United States Patent Application Publication US 2015/0376612 A1 - sequence listing, part 25

SEQ ID NO: 61993 - DNA, 2229 bp, Homo sapiens
cttcgcgccgcctcgctagccgaaacctgcccagccggtgcccggccactgcgcacgcgcgggacgacgtcacgtgcgctcccggggctggacggagctggcaggaggggccttgccagcttccgccgccgcgtcgtttcaggacccggacggcggattcgcgctgcctccgccgccgcggggcagccggggggcagggagcccagcgaggggcgcgcgtgggcgcggccatgggactgcgccggatccggtgacagcagggagccaagcggcccgggccctgagcgcgtcttctccggggggcctcgccctcctgctcgcggggccggggctcctgctccggttgctggcgctgttgctggctgtggcggcggccaggatcatgtcgggtcgccgctgcgccggcgggggagcggcctgcgcgagcgccgcggccgaggccgtggagccggccgcccgagagctgttcgaggcgtgccgcaacggggacgtggaacgagtcaagaggctggtgacgcctgagaaggtgaacagccgcgacacggcgggcaggaaatccaccccgctgcacttcgccgcaggtaaccggggccagcgtcccctcgcctcgctccagaccccacctgcgcagccggggcccacaggtctgaaaccagtgctcctccgcctcccgacctttctccaggactctggtcctggtgatctcgctctcttccagtggggactaaggagattaggggtagggtgagcgtgccacactcgctggaagttttttgttttgtcttggtttggtttttttgccaggtgttgggggtggtttggggttttggctttgttttgttttacagtatcaacaatacctgtaccaacttccggtcttgttaccctagaaggcctctacacacaagaaagagtaggggacgtagttgatagaccttatgatttaaaaggtcagttacctccaaaatttttcgttcttgcaagttccatttgggttaaggtcttgaaggactttgtaaaatacaaggatgtaatttaggaggagtagcttaataggacgttgacacattagcgttaattggtttatcagaatagccaatcattaccaagtttctggagtgactagaacgggaaataggcaagtttgggagaactgaaacctgacttaggctgggtgcgggaagccttagacacacacacatacaagttgggcggaaagtggtagtataagagaaaagatagtgcaagtactttagcttgaatctagaatttaagttgggactaaccttgcttcattctgaaatttagatcgtttgaattacattattttaatatttattaggttcactttatgatttaagcatattaaatttagtcgaaaaatttaaaagagccatagatgggatattcagcttattcccataaagcatgcatgctgttcacttgtaggaaagatgatgactgtttctaacttcaggtgagtcatgcgtgattgaaaatgggagtacctcctcttacctctgacaatcctggttttttgttttgtgtatttcatgattgtttaaaacaattttttgaaaaatcggggaataccttttaaagtactcctgttcttttggggctagattgatgaagagaaaaggagcagtgagaaatatttcctctttcacagatattacttttacactttctaccaattggagatttgttcgctttaacctgttccagattttaaatgtaaatactaccaggaggtatgcttttttgatcaattgcacctttgttggatttccattggggagtcttttaaaaagaagaaagtttagggaacctaggtgggagaactagaaacggtttgtgggcaatggaaagagaaggaagaatacttaagtcaaacacacctagttagcctttttgcccgaaatttcggtggtaagtgctgccgttcttcagctaatttaggttgtcctgtttgaccatgtagtcaacatttaaacaactcatttggcaaactgtcacgatcaactgatacataagccaaagggtagggttacttagattctgttcacttgatctgtgggataaaaataaccaagaaagatcttagttgctacctttcaagaatttggtgtattagtgagttcatatctgaaaatagtaatatttagaggtgtaagattatgttattagatcctcagtgaccttgttccttctctgccttcccacctt

SEQ ID NO: 61994 - DNA, 1166 bp, Homo sapiens
ctatcagtcaccagactggtttcagacatcttaatgactagggaatcatgttgatacagacattgacacagaagtctgtgtcttggaatgttggtaactatgtggatataatcactttacccattctacccatatcgatcgcctcagctaaaacttcagtttcagttatgtctttctctttaactctgatttcatgcaaccctcttctctttccagccttattttgacagaaggctactacttgaccttcctttagatcaccaatcctttgggacagatatcttcccagttgacactgtctctcataacagctagttattttactccagctatttctgtgcacatctaactctcctttctgggggagttaacctgtgagtcaccattttgattacttcagatatgcttattactgctgaagaatagtaatccttattctaaaatgcttgggtacatcaaataactttatagaggtagctttacaggtttttctttattttgattctttttctcttactctccaatttaagaagcctttttctaaaagcacttcctgcaggtgggtgctaagtggttgggatagcagaaccatagattagggcaactgtagataacctacttggggaggacagtgtgatcagcaatgcccaggaagtgatcaggaaggaaggctgaagtcagggctaatgacagcaagagctgaccttcccctctgacattttcctacttggcttctgcaatgccattctttctcttttttttttttttttttttatattttatctaatattttatttactgatctctctgaaacatgccaaaattcatatagctaagggaacttaccatgctaaaatgttgttcaacatgacaaatttatacaaaacatatttcaatgtagtgccttcatttcattcttgaggaatcaacattacatttaggtggtgaaatttaggatacaaatataattatcaaatatcgtacttctagtttactggaaaacataacagttgtgacagtaacacctaacaccttggttaattaaagacagaaaatgggcaggggtgtcacagaagtatgcaaggatttgacagttcaaactaatccatagcccttctgagaaactacagatggaaaatatgtagtaaatatttctgtaatatggt

SEQ ID NO: 61995 - DNA, 1010 bp, Homo sapiens
tagtaaagggggggtttcaccatgttagccaggatggtctcgatctcctgacctcgtgagccgctcgcctcggcctcccgaagtgctgggattacaggcatgagccactgcgcccggcattttctagactcttagttccatgaaggacaagagccatgtgcatcttaattcatcactacttccccagcatcctttagagtacatggtacagagcaatttgttgacatttgctgaattaaggtatcacagtatatgaaaaggagtctgagaagtaaagctaagaaagaatggcattgcaggactcgcgtcggttggcgactcccggacgtaggtagtttgttgggccgggttctgaggccttgcttctctttacttttccactctaggccacgatgccgcagtaccagacctgggaggagttcagccgcgctgccgagaagctttacctcgctgaccctatgaaggcacgtgtggttctcaaatataggcattctgatgggaacttgtgtgttaaagtaacagatgatttagtttgtttggtgtataaaacagaccaagctcaagatgtaaagaagattgagaaattccacagtcaactaatgcgacttatggtagccaaggaagcccgcaatgttaccatggaaactgagtgaatggtttgaaatgaagactttgtcgtgtacttaggaagtaaatatcttttgaattagagaaagtgttgggacagaaagtactttatgtaactaagtggactgttcagaagcttagaggtcattttttgtaattttctttttaatgtttactttagagagctagggatgcaaatgttttcagttagaaagcctttatttacttttggaaactgaacaagaaatgcatctgtcttagaaactggagattatttgatgttaggtaaaacatgtaattgtttctctggcaaatttgtatcagtaatttgaaaatgagatattaggaaaaaccaattcttcttaaatttagttcatctttcc

SEQ ID NO: 61996 - DNA, 1464 bp, Homo sapiens
tacatagacaaatattagctgtgagcagatctttttttgttgcttcttgtagtcccccagtttagcagaaacattctgtgagatagatgtgggaaaggaattctagcaagagttttgtcactgtatcataaggttgtgatttacatatttaagttttatactttgaacatctgaaaatgtatacatactaaatacgcagaactctattgtagagtgagaaacatttgaactttgagctttcagtcacttattttgtattctttctttgaggttagcagtagtagtaccacccaaggcactgcttaggtaccactgctgcttagtggagagtccctctggctttatcattaaggttagttattgatatatttctgatcacctttccattaattagttcttgaattgttgagtctgttattaattttcaacctgaaacattttagtatggatggtacttatctaatttgatatcttttccttgttgaacttacgtgtggacaatttgttttcatctaggttttgggcggaaagacgtagttgaatatttgcttcagaatggtgcaaatgtccaagcacgtgatgatgggggccttattcctcttcataatgcatgctcttttggtcatgctgaagtagtcaatctccttttgcgacatggtgcagaccccaatgctcgagataattggaattatactcctctccatgaagctgcaattaaaggaaagattgatgtttgcattggtaagactgtttacttttccgacttttactaatgttgtaactattctgaatctgaactgaattaatctgttcatatcatcaaattatgtcaagctgaatttaaatatttaagaacatcccatgatttaatctaactactatttactgagtgtctttttgtgtgtagtactgagcctaaatttctttggagaatggactacaaagtgcctattatacttgcattctcttgggagagaaaatatacaaagagccagataaaggcatggtggaagggaacagagagtgttaagaggataatgagcacagtgacttggcaggatcaagtcaaggccctacttcctggagtctttccgtgagaaagggaaagtctttccagtggggaaagggttaaaaaggtaggtggggatttctctataaaaagctttaaataccaggttaaggagcttaatattagtacgtgcaggcagtgtagaatatttaatattttttgaggaagggaacactgtgataagagtacatagtatgcagtcatgctccacgtaactccatttcaaaatggatgacatacataagggtggtccataagatgataatggagctgaaaaattcctgtcacctactgactttgtagcagtcctaacttcatagcacgaggcattactcaggtgtttatggtgatgctgggttaacctagtgtactgccagtcatataaacgtatagca

SEQ ID NO: 61997 - DNA, 1078 bp, Homo sapiens
ttttatgaagagtaatctggtaggggactgggtaggatggatggcatcaaggataccagttaggaaactgtaaagtaacccaggtgagaaatgatgctactgaattatagggttataggagagaaatggcaggataagtaagaaaaatatacagtatgtgagaaggctttttgagaatttgtattaacctggtatttacttttgtgagacagattcaaggattttggactcattgccaccttaactccattatttcctgatgtaaaacagggacagttgaaatccttaacagatagaaagccagttcagtgcactagagaaagtccaggtgttctatgctagacttaagttggacctcatggtccccagcatcccaaatcactatttatgtcaacttcaccagcttagttgaaatgaggtcatttataaagatgtgaaatggatttcctagttacctctgcccaattctccttttctgtatgttgtcttaaattgttcctgccctacattcaaatacatcatttttaccacataacccaactctggtacctcagaatcttagacatataattaattagttttaataatgtagagttttccagttataatctgcactatccaatatggtagctaagggcttgcaatgtctgaattgagaggtactctaaggggaaaaagcatgccacatttcagagacttagtacaaaaaaaaatgtaaaatatctaattttatattgattataatataaatgtaaatattgaatttttggatgtattaggtgaaatctgttcaaattaatttgaactgtttctttttttcatgtagttactagaaaatgttaaattatttatgtggctcacattttatttctgttgaacagcactggtatatataggagtagagcagaatggaaattcaccctatcaaagaacaggagctgagcttcctttctgcacatatttgcctgtcttcctccagctccttatttagagagtatactggaatagcttcataataatacaaataataatacagcacagagcaaaacacaagactttctctttttttttttttttt

SEQ ID NO: 61998 - DNA, 4651 bp, Homo sapiens
gtgtgattttcttttttttttttcttaaaaatcctacatatctctgttcccaggctatctatagctttagacattttatttctgtcatgatgaacagtctttctagcataagcagtgttcttttggaatgagaaaacaagcttttaagcacacttgccttttcccttacacactcttatctatccttagtcacttgtcaccagctatataaatagcaaaggaaaatctgcattgaactgagggggaacttatttaatgtgtctttaatgcattaagtaatagaatactttatgtattatttttatatttaaaatgtaacattcccattctgacaagatatgaaaggtctttaaacaactttgagactttgctggaccagacttcttgagaaaatgatttactaaaatcaagttgttaagattaccattgaacttcaaaatagtgttgctattttgcagtgctgttacagcatggagctgagccaaccatccgaaatacagatggaaggacagcattggatttagcagatccatctgccaaagcagtgcttactggtaagtctgtatactctggttattccaggaagcctgtaaagaacaaccttgccaggtaggaaatttgcctcctatgattaatgacttcagctagatttttaaaatagtgtcagttcagtagctatccttttctacgtctagatagctgacattttattctcctctaagaaaaataaagctttctttttattttctaattgctgtttaagtatgtcattgttgccttattgggggtgagggtgatagataattgtatgttgctttagtatattcaggacattttttaaatacccctgagtttttcagataacttatgcctgccctttacatgcaggttgagtatttctaacccaaacttcaaaacacttctggtcttaagcatttcagataagggatattcaagctgtactattttttttaatgtattttaattttgatggaatgctttcaaaaaacactggccattccgttaacttttcagaagaggattctaggcacactcatttcagtaccatgctagttgtactctgctgtaacatatttatgtccttggaacctattgctatgcataaggctatagtttagattgacaagctttcctgagttgtatccacttcacatattatctcccttgttaatgtgctttcctcttagcaactcagccatgttgtttaccagattcttacctaccttgtgatgactagaatcatacctaatctaaagtcaagagccaaaggggctttgctgtgagctttgtgcctggattttgtgatatttcttctaccattgctgagaaaatttagacttcttcatgagaagacttcttcatgaaaagacttctagaagtgtgcactgttattgtgactatcaatcagtgttcattttctccttcactagtccatgttattccatgcttttatttttgttttttaaatcttgggcctcaaaagaagcattgccttggcagtcagtatgcagttcacattgtgggtttggatgtcattcagcaaatcatattaatttaaattttgttggttttatagttttgtttgtattcatttgtaaaagtaaagcctttaataaagaaaagaaataaaagagttcatagttaatccttttttatatttgtatatatttaaagtagcattaaataaacatgatattagtgtcaaaaaatctaggttcataaagatgttaatgattatgtttaatcagtgatgctatagattcttttgtcatttctataatgttggtatattgagttttgtttgttttgtttaggagtttgcttttggggtgtgtatgtgtgtgcatgtgtgtgtatcaaggcctcactctgtcgcccaggctggagtgcagtggcacagtcacagcttactgcagcctcaacctatccaggctcaggtgatcctccaacctcagtctcctaagtagctgggattgcaggcgtgcctcaccacacccagccaatttttgtattttttgtagagagagggtttcaccatgttccccaggctagtctctaactcttgggctcaagcgatccacccacctcagcctcccaaagtgctgggattacagacatgagccaatacacccggacatttttaggtttggaacaaagttgtagatacattttgtttctctgttataaaaataacatactcattttaggaaatttgaagggaaaaagggaaaggtcaccaataacctatgacccaagataaactttgttaatattttggtatattttcttttgggctttccttttcctgagcatattgattttatatagttgaggttgcctttcattatataaaatagaatctttttttttaatcccatagcaaaggtatttcatgtttgctcttcatgcaaatatttttaaactacacaatattctgttaatgaactattttccatttattggaaatttgtttccaaatttatctactttataattcattgggcatctttttgcataaaactcattaatttttctttttaatttctatacttttttttttttctaattcacaggtgaatataagaaagatgaactcttagaaagtgccaggtacgtactaatgttataaatatgtgacaggaatacttcaccattaactttttctttttttttttttttacagtaagcaaactttaaaaagaatttttttttaatggttacagtacttatcttgaggaacatctgatgaagaatgcaaattactaatactttttttgtattctaggagtggcaatgaagaaaaaatgatggctctactcacaccattaaatgtcaactgccacgcaagtgatggcagaaaggtacttccttttgcaactgagtttgtgcttatctcctggtaacatgaagataaagatgtgtttatcttatgataaattgaaacatatttgaagagagtgctgatgttttaagtgtttcagtattttcagtatttcaaattcttaagcctagtaaaactttattgatgataaacagttatttgcttcctatatgcaatagtgaatttataaacttgtatactatgccttcaatatgtatgttggattttgtaaaaccaaattgataactacttagcgaagttataattggattttctggttttatatttgggttttttccctctcacacattttattcaaccattatttgaatttcattaatatatttgattaatatttcagtcaactccattacatttggcagcaggatataacagagtaaagattgtacagctgttactgcaacatggagctgatgtccatgctaaagataaagggtaagcatttgaacaaaaacaaggactttttaaatgttaccctcttcttaaaacaatctttgtaaccttagaaaaataatattttttactaaataacattaatatatattgagcttttacaatgtacaggttgctctgagggcgcaggaaattataaaaccttaagcccacagctcatagaaggtttacattacacttcagagggcatgaaaagatacctaagaatacaatgaggtctctaccaagtgttgagtcatagagagggatagcactgcaggagttcccaggaaggaactctcagtgatggttgactggagtggttgggaaatccctcagaatgaggtgtgacttgacctggactgtaaagtcaagtctcaattcaagaaagcagagtttgcgggacattagtctgtaagacaattgggataagtgggggctgctacagcaaacgttaaagcacatttaaaaaacagtgactagactagctttgctggagcagatgattcacacaggagacaaatgaagtttaggattagagaaataggtaagaaccaggttttggaggactgggtatttagcctaagtaattcaaagttcaccctgtgatctgaaacaaaggggatgattattctaaaagaagttttaggaggtgcgtttgaaagcaatgtgttggctaaattggagagagaggagactagaagcaaaagcagcaattaggaaagtgagcattctagaggtttaagcataatcaggatccataataatggtggcagaagaaatgaaaatgaaggcatagatgcaagagatattgcagtgtaagaatgggtaagatttgttgaatggatacaatgagcgaggaataaaaggaaaactacatttcaagttctgaatgagttagatccagtgatacacatacgaaatacaggaggcaaaattgtttggagggaaaatgttgaattgacttctagaactcttagtttttttatttgtttgttgtattttttattttattttattttttttagacggagtcttgctctgtcgcccaggctggagtgcagtggcgcgatcgtggttcactgcaacctccacctcccgggttcaagtgattctcctgcctcaggcttctgagtagctgggattacaggtgcacaccaccacgcctggctaattttcatatttttagtagagacaaggttttgccgtgttggccaggctcaaactcctgacctcaggtgatcacctggctcggcctcccaaagtgctcagattacaggcatgagccaccacgcc

SEQ ID NO: 61999 - DNA, 1040 bp, Homo sapiens
tacagggaattataagtttaatataccattattgaagggtaagcctagagagggagccagataattgcgtgtgccacgttaataagttggaaccatctcttgaaagcacagagttaatggtgaaacttaccttttagaaaaatctgccttttagacttaccttttagaaaaatctgcctcagcttggagcataaagtggggtgggagctatttcaataatgcaggggagaaataacatagacccaaactaaggcagtggcagtagcagtgaagtataaaggaacatggatttgaaagagacttgggagttcaaattcttaggacttagggttcaaatggatgttactaaattttgaacatttttattagaacatcacataatccatttgctatttaagtataagtaattaaataaattttaatttataaatttccctaggcctaagaaatctatactgaaacaggattttcccccccttctcattgtagtgatctggtaccattacacaatgcctgttcttatggtcattatgaagtaactgaacttttggtcaaggttagtgctcttgtactctcctaattactttctagagttatataaaataacttgaaatacattagtatgtctgggtttctttttattttctgtgttcttagtgcttaaaaaagtagaagtatttataagcattataaaatataggtgactgatagctcagcatttgactgctttgagatttttgagataccatatgttttgttttgttttgttttgtttttttgagacaaggtctcactcttgcccaggccggagtgcagtggtgcaatcttggctcactgcaccctccacctccagggttcaaaggattctcctgccacagcctcctgagtagatgggatttcagacaggcgccatcacgcccagctaagttttgttagagatggagtttcaccatgttggccaggctggtcttgaactcctgacctcaagtgatccacctgcctcggcctcccaaagtgctgggattacagccatgagccac

SEQ ID NO: 62000 - DNA, 1144 bp, Homo sapiens
ctatttttatgaaattgaagaacagatatatctaatatgtggccagaatcggggcaggaattgtctataaaaggagcatgaggaaacattctggggtaatgaaagtgtcttgtatcttgatttgggtgatggtatcacagatatatacatttgtcagaattcatcaaagttgtatgtttcactgtatgtcagctataccgcaagaggagcattcattcttggaagagatgcaggttaaatctaaagcttcgttcttaactgttcttaaaagtagaaaagttaagtagacccttgttggtagggctagcaatcagctactgttttttccattgggaaaaatgtatactcattctgaaataattggctcaaaaagtgaactttgggaacataacctgttttagcctgtatgatgttaaattacacagtacgaataattctgaattcttttaaaaattgaacattaaatatatgctttttgctctccagcatggtgcctgtgtaaatgcaatggacttgtggcaattcactcctcttcatgaggcagcttctaagaacagggttgaagtatgttctcttctcttaagttatggtgcagacccaacactgctcaattgtcacaataaaagtgctatagacttggctcccacaccacagttaaaagaaagattagcatgtgagtataaaattatgaatgttcaggtaggatattatatcaataaactgaacattttttctttcctgtttgtttttagaaatgtttaaataatagaatatttttcttagccatgggcatccactgttgtttagcatatttaataatttggaagtttctacttaagatgctatgaaaagaaaatatgtttgtattaattttttcaagtcaagttatatgctttttatatgtgctgtattagacttattagatggtatgcctttgaaatgaaagcatttgttttgctttcatctttgatatgatttttctgtttaatctatgaagcttatgaatttgtgaagttaaagcttcataagattgccatcttgtaaacagtctccagatcttaacatctgatattgttggcacctgggccaagttcggttttctgtctatagctgaagtagatgtagtgagaaataaccacctagt

SEQ ID NO: 62001 - DNA, 1785 bp, Homo sapiens
tcataggtggcttttgcaaatatccaacttgtctagttcccagttccctgatggtttgagcaaagctgtctgctatagccatgatgtcagtgtagagatcactatttctttacagagaaaaatttttgtgcttgaaatattctaaaacctctccagtctaggaagatattgtagtactccagatatcccaaaatgaattacgaattaaaacagaccatgaatctgccgtgggctaaacctgtgtatactcttgaggccatatgtctatacagttgcaccgtaacttaggggaactggagtaccactgtctgttttcaggggttaaatttggagaatatctttagagcctcaatctggctattttggaagattattttgaaaataatttcaaggaaaatactagatgtcttttagataaggcttttcaatttgaactcgttatacatgtaaatgctttttcttcatctagatgaatttaaaggccactcgttgctgcaagctgcacgagaagctgatgttactcgaatcaaaaaacatctctctctggaaatggtgaatttcaagcatcctcaaacacatgaaacagcattggtaatgtttcagatttaagtttttaaaatacaataacgaagaacgtgctaaactaatcataatatcctacttttagaactagcatttttttgagtctatagttttaaaaaattactgcctatgcaaatattttttaaaaatttaaacagtaccaaaaaatagacaacctcaccctgcagaagccaatgctattatcagttcgagaatcctcagaaaaaaaaaattattcatattctgacatgtattatatgtaatgcttttattatcataagtgatacatatagtttgcctttttaggggttataaaaatgaatgcttaggttagaaaatttggaacccaatgaaaataatgaaaaataaaataaataccaccatccagatgaaaacacttggtgtagtcccttccttcttcaaaattagatctagaatgtgaataaagtattttagaggttacttccctgataggggtaataataactgtggaactatgacaaagtagatgtgagtagagaagtctaacgaaaaacagaaaagaatggaagctaatagggatacatgataaaagataagagagggaatggtaaaatcaggggctaccttaaaattgaaaggtagaaaaaaagaaacttaaaggtagaaatttaaaaggaagaaagtaaatcctgttgcgtgagttgcagaatgtgcttcaggtgagagaagataagtaagttaatgtgtgtagaagcagatttaactgatggtagccttacttacctaatatcttttatgagaagttttttgccttatgccataatgtaaactatgaaatttatgtagaaacctacctataaagcattttggacctttttactgcttgtaagaaacttctaaatttaaaaaaaaaaaatagcaaagctgtagactaataagaaatgctagtacaaaattaaaaccacaacagcattaaaactgtacaaagaaacatggaaagactgacatggaaaattctggtcataactactgtgaagcaactcgtttttgtaattaaccttaaaacacactaggagttgtgttggtgagtagttatggtgcagtagcagtttcttacaggttcccagagatttacaggccctgctccaagatggtgcagaggagtagggtgtaatttgaggtggatgtgatttttaaaaaaagtctttaaaaaaccatgtc

SEQ ID NO: 62002 - DNA, 2570 bp, Homo sapiens
atcagtgctattaccaaacagaatccagagctgatgagtgttctgttatttccctttttttgttttttgagatggagtcttgctctgtcgcccacgctagagtgcagtggcatgatctcagctcactgcaacctccacctcccaggttcaagtgattctcctgtctcagcctcccgagtagctgggattacaggcacgtgccaccacgactggctaatttttgtatttttattagagagggggtttcaccatgttggccaggctggtcttgaactcctgacctcaggtgacccgcctgcctcggcctcccaaagtgctgggattacaggcctgagccactgtgcccggctatattctgttatttcttcatgtaaagaaacctcaacctttgcaagggtgttttcttaacctttaaaatattgcatgaacacaatgctacttggaaacagttttgaaaaggatattggtcacattaaggttttcatcacaccagtgctagctttttcaaagatacaggacaactgtaaagtttgattggaatatgtaataatagatattatctgataggtaggattttcaggttctgtcagaatttggtaattgttgtaattcaatcaaaagtcaagagcaaagttgcgtcaaaagtaaaacaaaaagattaaataactacttgattgttcttgattggaaacacgaatgttcttaaaatcagttatgtatagtccttgattaatgctgcaatttaaattatttagcattgtgctgctgcatctccatatcccaaaagaaagcaaatatgtgaactgttgctaagaaaaggagcaaacatcaatgaaaagactaaagagtaagtatacatttaatgattaaatatcattgagattttactcttttggaaaatatattcactgtctggctgattttttctctctaagattcttgactcctctgcacgtggcatctgagaaagctcataatgatgttgttgaagtagtggtgaaacatgaagcaaaggtatacttcctttttggtaatctttggtaatccaatgagttattttttatttagcaggtgaaatgcctgacttcctaaactatttactttctcataagtattacttttttttccttataatctatgcttaagaattgtcctgcaggtaaccttttctatatctaatttttgctagaacatctatgggtttattcagatacacattcctgtatgtcctccctcctccattccttttaaccacagcccacaggttaaagttattcttaaggacttttctgacctatcatcttttctaatcgtcttttctcacccatatcttctaattcttggttgtcatgataacttctgttatttaccccaaccaccgtttttgtttctgttttaccctcttatttctgtaactaagccaaaggacttgaacggaaggaaatatattatttaaataatttgactaaaaacataatagctccccatgttggtaagttactgttctttagttggcatttgtgcacaaagcattttattcaccaaatatgctttcatcaaggctagaaatcatctcttacccagaaacttttaaaagtactactcagtaaaagatatacatagcatctcagattggaagagatgacagtagtcacctaattcagcagtttttacagtttttagccacagatccttgcctccttcaaacaaaatctttagttgaaattcagtatactctataacagagaaagaatagatgtgctgtagatgaagggagaggaatagacgctcttctccttggatggcccctgaaacgcttccataaatgaaatttgcagaatagtttattcttacctatcctttcttgagtttccattcattcaaggaacgatttagagttctccaatttctttttgtgttgcctctctgtgtcttaatttctctttgatttgggggaattcttgataatgtataatcttgatctttcctattgtaaattattgaataaaataaagtttatttctgcttgactgcttggcatatcttgtctctctgttctatatctgtttgttgattgctgttttcatacttgtggtacattacttgaagaatatctggatacatattgaattagagttgtgacactcaatgaaacaatcttgactagggtgaccaaccattcagttttgtccaggacttcacgttttttgggaacacaggactttcagtgctaaaaccaggaaagtcctaggcaaaccagaacaagtggtcaccctaatcctaacacaaagtggtacccaaatagtttttttttttttaagtgggtatttttcacatttcagcgagttagggtatgtgaataaatagtttgattgtcctaagcattttaaatccatttttcaggccctgtaagcatggagactagctattcatactctagttttaggttcattgaggtcttgattatattcacattcacatattatccgattccatgaatatgaattggtcagtgtctcaaaacacactagtgtccgcaggattgattactgaggaacttaatttcttag

SEQ ID NO: 62003 - DNA, 1380 bp, Homo sapiens
agtattccactatgtgactattccatagtatgtgtatctatatattttaggtaataaataagggagaagattaagcctatagaaataagcattttaatgctaatttatctctggctttgttactattgtctatctcggggttaagctttacatttctacactttagagatccataaaaatagatgagttcaactttcttaggcagtgtctagctctaaatatctgtgaatgctttaatgataaacacaattactattcagcatctcgcatttaacccaaaattgagtcttccttctgatggtagccttcatgacttggtaaatttattctctagatttgagcaaaaatacttgctttggcattggataataggcctcataaaagaattgagacttaaaagtagtaaaaagtgttaaatacatgattgtatggttttaaattttgcattgcgggctaatttcaattttttctgctttgttaaggttaatgctctggataatcttggtcagacttctctacacagagctgcatattgtggtcatctacaaacctgccgcctactcctgagctatgggtgtgatcctaacattatatcccttcagggctttactgctttacagatgggaaatgaaaatgtacagcaactcctccaaggtattacatgcttcaatgaaattgatttttttaaattaacctttaaaaatttttcacatatcaggtattataggtaggagttggtaataagaaaaattgagaatttttgtttatttcttcttaggttattatacttttaatcagctgaatatcctcagttcccaaatgtcattaagtgataattatgatttttgttccagtagcattttctgcccagtttcttaagttaaatagatggctttcaagtttttatcgagaaagttttgagagtaagataaaatggttgctatttatttttaaagaaaggaatttttagatcctacatattcaaggcaggtagaatttgtataaggtagccaactatttggcttattgaaacatttagcaactgaatacactcatattcattacgtcttaaaagatttagatcaaatatctacacacttggcatagatgaaacatctcagcccagatatctggtcccataaattttaaagtatttttgtctacatctctacttttattagaatttgatgcagtagctttgacatctgaaagctcagatgagaaaaatgtaatagattaagcttttctgtctttaacagtaaatccttgatgatctttatgcctttgttctgggaaccacgttttgagaaacactgcttgaacagatgaaagcagattgatacaacctcctggaatctaccaaaactgtgaacttacaag

SEQ ID NO: 62004 - DNA, 1222 bp, Homo sapiens
ctaccttatgtctttagaactgaaaaaatctgagaaccaggaagttccagtgacttgttccagttcagatagctaattaatgacagaaccacagttagatttctgtttgctctcttaatttaatacttttgcaccattccaatggcttgcttatagagcaggccatctttagtcatctcctttatgttcctttatattgcttacatcacattttataatcattatacacatttacatattttgcttatatgtgttgtatttcaaagagttttaagagaatcttatttttcactccccaaccctcaccccccttactaccatggagatctcgtacataatctaccaaattgtaaaagaactttgctttctgatgagatgccttccataaagcttggttccatcttccaaatagaggttagtcactcttctctctctctctcttttttagagggtatctcattaggtaattcagaggcagacagacaattgctggaagctgcaaaggctggagatgtcgaaactgtaaaagtaagatacagtgttacgtttctgttaactttgggtttttattttgacattgttatttaatctgtactgttacaatgaagagcctggtttatttgtatgggccttgccttaaaaggtcaataatacaatcttaattgttctctacaaatgagtagctttaagtaatgaaagagaaagacttcactttcacctgcatcccagtgaatattacattcacaaatataaataaattcgggtaataccaaatgggttttgcttgaagaacctattcatttgtccctttaacagaataaagtttatcaaattattttatattactgtttacgtatgacacataaaacaagaaaggggaaaaacagtgtatcacttctgtctatagatttcttctgatttcttcatttcttcaccccatctacctctagggatccagggcttagtataataataaatacaatgttgccacttctctttcccagggcttgcaacttcaggtcttacctgtttctccgacaagagtcttccccagagtaacccttcttactgttttgactcttgctgtagaaatatgtatgtaaaactgggcccagtggctcacacctgtcggtaatcccagcacttcgtgaggctgaggcgggtggatcacctgaggttaggagtttcagaccagcctggccaacatggcgaaaccccgtct

SEQ ID NO: 62005 - DNA, 1018 bp, Homo sapiens
ttttttttttttgctgtttgtgggaagggagagatacagaattgtaaatgctcattctcttacatatattaaagaacataaaactatatttagtaaacatgttaaagactaaactttgtttttataaagatagagggagtccagaggaggggatagataaagaggagatgaagttggggggcaggaaatggacttagggaacacagtaatgccattggattcaggaaaacctgtgctaggcatcaggctttcttccctcccctctgcttttaaaatcacttgatggacatttatctccatcagccattcttcttatctacctccagacagatggctctgtacgaatcactgggacaagaacatctgcgtattacctaatgaacacttaactattgtgctcagttgtgtttgttcactgataatccaccaggctggatactttattcgacacatgctattagaaaacctatctcagagtggacaaaattaaactgacaggtaaagagtagaatggcctgtgataactaccaaaccaagcagcacctggtacacgtgttaaaaatagtcatttctaggaacctgacttgagacccactgaaataccatctcttgaatggggccctgaatctgtatatctagccagatcttatttgggaagcacagaagagctttttaccaggacaatgattaaaccccttgaggtaaacccactgatagtaggctcctttattttattgagcttaggttatccctgttttgggagtaggttagtaaaaagggggaaagagtttttactaatatggatatattctttttgtttgtttgtttgtttgagatggagtttcactcttgttgcccaggctggagtgcaattgcacgatctcggctcacagcaacctccacctcccgggttcaagcaattctctttcctcagcctcccgagtagctggcattacaggcgcccgccaccacgcccagataattttttgtatttttagtagagacggtttcaccatgt

SEQ ID NO: 62006 - DNA, 1814 bp, Homo sapiens
agaccaggcacggtggctcacacttgtaatcctagcatttggaaggccaaggtgggaggatcccttgaggccaggagttcaagaccatcctggccaacatggtgaaaccccgcctctactaaaaatataaaaattagccaggtgtcctggcatgtgcctgtagtccctgctgctcgggaggctgaggcaggagaattgcttgaacccaggaaacagaggttgcagtgaactgagattgcgccactgcaccccagcctgggtaagagagctagactctgtctcaaaaaaataataagacaaaaaaaaagggcatggatgagaggaccagagggattcccagtaaatgacaaggtgaaataagaatactaaatagtttctgagaatactgatttaatgagacaagaaaataagtcagacactttgaaaattcctactaaatgacttgaaacaagaaataacaatatgtagatgtagtatcatgtatgttgtgttttgtccttcagaaactgtgtactgttcagagtgtcaactgcagagacattgaagggcgtcagtctacaccacttcattttgcagctgggtataacagagtgtccgtggtggaatatctgctacagcatggagctgatgtgcatgctaaagataaagggtaaatgccaatgattgttatggactctcttccttacttttacttgacctttttaggaaaacctggaaatataatatgttttatttttcaagaaagcctgtttcctaacattggcctaaatattaaatagagcttcttaatttcaattaagattttatatggttagcattcatataaagactttattggcataatgcctgagaattttataatggccaaggagattataacattagtgtgatattgacttttaatgtagtaaatttttcagtttccatggagggttttttaattcttccagtttatcttgaagttattttttattaaaaatatacaattctagacgttgcatatatggatgaatgttatagtctctgcatttaaaacattttttaaatgttctcccctgactcaccaaaaagaacttatttctgccttaaatagatttaggttctacaaagtataatcagtataattccttatgtagttcaagaattatctttcatcagttatatgtaattatttaaattaaaacatgttcttctgtggcattattgttcatttattacttttcagaggccttgtacctttgcacaatgcatgttcttatggacattatgaagttgcagaacttcttgttaaacatggagcagtagttaatgtagctgatttatggaaatttacacctttacatgaagcagcagcaaaaggaaaatatgaaatttgcaaacttctgctccaggtatatttaaatacttaactgtaaagagtatgaattacatagcatatgtttatggttttctaaataattctagtataaagttaaactagtaagcaatgggaagcaatgttacctaattctgtacctagattttagaataaatataataaacattttatattttaatccacaagtatgtttactagcacctagagttatttttgtctagagccaactatcatgtgatagttctcttattatttttagtttttctctttggtacttttatattcatcaaatataaaaatatttgatgaattatttacttacaagccagatttatttagcattgataaaatggatgatactggttcagtacagataccagtggatattttacaataacaagaatacagagatttatactttatttaaatgttcatg

SEQ ID NO: 62007 - DNA, 2294 bp, Homo sapiens
tgagaaaaagctttacttccactggctatcaggagtttctagtccatgcaagacaaaatatgacttgacctttgattggaagttgtgctgtgcatatttatgttagcttttatatctttcttgtagcctatctagaacacttaacattactgtgtccaagttgtctttgtaagtcacaaataatttgtatgcataaaatatttctgtccacttctgcagcgttaaataccataccttgagacctagaaagacttttagattaatgtaatattttatggtagttttataattgtattcttctttacttgatctttttaaattcttttgctttaaatcctttagcaaaaggataaaaactataatagaaataagttttatttcatggctttaacagcacctaagttcctctactagacttgcagagatgtgtacctctgagttctctctagcaaaaaagcatgctcttgtggccttctggggaagaggactctgaggcccactctggtttgacttgtatgtgattgcagacctttgacttgcagcctctgagacccatgtacctgagttcaagaagtggtatgtaacacccatgaaggcagagactttggtaggaaggttttcataggaaagatacaagcaaatcagtcaatataattttgggaatctacaaagctaattgataacacaaaaagcttccaacttgaggcaagggggaaatgttttccagaaggtaaattgttaatagagtccaatgagctatttcagatttatacaaaatctctttttttatgttttcagtaatgtctatgccttataaatacatatatatatgtatacatgtaatgacttttttatgttaacaagtggaagtattatgacataggactaaaaaagaaaaaacaagtaaagtaattttacttcttttctaaattagctggttataataatttagaagttgcagagtatttgttacaacacggagctgatgtgaatgcccaagacaaaggaggacttattcctttacataatgcagcatcttacggggtaagttcttccgtgttacctttaaaaatttgtggaattttaaagtgaaagtcagtattgcagctcaaatggaatgtagtttgatgttctcattttacagagaagtaagtggcagagctaaagaagttaaataacttccaaatttcggttctgaatctgttctaagcttgctgtgtgatatgcggtgtattgttgtttgttttattatctgccttaacacctgtctcttattttcagtgagatgttggtgattgtgtttatttgttggtacccagaaaatccactggggcaccaacggggtagatggaatctgtacagattcagatgcattgttcctgacttatcatagtccaatgtgacattcaaaattgaccatcttcaatggtatagtttgaataattgaggaagattgctgctttataaattgacatttagtagttataacatttgaataaattagaaattattgaagtcatattagtctagtttcctgctaaatagaattcttaactcttttctagatagtttctcaagttattgaaatgtccactgtaatttttaatcagctactcataagttgtgatgttggggagaaagagtttttcttttcatttccagaataagtttgaaaatgtggaagtaggtacgtaactagtttcattttaagaaagtaaagtgtgacaaaataatatttcagactgtaacgggtattttcttttacagcatgtagatgtagcagctctactaataaagtataatgcatgtgtcaatgccacggacaaatgggctttcacacctttgcacgaagcagcccaaaagggacgaacacagctttgtgctttgttgctagcccatggagctgacccgactcttaaaaatcaggaaggacaaacacctttagatttagtttcagtaagtgatgggctttttgaaaaatctcagtgcttttctgacttgttaaaattcacttgatgttattataaaatgtctttatagtcaatgtgaatggcaaaatctgggttttagcctgattttaatgtaagagttctttagtattaaaatataatagaattataaagtaatataattatccttctgtagaatagaattatcaatcagttattatatactgagtattttggaaataggaaaaagaagtacatgatataactgcttacgttagttaggaaactaaacagacccaggccctcagaaaatgctgttacttatagtgcatacagcgcagatgg

SEQ ID NO: 62008 - DNA, 1071 bp, Homo sapiens
ggctcactgcaacctccgcctcccaggttcaaatgattctgctgcctcagcctcccgagtagctggaattacaggcatgcgccaccacacccagctaataatttttgtattttcagtagaaatggggtttcaccatgttggccaggctgacctcaagtgatcgacccacctcggcctcccaaagtgctgggattacaggcataagccactgcacctggccccattctagcagatttgattaaaatgattatcttttctacccacctcctctccaaaaaactttcagttttaaggaacaaatacattgctgaatattttccaggaaatacaaacaattcagtttgctaaagttctgtgtaggttgaattacttctttcagagtaactacaataggactaaaatctcttaccttttaaaattgatatttctgtaattcgttgtgcttctcagtcacagtatcagaattagggttttgttcatgctttgccatatttaaattatattttgacaatatgtgttttggaagagatgttctcagttatgtcttatattttaataacagtttagctggatacaggttgaatatcccttatcggaaatgcttagaaccagatgtgttttcggcttttggatatttttttcagattttgaaatattatactcaagcattatacttactgttgagcatccccgatccccaaatctgaaatccaaaatgctccaataaacatttcctttgagcttcacgtcaacattttaaaattttcagatttgggatgtttgacctgtattaacctgtttgcttcactttttaaaatgaataatcctccattgtgatagtactggcacaaattgctgggttttctcatatttttaaatatattttattaggtataatagcattttaaaacttgcttatggcagatgttgtctctgacacgtaccctaggcggatgatgtcagcgctcttctgacagcagccatgcccccatctgctctgccctcttgttacaagcctcaagtgctcaatggtgtgagaagcccaggagccactgcagatgctctctcttc

SEQ ID NO: 62009 - DNA, 1104 bp, Homo sapiens
ttgaagaaggaaaggattaccgtgagctaggctcatcagggaatgcttcatggaacgtgtgtaagtaaaacaggattttaaagaatggcttcaatttcatgaagccatagtgtattactgtattaaaggtaaaagggttactttgaacagtgatgcagaagtaccacttggcatagtccagactcagcaggaaccattgaaagacattatataaatagggttggatgtagagtgatggtagaaaagtattatggaaaagataaaatagaatacctgaatgtggttaatttgaaagtgcctttttgttttgcgttttagttctgctcaggttcttatgctaaatggaaataatatttttagaaatgtttaaaataatctggagtaaatgtgtgaatcttacatattatgaaaacaccaatatatgaatgtccaccaaataagtaagcattctaagtagtttcctcctcttttgtaagatcactttggatgtattagttgagatggggcacaaggagctgaaggagattggaatcaatgcttatggacataggcacaaactaattaaaggagtcgagagacttatctccggacaacaaggtattttattttaataattgctgttgtcagtttaacagtttgcataaaggcaaccctcagtgtactaagttataatttaaaaatatgagagaatctgtttaataggaagaatactaatttaggattcaggaaactgggattaagtcttagctgtgctactgacttaaacttactgagctgctgctgttaacgatgtgaacctaagtaaaatttctggaccattcagaaatttgggaattgttttagctcctgaaaataaggaagttagtttgagattattttctgaagttattctagctcttaaattgtattattttaaaggtctgaaacttaggtatcacatttcttatggtaatataatagataataactaagtgttcaggctaacccttaaagtactatagtagatctcttatgtagataaaattttaagcgcttgggatgaaaatactggaaagcaataatgttgcaactgaggaaattgaacaaaacaaagttgaataatat

SEQ ID NO: 62010 - DNA, 1096 bp, Homo sapiens
ggaaagtgggtgaagggtacataggaactctgtactttcatcctttctaaatatctaaattatcacactatgaaatgtttttaaaattgatagtaagcggccaggtgcagtggctcacacctgtaatcccagcactttgggaggctaaggcaggtggatcacctgaggtcgggagttcgagaccagcctgaccaacatggagaaactccgtctctactaaaaatacaaaattagccagtcgtggtagcgaatgcctgtaatctcaggtacccgggatgctaaggcaggagaatcgcttgaacccaggacgcggaggttgtggtgagccaagatcacaccagcctagcctgggcaacaagagtgaaactctgtctcaaaaaaaaaaaaaaaagtttaaaaaaaaaaattggtagtaagaatcagaaaaattaggtggttatttttggttttgatgttcattgtttattggcaatttatttttctaccttcaaattttgtttcataggtcttaacccatatttaactttgaacacctctggtagtggaacaattcttatagatctgtctcctgatgataaagagtttcagtctgtggaggaagaggtatgttcatataacttcaatagtaggtttgccgtatatatttagttcactttgtatcctcttgtttctttttcttcctttagtttgcattatataattttcacctataaaatctgttttcaagctgattatctaatattactagagtaatattactctagaaaatattactcatgaatttataagactcatattctttgttttttgtgtttgtttttgtttttgtttttgtttttgttttagtagagatggggtttcgccatgttgcccaggctggtcttgaactcctgagctcaggcagtccacctgcctcggcctcccaaagtggggcaccatgcccagccctcatattctttgaataacaaaaatattaaaacctgttttgtattctcaaaaatagaatcagacgagtcaagaaccatgttccccaaatcagaaaataacacaaatgctaatgcacatatatttcaaaccatttttctgacagatgcaa

SEQ ID NO: 62011 - DNA, 1353 bp, Homo sapiens
agactacatctcaaaaaaatttaaaaaaaaaaagaatgtgaaagtctacttgggccacttggtatcttcaaaaaagcacacaggcataggcatcattctaagacctaattgcatttagctttgctatctaaagtgaattatgagcctcttggttttagatttttatggatttgcagtctggcatttggtaactcttacactgatatttcaagtactctgtttttctagttcaatctgtgtccttattttagcacataaaccagcactctgttagaaacattagttgatgttagcagttctttattctaaaatagctggctgacagttaacttgttaccctttttcgttttggctttattatggttgggctatatatttaagaattcagtttctaagaaactagttttttactttttattctaagataaattttaaattattgttacccatctatatgtgtttcagggtctccttttgtgaatgcaattatccacaaaggctttgatgaaaggcatgcgtacataggtggtatgtttggagctggcatttattttgctgaaaactcttccaaaagcaatcaatatgtatatggaattggaggaggtactgggtgtccagttcacaaagacagatcttgttacatttgccacaggtaagagatcacttgttctcatttattttggtggtaatcagataagaactagttgcatttttgagggcaaagcattatgttggacagtcttaggaatgcaagctaggcatgttttagattgcttttggccctctcaccaattgtaataatagctaatatttattaaatgatccgtatgggccaattataatttaagcacttgacctgtttggctaatttaatcattagaatatctggtgccttaaagcatactgagtagaaagtaacattaggcatgaaagaggctttattgtagcccttgagtattgtaggactctgtggactctaaaaatctagtattcaaatgctaaaatggcattatttgtcaaatctaattatttgatggcagtgcctgagcctctcttccactgtgatacgatcctaatcctcaatttgcaatattactataagaacttgaaattaaaacattgatcctttttgaaaggaaataataatcaaataactactttgcactttttttttccacttttaattacctgttctaactcacttgttaaaaatcatttaagtaacttgtccctaacttataaaatccttataggcaaaaagtaatgccacttgaaaaatccagtaagattaattcctgagatttattcgacagttagggcactgcttattgaatatacagagcagtagtttat

SEQ ID NO: 62012 - DNA, 3319 bp, Homo sapiens
tcagtgagagccaaaagtagttctagagcagtgttgtgaactgggagtaggtatcggaatcaccgcagttactaaaatcagacatgattttagtcttatctgatacttatgaacttagtattcatcttagacttgctgattgaaaatctgaagaactgtactcagggtaaagatgttttgagaaaatgtccctagatgattctgatctacaacagtaatttagaacctcctccctaagattaggaatacttccggaaagtctgtttatctttcaagaaaatttttgtaccattatttgaatttatctttctcttccaggcttatcctgagtatttaattacttaccagattatgaggcctgaaggtatggtcgatggataaatagttattttaagaaactaattccactgaacctaaaatcatcaaagcagcagtggcctctacgttttactcctttgctgaaaaaaaatcatcttgcccacaggcctgtggcaaaaggataaaaatgtgaacgaagtttaacattctgacttgataaagctttaataatgtacagtgttttctaaatatttcctgttttttcagcactttaacagatgccattccaggttaaactgggttgtctgtactaaattataaacagagttaacttgaaccttttatatgttatgcattgattctaacaaactgtaatgccctcaacagaactaattttactaatacaatactgtgttctttaaaacacagcatttacactgaatacaatttcatttgtaaaactgtaaataagagcttttgtactagcccagtatttatttacattgctttgtaatataaatctgttttagaactgcagcggtttacaaaattttttcatatgtattgttcatctatacttcatcttacatcgtcatgattgagtgatctttacatttgattccagaggctatgttcagttgttagttgggaaagattgagttatcagatttaatttgccgatgggagcctttatctgtcattagaaatctttctcatttaagaacttatgaatatgctgaagatttaatttgtgatacctttgtatgtatgagacacattccaaagagctctaactatgataggtcctgattactaaagaagcttctttactggcctcaatttctagctttcatgttggaaaattttctgcagtccttctgtgaaaattagagcaaagtgctcctgttttttagagaaactaaatcttgctgttgaacaattattgtgttcttttcatggaacataagtaggatgttacatttccagggtgggaagggtaatcctaaatcatttcccaatctattctaattaccttaaatctaaaggggaaaaaaaaaatcacaaacaggactgggtagttttttatcctaagtatattttttcctgttctttttacttggttttattgctgtatttatagccaatctatacatcatgggtaaacttaacccagaactataaaatgtagttgtctcagtcccctccaggcctcctgaatgggcaagtgcagtgaaacaggtgcttcttgctcctgggttttctctccatgatgttatgcccaattggaaatatgctgtcagtttgtgcaccatatggtgaccacgcctgtgctcagtttggcagctatagaaggaaatgctgtcccataaaatgccattcctattttctaatataaaactcttttccaggaagcatgcttaagcatcttgttacagagacatacatccattatggcttggcaatctcttttatttgttgactctagctcccttcaaagtcgaggaaagatctttactcacttaatgaggacattccccatcactgtctgtaccagttcacctttattttacgttttattcagtctgtaaattaactggccctttgcagtaacttgtacataaagtgctagaaaatcatgttccttgtcctgagtaagagttaatcagagtaaatgcatttctggagttgtttctgtgatgtaaattatgatcattatttaagaagtcaaatcctgatcttgaagtgctttttatacagctctctaataattacaaatatccgaaagtcatttcttggaacacaagtggagtatgccaaattttatatgaatttttcagattatctaagcttccaggttttataattagaagataatgagagaattaatggggtttatatttacattatctctcaactatgtagcccatattactcaccctatgagtgaatctggaattgcttttcatgtgaaatcattgtggtctatgagtttacaatactgcaaactgtgttattttatctaatccattgcttaatgagtgtgtttttccatgaatgaatataccgtggttcatatgttagcatggcagcattttcagatagctttttgtttgttgggaagttggggttttggggggagggggagtattagtacgttgcatgaaatagcttactttataatgatggaattgctttttcttttgtcttgtgatttttttttttgaagtgaaatttaactttttgtgcaagtagtactattatacccatcttcagtgtcttacttgtactgtatcacattccataccctcatttaattcttaataaaactgttcacttgtttttctgggtagcatggtaattactggaatagtataaatgtgttgaatggtctttgagaaaatgaattaagattacaataaaccacaattgcaggaaaacaatgtagttctgagtctaatagtgataaagaatgcagtttgaagtttgaaatattgaatattgtagctgtacttgctcattaaaatgaaagtagctgtgagatgctttcaacatttagtctattcagcacaactggtaaaccttaaagctcattcctgggaaattaatcttcttaacttataaaaaggaatatatttttatttctgtgtcatatgaaaacattcttaataagtttccaaatctcaaagttagtggtatttattgctattaaaagaaagagtaatcgcatatgtatattagacttcagtatgttaagtttccttgtgtgtgagcaattccctgatttccataataagagaatgatggtgcaaataattcttaagtcttttggctttgaaatacatttcagcagctctgtgttcctgcttcatttagggtaatatggaagtatttgctgctatttcaagtatgcatgccagtctcgggtgtttattgtgatccagttgtttgcaggttgatgaggcaagaaagcatgcagatttcccagagctcttatagtcag

SEQ ID NO: 62013 - DNA, 1042 bp, Homo sapiens
ctgcctttctaatctttctccagctgatcatttttctttctataccagttaccacaatcctagaacatgccaccatctctagtccaagacacctttagagagacgcttcccttttgtcactgtaaagctacatccaatcttttgaaaatacacactcaaccctaggaaaggaagtactcatctccttgaacattgtatcacctgataagtctcatagtaagtttatgtatcaatgtatttggtatttggacatgtttagtacaagacaggagcctctctccttttcctgccttccatggcatctcatttcaatctgttcttcgcttcagtcatattatttactgatttgaagatttgaacatgaacatggtaatctttctaattaatacctttagttgtttcctattgccttaggataaagtccacattctcaaacaaacatatcttaccaagtcctttgtgatctggttcctgtgtcatctttttagattcatcttgtgtcaacttctctgtacttccccttcaccttcttctctcttctatcctccaccctccccagaattcattttgttaccccctactgtttatctttggaacacttcttagccccatctcaggtatggctagttctgaccttagtgtgtttttttgtttgattttttttttttttgagacagagttttgctcttgttgcccacgctggagtgcaatggtgcgttcttgactcaccataacctccacctcccgggttcaaacgattctcctgcctcagcctcccgagtagctgggattacaggcatgcaccaccacacccggctaattttgtatttttagtagagatggggtttctccatgttggtcaggctggcctcgaactcctgacttcaggcgatccacctgcctcaattttttgatctaagcttatatattaccttgttcaggacattttctctggttttacttcatctgagctatttgcaccaatacatattcctatcagtcataatatttatattttgtaattggttaattgttctcttac

SEQ ID NO: 62014 - DNA, 1097 bp, Homo sapiens
ggcaagatggtgagacccttgtctctacaaaaataaataaaaaacacttagctaggcatggttgtgtgcacctgtagtcctagctactctggaggctgaggcagaagaagtccttgatcccaggagtttgaggatacagtgagctgtgattatgccactacattgcagcctgggcaacagagcaagacctcacttcttaaaaaaaaaagtttgtgtgtgtgtgtgtgtgtgtgtgtgtgtgtgtaacccatgcaacccaagtaatgatatgctattttctttcattccacactttggctatatggtcaaattaatatttttaaacctcatgtagaacctacttccgaaagttctatggaagattcacctactacagagcgattgaattttgacagatttgatatatgtagattgttacaacatggtgcatcactcctgggatctgctggtgccgaatttgaagtccaagatgaaaaatcaggtctgtagtggttctgagaagaaagtctaaaatttgttttttcagactaatttgtcactgtggtatgctgttcattagtcacacgtaaactaacatgtcatgaaatgtaaattaactgaagtttgcaggtggcgggggatgctatgaatgggaggtaacccagcagtatttggtttaaagctacaatatgagtattttttctcctttaagtgaatatgtgcatcattagttgatacatattaatatttcagcaacaattttattatgtagtatggaaattataaagtgttccccaagagccccagtttaatatattataaaatcaggattagtatagatcgtggtagtgttttcacaattctggaaatttgagagattgattgttttgtttttatcacatatttctgatattattgggtttactcatgctggtgtccaacgcaaaaactaagagtgaaaaataagacttggataggtattcacacctgtaatcccagcactttgagaggccaaggtgggtggatcacctgaggtcaggagttcgagagcagcctaaccaacatggcgaaaccctgtctctactaaaaatacaaaaattagccgggcatggtggcga

SEQ ID NO: 62015 - DNA, 1378 bp, Homo sapiens
agcctctcgccttcagcccctggagtagctgggactacaggtgtgtaccatcatgccctgctaattattttttatagagatggggtctccctacgttgtccagactggtctcaaactcctgggctcaagtgatcctcccacctcggccacccaaagtgctgggattacaggtgtgagccactgcacctggcccaggaatgaatcttattattttatatatatttactaattaacagttggggaatgcgggaatctcagtgaaaactcccagaatgttttgttaactagaccagtattttccaatgtgattaggtaacagagtttatgagatgatcatgaatgaatatggttggttttattggcagaagggatgctttgtgtatttttttattttgatagagtttgatgtgcacgtattagaaaacttcttaactgatttggagaaaacgtatttcttttctgttgaaaggtgaagtggatcctaaagagaggatagcacgccaacgaaaattattacagaagaaacttggccttaatatgggagaagcaattggaatgagtactgaagaacttttcaatgatgaggatttggattataccccaacttcagcatcctttgttaacaaacaacctgtaggtaaaacgtttggttatttgattgcaagtaataatacaaagggtttgcttcattttgtttatgtaattatagtttaagaaaatgttatacttagctctgttcattgctgcttagtgccaccataatttagcatctttttttaactggatttctgatgacagattctatagagttagaagctcaacctacctcccagacactggactgttaagttgtagtagaccttttaggcactactggtattgaaagattctaattgctgcaattgctctttttttggtatgttctttgatgtagggaaaagtaattttttgggagagtgagagatagtaagggctattatagtcagatatgatagtagaagtgtttagtgttatgatttattcttttttttttaagtgagaaataagacaaccgagaaagggtatataatatgaagtaaaaggaagttttttgccaacaggacacagacatttccatgccccatagacaaccattttcaagttacttgtgcatcatttctgaaacttgtgtgtaccaagtgcatgtgtttgtgtgtgtgtatatatgtatatgtgtgtgtgtgtgtttgtgtgtgtgtgtgtgtgtgtatatatatattccttttaagccatgtttaccttttctcacttcatacagcttaatgtgtcagtatattcagattgaccgcattctttttggacagcttcatgctgttttgttttgtggctgtaccataat

SEQ ID NO: 62016 - DNA, 1740 bp, Homo sapiens
gaaaggaaagtgtaagatgtaactagaagataaagaggataatagaataaaaatgcaataatatgatcacagtatgggtaattgaacatggtgtaagaaaatgaatgggcaggtgtattagaaagtgggctatacagatcagattaattgggtgcgggataggcaacactaatttggggtttgcaaaatccagatttatatatcatggacctttgggggaagttgcttgaggttcatcgttgccataggtcattacagctgcattgcttatatatgtgcccatggttcttgatcaagactgcagcagaacatccacaccagtgaccttaactgtttgtggaagtataaatttcagttgaatcttttggttaggcacagaagggatttttaggcttgagcttaaaaatctaacgcacagactttatagtgtcttctgtgaatggaaaagagcaaaaagagtagacagtaagtagttaagaggaaaggggcatatgagctaagttggactatagcatgctggaccaatcacttaaggctataatttatttatttatttttttcagcagatggtgatgatcagtttcttctattgacatttattctcataactttttggtgatattatttttattttgaagtcttacctcttcaaggccttctctatgggttaggatcatacatttgtgcctcataatgtagcataaaaaaagttaagaagcatatgtgtatctgttgggagttggaataacagagaaaagggaggaaaagactgaaattatggtacagtcatacaacaaaagagtgtgaacctgtcaaaaaagaatgtgatcgatgtatatatactgaaatttatagacttggtcttcttctgaggctgagactataggtacttattttaatttcaaaagttccaactcagcattcttttattcttttagactcttcaggcagctgaattgattgactcagagtttcgagcaggaatgagcaatagacaaaagaacaaagctaaaagaatggccaagttatttgcaaaacagagatccagggatgcagtggaaactaatgagaagaggtagtaatctttttttgcctattcacttaaaacaagagggctctgtggctttaatctgtgtctgcttgatttatagaaacattctgctgacatatttagctggggagtactgtttggattctcttactcaattgtcagagagtattcattgtactaggaactgagaccacttccccagaaaaatccacatgtacagacttttttcctactaattatcagttttgaatgagggctgaggatctccaaaggggagagcattccaggcagaagaaacaagtttaaatgccttaaacatggaataatcaagaaacaaatagaagggcagtatggccttctatactgggatgagtgcacaggagagtgatagagaatgaaatcagagaggtgtctaaggaccacaagttaagaatactcccttagtaaagtgggaggtattgtcacgatattacctcacctgtgccttaagctggggctatgctaaatagccaatgataatctaggctagtttatgtagtcctgttgaagaaaagaactgtgtgggtaaagtcactgtcctctgtttcttcataagttactaaaagtgatcatctatgcatggcttggagcagcatttctcaaagggtggttcaaaactatttccttcaggtgctcttcgaggaccttgt

SEQ ID NO: 62017 - DNA, 1018 bp, Homo sapiens
gtcaggagcttgagaccagcctggccaacatggtgaaaccctgtctctactaaagatataaaaaattagccagacgtggtggcacgtgcctgtaatcccagctacttgggaggctgaggtaggagaatcgcttgaacccgggaggccgaggttgcagtgacttgagattgcaccaccgcactctagcctggcctacagggcgagtctctgtctcaaaaaaaaaaaattgcttataaatctttttcaaactaatatatcattgaaagtattgaataatctattgagagaaattttatcagtaaaaatatatcttaattagttaaaaaaattaaatttttaaaagcctgattgctactactagacctagaaataaaatttattaagttacttaaattgttagcataaaatagaccttttgaactagtagtaattctgtttttcttattcagacaaatgaatggcctttggaaagcttttgtgaagaactttgcaatgacctttttaatccctcctgggaggtaagatttcttcattacagtttttctcagctctattttctgtgctaatgaagggaacaatgtcaagagcaatatactttgtcagagtccctattcttctctgtttgtctcaggactcagggcacgtcatatcattgacctaaatagaaaactataaattgattttcacctttcatatccttcagtcatattctttagtgaattgtttatttcttttcgttctttaaattataatccaaaggcttgcatatctctcccaggcagtaaaaaaaatacttcctttcctttggaagtggacaattttgattgatcaagagcagtagtttccaagccagctttttagcctcagaaatctttagagaacatcttgaacagttcccaatgtgtagaagagaagagtgaagttcctctgcttgaagttgaggattggtagtttcaaaccattgtttctcccttctgttggcctctgtgtaatttaaaaaacatttatttagaatacc

SEQ ID NO: 62018 - DNA, 1654 bp, Homo sapiens
gcgtggtggcgggcgcctgaaatcccagctacttggggggcttgaggcaggagaatcgcttgaacccgggaggcggaggttgcggtgagccaagattgcaccactgccctcaagcctgggcaacagagtgagactccatctcgaaaaacaaacaaacaaacaaaaacactatacgatactttctttcctctctcttgctgtggatagtgctgaatgaaggtagaggataagggagtgaaagcaatgtggatttatatctcaaaaggattttagaatagctgttttcttgcttgatttttaaaaaattccatataaccaaaagcagtctgaaatgtatatgtgtaattcttcttagatagttgaagaaaaatacattcttgtaaagttccacttagtttattctaatttcttaaaaatccagtatccctatttcgtatagaagaaaaatcaaactttgtttcttaaacatttaacatctgacatttgcttctttgttcttttcaggttcgacatggtgcaggcactggacttagggaaattcttaaagctcatgggaaaagtggtggtaaaatgggtgacagcactttagaagaggtaagtgtattaatgcaacaattatcaccaagtattaatagttggcatctttttccaatgtagggaagtaacgagtatgtgccgtgaagtaggaatgagaggtaaataagaggaagagatatgaaaaggtaaatatcatacaatggattgaaaagtagagtaagatgaataagaggctagttgagaggtcagtgagcaacataattggtattgcctggagacactggtaatagtataaataatagatatatgaccggtgtgcttgatatgagaacaaccttaagtaattagtttcttaatttctcttggagtgcgagtaacataatacaatccatgaattttaagaattgtgatatagtatatctgaattgaattaatgatcaaaggggatatgagatatgtttaatattaaagacattaattgggactattctactttttggttgttgttcctacagctaaaatctgtccccattttttatttttgattttggacctaaggtgtcccccaagtccccagtacaaagtatgatctttgtttttaaaaaaattatgttaaaaaaatgtgtgtgtgtgtgtgtgtgtgtatatatatatatatatatatatatatatattatattttaacagatgattcagcagcatcaagagtggttggaagacttggttattagactcctttgtgtttttgcattagacagatttggagactttgtttctgatgaagtaagtatcatttaagggaggctttgcccaatcaaatttcaaattctacaaaatacgttttttgcaaatatgagttttcttcctttttcgtctgtaggttgtggcaccagttcgtgaaacttgtgctcaaacattaggtgtggttttaaaacacatgaacgaaacaggagttcataagactgtggatgtgctgctaaaattacttacacaagaacaatgggaagttagacatggtggtctgctgggaataaaatatgctttggcagtccgtcaggtaaatatttcaagttttgaagcttatgtgggagagttttttcccccttatagtttattt

SEQ ID NO: 62019 - DNA, 1755 bp, Homo sapiens
aggctggtctcaaactcctaagctcaagagatcttcccagtcttggccttccagagtgctggggttactggtgtgactcatcacacccacccctctagtctcattttttgaaatgacttttttaaagatctggctgactttccaccttattatcaaaatcagaacacaaagttagaagtacagtaagcagtattttaagagcttaaaaactaaattttttttatgatgattagtaccattttaaatgcagtaaaattacatagaagaacatgtcttgtgtctcgatgctctgttgttttcactgttaagttttttacataaaatagttgtggctcttttattttctgaattctacccattatgagtctggtcaggcagggaagtatcaaagtagagttgaatggcattaaaaagaaggaatagagaattgttaaaggcaaatagtgtgacctccttaactttactcaaaattgacaccgtccaaggtcattggaattgcatgtgttgttgaatcagtagtgacccctgggataccatttggcagggtttgtgagtattttgtgcaaaattgataacttttcttgaaaactgatcttataggtgcccttcattataaatacattgtgggatgctcttctggaattagatgatctaacagcttcaacaaatagtattatgactctcctttcatccttgttaacttaccctcaggtccaacaatgcaggtaattatttctaattagtggaataaagtaaaaagtctttacatacctttcgagataattcagcctaaacataacaatattttagcacctttaagaataatattatttaagctggagatgccaaagactaccgttttcagaaggccttgtcttttttactctagccattcgggcagcagcttacaaagatcattttttttttacccttgagatatttcagttatataattcatcgtcttgttcgtcttataattgtttacttagaaatataatcattgaatagtatttccagttctagtcctagaacgtagaattttagctttatttagtaacatttagttaacagaattatcatcgaacatcagctttaaattttctaaaacttgcccctctgtgaactttttttttgtaatgttcatgtcttcaactcttgttcttgatttcagtaattacttatcatgaaggaaatacataataatgtaatataatgtccaaaggcagagatcaaatgaagccaaaaacatacatcaaaaatttagtgtcaccaattttcctgtcctgatatatgaatctcagctcagcgaattaacatattccctaccttttagactggcccttgaatattgttagagataagtgtccttagagatagagaatagtgtccttagagacagagaagaaaaaattattatgcaactttaaaaaattcacagatgagaaaattactcttcttgtcctagtgagggcgttcagtgaatgttcatataaatgcttatatgtggtttctggctctatgagtatttcccatgaaacccatagatgtataaaaaaagtagaaaatatttcaaataatactgacctactggaagtactttaatgctaagtttagattagttggatagcctataagtaggaatagcaaaataagtgcctataaaagcaaaagaagagaaaaattgaagtggtagtacatttatggggtttcctaatttttgatgtttctattactaatgaaagctgtacaaactaa

SEQ ID NO: 62020 - DNA, 1067 bp, Homo sapiens
aggcctcctgggaggaaccacaaaagaccaaatacagtggcatattattttttgcttatgtctttttctgtggagccatatatttcaaatgctgcttatgaattatttcctagttccaggtaacttttacaaatgacttacgaatgtgacaggaatcctgtggcccaagttagtctagacttggctttgtttgcttccccatttaaaacttaatctatgagaaggaagaaatttgagttttcctaacttagtaatgctacaccaggataataaatgtcaaagttgctaccataccaccacttgctcatttgatatgtgacagagatggcaccaaagggagatggaaattatgtgtatctacccgttggggttagccatggggaagaagtaaggattagcaatcctgatcatgtaggctgactaccagctaggatacatgtcccattttcctaagaacaattacattggaaagtcctaacttgataaaggtgactcatagcattagtgccatagaagaacctgatgttagtatttctacccttctttttgactgcatttgctctggctcttctgttgctacgataacagttgtgaatgacattgttacatgaatgttcatatgaaaactgtattatcttttaagaatttattcatcaaaaaagtcacatggtgtcagcatcactagatcccatgagaatatttagataatgtatctacagagttacaacttagaataagtaagattaatttgtgtcttctttattagtattcagcagtcactgacagttttagttccacgtgtctggccttttttgcatcacactatatcatcagttcgaagagcagcattggaaactctgtttacgttattatcaacacaggaccaggtaagaactgataactatagcagtcttgaaacttatataaattaattttataaaataaacctggtctttagcttacccttgctgtatatccaaagatcaggacaatgttgggcctagtggtatggtaaccatgtagatgaatataatcactgtaagagcagaaatattttaatattttgt

SEQ ID NO: 62021 - DNA, 1018 bp, Homo sapiens
gtaagagacaaggcctttgctctcctgtagtgcttaaaataggagactagacaggagaagacaaataattaaacaagaataacttaatgaggtaactctgatatgggaggtagaagacactattggatcctaaatgagatgggtgatggacagggaaggcatcatgttagaagtgaagtttaagctgaaacctgaagggtaagtggaatttagccaggggaaaataagggtaagagtcagaggagggaatagtatgtgtaactctggaggcaggagagagcagaatggcactaaataagtgacaggaagttggtttggtggagggcaacatggaaggggggtatagatagttagaagtttaaccttcattttcaggtacagtgaaatgtccatagtcttatttctgtttgtcatcaactctccttattctgagtctccggaaggcagatcagaggaagaaacgccatttccatagttttgccttttccagaatgtcatatagttggaatcatatagtatggagccttttcagattggcttttttcacttagtaatatgcatttaagatttctctgtgtcttttcatgacttgatagttcattttctttttagtgaataatactccattgtctagttgtaccagtttgtttatccattcacctaccgaagacatcttgcctgcttccaagttttggcagttatgaataaagctgctataaacatcttgtgcagatttttgtgtggacttttttgcctcctttgggtaatatcaagaagcacaattgctggatggtaagagtatttttaatttttgtgagaaacttccaaaatagctgccccattttgcatttctaccagcaatgagtgagagttcctgttgattcatatcctggccagcatttgttgttgtcagtgttctggattttggccatgctaacaggtatagagtggtatctcatcgttgttttaatttgtattttcctggcaacatacgatgtgggccatcttttcatatgct

SEQ ID NO: 62022 - DNA, 1501 bp, Homo sapiens
aatttctcttaaaaacactgtatttagtgcttaaaaaaagtcatgtggagggcaggggctgttaggtactttgagctagttagtagaatttctctgatggacatttctatccagtgagcttgtaattgtttgaatagcaatagacagtttgggattccttattctgggatttctggacacacattagatatttggtgaagcactatttggttgcttgatttgggtgggcctttgaattgttaggaagttccttaaattgaggtttgtaacccaggctttaggagatccctgaaccttggaagcaaaatattgttagtaattatatgtttttctgataacatagtgtacatagttttcatcagagttttaaagggtccctgacccaaaatagattaagaacttttaccttaattttgtagtgaactccaagtagaagtttctaggttggatattatagtataattcattacttggattattggtgagcatatagaacttaaactctgatcatctagcacaacagcagtaacctgattattttatagattttcttgacaaagcagtgatgtatggtataaccagagagatgttgctggttagaggatggttccatatggaggatgatttcaactttgaggaaaaattgttgttaatgataatcagactttttccagcttcccagtgattatatgttgttatttcttcagaccattggtataataaatatggtgttgttgcctcaaaatcttgtcaaagtttatcacctgtttagcctttttaatgaaaccatgcagtcttttcatggtagtacttttgttatttgacatataattcttcaggtaagctaacatccaagaattatatgctacagcttttaattctgtttttgttttcagaactcttcatcttggcttatacctatactgcctgatatgctccgacacatttttcagttctgtgttttggaaagcagccaggaaattctggaccttattcacaaggtacacagcaaatgtatttgtgttccttttcctagtaacttttgtagatttttaaaatttttcataattgctgttctgttggtcattcatatctcatggagatttgaaaagtctggagatctgcataatgagacagagaactaggcttcttacatgtagcatgtaatagttaagttttgattggccatgcttcttcctcttattatgtgacttacacaggtgttttaagcactttctgatagcctcaatacagaaaatgaaatgaggaaaagattgcttttctctagccctcatcttgctgtttatcaatatgcttatagatcctgcaaagtatcttttaggatctgttggtaatatagagtctaattattgttgaaacttgtacttttttccctacttagagtgatcatatgtgttagaatcattaaaggaggagccgtttgatatatttaatagcatttatggggggaaatggcacttttgtacctttataatctgtt

SEQ ID NO: 62023 - DNA, 1104 bp, Homo sapiens
ttggcctctaaagtgactccttgttaacaaccttggattaacagtggtgatcttgccataggctagtcctagcccattaaatgttaggcatcaggaaaggtaccttatccttattaagtaagatcatgaatcaaaacttatactgttttaaatttatactaggttattaccacctttgagtttagcagagaatattaggagctatttttaaatgtgtgttgaatataggactgcattaatattgagtcttatgatatatgcaaaggatttatttcagtgacttactgagattttgacaattttgtattacttttataggcatgtttttttaaaaagagaattgtgttctttttttaaaaaaaaactttcctttgcatgactttttttttagtgcacaaacctattagaaaacagtactgtatttcaaaataagcctctatattgaatttctaaattaatctctgtgctatttcctacttaaaaaaacctcagtattcctaaagataagtgttagagtttatttttattagaaaaaattcactttcatgtcccccttttaccctgcaggtttggatggaactgttgagtaaggcttcagttcagtatgtggtagcagctgcttgcccatggatgggtgcttggctttgcttgatgatgcagccttctcatttacctatcgatttaaatatgttgctagaagtaaaagctagagccaaggtaagtgtagagggacatagtgtatttgtgtgttcatcatctaattattaatacagtaaccatatttttaaaaatctgtattgccttaagtgtgatttaattaacataagtaaggagaaaccgttattttattaggaccctgacaaaatgaatagtaatgtttatccattaaaattttgtgaaaagaactgtattttactgggattattttaaaaatatcatatttttgttgttgcctattcagttttaatggttaatctttattgtttttttttcccctccctctgtaggaaaaaacaggtggtaaggtgcgccaaggccaaagccagaataaagaagtacttcaggagtatattgcaggtgccgacaccatcatggaagacccag

SEQ ID NO: 62024 - DNA, 1831 bp, Homo sapiens
aaaagtaataaagacaaattaagtaaaccaatttccattagctgttaggattatttacaacagaaaagtgaaaattttcgatgtataaaaatccaagagttacagaaaagtgtccaaattatattgaagattatttctctcccatttacttttaactctggacttttgtcttagaacccctactcatacttccaactactagttatgctcatacttaatatttgctgttgactgtacagtctgttaagaaatatccctattaaaaaccgcgtatatgtgaaagtagtccagaaactattggtcatccattcctctatatgtcactcaggtatcactgaaaactacaaaggatgaggctttgagtattagacatccatctgtgtgggtagtagcaaaggcagaatttttggtcacaggaagaataacatctctgtatttaaaccaaaatcttcatgtttccaaataaaccattcccttccagcctctttaaccgttaacttctagggagatgtatgattttgtataagacatacttctgtaaatcaaagaaactttctactggctttgtttattccattgactggaattctggaaatttaactgtctgcacttgctgtgagagttacttgttactgcctgttagcagtttgtcaaagctgtatctaaaagtaattgagccatgctccattgcagctgacacccctgcttggcctctggaaagaagcaaagctcatctgtttttaggcaggagttggtgtgctggagaggcagtgatgctatgtttttgtgcctctcagacttagcagcaagtgttgacagttaggtttctggacactcacagagcttcatggacttactctgtgaagcccaggctgataactgagatgccacagaacccctcatggctcaccactgaggccatttcctgttggtttggggcaggcaacaaccagagagagtgggaagggttagttaaatttggggatagataagtagcttttaaaatttatatccacttttacagtatggcatgtgaagcttagggttcaactgttatctaataatgagtttttaaataacatttttaattagtgcttgatagatttcttttctgattttttttttttttaccataatacactttaaaatctgtgatatatatacacgtgtaaactttggataggtagaaaatgaagttgtaatagttctgtgtgcatgttctgtagtcattcatgttaaaattttacaataatttggatgtaatacctttttttctgtgcaattaactgttgtttggagaagtaacagaatatagattcagtacaagtaagaatttagaacttggtagtctacaaatgacgatttctgtatctataaagttaatgttcatacagttaccctatttgttttctgttgtattttaggagtgtaaagctgttaccttagctgtgcagccgcgtttacttgatatcctttcagaacatttatattatgacgaaattgccgttccattcacacgaatgcagaatgaatgtaaacaacttatatcatcattagctgatgtacatattgaagttggtaatcgagtaaacaacaatgttttaacaatagatcaagctagtgacttggtgagtaaagaaataactttcttaattagagatagaacatgaaatataggttagaaatttgtcatgacatgtttatcacaaaaacacattagtttgttgagtctgtatgtggcttggtagcctgtcatctctacccttgagaaaggttatttcattgtataggcttttcttgaaataagagaataacaaagaattttttttaa

SEQ ID NO: 62025 - DNA, 1054 bp, Homo sapiens
tgggaagttttagacattagtttactgagtactaaaacaatattacatattgtggaaaccaaaattgaaacagaaagcttgctgtctaccctttaggagcttacagtctatttggggttgatatgattaatgatttttaatttcttttttttttaataggtcactactgtttttaatgaagccacatcatctttcgatttaaatcctcaagtgttacaacagttagatagtaaacgacagcaggtccaaatgacagttacagagaccaaccaggagtggcaagtgttgcagttgagagtgcatacttttgctgcctgtgcagttgtgagcttgcagcagcttccggagaaattaaatcctatcataaaaccattaatggagacaattaaaaaagaagagaatacactagtgcaaaactatgcagctcagtgcatagctaaactccttcagcagtgcacaacaaggacgccctgtcccaattcaaaaattattaaaaacctctgtagctcactttgtgtggacccatatctaactccttgtgtcacatgtccagtaccaacacaaagtggccaggaaaattctaaaggtatatacctaaacttttatttggggtagagaaataaccttttaaatttgtttttgtttacttatgggtataatttaagcacaaatccagttcatgttagtgttttttcccattctgagagaaaaggcttgattataacaaaactctttgttacatgaatttgcacataatacttaccagtcacaaccctgtaagttcaaaaaagccattcatggaagatctgatagctgatataaggtgactgaaatctgtaagacaggtgttcacccttacctttgccttcaaaaccatcattatatggtttactgtatcaagctagaaaaggtaattgtatcaaatgttatttaatgaattttttttccttaaccaaaggagcaaccctattgactgaaaaagtcattataaaatctctcgtttccctaatttagtgcatgttttatgagattagtgaacttttagtacttttag

SEQ ID NO: 62026 - DNA, 1051 bp, Homo sapiens
attaaacataattttaaaaatataaatatctttttggggggacagatttatggaccgtaattactgctgaataagaattattaatcttggggttagcttaaacagatgatcttgtactatcccttaagtgaatgtaaataaggacacatcacttcatctatcttctctctagctgacaagtttctttgaggtagagagaaggaggaaaaaaaatgtcacttaggactatctctagaaacagcacatatccgtctgttccttatcctcaaccccaaaaaagtgttttactttggtcacaaaaatctagttaggtgttgtaggcccctgtaaatttaattattgggaaatgtttataattgagacaaacatgtctaataattgcttacttggttaatgataacattatgaattcttagatggtgacttttaaattcttttgttaaaattttaaatgtattatgattttttctgaaattctgtttttatctaacatttaattttaaggcccagaagccttacctggtacaacggagaggagctgaatttgctttgacaactatagtaaagcattttggtggtgaaatggcagtgaagttgccacatctctgggatgctatggttggcccattgaggaatacaatcgacataaataattttggtatacacatatttttatgagtccagtttttaacaaattttaatgtctattaattgaatatatccttataaaataaaaatgcctctatgcctctacctgtttattccagaccagctggtaagttttaaaatggaaacttggtttaaaaaaaacacacacctttattttataaaagagatatttgggttgggcatggtggctcatgcctgtaatcccagcactttgggaggcccaggtgggcagatcacttgaggtcaggagtttgagaccaacctggccaacatggcaaaaccccatctctagcaaaaatacaaaaattagctgggcgtgtagtcccagctactctggaggctgaggcaggaggattgcttgaaccctgggggtggaggttgc

SEQ ID NO: 62027 - DNA, 1101 bp, Homo sapiens
cagagcgagactctgtctcaaaaaaaaaaaaaattgtttttaaagagatacttgaaatggatcactatgtttaagttctttggttgctctacatgtagtaccccagcacttaaattaaggtcatggcatttaattttaacactaagaagcaaaattgactctcctatgctagctgaaaaagtgctaaaagtttttgtgtgctctagattttgaaaaattatttgccagataatacagacaatatattttaacagatggaaaatccctcctggataagggagatagccctgctcaagaattggtgaattctctgcaggtttttgaaacagcagcagcttcaatggattctgagcttcatcccttggtaactaactaatgcaagtgtaatatttcttcaaataaaacaagtggtcttattaaaaagtcttaaggtttgaaaggtacagctttgatgtcatccttattaattgcatttttctttgctgtggtataactagattcctcctttactaacagtgcaactcctgtgggctttgatgtagaccaggctgcttgaatttaatagaaaacccaacctggaagcttagaatgtgggggcattgaggaaaggactctgatgacacaggagccagatgtaaataggaaagaaaactgcagccctgttcatccagatgatcctaataatacagctccaagaaaggaaaagcatatataatgaaatctgtttcctagataagtacaaaggtgaaaggagtcacctgcctaaggtgaagctggtcagtggcaaagatagaacactggtttgggatttttttaaaaaactattaaaatgtttcttacaaaagaattaggacagagggaggaggaaaatagagaattatctggtttttttcatagaagaatattattcttttcatatctctgcaataggaagctgtctgcaatttaccccattttgaagggtattagcccagttctctattgttatttaacacaaaagggagaatctatgagagggtggagaagaatggatttttttttttgtacatagtaataaagtatgtccttttacttgttaaaagttttgctgatttactgtta

SEQ ID NO: 62028 - DNA, 1063 bp, Homo sapiens
cagctcctcaacagattgtactttgataagcagcagaattcacagtttttttcctcacagaatgttaaaaaagacatgcattaaagggttgagatttattaaaatcgatcatttttactgctctatcaaggtattttttgtcttttttttttttttttttttttttttgagatggagtctcgctgtgtcacccaggctggagtgccgtggcacaatctcagctcactgcaacatctacctcccaggttcaagcgattctcctgccagcgtggggtagctaggactacaggtgcacaccaccacgcccagctaatttttgtatttttagtagagagacagggtttcaccatgttggccaggctggtcttgaactcctgacctcaagtgagccgcctgcctcagcctcctgcagtcctggggctgggattactggtgcgagccaccatgcctcgcttatcaaggacatttttaagtaacactggctatttgaaaaaatgctaatgtatagttctaagaaatatgactactagcacattttggtgccattgccttgattctttcagaggtacacgcagttttctccatggtaacttttgtaacatctacgcagatatcaacatggtgattaaaagcaaataatgtttttcttttattatgaaatagttgaaaaggtcttagagatccataggggtcgcgcagaccacattttgagagctaataccctagggtatcagaacactaaaattgagaagtgccagtaatggcatttaattcaaaattaaactatgcaactttatatgcctctttatcaaataatgcatagtgtgggaaaatgaagttgtagattatggtctttcagatattccatatgtatttactagtagactaattgtagcacctttaatgcttgtcaatttctttaacctgatttgtcttcaagtctttgtacaattttcagaattcttttttctgtgtgtttgttttgtgtttatttgatctaagaatgaaaactgtgagtacgtagtttttaataactttaaaaaaatcattttaggcaggcatt

SEQ ID NO: 62029 - DNA, 1347 bp, Homo sapiens
caagtagctgggactatacatgtgcaccactatggccagctagtttttttttttttttttggtagaggcagcgttctcattttgttgcccatgctggtcttgaactcctggcttcaagtgatcctcccaccttggccccccaaagtgctgggattagagatgtgagccaccatacctggccttaaagcattttgtaaaatcgatttagtaaaatcttgtgtttagtgtcttatacccatttatttctcttttgcatatagaaatatttttgttttgtgcaaacgttgtttataagaaaatgtttttataagaaaaaataaatttatgatgtattcacatttatgatttttctctctatcaggatggtgtgaactggttagcatttcttaataagtataaacttcatggaattctgtgtgatgacatgggtttaggaaaaactttacagtccatctgcattctagcaggagatcattgtcataggtaatttaagatgttattttaaaataaggtttccggatttggagaaatgtaaacaagctggttaatttattgtgttttgctattgtaaagggcccaggaatatgcaagatcaaaattagcagaatgtatgccacttccttccttagtggtttgtccgccaacattaacaggccattgggtggatgaagtaggtaaattttgctctagagaatatctcaacccgttgcattacactggacctcccactgaaagaataaggtaagagttgtatgacaataacaaaatatttcatctgttgtcataattaagataaggaacagtaacatttattaaagtgaattctaattagctcttttggttgtatgacatagaaacttcacttatgaaaagtgaatgtactttgggaagatataatcagtgaggctcatcaaaattgaggaattttaaccattgtacaataagttgagctttcctagagctggagaactatcaggaaccaaagccattttgtatgccccttttgggagtctgtgaccatagcatctttttggtgcttctgttttattctcattttctacccactttcctgagagctctcctttgagccatgtgcaggggaatattcctgtagtcctaactgttcaggaggctgaggcaggaggattgctttagcccaggagttcaaggccagcctgggcaacatagtgagttcccctctcttaaataaaaaagagttcccctttgctttgttccctttccttccctctccacagaagtacttttgttccactatggctgctttagctgccgctgcagtcatggctgcactaaattttagcattgtttcagctttaccccttccct

SEQ ID NO: 62030 - DNA, 1165 bp, Homo sapiens
ctggccaggcactattctaagcagcttttcttttatgtaaaattgtgtattatgtatagaaggagcaggactgaaaaaaaaactaaacaaaaaattgtgcattatgtattctcacagtcactttatgaggtaggaatactgttgttccaatttgcaaataaggagtctaaggcatggggtctgggtccaaggtcactcagctaattaagtggacagagtgaggctttgaatacagtcagctcaaaaacttgcactcttgagcagtttactatagtgcctctttgatagaattcattcatttgtaagtgatagaaattcaactcaattctcagtttcaatattcagttctcaatattcaattctgttagcttaagcaaacagaaaattcattaattcactaacttgagaatttcaggggcagattgttgcttcaggcccatctagattactctcattcactcttcctccccttacataacttattgttactattgggcttcagtctacagttggtagataagatgacaatgggcagtctctggcccatattctcttagcttggcaactgtagtaaacagatcttccctctctctcatgaatatatcagtactggagatgactgactggccttgtttgggtcatgctcccaaaacaacctttgtggttaggggattaagtattgtgaatagcttaacctggttcaaatgcttcatttccttggtgattatggggacacatgattggtagttcccccacatcacctagaacaacatggagtgagaaaggaatagtgcccctaaggaagagatgttggcaaataaagttgaaatgtccaccatattttcagtctgatgttcatctcttttctaatcagactgagtagggcaacacagccagatcatcagaagagtagcccttcagggtcatgtatgtagagtaagcagaagggaatgctgggcttagtgggcagattgaaagcactttatacaaatggtagctattaagaacttttcagggtctctgttttctaattttattcatttctaaataaaggttacagcaccaagtaaaaaggcacaatctaatagtggcttcatatgatgttgtgaggaatgacatagatttctttaggtaagaattaattttttttttagaaaaattaata

SEQ ID NO: 62031 - DNA, 1104 bp, Homo sapiens
tttaaaacttgacatatgttccccttttaggctagcagtaacattcttgtaaaatttggtgtcttgaaacatacatacagggtcttgatcatgtaacttcatttaaggaagatttttctcatttacttctaagagtttctttttttcttttttaagactcaatttttctaagattttcttttactggtaatgtatttattttcctgaacagtagaaaaattgagtcttggactatttgacttgtatttttcatattttggcagccgaacttaatgtgttcatacttgttttctaaatgtaattttaaaggaatttaccaagatggagtggataacctgtaattcctgtagtgaattagagatatcacaatttgttttcattaatgagggctgatttaaattactgctgttattggcctttgctggttatgtgttttgaacaattgaaaataaatatacttaaagcttctcccacgggggccattttacaggttcagctctatgaagattttgctaagtctcgtgccaagtgtgatgttgatgaaacagtttcttcagctacactttctgaagaaactgaaaaaccaaagcttaaagctacaggccacgtattccaggtatagattacattctactttttttttttttgagatggaatttcactctgtcatctaggctagagtgcagtggcatgatctcggctcactgcaacctctgcctcctgggttcaagctatcatgcctcagactcctgagtagctgggagtagaggtgtgcgccaccatgcctggataatttttgtatttctagtagagatggagtttcgccatgttggccaggttgatctcaaactcctgacctcaagtgattcacctgtcttggcctcctaaagtgctaggattcaggcatgagccaccacgtctggcccatcccactttttaaatgttgaataatgatttttaatgaggcactttttatatggaataataaaatacggatctatgtatatttgtttcaatattatgtatacattcttgaaaataagttaaaatacctatttaatatatcttaataagcactttaatattaaaattaaatgtataaaa

SEQ ID NO: 62032 - DNA, 1092 bp, Homo sapiens
gcaccatgcccggccagaaatttttacactcactgaagtttgagcaacttttgtatccaaaatgatccctggttccagaagcatctgtctgcattaccaggtactttgagtgggaaagggttttaaagaaaacaactaagacgctcaatttgccatgggaagctcattgtctggtgggggagacagatataaacagtacaatttatacgcgttgtaaatgtccgcatagaaactgcacaagaatctcaaatgagacatttgaactggttcttgaagaatgagtagaagtttgccgagcaagaagagggagaaaggcattctaaacagcataggaaatagcatagggaaagatacagagataaaaatatttgtgatatgcgaaattgactcatatatactttttttttcctcttgaaggcattacagtacttacgtaaactgtgcaaccatccagcattagtcttaacacctcaacatccagaattcaagaccactgccgaaaaactggcagttcagaattcttctctacatgatattcaacatgcccctaagctctcagctttgaaacaagtatgtatgtcttttaagtgttaaatgtgtgttgtaccccaggaatataaattcttggtaaatttgcttttcttaaagattactactgtgtttaccatttatttttaaatttggttaaatttttgatacagctttttgtaaaaatgtggttaaaatatatacagcacaaaatatgccattttaaccattttaagtgtgtaaatctgaggcattatatttacaatgttgtacaaccatcagcattatcttactgctaaaatatttccaccacccaaacagaaactctatattcatcaagcaataattcttcattctcccttgttctagcccctggtaatctctaatctactttctctatgaatttgcctgttctaaatatttcatttaagtggaatcataaaatatttgtcatttgtggcttattcattagtcagttttatggatatagcacatttcattcatccatttctgtgtcagtggacacttgggttgttttcaccttttggctattatgaataatgc

SEQ ID NO: 62033 - DNA, 1029 bp, Homo sapiens
cagtagtagcaaccctaacactctcaccttctgtcgtccctgaatgaaagtctagcctgttctcacacttctctgtccccatactttaaaggttcatagttgggtttatcttaattataattagcatttaattatatttttgcaagttagtccttacctgatgttactaaattcaatgcagtttgccttattttgtatttatgaaattcctgaatagctttggaatgccctcttttactaaaaacgttatacatattgagaggatatttttctcagatgatcatgtaagtatccctattgtggatttttaaagcagcattttcatttgtgctctttaatttttattaacagtttctgttataggacttaagaatggactaattttatttttgttatctacttttaggtttaataatgatccatctatagacgttctgttacttaccactcacgttggtggcctgggacttaatttgacaggcgctgacacagtagtatttgtggagcatgactggaatcctatgcgagatctacaagccatggaccgggcccatcgcattgggcaggtaaaagtcaattttacctcacagatgttaacctgtgcatgaaaatatactcccccagaaagataggaaaccttggtttagttcttgctctggtgttaacatacatgtgttatgaccttggacagatcacttaactcttctgtggtatcacttcctcatgcattaaatgaggtgctagcacttaggaaaacctggatcactgttcatccctaatattctgtgattgctgcacacattttgagctcatgtggccagacaaaataaaaatccaaccctaattaggtagtataaaatagtacaagtctacaagccctctgactcgttggaacctcaaagcataatatgtgttacggttgcttaactgtttttcttatccagaaacgtgtggttaacgtataccgattgataaccagaggaacattggaagaaaaaataatggggttgcagaaattcaagatgaaca

SEQ ID NO: 62034 - DNA, 1587 bp, Homo sapiens
cctcctatctttagtcactttgtacaggatgatatccatgagtactttagtgtttgtatatgttttttcttttaaatagaacttgtttttataattgatttaaaatagggctttttttctataaaagccttaatgagccataattttaagaatataagaataatgactatgatattggtcagtcttagaacatgaaaatgtcagacaatgaatttaatcgggcccttggtggaaacatttatatatttaatgcagatgcatagtgtttttcaaatctttaacatcattttttcaacttttaagatataatatcaactattctaaatacaggtaatggtatatttaaggctaccataacatcctatttagagggtggttttttttaatttatctaatggctacgatatagccagattcaaataacatatgtactcaataggtttcaatcatatatataatatattttttgtaactatgaacatacacagttttccagaaatagattttacactgtttagaattccaacacctacagtggaaagactgtttattgtagtaatgcatggctgaagcataaaagggagagagaatttctttatatacacaaacatacatgaatatgcatatctatatgcatagatgtacctatcctgcacccaaaaaggtgcctggtattggcactaaaatcatgtagttatactgggcagcaataataattgggcatgaggctgattactcaatggtgagggtaggtatatgtagatagatgtgcatgtatgtgtttgtatatataattttataagtttcacgcataaattaatacatgcctgtgtgcatacatatgtatgggatatatttgtatatatatgtacaggtaataaacatccccaaggtttgtggctggccatacacataggcatcagtttaacaaccatcagacctcagctgtacaataacaggtgttttgtttaattaaaattatactgttctgcagcatttagacatttgtcacatttcattagctttgacaaccatactgtaacattaaacctagcattccacaagagaataaatataagattgaaactgtaaaatatatgcaactgtgtgttatttgtaggaaatggtcactagaaagagcaaaagattattcaggtatacaggttttttttcattgtttaggattttaactcaaaactttatgtagaacatttcagtatatttgagttgaatatttttttattaactatttatttgctagttccataaaccagctctttaacatagcttatagtaattgatattttcttagaataagtacagagcaatatatcattaaagggctatgaaggggcaaaagaaatcacaccataaaagttagtactttttcccaatctgaaatgtcagatagagctagaagtcagatatttaggctgtttaaactttctgagagtttaatcaaaaggtgtgtatttctagaaggatgactagaaaaatgatgtgtggttgcttctgaatgggaaacaggagtcagagctgacaggaaaacttagagtggctataacatttttaaaataatcttttgag

SEQ ID NO: 62035 - DNA, 1360 bp, Homo sapiens
gatgtccttgtactgtcttaagttagtgttgcttgtttttgttttgttctcccatgtttagttgcaattactggctctcaagctatagtttgttttcaaaaaggaaaaacaaaatagttttttactggattaaaaatgcttattttagaatcctcccctttttgaggctttttggtaataattgcttttttccagcccaggtgtggttttgtttgtttttttctatgtttgtgggttttttttcatctgtacaagaaattttgttatgcactactactttttgtattctagacagttttcaaaagttggcagatttttttttttgtttttaaggaaaaaggcatgctttctgactgacatgatcttttgcaatacctcaattttgaaatataggaaagaaaatgatattttctaagtaagtttattcagaaaaatatatattaatttaattctgcaagaaaatgatttaacagatgggtaactttatttttttcatgcttatttgtgttttttgaaaatgaagaagttagagctttataactataatattaaagatcatatctaacctacagaaatctacctaattatgtgaaagaagcaaaactttttgaagaagcacccctctttcatgtattaaaataacactgagatttttttaaaagctggaagattgtacagcataaagctaaagtgaaggcaaaaaacattgtcctgaagaataggttacaaaaaataaactccatttggtgctgaaagttgtgaatagatggtggaaactactttcccttaatttgtatatttctaatcaagtgttgattgtgcgcgactgaccaggattgtgaaagagttcttctgtttgtatttttttaaagagaacttttttagtttattaaattataacatgttcccttttgttttgtaaataaatgtgcccccaagttgttaatgttatattaaaagagagggtccttcaaaaaaattattttttaaaacacagaggtgttctgacctgcaacttgactgggaagcccctgggtaacacaggtcctgctgtggcctttccttggtgtgacacttgaactagtcgattttttgaaggctataacctaacctcgactatttgttgttatgtgcaatactgtttgtactgtttgtataaaaaatagaaaaaaaaaagaaaagaaaaaaggcataaatctttattgcagatttattttcattgcaaactttagacattgtgattcactgaaatcatttttctactgtcaaatatgtaccttttcttcatgctggtattttttcaatagtaatgtagcctttgtactgagacaaattttcattgttatttttagaaagattt

SEQ ID NO: 62036 - DNA, 1050 bp, Homo sapiens
gctggatgatcagatgtgtgatgagtgccagggcacacgctgtggtgggaagtttgccccgttcttctgtgccaacgtcacctgtctgcagtattactgtgaatactgctgggcgagcatacattcccgagccgggcgggagttccacaaaccgctggtgaaggagggaggcgaccgccctcgtcacgtcccgttccgctggagctgagccacgggccgacccagccacaagtactggagtagataacaaggagggaaaagagagggcactgcctcagggcttacagtgttctggaaatctgtgcattcgttctcgatttttaaagaagaattgggtctttttattattattattattatttacagtcatattactgaactcagtgtccagtataatgcagaattgcagagtgtagaatggtactgatttgcactttgattcacacctttgtctgcttggtaccttaattttttatacctgatttgtcactcgtgacagtatgtagactgccattctcatcagcggccgtcaggctactgtctgtgattcttttgtttgttgttgtggtgttgttctgattgttttgaactggagcatgcacttattttcagaaacttagagagttgcccctaggacaagacttaccaaaggtaatactcgtgagtaggtggcagatgtagcaaaaacttcacaacaattcagcaatcattagctcgggtcacttagagtaaggataacccttcatgaaaataagcctttagttgctctctattttgacttgtaaggatacctcataagctggatcttttatttttccttcatgtttgatttttgttttgccgaggattttggttagatcttttagtattatgtaaatttatgctgcaatagcttttgctgctattaaaatggtattattaataccataatactctattcaggctaggatatcaattaaacacaaaaacccaacaacacacttttgtgattttagggatagagtcagctgccgaacggagatcagaatagacttcagaaagcttcggtgg

SEQ ID NO: 62037 - DNA, 1031 bp, Homo sapiens
aaaagtgccactgtaattttcaaatttggaggctgttgccaaattttggagtagtatgagtttggaaagtctgtacccaaagaagaaacaagtccccctccacacacacaaaaaatctgtacctggccaggtacagtagctcacgcctgtaatcccagcactttgggaggccaaggtgggtggatcacgaggtcaggagatcaagaccatcctggctaacacggtgaaaccccttctctactaaaaatacaaaaaaatagctgggggtggtggcacgtgcctgtaatcccagctacttgggaggctgaggcagtagaatcgcttgaacccaggaggcggaggttgcagtgagccgagatcgcgtcattgcattccaacctgggcgacagagtgagactgtctcaaaaaaaaaaaaaaaatctgtacccaatttggtaggatcagatatctgagaggtaaattctcaacctccagagagcctctgctactggcatgccagttggagagaagctggagtgagctgggaaggtttaaggtcacacactgtaggagaggattagaaataaatttttctacataaaaaggcagagggatagtagtacatgttgaaatagttatgtccatgcaggttaagaagctagagatgaacacgcagagtttatatactttggaagaatcgtgtcactggctctgtagggaaggagaataatatgccttgtgggacaagccttcagctggacaggatgtctcttgagcagggagtgagcagcagtaggggtcagatggaggtgttgtggtgacaatgccattactcttgagtgttttcagtagaaacacatgtattatccttggattgaaggacttttgaaaataattagtagaattaatctgttttggaaatgtttatggggaaactagctttcactgtttgtgttttggcaaattctgccttattacagttttcattttctgagctcaagtgcagcagttttattgtagcttggtgaattctgaatggcgactgccaatca

SEQ ID NO: 62038 - DNA, 1042 bp, Homo sapiens
aaactgaaaaaaactggctgtgtctatggaaatcctgcagctaatgtccatttttctagacctactgtactctgccaagagggtatctcttagagaagcagagcaccatcatcagaaatagcaggcaaaagcacaccagcttattgttggcctttttaaaaacttttttgaagctttttgtgtgtgtgtgtttgtgtgtcaacaaagctttgttaaaatatcattcacataccatacaactcaccaatgtgacatgtgcatgtcagtggttttcagcatgtttacagagttgtgcaatcatcagcacaatcaattttagaaaatttatcatcccaaaaagaaactcagtgcctattccctccagcttccccatcctaggcagccactaatctattttttgtcttgatagatttgctggttctggacatattttgtctggcttctttcacttagcataatattttcaaggtttatccctgtggcatgtggccagcctagagctttgtagaaattggaaagcaggtggtgcttgtttcctggctacttgttagttgtggctaaggccaatggtgagtccacttgccctcattaaggataaccagatgtatttagtggaaattccatagatgtgttctaaacttgcttctgtgagtaattgtaaaaattaaacaaggtaatatcaatgagcacctaacttagttcctggacaaagtccctttgtcccacttgaacttcttagattttagtaagaatttgccaaaatgaaacaacagataatttgtaattggtactttgagtttaatgtactgattcttcctctacccttttgtttttgctctccccaaggctatgcctttctgctgttccaagaggaaagctcagtacaagctttgatagatgcctgcctagaagaagatgggaaactctacctgtgtgtgtcaagccccaccatcaaggacaagccagtaagtaatacatggccagctgttgcttttccagagcacatatgctattggaatagctgacctcctctttctgataa

SEQ ID NO: 62039 - DNA, 1029 bp, Homo sapiens
agtaaatcttggagatcaggtatcctcattcaagaggaaaatgaataagagatccagttcagagacctacagtgagtgctctccgctgcaggcagggattgatgagctgcttcaactcttaccacccaccactctcaatcctatactctaactaatgaactctgctcaccgttgtccaagtgagttgaccctttggcctttccatgccgtggcctgtgcaccttcctgaacttggaatgcctttactctctggaaaagtaatcagcctctgggtcagatatggcctttgctctttggtgttccctgatgtttggacaaatctgctccctttttttctccccagtgtcctgtaggagatacctccaacatagtgcttttaatgttgcttattagttattgacagtctgattttttctggatcagggttcttctttggcttgttcatctttgcaacctcagtacttagcatcatacctggcatctcctagatgtttttggtacccttgaattgaatccaaaaaaagtctcctgaggcaaaccagataagtcctctgacctgaaagccaaagtcagagagaatgtttgggacagactgcctgtaccaaaaaaagtctgaactcaggcagctctggctagagcagtgccctttaggtttctctaggaaggtcactggtaataggaagcttgattttgtgagaggagagagctgcctgtctgtccaggccatggacctttccttctagggttggtctcaatccaaaaccagccattccttggtctgccattttatgaatgctgcagtggttcaggatacagctccacaagctgaatttttttttttccatttgtagttggtacttgaaacaaatacatcactaatagtattagttgattttaagaactgttgattccttaaaaaaaaaaatacacatctctttttagaatgggagaccttgtagttttttttccacaaatttttatttaaaaaaagtcaaacctacaaaaaagctctaagaataatacagtgaa

SEQ ID NO: 62040 - DNA, 1029 bp, Homo sapiens
gaactgaaatggaaggtggaaatttggcagactgaggcagagaggatgttttagaagaggatatagcttgggttgggacttgctgacagtagttagatagggctaaggctgtgagcaggtgagaccaacagaggatatgttaattgcagagttaggaatgggaagccagctaggagggtctggtgaaattttttgaaaactgagagcaaagacctgggttgtctttcaaaggagaatggacccacttcagtcttgagaagactggcacagaaaaaaactcatttgaaacagcattaagaactgatcagaggaatgttaaagtccagggaggcgaagaaattaagactatcaaagctcaggcagtatatgcacaaggccagactaaagcttcatctgtctgtaggagagcatcacctggattgaaacagagttccccagttgtttgctgactgagggagtgtaacaggcagtggggcataagctaggtttgtggactcagatgtgggcatcagcatttactagctatatgacattgagcaagtaatttaacctttaagcctcagtttacttatctgagttaatactactcgttgggttgttaagaggattatgtgaggcagtgtgtgaaagcactaacacaatacttaggcttattaggtgttgaataatcttagcgtccttggtccttgcctgtgacttaaatgtaatgctcagtaatcataaaattacccaacgagtttgaccagttctctcccacacccccagtctggtctcagtttccttggtcaggtgcttgtttgaactgactgtgactagaactgacagattggcagacttcacaaggacctctttatatagggaatgtgtgattatgtaaacagcagattttaagtccaaatgccccaggtcactgccctggactgcaagactttgctaagaacacaggaagtagattaccaattttgaactctgaggtggttctacgctgccggcttgttttcttgtccattcccaactattcccacccct

SEQ ID NO: 62041 - DNA, 1002 bp, Homo sapiens
actcttgaaatagctgttgaattttttcccccaattaggaaaacattttaatgttgatcatccttttgtgtattatgtttccacttagagactcttcccctgaagcacactgattgtttcatggcaccgattttattgacagtgagaccctggaagtctgttgtggatgagcctcctgctaattttcattattttgaaaggaaagatctagggttttgaggaatgtcagcaatggtaaaggaaaagattatttagggtcagattttatttgtattccatagccctgtggttttatagatcttgtaaaccccaaacctgggaaacctagtggctaaagaatggcattgtacaaaattatctttatccacatctgtatattaagtgacttagcctgtttgggagcagagggcaaactagcaaaagacactccatatgaccttgcttccctgatttttggggaggctcatttgataatttatgagtgcatgaaaatatattgctttgttcatagtttgtcatttctgcagaatctagggaactttactggtgatattcatttgggtgtgttcctagatttatatagaagaatgttttgggttaaaggttttgtttgtgttacattctgtagatatgcttcaaggatacatttcatttcagaaaaatggctttttgatacgtattattgtgtaatattactcagcacaaaaagatgaagtgaaaatacttgtccttcctgtgcctcataaatgaatcaaattatagcttaacctgaggaaggcaagtggcttccttttatgtccggtttgttaggtttcattgtcagttgtacttctccaattctcactctcttcataacccacaaaaataagttaatatagagggctgttgcttgttctttgttttttttttttttgtttttatttgtttttttttttgagacggagtctcactctgtcgcccaggctggagtgcagtggcgtgatctcggctcactgcaagctc

SEQ ID NO: 62042 - DNA, 1061 bp, Homo sapiens
gctggagtaagttaatgttttttttttgagacagggcctcactctgtcacccaggctggtgtgcactgatgtggtctcagctcactgcaacctctacctcctggactcaagcgatcctcccacctcagcttccccagtagctggaactacagatgtgcatcaccatgcccggctaatttttgtattttttgtagagacagagtttcaccatgtttcccaggctggtcttgaactcctggactcaagtgatccacctgcctcggcctcccaaagtgctgggactatgggcatgagccaccatgcctggccagttaatgtttctttactgtagaacttttcgtagccttttattttctgaggtggaaaagcataacgtacgcattattttcccagattatttcatttccccttccccagctctcgttttctgagtatctaatgttactagtgttgaaggtaagaggtgggtttgggaacactcactgggaaatgctgatttgcgcatgtgcctgacactgagtaggcatgtaattcactgagtgtgggctatggaataaagcaaacctgtcagctctaggagaacgtcactggatgtctttggaaagctctttttgcctatagttgctgcaaatctatttctttcacccccagtgatcaaaacaaacatcaagggatgagaatttactgtctattgtttgttgctgccaggctaaaaaagatgggtggcatgagatgacagattttgttctgtttctttatagctaagctggggaaaactgaacaaaaaattatttggtcttcttatttaactcctagcattaaaacagtgtcttttttacactacctgggttgttcacaaaataaccagagttatattaataactttaacttttttgtaaaagaaatacatgttcagtatttttctaagggctatttatattctgttttagagttggctgttgtgacacaaaaacctaggtttcagggaaataaagatagtatagactaaatggggaagacactgctcttttttttttttaagagtatattaatttatttta

SEQ ID NO: 62043 - DNA, 1032 bp, Homo sapiens
ccagaatagacaaatctattgagacaaaacggagattagtggtcgcctagggctgagaggttgggggaaaaccaagagtgactgctaatggattaaatggatcaattgtgtgatatgagaattatatttcaaaaaagtcgtgtttctttaaaaaaaggcttgaggcaagaaaaggcttactttgaggaagcctagaatgactgatgcttggtaggtgatggaggagtatgtcttaagatgagtttggaggaaggaaagagaatctgatcttgctggacattagctcctggtaaggattttgaacttggtccaagtacaagaggaaatctttgaagctttaaagcaaggtcaaatgattggatttatgtttttaaaagagcacgtctggttgctgtttggagtgaagtgaaaagagaattgggttgccttgttaggaggtgatgtcaggcatgagatgaggatagttaggatagggtgatggcagtggagttggagagaagtgaacaaattaaagatagatcttggagaatgggatcaacagtagtgtttaacagatggtgtcaggttgctgaattaaccttggagggtaaataagaaggaagactcaaaaatgattttgagattctggctgaagtgattgggtgaattgtaatgccacatattgaaatgggactgggagagaataagtttaaggtagatatcaaaagttcacttgtaaacacattaagtttgtgatgcctaagaaataccagatattaatatgaagtaaatctatttttaggtaagatttctgtgtaataaaagggattctcctgttcctggggatctgaaatcctgccatctagttaaactctctcattatgcaaatgagaccataagtgaaatgttttttgttcaaagtcacctactggacactaggctggaacctatcttgacttctagggaatatgtatgtattttatgagggagtcatgcctcataattcctttttcttaaacccccaaagtgactgattgctgagctacttacaag

SEQ ID NO: 62044 - DNA, 1093 bp, Homo sapiens
taaattgtttttggaatgcatcccctttcgtaagttatgtaaacagtaatagctatgtaaattcagaagagatttttttcagctgggcgcggtggctcacccctgtaatcccagcactttgggaggccgaggtggggatcacttgaggtcaggaattcgagaccagcctggccaacatggcaaaactccatctctactaaaaatacaaaaattagccaggcgtggtgaccagcacctgtaattctagttacttgggaggctgacgcaggagaatcgcttgaacctgggaggtggaggttgcaatgagccgagatcgtgccactgcactccagcctgggtgacagagtgaacgagactccatctcagaaaaaaaaaaaaaagatttttttcattgaggtttgtagtacaggaggaatcagggaaaaaaatagagcttgagctggataatcctttctaatatttgagtagtgggaaagtgaagaagttaaaggtgtggagtgagggcaagtctgatgcctgaggaaaagtggaaagtagtagaaaatgagattggcctagtggtatttcaactatccggctgaaaagtctgaattattttcctatggaataaatagtttttttgtttgtttgttttttgttttctgtttttttttgagacggagtctcgctctgtcacccaggctggagtgcagtggcatgatctcggctcactgcaacctccacctcctgggttcaagcaattctcctgcctcagtttcctgagtagctgggactacaggtgccctccatcacgcctggctaatttttgtatttttagtagagatggggtttcaccatgttggccaggatggtctcaaactcctgacctcagatgatctgcccaccttggcctcccaaagtgctgggattacaaacgtgagccactgcacccagtcagaaatagttttctttaatgcttaatgtaatacactgtaaatgtaactccaaattatcttcctttttcagtataagctagttgtgtgacatttcacagttttatttatttttttacttatttattttgagacagagtcttgctctgtcgcccaggctg

SEQ ID NO: 62045 - DNA, 1026 bp, Homo sapiens
agatggtgtttcactatgttggccaggctggtctcgaactcccgacgttgcaatctgcccacctcggcctcccaaagtgctgggattacaggagtgagccactgcgcccagcgacttgtttaatttataaaatgggacaaaagctacctacttaatagggctgtgagataatgcatatagcatacttagaacagtgacaggcacatgttaaatacttgaaaaatttattactattaaatccagctgagggaagaaagagaggactaatgcagtggaggtgagctgttctgtgtacagctaactgacaacatcttcactggttatcttcaaagaaaaagagtcaataatgggctgcattatttatagatgttctaatacttcttggtgtgtttgcttgtaaaaacaaataatgatgctttcctgtttctctgtattgggaaacaaaacttataaaaaaaggtctaacaggttagttgccacttgcaacttttgtcattgaatgataaattgtggcctggttttctgtatacataatttctgttgatgaattccactgtagatttttctgtttttttctatcctttttgttctgtttttgcagacttcctggttaatcacttatttcagcaacgtttactacttctaaaacaaaaaggatgaatggtatgcatcaaatataagttgatgaggcatggatggaattaattttaatgagaactctcagaggcctgaagtttgtttaattaagcctgtacaaattctatcatgccattcacatgtcatatgttttcatctcttgagcattaagtgaaccctgttaggttagtatctgtgaactgctaggtttaaaaatttatttttcagtactcttgagatagcatcacagaaatctttttgtgttctccctaatattatggtagccaccatggtacagatgcctatatgttctgtatttagtactgaagaaaccatgaagagagaattatcccctaccctttttttttttttgagatggggtctcactct

SEQ ID NO: 62046 - DNA, 1048 bp, Homo sapiens
ttttagaagtatggcttatatttctgtaattctggagtttaaatgtgaccatgaattgcagtcaaaatggcagggtataattcactttgtgctggggagatttggtggacttcaactaatttgccatattataattagctctagactaggagatttaccctagttgttgggctttaacatagtgttctactgagtcctgagactgttggaaaaagtagtggagatggccatgtttgttttgtgtttcatttaaaatctgctttaaagacccagtcaggagttaagtgtcaaatcataaaaatagtaaggttctacaaagtctaaaaatttaggacatgtttatagcctgttcttaagattccagcttcaatgaaattgatatattatgcctgttgtttctacattaatcttatgttctcctactctaccattccaggaaccgaaataaggtagattgctacaagtatggattttaattttggtaatttaaatcattagacagaacaacttatttataaattacccttttcaaaccgatcatcattgtttctgtttgttaaacttaatgaatctccaacacaacttatttcactttacaattcttattcattgacttttgttaaagccccatgtaaacaccactagggaaatctgttaattatatgaaactgagtttcctaaacttgctgagcaagcactaccttgacagagcctcaggagtatcttagaagaaggagtgtcttaggatgggagaagttagggtacttaataaggttttggggcctggggttactcataatgtggttttagggcagaagtaaacaagatttgggtggggattggtaaaatgtataaactggcctagttgctgaaacttcggaatgcaggaatttaagcagagttaccatgaactctgtctatagcagtgctgtccaaagaaatagactgcaagctacatagatcattttaaattttctagtggcacatttgaaaagtaaaaagaaacacttgaaattttttaaattttatttattttttgtagagatgg

SEQ ID NO: 62047 - DNA, 1130 bp, Homo sapiens
ttaacgtccatgtagtgcaggtgctgtcaggtagaattcattttaagtaagattctctttggactccattcagagggacttagtgaagttttctattaggctaatgcatcttggtgatgtacctctcagcaacagagctcaagaacagagaggcactccactggggggaattatatatgtgaatctttctatatttctacaagtcaaggaagcctagatatgtattagtttggtgcataagtaattgtgggttttaccattatggcaaaaaagtaatggcaaaacccacaaattacttatgcatcaatttaataaaaggactagagctattttctttatgttgtaaatttgggtttaaatagcattgctgtcaagaaaagtttaggagggacttttgagagcacctattctagactactatgctcattttacagaggataaaatcaaagtcccaacatgtgaggtgacgtacccaggttcaggttgataatttctgtcataagcaagctttgacagcagattgcctggatttaagtctccactttgcaagttattggctttgtaatcataaacaaattatataaacgtgctggttctcaatttcttcacctgtaaaatgggaataatattagtttttggccttgtatgagttaaaatgtgaaactaaatataaagtgcgtagcacagtgcctggcccatagtaaagtatcccataaacgtagggttatgattattcttactgtaatggtgaccataggctttgcatgatcttgtcataatacggattactgatttttttttttttgagacaatgtctcaccctgtcacccaggctggagtgcagtgtgttatgttggctcactgcagcctccacctcccgggttcaagtgattctcctgcctcagcttcccaagtagctggaattacaggtgcccgccaccacacctggctaatttttgtatttttagtagagatggaatttcgccctattagtcaggctggtcttgaactcctgacctcaagtgatctgcctgccttggcctaccaaagtgaattgccgatttttcatacagtgcattctaaatatccccaaacttcagtgtaatgccatttgttcttttttcctgtct

SEQ ID NO: 62048 - DNA, 1003 bp, Homo sapiens
cacgcgccaccacacctggctaatttttgtatttttagtagagatggggttttaccatgttggtcaggctggtctcaaactcctgacctagtgatccacctgccttggcctcccaaagtgctgggattacaggcgtgagccactgcacctggcctacagtgttactttgatttgactttagtttcttagttctagagagaggcttcacttgctacttatagaggactgtttgaaacctatcttcatttgctacccagagaatagaatcttatctgcatatattcactgtaatggggtagatatttacaaaatttcataaatcaatatcatctgtcaattttgctttctccttataaatatggtgggagacccattacttttcattatccttgcttacattcctctctttggcttatgtatccctgggccatgcaatggtcgagggcagagaaactttctgtagcttgttcctgaagtatcaattttataagaaaatgtatatgtaaagaattattttgctttttaaacaagcatggatttcatagagcagcagttctcaaagtatggccttgcagaccccagggttctctgagaccctttccacggaacatgtgaagtcaagactatttcataatagtagtaaaacattatttgcatttttcactgcgttagcatttacactgatggcaccggcaacagtagataaaactctgcaccttagcaccattcaagacattggaaccaatagtagtaatgatcatagttttcattaccatgtgcatgcaaaaagaaaacaaaacaaaactagtttcacttaatgtccatgattaaacagtagaagatactcattttattaaccttgacttttagatacacatatttttaacaatctatatgataaagtgggcagtatgcatacttctgtatccaaagtatgataatagatacaattaagatgcaaactgaactggttgcttttttgtggcacactatttttacctga

SEQ ID NO: 62049 - DNA, 1032 bp, Homo sapiens
gcggtccatggaccggaacctcgggccgacggacgggaacccgggccgcgatcgccgcctccccgcctcaggctcctcctcctcgctctccgccgcctccgccggactcccgcaggccctgcaccgccgccgccaggctagcggagctgccccgggaagctgggtgacgggttcgcggctgccgccggactgcggcctactccgccgcctctcagtgctattgtccctgggcctggccttgagcgggtccactggggaaggccgtgtgcgccggctccgcggaagatgccggaccaagccctacagcagatgctggacaggtacgggcagctgtgggggggaccgggagccgccgaccctcgctctggccctgcccgcgcccgccctcgaggctcttggtgagcagaacccggcgtgccgggaggagttccacggccagggggccgtgagaggggcaaaaagtttggagtctagacctgggggaggacagagcgagcggcctgggtcgtagactttgggtgaaacttagctaaggagtggcgtctggtttccttggaaccccgttttgacctgagagggactcctgttaatccacaaaattagttttccttaccctcttcccctcccccttccccctccccaacttgtgaagtgtttgtcagcgatgtcactggcaagaaccgggttatctttcaggggaatgacccccttataattttaagtctctgtctgagaaccaatgataagcattcttttggaaagcctgataggctgatttcattctcccactttccctgaacccgcaccccccgtcccccccgccccatcccgtccccacctccgaactgtaaggtcagagtatccgcaagggagatttaacggtcagaccagagtagaggttatggaaaacagccaaatgagtccaacgctgaacatttagtgtacttgacgatcgttgagttcattgaagacgtttcagctcgtacaggagtccagttgcccattcttggggggccccagtcggtaaaactc

SEQ ID NO: 62050 - DNA, 1406 bp, Homo sapiens
atcactcgtgtaatactttgtttttccaagttcaagggattggtggtggtgaactggggagaacactgaatttaatatattactgtgcttactattcctcaaagaattattaggtcttataacaaaaacaacttgaggtttgtctccttgcactctggttcattagagaaggtgaagaattactgaaaagatagaggagattacataaaaacaaagttcagaaaacataagttctgtagaggaagacaaggaaaaacagaaaaagtagaaactgctctagtgggaatgtattggttgttttgtctccttagtcttttaatataggacagagattctgtaatataacatagcaggctcatcccattaagtaagagctgcagtatagaggaggctggagtcctaaagatataaatgtcatccttttctcttttaatttacagaagttgctgggtttgttttgctactgatgaagatgatagaacagctgaatgggtgagaccatgcaggtgcagaggatctacaaaatgggttcaccaggcctgtctacaacgctgggtggatgaaaagcaaagaggaaacagtacagccagagtggcatgtcctcagtgcaatgctgaatacctaatagtttttccaaaattgggtaagaatatctttaaaaacaacacagatatagttgatgttattatatataactttataagttcattttaaaatgaaccacctcttttttttagggtgtgaatttctatattccctttctcttgtttcctctctgaatgtcagacatttatttcttttgctaacagtttacagtatccttaatatatccccaaatttatccatttgcctgtgtattaactgtctgtttgatagaaaggagaaagaacttgcatacctgtgtggatataattgaataacaaagctctaataaaaagctgacttttaaaaaaaaaactaacttagcttaattatctggagacggtgtaagagaaagaaagcagtagtatgttctaatacttctccttaattcttccttttaaggaataaaagtagagaaattaaatatttaataagatgtgacgttaaactcatctttggaatccaatttatgtggtttctttcatgaaccctgctatcccttttctgtgaagtggcaggtaagaaataaccaaagatctttgagaacaggcctagcatggaaaaaaagtatagcagactgcttacaagaagcattctaaggctgcttctttagcagcagtataactaaggctgatatttagtgagcctgttccattacagccatacagttataaattggtgtcaatctcttggtttggtgtttataccatgccagttgttaaacatttttttataacccttgactgtaaccaagaggtatagga

SEQ ID NO: 62051 - DNA, 1145 bp, Homo sapiens
ctaaggagagagatagagggccgggcgcagtggctcacacctgtaatcccaacacttcgggaggctgaggtgggcggatcacctgaagtcggagttcaagaccaatctgacaaacatggagaaaccctgtctctactaaaactacaaaattagccgggcgtggtggcacataactgtaatcccagccactcaggaggctgaggcaggagaatcgcttgaacccaggaggcaagaggttgcagcagtgagccgagatcgtgccattgcattccaccctgggcaacaagagcaaaactccgtctcaaaaaaaataaaaataaataaaacatatacagttcttctggggaattttgttgcaaagggagcaatgaaatgaagcagtggggcaaaaaggctcaagaaaataatttggttttaatttttttttttaacactgaagaaataatagcatgtttgtttgatgaggatccagtaaagagtagggagaaattatgtaggatagtgggagataattgctggagctgtggccttgagttggtgaggggataggatcatctagtgcataagtgaggggattgacttcagatgggtggaatattggttgatgagtacatgtgctggagagcgtcgataaatgttctcttatggcttcagttttctgattaaaaaattaccaggccaggcatggtggtacatgcctgtaatcctagcactttgggaaactgaagtgggaggattgcttgagcctaggagttccagaccagcctgggcaacacagggagaccccatctctacaaaaaaaaaaaaaaatttaaataaagaaaattagccaagcatggtggcgcacatctgtggtcccagctacttgggggctgaggtgggaggctcgcttgagctggggaggtcaaggctgcagtgagccataatcatgccactgtactctagtgtgggtgacagagcaagaccctgtctcaaaaaaaaaatcgaattatcaaccatacgaaggttgaagtgctgaggttttatatatacttacggtctttaacttctactactagcatttgagggatctttggtgactaagatgacttttattgtgctttctgaaggagttataaacttaacccagcaaatttgtatgtctt

SEQ ID NO: 62052 - DNA, 1391 bp, Homo sapiens
ccatctcttgaaggccggtcctacctcttggctggctatgcttaatctcctagaaggaagatcaggaaaacagttgttttgctggaagacaaataggacttagaattatatcccagttccgtagcccagtctaaccaaatcaaataaaggaatagaagcaacaatcagaggtccccgcccctctattgtaatgtaatcagtctgggtcagccattttaatttttattcctgtgtggtatgaaatggcttgggaactttgtttttcccttgaatgagacatttcttataaataaatcaggactgatagctttccagcttattttttaaactttttatttctgtgtattcttttgaaattaagcattttctattaaaaaaatagagcttaacatgcaacacctcatttgaaaaagaagtaattctaatatatgctatctgtttcacaggttgtaggtcataaagaaggtctggatgttatggagagagctgatcctttattccttttaattggacttcctactattcctgtcatgctgatattaggcaagatgattcgctgggaggactatgtgcttagactgtggcgcaaatactcgaataaactacaaattttaaatagtatatttccaggtaaggcactgaactgtggttgtaaagtgcataccaaattgatcttgaagaacaataacatgcttttttagccatgtttgaaggtagtctaactcttctgatttattagcactaacgcactgcatttttttcctctagggataggttgtcctgttcctcgaattccagctgaggccaatcctttagcagatcatgtctctgctactcgaatcttgtgtggagcccttgtctttcctactattgctacaatagttggtaaattgatgttcagtagtgttaactctaatttacaaaggacaatcttggtaagacggctttaacattacttatattaccttgcaaaagagaatgaagtgtatttgtttttaaaaggtggggaactgtataaatattcggtctgtggctcctatgcattaagcctctatttgagcctcactatcattcaatagcttgagtggaaataaaaagaggagaaaccactgcagcagttctggccttttggaactatgttgtaggtgctttctctcctggcatatgcatgaatcatcacacctgtccctcttgccagtgggattacagtactttacgatcagaccacctggttcaaatcccatcacagaaattgtcttgctgtgaaatctaaatcaaatgtctggactttttgttcctgtagtatggtgatggtaataatcaggattattgtgaggattgtataagtactagcacatagtaagcactcatgttgtttgctattattgtta

SEQ ID NO: 62053 - DNA, 1013 bp, Homo sapiens
ccataaaaggagcatttaaagtttacttcaaacagcagcaatatttacgacaggcacaccgcaaaattctgaattatccagaacaagaagaagcataaaactgacttctggttgttctgcagttctctcatccttatgaatctgttgtgttgttttgattccatcattaatgcacttgtggagacttgtgataagctgctgctcctatattttttaagaaatataataaagcacttagggcaggggaaatcatctcggtaatcatggaacctaaggatgtgatttgttttcattgtttgtatgtactacttttatggcagtcatatgaaccattatcttagcatggtaaacctgggttttgttcatattttctccagacagaaatgcaaagatcaaactgtgcaaatattaaaaaaatgcacatgctgttttattcaaatgcctcttttgtacatgttcatgtttagtgttttctcagaatcagcaactcaaggtactatgaggatttttctcactgacataatttgattacatactaaataagaggatatgttaatatgaggaaatgtaaattaaattagttataaataaataaccaaaaatgtatgtaaacattcaaatgattatctgaacaaatgagattttgtggtgttttctttaacccatgtgatgtcctccaaaatgtgtagggtaaaaattcacagggcttccagatcactttttcaatattaaattttatttacataatgttgacatctcatacttcatgaagtaattttgactcatgcagtcgtgtgtgtgtgtgtgtgtgtgtgtgtgtgtgtgtgtgtatttgtgtgtttcagtgtttcatcaggtccttccatctctgggagttttttcaacccatatttctagaaattacagctgccagtttatagtagtttgagcagaggatgatttgcaaaaataaaaataaagttattttactctcctcttgcattgattcagttattgagatattcgttgatcac

SEQ ID NO: 62054 - DNA, 1044 bp, Homo sapiens
acattaatgcccttgacagggagtagctgcttggttttataggtattagggctcatgaaggccggggaacaactctaatccttttggggcaggagggagggtttttttagggttgcggggagggaactgcaagtgcctgaggaccagagtggcctctagccccgaattgaacacttttaaacctaaagagccttattattattagctcgagaaataccacatgccagtcttcccaggaaggtgacctgcctgaccatgaagcaacaaaagagcataggcagacttaaagttggatagacctgggttcaaatcatagttcagctttcaataactgtatgtatgattttggctaaaggatttgactttctctcaactgcagttttcttaatctttgaaatgcaaataatgtttatctcagaagactatttctaggattaactgagagattaaaggaacagcagcacttaggctcaaaatcgcccctacaaagcagtagttgtttcttaattgctaagtaatctgtttgcactctaggaaaagtaaatggagaggtaaaagaaaggcattggggacaaatgaaagagatgatgtagatttttcggatgggtgggtatattttattttccagtttattttcatatttctttactgtgttatttctggaaactttaatgttttaaacctcttttataaaattcaatgacgactactagaattcttttcaaaagttaacttatctccaaagtggctgaaaatattgtttaccattacatgattatgaaatgactgtgaagaatataaaattaaacttagtgacttaattagtcactgccttgctaactttgctgtaatttttttaaacgtcttgtttttaatatagcaaactatctcaatactggctggattaggttaaataaagaatttttatgttctctaggtgtactttgttaaatctcaaaacattctgtacatacataattttttttaatcacagttatcgagatactagtttttgtaagtaaaagtaatctgaatttaaaaaaa

SEQ ID NO: 62055 - DNA, 1315 bp, Homo sapiens
aaaatgaatgatattcctatagaatcttccttccctattctgtaaaatagtcacttgtccgaagaaagttaaaagttagctcttttctaaaagcctcctagcttgacatagaaggcttcacaacatttagaaaggtaataactttttaaaaattgatcctcaaatttgctttctacttgatggtttcatgtaaatcagtggaaaacattacatttggcagatgataaagcaatgtcatcttttattagtgaaatgctggttatataaggcatggttttaatctttttataaaatttgaacatgttttttatgccaactcgtaaaatgctagaaaaccctacttatttacaatgctagaaatacagacttaccttacatcaattttgtcctaaaccgaatttctcaggattactgtggtttctttcattctgattgaattatattgacctacttcttcatagttggtttgcagtgttccatgagttttacttttcctcatcaacatattgctttaacacaacatatttatttaacacgtacaaatagggtcaacttcagatcctactgagtgtgtgacatgcttttccaacatcagctttttgtaaccacctgtataactttttattacagtgaaattgcagtcagtatgtgaaccaaaatatcttgcccctttatgaatttaaaaggcagccaatacaaagccacctttttggaaatataaaaagtaaagccttgcattcttatatagcaggtcttcataaaactctaaaatcccttgttgctaccagtctaatcttgccttaaatgttaagttattttttgaatatataaatataaacatataaacacagatgatgactggagtagacttttaaaaaaatatttttttcatgagatactattttaggtgaaattgttactgtagatttaacagctgttttgaaatatttactgttattaaaacttgcttcaagagaaattgtgaatatatttccatatacaagcactagtaacagtaagtggccctgtcatccactaactcaggcaaagtaaagaatggcatttttgaaggacattttacctccccatatgatttgattggctaggactttcttctgtaaagtcataccttttcacatcttaagtttttacatttgccattttccaaatctcaattttgggcaagaacgatatagtcacaactatggggctgctttcaaaagcggggctccatttctactgtcagatcaatgtggtgctgtaaccatctttttatccctaccttcaagaacctccttatatgaagcctgtcttt

SEQ ID NO: 62056 - DNA, 1034 bp, Homo sapiens
tagaaacttcctcagaagtgagacccagaggcaccacagctgttggaggtggtagatcagggcagggcagctgaaggagataagccaagagcttggttttgaaaaggtgttgaaggaaggtagtgcatgtcctcatgagataacatggaagtatgacttttagttagcttgatctctagagagttgcattctgaattaattggttcaggaatggattatctaacaagaaatacagtaggagagccgtgttcatatgcggaacttggatgttaaaggaaacacagctaggactgtcactaagggatgaaaatgagtccagcattttatattctgggagtaactttagcatagattgaagaggattaactcacagagagtgaggagtgacaagatgggagtttgaataatgaataggatttttttcctaagaagaagaaaaagtcatctccaactttgtaattcttcagagagctcttctgctctgtccttaggaactgaaaccatcttaagtgctcatatttctttaagaggtgaatactctaaaaccttaaactagattttatttgctcagacaggttagtttttgaaggattaaaaatgacccaggtctcaaatgccacggtcatgactggctgatgtctgtgtttcaggctatatcgtcttcagcgggccacgtcgagctaatggcatacagggcttgagattcatcatccagtcagaaaagccacctcactacctagaaagcagagtggaagctttcttaattaccatggaaaagtccatagaggacatgacagaagaggccttccaaaaacacattcaggcattagcaattcgtcgactagacaaaccaaagaagctatctgctgagtgtgctaaatactggggagaaatcatctcccagcaatataattttgacagaggtaaggtaaaattagggctccaacatttatggcattcaagtaacatttgattaaggccattctacaaaatggtattcattttgtaggtgatattccgttacctatttgggg

SEQ ID NO: 62057 - DNA, 2325 bp, Homo sapiens
tgacagtaagtagagatgttgtaactttgggaatggactattttgacataacagtgtgggtgattacaggtgggctgaatttggtatagttttacgccaaagatttacttgggaacctctcctatttacagaattatgattagagataggtaattctgccaaaaaaatttttggtaggagggccaaataagtaaaattggagataggcaataattttgaagagaatgatactggaattgacgggtacttgaatgaaggggaattaggaagtaaaaatatcacaaaggtattgactatgagtcatgaaataaaatacatttataaaaatggaaactggaattataatatttaattggaaacccataggattctttggcagaaatagttttaggaaacccacaggtgcagataacatgtaatcattacaagtatatttttataagggattaacaaagacttttattgaatttatatattggggtttacaatgttgggttacttttacattaacagtggcttcttctgataaaaactcattaagcattattgtcaatattgctcaaaactgtgtaatagaaggtatattaaatgaaggaagagaagctttttttggccaagcttgattgtttggttgttccctatgcatgaaccatctgtgctgccttttccccccagctattttatcctcccaaaatggtgttctcctttcccccttcttcttcatgggccagtgcctacatcctacttctccttccaggcctattttataagctacttattccactaaactttttctaaaactcccagctagaaataatcacatctacctctggacttgcagcacaatttttctgaacctccctattcaagctacttagcacttctcttgtgttgggattgaagtgcatctccatcttcttgttagactgtacattccttaaagccaaagtctgtgtctagttcatttgagtagcttctaaagcaactggaacatattattacttcaggatacctttgttgaatgcttagagatacgttgagcccagctctgctgttgtgcatgaccagtcatcacagatctggtagtggtttatttccaacttttgccagtttattcctcagtcactaaaaccaggacaagactcaggatgtgctgatcccactacaattagagaaagactcaggatattctatgcaagagccataacagttgacttcaaagtgaggccagtgtagaaacaatatttcaaagtgcaattcatccttcttacttcttttgactctacttccctctttctgtctcctttcctaggatcttaatctcttttgcctcctaagtaccctcccaaatttctccatgttcaaaaatagcccagttcacatctcattctcaaaatgctaagtggtaggaaatcatgctgaattagccagctgatcagatgtgaatctttaaatagttcttcacttaactctccatggaaaggcacttagtatttaaaagtaaaatattcaggcctgggtggtggctcattcctataatcccagcactttgggaggccaaggtaaaaagattgcttgaagccaggaatttgagattaggctgggtaaaatagaacttgtttctacaaaaaatttaaaataaaaaaaattagctgggcatagtggcgcacacctgtagctacttaggaggctgaggtgggatgatcgcttgagcccaggaggttgaggctgcaatgagccatgattgtgccactgcactccagtctgggtgccagagtgacagactgtctcaagtgaaaaggaaaattttcaagcattataaaggagatgttttatttatctttatttttgttattattttttgagacggagtcttactctgtcacccaggctggagtatagtggcacaatatcagctcactgcaaccgagaagatgttttagaatatatatgaaaagggccaggcagccgggtgcagtggctcacacctgtaatcccagcactttgggaggctgaggtgggtggatcacctgaggtcaggagtttgagaccagcctggccaacatggtgaaaccccgtctctactaaaaatacaaaaattagctgggcatagtggcaggcacctgtaatcccggctacttgggaggctgaggtaggagagttgcttgaacccaggagatggaggttgcagtgagccgagattgcaccactgcactccagcctgggtgacagagccagactccgtctcaaaaaaaaaaaaagaaaagggccaggcgtggtggcctacatctgtaatcccagcattttgggaggccaaagcaggcg

SEQ ID NO: 62058 - DNA, 1052 bp, Homo sapiens
tctgtactttagttaatagtattataccaatgttaatttcttagttttgatggttatgaaagatgttaacattagggaaaactaggtgaagtgtttacaggagctctgtgtactatttttgcaagtcttctgtaagtctcaaattatctcaaacaaaaaatccctcataggtagcgctcactatgtcttcttacacctttgcagatgtaacccttcctcgccttaaggccttcatacctcagctcctgtcacggctgcacattgaagcccttctccatggaaacataacaaagcaggtgggtggttgaggttttagcaatcttttgtggatcattgcaagatattttttccctctagtctttctcaagattgttaaccagcatggtgtgataaggaacacattagagtttactcaaccctcttgctctgtggaggaaggtagagggcacagggaaagtagaatgatggtgattaactgaggacctaactttcatggctgcctcctctgctgttttctaccttgtgcaatcataggaggaaatgggagtaattatccctactctgtatagggtggcataattgtatagtagataagagcacgtgctgtagaattagacagcctggattcaaatcctggctctgctatatactagatctgtaatcttttgaaaatgtcttaactctgtgcttatctgttttcttttctgtaaaattagagttacagtagcacctacgtcatgtgtggtaaggattaaatagtacatgctaagtacttagcacatggaaagcactacaaaatttccgtggcagtctgtctcaagatccctcagtctcggccgggtgcagtggctcacgcctatcatctcagtactttggaggctgaggcaggaggattacttgaacccaagagttcgagagcagcctgggcaacataactctacaaaaaattgaaaaacagccaggtgtggtagtgcatgcctgtagtcctagctactcaggaggctgaggcaagaggatctcttgagcctaggaggttgaggctgcagtgagtt

SEQ ID NO: 62059 - DNA, 1034 bp, Homo sapiens
tttccttgtatactagaagaaactaccatcagttttcaaataaagattccatattttatatggctacctatttatgttgcttgcttatggagactttggggatggctttatagcgtagaacctaaagattccaaaagacttccctgaaaactagggataactttctgagggactaaagatatcccatagtgaaggcacttatagtccatgtcagatgctgaacaaatgtagcttggacaaagaaaaagcatgcacttttatgtaaagatcggagaggaataaaccccattcttaattatataacttcagaaaggggaaagaagggaatatcctagtaatacagtttatagagaattgaaatttgattataactggacttttgaaatgatttttaaaagatttataaaattaatgaacgcatgtctctttcactagtatatgcgatctcttaacaatttccgggctgaacagcctcaccagcatgccatgtactacctccgcttgctgatgactgaagtggcctggactaaagatgagttaaaagaagctctggatggtgagactttctacttaaagcttaatgctttcttcatttttttcctaaattcattttggtttattctgatattgactgtttatacttttaaataacttgtagttctattaaagctggctgtgtatatgttttataaaaacagtggtgggcaggatggctatagttaacagtaacatatacttttaaataggtagaaggaagatattgaacattcccaacccaaacaaatgataaataaacttgagatgatggatatgcttagtaccctgatgtgatcactatacattatatgtatatataataacattatatactctatgaatatctacaattattatttgtcaattaaaaataaaatgtaaaaaaacagtggtggctttgaagtggtttttgcattcaggcaggttagccacatttactgttttcaatctggacctacaccagttaattattactacttttagatttctgcagaagg

SEQ ID NO: 62060 - DNA, 2947 bp, Homo sapiens
ttgctgccaaacaagccaagcaggcacctgcctcaggcctttagcagtagctatttcttcagcctgggaagttctccactccaccccttagatatccccagggctcactcccttgcctccttcaggtctgagtccagatgtcacattgtaagagtggccttgactggccatcttatgtaaagcagcagtctttcttccctgctgccatcaccccatcattccctattccccttaccctgcttaattttaccccatagcactgtcaccaactaatatgtcaaatttaaatttattattatgtgtcccctctagctagattatcaactctgaggtcagggaatttgcctgatttgttcactctttatttccagtgcctagagaagagcctggcactgtagtaagcatataatacatatttgttgaatgagtgagacctttactttcttctgataaaaggtaagcaaggttgtatagtcaaaggagcaggtcatttaacttgcatttgaatcccagctctgctgccacgaactcaggggacctgaagaaaattatgtttcttatctgggaaatgaagtttagttgatcactgtggtggtttagttcttgtactctataattctttcttctttgttctttctcattaaaatatttttctattttatttttccctagttttggctgctgttatatgatagaaattatcaattattttactgacagttctctagctttactgttttggggaaaactcagggataagctaacattttcacaggtctcaatttttctaagttcatgtaattaccacagacacatttcccagtcctttattcctgtccaccaaggatgtgactttattggagagagagggaagacatgcaaatgctgtatctgttctgtcggccgtgctcctcccattagcctaagcacagccatgcattttggcccgttcccactgctcacataccctgcatttctaacttgtcagttctgccacaccatctggggtaggcagttccttctccttcttcactactaccagtgcgcacgcacacacgcacgcatgcacacacacacacacacactcacacacacttcaggcttctttttcagacatcttcttttttttcctcataagaaatagcctcaagaattcaaccatatcctcaggaaatcatattaaccggtgttcaatatcttgatccatctcaaaaggccatatcacattgagaagtaataaaatcagctattttactgtcaacattttcttccagcccatttgcttatgtggaccccttgcactgtaacatggcctatttgtaccttgagctcctcaaagactcactcaacgagtatgcatatgcagcagagctagcaggcttgagctatgatctccaaaataccatctatgggatgtatgtaagtacccacgccttagagccttccactcatcaacattttttatattgatttgatggaagcattttttgattgagggtgtgagtttaatttcttttttttttaatctttatggctaatcatattttctcatttaatttttaagttagcttttattctaagtgttcaactacataccattcatattatgcaaattttccttgatttctttttttttaaacgtctttcatcagaatgtcatatttttctactcaaacaaaattggaccctgatttaggtttagctcttacccattctgtatttgaaatcttggtctttggcaaaggaaaatgaagtcttccttttgtaaaacctaaggttggcatatactatttccctagaaatccagatcatgaggctgcatatccatactcttcggtcatgtttcttcattaccatgccactgcttgaggtatcaaagcatttcttttgtttttctttttgttagtcgctacatttatgctgatcctctccattgcaacatgacatacctgtttatcaggttattgaaggatgatttaaaagagtatacatatgcagcacgcctctcaggtttgagctatggcattgcatcaggaatgaatgcaatacttgtaagtaaaatgaaaaccaaagaaaaggcaccaccccgtttaagcattatgttgagcttgggaaaactattaacttcgcatttttaaacaagaaagttaatggtttttttccttgcatctttttgatgatcaaagaactcaaattagtgttagttccactaatgaatgatttaataaagtttagtgcatcttgtgaacatgtatgtgtgctacgtttatttgcatgctcttctgcctgagatgtttaacatattaatcctgaaagcatattgttctttctatataattgagtatattaacatccgtaagtagaagatatccatagttgttgtggtgattgaattttacttataaataggcaccctttatttctgcagacagtagtataaagtttctatgttcagatacatctgacattttaatttaaaacttattttgtagcatgcaccattacctactttatgtgtgttttaaaataagcatttattaaatccatctaagaaataactagatcctttctttggaatgtgtttccaagcttgcttatatctcaattccgagttaacatcccttttatggcacacattcatcttcacttttcttgaaaatatattgcatattttagtaaaaatgaaaacaagagcattttggggtactcgttgtttaaattcttacacaaaagattgtaggaattttaaattttatttattttccagtgacttttttttcttcacataaataaattctctggtagcttttgtttaatgtataagaatgtttattaatctaaccattcccagagtccacagaagtttgaagctcagagatcaaaattagctccaaatagaaaagtaatcatctgttttctcttttttctgttgatttttagtagcata

SEQ ID NO: 62061 - DNA, 1031 bp, Homo sapiens
gtctgtcttcctagaggtaaccactgttctgtttcttgtacattttaattgaaattttcatgtgtgtgtctatatcctttccatcttttcagaaataagattatattatgtgtagttagctatggtttttaaaaccctgtgatccatatttaagcatatagtatctggttacaaaataacgtatttttaaaattaacacatgaaccagaatttaggtatcccagttgaatcctattctcttttaaaagttagtttagggtcttctccacttcaccagcacagctgctgtggatacagctgtttttgttgttctctttttttaggagacagagtcttcctctgtcacccaaggctggagtgcagttactgcagcctcaaattcttgggctcaagtgatcctcccacctcagcctcctgagtagctgggactacaggcgtatgccaccttgccaggctggatgtagcattttaggacactccttggaattattttctgagcctgagccatagtgctttgagacccaaaacttggattttctggcttttcacttccacctgagaaaggtgcatagttgcctgtggggccgacctctgtgatatcctctcttttgttttgatgattttgtttttgtgaattgtgccttaagtttttgagctgctatttgccaaaagaaggaaatctgtcatcatgtatcataccttaaaaaatttaatggcagaacatttattcagattttccagttggagaatatttggatagctgtagaactttgtctttgattttaattctctaagtgactacacattttatccctatttttgcttttttatcagctttgataaaattgttggcttttggctgggtgcgatagctcacacctgtaatcctaacattttgggaagccgaggcaggaagatcgcttgagcctaggagttcgagaccagcctggacaacacagtgagaccttgactcaactttaaaaaacaaaatgttgactttgttatcagtacattagttatatttactgtgc

SEQ ID NO: 62062 - DNA, 1065 bp, Homo sapiens
ccagcagtgacttagttgggtagttctggctcagggcttgtcgtgaggttatagtcaagctgttggccaaggtttcagtcatctgaaggttcagccagggctggagaattctcttccaagttcagttatgtggttgttggccagccttaatttttcaccacatggacctctctgtagagttgcttgacatggcagcaggcttcccccaaagtgagtgatccaggagggaaagtgagtgatcaggatgcaagccgcggtgtcttttataatgcagtctcagaggtataccattaattctgtcatattttgttagtaaggcagaccaaccctggtgtagtgtgggaggggaccacccaaggctgtgaatctcagcaggcaaggattgttgtgggccaccctggaagctggctgccatacgcttgcaagggacttctgcctctgccttcctcctagtgtccagaaagacgaagacaggacagttggtattggcttctctgatctgtctcttccttcactgtacccccatctccctaatacaggggaaatagaaggcagatttcactctgctacaggagtctgcagtctttgtctccagcttcctacctgctgactcttgagtatgcttcaaggcccatgggacagcaactccagaacaaaactctaactattgcttctgtcctcctcctcttgaagagtgatttgattgaacatttttgctgaatgcgcctctatttccctaaccaaattgtttctccatcacaggatacagctatgagcaaactttggttcaaacaagatgataagttttttttgccgaaggcttgtctcaactttgaatttttcaggtatgtaagatgaatctagcttataaagcttataaaaatcaacaattacgtttccaggagttgtctgttcttcttaaacatccatgtctagaaataaaaggaattagagttatttcacctagaaaaggagaggctgaaaaaaataaataaataaaagtaaagaaaaggagaggttggccgggcacggtggctcacgcctgtaatcccagcactttgggag

SEQ ID NO: 62063 - DNA, 1079 bp, Homo sapiens
ttgtatttttagtagagacagggtttcaccatgttggccaggatggtcttgatctcttgaccttgtgatccgcctgcctcagcctcccaaagtgctgggattacagctgtgagccaccacacccggctgggaattttttaagaacacatctatctgggaactcagtagtgaaattacttactaagtgtttcctagtccctagtattcagctgttctggaaacctaagataccacttaagaaatatggccaacgtccccagtgccgaaagtcacaaatgcaggaactaagaaccgtaaaatctgcaaggctgtgccacaccagctagagatcaaattactgaatccagaaatccagaattattgacaattggtttttttttttaaatagacagggccttgctctgttgtccaggctggttgctttttactcctggccagttgctttttttttttttttttttttttaaataatgaaaagccttataaattaggttcaacaatcagtggcctgtgatctgtcccacttagcttttggaactagaacaggaaacagatccagtctactacaggttgtgtgaatcccaacctaaatctcaactttgttttttctttttttttttttagacagagtctcgtactgttgcctgggctggagtgcaatggcgccatcttggctcactgcaacctctgccttccaggttcacatgattctcctgcctcagcctcccaagtagctgagattacaggtgcacaccaccatacccggctaattttttgtatttttaatagatatgaggtttcacaatgttggccagactggtctcgaactcctgacctcgtgatctgcacatcttggcctcccaaagtgctgggattacaggcgtgagccaccgcgcctggcctcaactttgttcttaaccttgtgcttgaactactggttcacttaaaagttcacatgatcatctgggagaggtgtgggccagttcttaagaagtactgaaagccgagcgtggtggctgatgtctgtaatcctagcactttaggaggctgaggtgggcagattgaggggagtttgacac

SEQ ID NO: 62064 - DNA, 1076 bp, Homo sapiens
gcccagcacattcttggatattgtttatattgtcctgagtcaggttctttaaattcatatatacagtatgagtttacagggtttttttgtttgttttttctatctctagggttgccatagtttctaaatcttttgaaggaaaaactgatcgcacagaagagtggtatggaacccagtacaaacaagaagctataccggatgaagtcatcaaggtagggttaactcatctatgaataagcctgacatgtgaggaatcacaagaacattgctccctagatccaccaactaaggccccagagtgtggaagactgatgacctagtgttatctgtaccatcctaagagaaatcaacaagtagatagggagctggagtttagccttttcatgaagacatggtactctagccaccttctcatgtgtctatcaaaccaccagggttgtgcctcatgccataaaatgtaactaaagtgcagagtacatgggcacaggcaccagaaaggcaagaagcgatggaagtaggaagcatgagaaaccaatgcaagggctccaaagagctcacagtcttgctgtgaacacaggctgagagcaggctctaggattcataccatcttcacttcaggaggtgctatgttttatgcctcatgttatagcaccgttctttttgtcaacataggagaattatgattttcagaaaaggtatgttaaaacaatattttgtcccattcatcagtagtcaggattttgcttgtgaatgttacctacttatctagtactttttctttctttctcttttggttctcattggctatgtgcctttgagactgcgtcccttattcctgggaaaagaccagaaaactttactcaggctagattctagttaaactcaagtaatggacattttaaaaatgtacctgtgtaatgacatacaaaaaaaggaattagtttaagaaagaagatcatcactggtacttcacagatctctgacatattcatgatacagaagatcattgaagccctccagtgtgtgaaaatgtccatctctctaaactgagaggaaagctgatcttccatgaatta

SEQ ID NO: 62065 - DNA, 1055 bp, Homo sapiens
cggatcacctgaggtcaggagttcaagaccagcctggccaacatggtgaaaccctgtctctactaacaatacaaaaattagctgggcaaggtggtaggcacctgtaatcccagctacttgggaggctgaggccggagaattgcttgaacccaggaggcagaggttgcagtgagccaagatcgcaccattgcactccagcctgggtggcaagagcaaaactccaactcaaaaaaaaaaaacaaaaacaaaaattagccaggcgtggtggcgggtgcctgtaatcccagctacttgggaggctgaggcaggagagttcttgaacccgggaggcagaggttacagtggtagacattttttggtcttgtccctttctcccctagtagcaggaaggcctgtgtatttgtagtagacatatttgatgctagtctctggcagggaaaaaaacatagagcacaaatgtagcaagcaataataaaagtttcttgggtatgtgtgtcacgtttttaaaatctctggatgagccagcaggttttattagtcattcctgttaattctgcacctgagatactcctaggaaggagtactttttttgcctttttggtttttttttttttaaagagacaaggttttgatttgtcacccatgctagagtgcagtggtgtgattctagcctactgcagcctcaaactcctgggctcaagcaatcctcccacctcagttttccaagtagctggaactatagctgcgtgccaccccacctggttaattattacaattttttgtagagacgggtcccactattttgcccagattgctcttgaactcctgggctcaagtgagcatcctgcctcagcctcctaaagtgctgggatttcaggcataagccactacatccgcaacttctttgctttttttaggactgttttttaactgactgtttttaactgaccttgttacatttttttcccctagctactcttctttttaaattttagtcagtagcaacctagaggaatctctcctgcgagcactttttcatactaaaaataatggac

SEQ ID NO: 62066 - DNA, 1033 bp, Homo sapiens
tttcttatttagcatgttttctagaactggtagtggttagtgacagataggccagatcaggaacacctacagctggaagattagtcggtcatactgacaggtgagtcatcttgctttaggatatctaccgaaaagcagatgacaagaccaagtccagtcagccaggtagagtattttgtctagaatgaataaaaaatagacagtagttcagactactagcgttgaagttggggaggttcaacaaggggcaggtatttggaacagagattgggattctcaaaatgaatgagtatcatcagaggggagttttgattgcaagtactaggctttcagctgtgaggccaacattcagaggctagaatcaaacctctgggggtaggtgagaacaagcaggaacagatattatttgaattgggacctaattatttgaattgggaattgggacttaagggagaagtggaaccaatagcaggactgactttacaccaagttgcccaagctaattggctagaattccttgacccacaagattcaaaataggattggtcccagcctgtggttgagtccactggtgagggtgtagtgattccaacttcaatgattaaaaggcagtagaggcggagtgtccctgatagtgctacacagggatggcttagagttccacttgttcagaacttcttttgctcctctagtcttgtcattttttgttcacttatcttttgacatcactttacttctgccttccctccttgaacacttttttcttttctttttttttttgagacagagtcttgctctgtctcccaggctggagtgtagtggtgcagtctcggctcactgcatgctccgccttccgggttcacgccattctcctgcctcagcctcccaagtagctggtactataggcacccgccaccacacccggctaattttttgtatttttagtagagacgggatttcaccatgttagccaggatgatctcgatctcttgacctcgtgatcttcccgccttggcctcccaaagtgctggga

SEQ ID NO: 62067 - DNA, 1025 bp, Homo sapiens
gagatcttggatacatcatttttttctttcaatgtttattgaatcacttacgtgaaacctcagagttgacagtcctgaaagggggacttgtgaaaagttaactttatataatgtcatgaatactggctgtcatttaatttccttgaaccctgctcatctgcaaagtggggatagtgctttatctgtatgatgtaaaatgatttagcaaagtcaaaaagtgttgtacaaacacaaggtaatgctatattaaagttataccatataataaggatgtgctttttcatttttgtaagaaaaaaccatgatttaaattataattcttgctgctctagagccagtaattgacccagcaacacttcgtaggagtgcatttgctggagcatatgttttacttttgaaattgcatatttctaaatttgatatcttatgcaattaaatacctctttttactctcacatttaaagagaaagcacttttcctctacaggattggtctctgtgactgttaacagttgtaactgtagtaggtcagtgatacatggtgcaaaacagcctgggataatattgccagctgccagaccagactagggtggctcaagggtaagattaccttctttaatacccgctgagacaagtttaacattgcaaccaggtagggaaataaacaggaaactcttaagaatgaaaggaaccttagaggccatttaatccaactcctgttaggtatacacttggccctccatatccgcaggggattggttccaagacccccatggatatcaaaatccaaggtgctcaagtcccttatattaaatggtgtagtatggtactgtgtatctgttctgcagtatcccagctaagtagttaccagcttcagtttaacttcttccaaggatggggaactcattaaataccaaggtagccagtttcatttttgccagtcctaattgttagacaattattttgaattttgagacttgattacctgttcaaaggtgtttacctattattactcaatgatcattg

SEQ ID NO: 62068 - DNA, 1169 bp, Homo sapiens
tggttttgaggtttaaaaaatatattaagggtcaaaatttagaagtctttttcaatgaaaataacatgtgaaattatttagaaattaaatttctggtttgaggtacccagtaggttacaatgtttcctacgcagtttcttgccaatattttaagtccccatttattgcctaatccttaattactcaagaattgattatgatacagaaaatcttactgaaaaactagacaaagttactgacagctgtgaattcattagagattgctgagttgatcattctgcctttaacagcaaatgctctttttcaactctagataatttactgaggaattgaaaaacgaagaaatctttccttttccattcagtgaacaacagagaaagttgtagattaaatatttgtataacgtaatatgttaagttattcatgcctgacgtagtttagtgggggatggcgagatatagttcacataatttaaatggtttaaagtgatatatgcactgatacacataattgcatatgtagaaaatcctaaggaatctactttccccttcaaaaatctggaaccaataactgaattcagcacagtcacaggttgcaaggtcaacatacaaaaatcaactgcatatctatatatagcaacaaaaaaatagaaaattaaaagaagtatttataatagcaacaaaagcataatattactaggaatgagtttaaccaaagataagcaagacttctacataaaaaactaaaaacagtagaagagagcaaatattagccgagaaaaatgaaagaagacctaaataaatggagaagcatactatagtcatacattaggagacttgatattattaatatgttagttctctccaatctgattcatagactcaatgtaatcataaccaaaatcctggtaggctgtttttctttttctttttattcatttatttagagacagggtcttgcattgtcacccaggctggactgtagtggcgggatcatagctcactgcagccttgacctcttgggcttaagtgatctcctgcgtcagcttcctgagtagctgggattatgggtgcaagccactatacctgtttgtttattattatttttttttagatggagtttcattcttgtcacccaggctggaagtgcaatggtgcaatctcggctta

SEQ ID NO: 62069 - DNA, 1056 bp, Homo sapiens
tttttttccacagccgcttcctaaatgtttgtctaatttgtttcatagaaatttaggaggaaattctgttcataaaaatgtgtgtactttatattttaaaaatcctgtaggtgtcagcattttaatatcgaattttcttcattaacaagtactcagtttttaaccagaaacattcgtggttttccccgaaagaaatgtgattttgctctctacaatggaagtatgtttggggattaacagtatatttggcagaatcatcaaacaatatgaaactgcttaacaatgtggtaggaaagagacaacgatttagggctacagaaaatttttccaatggagtaaaatttaactgaagagagaaagggtgtacagtaatgaatttaatgtgttacagatctgctttaataaactatgtagtagctttgtatattttatttatttatattttcctttttaaaagtattatcccctagaagaggtgctcacagcggaatatttactggaagaatttagacctgacttaatagagatggttctcgataaactcagaccagaaaatgtccggtgagtcaccatacagattttactattatacactaaattttcaataatgattagaatctgaaaaaatttgaaattgtgaataaaatgcttttaaacattttatcaagcattacaaaagtagagaatagtataatgaagcaacaccaagcttcaaccattgatacatggccagtcttttttaatctatacccatccctcttcagtcatcccccttccaccctaaattattttgaggcaatatctctaaaagatgaggacatttttaaaaacaaatataattttattatcataaataaaatagaataataacctgtcttaacctggctttattctaactcaaacgcccaaagtatcagcccacctatctgactcatataagcaaatgaaggcaccctctttttcttaagccacagtaaagattacaatctcagaatcctcctgattgaccagtggttaacctggaaatcaaaagtccaaactcttatagtagcagag

SEQ ID NO: 62070 - DNA, 1050 bp, Homo sapiens
cgggataataaaatcaatctcacatttattaggatcatgaatcaccaaaaacatatcaatatgttctggtctttacatgctaaaagtagttttggtagctgtagtcttaatagactgttgaagctgttaacctgtacctgaagataagcattcaaaaccattaatatttagctgcatggttcagggggtcaaacatggactatataccgactgtaatgaaattccactaggagagtgctgagtcatttatttctttgtggtcagtgtatcattttctgtggcaattgatttgctcttaaatttgggattctcccatgaaaatcattcttcatagtttagaaatattttcttcagtaggagtcgtatatagctaatctctgtgatttgttttctccagcaactttacaaaatagtacccattaaagatattaggaatctctatgtgacatttcccatacctgaccttcagaaatactacaaatcaaatcctggtcattatcttggtcatctcattgggcatgaaggtcctggaagtctgttatcagaacttaagtcaaagggtaagtctcctgggcagcatcttctgagtgtccaccacatcttttcactctggctctcattttctcctgaatagtgtcctatgaaggaacattgttagatgtgaccattttgggttagtgagtgagatggtggttgttggcacgctgttgccttttttttttttttttcttttttagatagagatggggtttcgccattttgcctaggctagtctcaaactcctggtctcaagcgatccgcccatcttggcctcctaaagtgctgggattagaggcatgagccaccgcgcccagccagtagtctactcttgactgggaattgatttgaggaatcttcaggaaagcccccacttctgcaccatcttaaactgcttttctgaactgatttttttttcccaatcttttcgcaagaggttcattctgatatcttaggaacatacagtatgaatttttaaaatttttcttatcttcaaggaagccacatatgcaa

SEQ ID NO: 62071 - DNA, 1027 bp, Homo sapiens
ctgtaatcccagcactttgggaggctgaggcgggcggatcacgaggtcaggagatcgagaccagcctggctaacacagtgaaaccccatctctactaaaaatacaaaaaattagccaggtgtcgtggtgggcgcctgtagtcccagctacttgggaggctgaggcaggagaatggcgtgaacccgggaggcggagcttgcagtgagccgagatcacaccaccgcactccagcctgggcaacagagcaagactccgtctcaaaaaaaaaaaaaaaagacacttttaattccgtagagacgactatagtttaaaatgttgctggtttgtactctattatcctgtttattcacttaacattcaaataaatttgagttattctgtgtattagaactttatttttaaagttcatcttaagcaatatcagtgataattacaaaactttaaaagtccacatattttgctttttctaagaaatcccttttcttcccttccaggtaacaaatatactctggagactagaccaaaccaagaaggcattgatgtaagacaagagctactgaaattccattctgcttactattcatccaacttaatggctgtttgtgttttaggtcgaggtaagaacccttacaattttttatagaattggataatataagtttttaatgttggctttttcacagtgttagaagatggatataagatagagctgcttatttgctcagcatcttttgaaaatgatctacttgttagagaatacataggtggggatttttatgtttaaatcattgtgttcccaaaagaagtttaagtggagatctgaaaaaaaatacaaattactacagtaataggtgctctaagcatataaaagcaaggcaagcccagcctgggcaacatagtaagatcctgtctctaccaaaaaaaatttttttaaattagtgggatgtggtagtctgcacctgtagtcctagctgctagggaggctgaagatcgcttgagcccaggagttaaaggctgcagttaaagg

SEQ ID NO: 62072 - DNA, 1028 bp, Homo sapiens
aaacaagaacaacctggaaacttgggtgataggctacttctagtgagtatgaatgcatatgattactttgtgactaggaaaaggttaatgagttaaggttaaggttacttgctaggctgtttcttgcacattctgtcttcactggatctgttaagcattctgggacaggaatcttagtactgtgcagcactactgagctaaagactgagtttgagagcgccatctggtggctttctgtagacatccaatttcatgaaagagggactttcccagtgcccctatatcagatattataaaaacacaagaaaaaaaaattaaaccacttcaagaacatactctaccatagttttatctctgcagaagaaagacaggatctcacttagtagtgtaagtagaaccaataataaaagttattatgccaggatcttaggatatttccagtcaagatgccattttggagagacaccgatcattggaatttcatctcccagtccctaatttgcaaggtattatttagagaatttgactatttgtttttgacttacatattttaccctacttgaattagttattaagatttcatgagagctgttagtggtacactacatacatcgctggagagttataaaaatagcattgcatcctttttttaaccagtctagatcacatctatgagaattcacatcacaaatttaatggtttggcccaaaatagtaaatttctttccacaagtaacttggcaagttctaaaaaaatccctcagtgactctgttcaattaattatggagtacatagggaattgaaaattaaaataagcatgaatggaggccatgtggatcttattttgtcttttaagcactcataatacctactatctcatagggattttaagaagtggagatatagatacagatatagacatatttttttgagacagagtctcactctgttgcccaggagtgcagtggtacaatcttggctcaatgcaacctctgcctcctgggttcaagtgattctcatccctcagc

SEQ ID NO: 62073 - DNA, 1034 bp, Homo sapiens
gtctcaaaaataaataaataaataaataaaaagaaaattttacctcttaaaactgtgaatccagctctttcttcctctccggcatgtggggaaactaatgttcagagacactaagtaacctgcctgaggttaccaactaattagcgtcaagagcaggcactagaaaccagtcttctgactactgatttactttctaaataatatcattttaggtagcttgtgcttaactttctctgattatatagttggagttgtcatgctaacaagaactacaaatcacctgtacttactaactttcagcataggacaatgatttattatatacgtgttttctctttcaggttcattgtcggatcctccaaatattgctggcttaagtcatttttgtgaacatatgctttttttgggaacaaagaaataccctaaagaaaatgaatacagccagtttctcagtgagcatgcaggaagttcaaatgcctttactagtggagagcataccaattactattttgatgtttctcatgaacacctagaaggtgccctagacaggtaatgcagaataccctatgaattatccaactttgtgtacttatcacattaataataataattattatttccacagagatggcttcataatttaacaaaaggtattttaaacagtgtttttccctgtgttttctgaaaaagaaaaaatgagtgatgtcatattttaaatgagccttcaggcctacaaaatattttattgaggtatagaattttcagcagccctttccattctaactggtgttacatataaagcatgtgatgaggactaacctgtgataatgtcattgatctcttttcagacatacttctgttccagaatgctaaaccttaaatattctctcctcgttcatttccttgcttctcaaggatgcttagtagatacagaacgttttgacctgctgtttcaaccgtggggatattttgaaagtgttttctggagcaagctccattaggccgatttaatttcttggtcaaccgtggggata

SEQ ID NO: 62074 - DNA, 1039 bp, Homo sapiens
gcctcccgggttgaagcgattctcttgcctcagcctcccaggtagctgggactacaggtgcacgccaccacacccatctaatttttgtatttttagtagagacagggtttcaccatgttggccaggatgatcttgatctcctgaccttgtgatccgcccgtctcagcctcccaaagtgctgagattacaggcgcgagccaccgtgcctggctgaaaataattgttaataatggcttttcagtttcaagttgcttttgaattttccaacagtgacctactaacatagccccaatatgttagtattatattttatgctttgtttttcaagaaatgatttttactataaataggagaccattagcactatctgttgtaaagtactatgtgatttttaaaaccagtattatacatttagtgtgatatgttgatctttaaaattccgtatctcctctcctctaaagaagatctatcagcactgtaagagagggcgagagaaaaaaaaaaaagatctaggggatctaggggacagtcttagtagcaacaaacccctttgatttatcaattgttatgcagattggaagaatagttataggtgatttcagagaggaaaatataatggtgaaagcaaactagattttttttcctctctcaatctctagagattttaacacagaaaaaacttatctaaaataattgtatgcctatttcttccccctcttacttacgtttaaatctagctgtcagtctttaaggaacagtcagatctgtttagttttgtcttgtaggtaagaagcagatgtgctcatagagggttatttttcctctgtagttccagatatgtttttggctttacttaattatatactggcagtatattaacctgccagtagtagcagtttcagtttttttttttttttgtctattaagcaatctccagtatagacaaaagttacatctaccctactctcaaaaaacatgcgtaccccagactctggaaagtcccttcactgcactaattgcaaccaacatccctacatga

SEQ ID NO: 62075 - DNA, 3539 bp, Homo sapiens
ttaatcctgccatgtattatggttcttagctaagggattcctttggtagattagaagcattgcagactccccctactacctgtgttttatatgcagaagaaggagtgaaaaactgaaaactttccttggagcatttattttgacctagtttaatttttgtttcctggcttttgttatttgggattgtaagggaagaagaatggggctagggaaggactgtgagggtgataaacaggagctggagaataaaccagtgtatgatttccttcagcaccacctctgtccctccccttcccacgcttcctctttctctgtagttccagctttaccacaatcagcttgcccttgggcaagtcacttaaccacttatcttttcttttttttctttttggttatactttagtatgcaagcactgactgagcttttgtttctcatttggagttgaagaggatgactgcgaacagctgttacgacccaccacttaaggagaatggaaggattaaatgaacagtttataaagcctatgacactttaaaaaaatgagagtgattgttaggattagatttgtacaatggtattctatctttttttttttttttttgagatggtgtctcgctctgtcacccaggctggagtgcagtggcgcaatcttggctcactgcaacctccgcttcctgggttcaagtgattctcctgcctcagcctcccaagtagctgggattacaggcatgcgccatcatgcttggctaatttttgtattttcagtagagacagggtttcaccatgttggccaggctggtctcaaactcttgacctcaggtgatctgcccacctcggcctcccaaagtgttgggattacaggcgtgacccacggcacccggcctatatcttacatttcctaacagccctgaaaactccatgtggaagaaggatacttgtgaaacacccttggtacccaaactacaagaaactttctatagttacctctgtggcacaaggtctaaaacagaggttttattcacttgcttaaactttataacgtttctataaagtgttctgtgttaagcttgtcacttttggaatgaacaaccattgataggcatgcatcaaactaaaacaacatttgcaaaagcacttctctctagaatgatactactttagaatttctttaaattgcaaccaccctacttcatttaagggtttatttgttgatcataaactcctttccagagggccaggacatagagttacgatagctgatattctgcctggcacaaaggcaaaacatcaggggtgaataagtttaacaggattttattttgtacccaactttatgatctagctggtgtatgaagttaggtgtacctgttcctataactgaagagctttgggtaggtggttccctaagacatgttgttattttttagttcatgtattattaatagtacttggggtatatggtcttaagcattaatatgttgaggcatccttgggctcataccaccactatcttgtcaccctctgcttatttacctctaccttctgcaaggaactgggaatgttatgtggtgtggttttgattccatgccttttctctctgggctcctcctccacatgcatgagtgctataggccttgacttccacctatggttttgggagtgggtggatggattccacagaagggaggttttggtttgtaattcactattaacgtgatcactcacctgttcaggtttataggtcattatttctaaatcaggtctgactttaaatttgtgagagaccaatggaggtgagtaggaagcaaaaagcaaagtaaaatttcccaatctgctactatattgatcatgaaacactttaaagagagatgagaaagactgaaaggtcacctgaataaaagattctttgcagagtaaaatttactcttggtgtggaatttggaaatgaccttatatttggggatttgtttttgcaaacctgaaatttaggcctttacatgtcttagtccatgatcttgacctggagttcctgttgtagttcattagcaccacgcttcttgtttttccactgtattcctcatgctttttcctcattgtcaggcttcgctcacgaattcccttctactttgattgattgtccccttgccttttatttggtgtgcttctactccccctcctagacagggttactcccatagtgccccagggaaagttttgtcaccacacttaaaagataatgacctgggctgggtgtagtgtctcatgcctgtaatcccagcactttgggaggccaaggcggcagtctcttgcgcccaggagtttgaaagaccagcctggacaacatggcaaaaccccatctctacaaaaaaattacctagagactaggcacggtggcccatgcctgtagtcccagaactttgggaggccaaggcgggtggattgcttgaagccaggagttcgagaccagtctggccagcatggcgaaaccctgtctataaaacaaaacaaaaaattagctgggtacggtggtgagtgcctatagtcccagctactggggaggctgaggtgggaggatcacctgagcccgggatgttgaggctatagtgaaccaagattgtgcctgggtgacagagtgaaaccttgtctcaaaaagtagaaaaaaaagataatgacctgtttttatatctgacttcatcactagtctaggttccttcaaaacaagggctctggtgtactcatttttgtaaccatttgcatagtgtgatgcctggaccttaatagacttccttaagtgtttgtttggatgtggaggggaggctggacacaggactgggagttaagactgagtttgattataactttttgttgtatgatcttgggcaactgatttattaaactccttgaggttcagtttccttgtatgtaagatgaggggatctagcccacctggggatcttgttaaaatgcagattatggctcagtaggtctctggtgggttctgatattttgcatttttaacaagctcccaggagaagccagtgtagccagtccctgaactgcaaaggactagataacatctagtggctcttccagcttttatcttctgtgattatagtcattgttttaaattctgagcagaatgacaaaatatatgttgtaattactaaatatctctccagtttatcagagtgctgaaaagacagttctgtgccttatgaagtttccagtgtatgacaatgtccctagaattgaaagtaattttattgctcctaaaattttaactttaacaagttaaaaatataaatgtctgggaaagcatttgagttaacactagctcgtcatctaaattgtcagtatgcttgcttattggagaacatttgccataaataaaattactcttgaaggctttatgctaatgatctgaagtagatagacaggtgatcttatgagtataaatacagagacaggcaagctgttgatgaattcatcatcagaggaggaagagttcccagtcattgtcttcacttctccagaaggt

SEQ ID NO: 62076 - DNA, 1075 bp, Homo sapiens
tgtttggtataaatattgaaaattgttgaggggagaatttattcaaagtttaatcattttgcttttatctatgttatacttagctattagttactggaagtgtcaagttttatttttagatcttaactagagtctaaagtaattactaaaagctagttttcaaataatatgtaatgagtaaagtcctgagttaaaagatttagcatactgaattaacttagttgactgatgctgtacttacatgggcctcctatttcttgtggccaagatagcatcaacagaaataattgaaataattgtctcgagacacacctgagaaggtttaattatgttaattgtactactgttccttagtgagccttcttagtttagcacctctttggtatgggtagctgctttccagtattcaagtggtactatttccaggatgatttttggcggttgatatttgtaatatcagtaattcatgtatctcccccttccttttattttactgtgttttatgatattttgaaaagctctatttttaagaacttttaattgaaagatggcagtgttcaacttaatgcatttttacaaactgaacgtacctgtataaccagcacatgacctggaaccccaaagcccccttcattctcctttccaaatccaatcactactcccactcccaagggtaatgactatcctgggatgaaagcatagcttgattttacttgctcttctgctttgtataaatggaaggttacagtatttactcttttgtgtctagcctctttcactcaaccctatattagtgagattcatgtttattgtgctttgttctatattattcctttttattgctgtatactttccattgtgtgcatgtacaatttatcatttcactgttgattgtcatttgatcatttctggtttgggctagtttgaatagtgttgctatgaacatataaatgcatttatttgggttatttatctgttactagcattgttaggtcatagtgtgagctttagtgtatagtgccagtttttgaaaatggttgtacccataccaaattgcatgtctgtagcagtgtgt

SEQ ID NO: 62077 - DNA, 1007 bp, Homo sapiens
ggccaggctggtttctaactcctgacctcatgtgatccgcccgcctcagcctcccaaagtgctgggattacaggtgtggatcatataattctttcttgtgggagatatcccatacagtgtaggttgcttagtggcatccctggcctctactcactatgtgccattagcaccttcagttgtgacaataaaaaatgcctctagtcattgccatatgtcctcagcgagggttggtgagtgggaatagtcacccattgagaactacttactataaacactggctcatctatagcaattataaagggataattatttacctggtttcctaatagtcttataaagtataatcctattatcagcctacctaatgaatgtttttgacctccagagatgacaaataacatctggaattcacataagtatgtgttaagaatgctggtaataacatggtggttatggaggtggttcatttgcaccttagccactgcgaccataataatgatgatgattttataataatcaagttaccattcatggatgactactgtgtaccaggaactatgccttggtgaagtttatataaacatattttacaggagaaactctgtgaaaggttgtctgagtgtgatgcaactataggtgcccctgtcaatttaatgagccatgtatacatttcatctgactctttttttttttttttttttttttttttttgagatggagttttgctcttgttgcccaggttggagtgcagtggcacaatcttggttcaccgcaacctctgcctcctgggttcaagcgattctcctgctcagcctcccgagtagctgggattacaggagtctgacaccacgcctggctaattttggtgtttttagtagagatggagtttctcgacgttggtcaggctggtcttgaactcccgacctcaggtgatcggcctgccttggcctcccaaagtgctgggattacaggcatgagccatcgcgcctggcctcatctgactcttg

SEQ ID NO: 62078 - DNA, 1003 bp, Homo sapiens
gctttttaagacctttgcccatttagaaattttttgttgttttgttgcagattttaatatattctggatattaaccccttatcagatattttttcccactccacaggttgccttttcactgtgtcctttgcacagaaattttttattttaatataggtcagtttatttatttatttacttatttacttagtttttgagatggcccaggctgacgtgcaatggcgtgatctcagcttgctgcgacctccacttctcaggttcaagagattctcctgcctcagcctcccgagtagctgggattgcaggtatgcgccaccatgcccagctaattttgtatttttagtggagacggggtttctccatgttgttcaggctggtcttgaactcctgacctcaggtgatctgcctgcctcggcctcccaaagtgttgagatgaacttttaacttggtggagtgttaaacagcatggtcattttgtgtctaaagacttgggtttgaatcctagctcttctattttatacctatgtggttccaaccaaataacttttctgagctttaatttccccatccagtaaagaatgggactaataggatctatataaggggtttattgaatatattatatatatgtataatatataatagatttattccctaaacaagtatatgtgccacaagatactgactgagtattcagtaagcatctgttctgacatactggctttgcttctttctaagcttaaccccttcacttacgtactagattccttactctaggacaaggttcctgtaaagtttccttctctctttctctttcattatcagtttttctcctctctttatgtaaatcttttgtggcttagatgttgattgattgattgattgattgagagatatgtagatacatagatgggagtttaattatagaagcgttctgtactttaatgaggctgtctcttggatttaagtggatagaattggttgcattgattttcatccatta

SEQ ID NO: 62079 - DNA, 1037 bp, Homo sapiens
aaagaggttaacttgctcaaggatacacagctagtaagtggcttagcgagatatgaattcaactgggctcactcaagaacctcaggggttggccattatattgtcttcttcctagaggtagcacgatatctttagtagagatggggacgttaaaacagggagattttttagaaagaatatacatggtagttgatgatattgagtctgaagtgattactggatagccaaggggagatctgcaggaagcatttgaaatatgactggaacttggtaagaaggcctgagctgatttcctaaatctgaagatagagttgaagacacggacatggatggatataggaaaaataatctatgtttagatgcggtgggggagggggcagccttgacaatgctcacatttaggtataagaaggaaacatagttggagaggttgggagttagagaggtggaagatgatatcggaagtgaaatagtctgaagttctagccaaagagattttggggagaatagggtcttgagaaaagaacaaataccatttctttctttcttttcttttttttttttttttgagatggagtctcgctgtgttgcccaggctggagtgcagtggtgctcactgcaacctctgtctcctgagttcaagcaattctcattccttagcctcctgagtagctgcaattacaggtgcccaccaccatgcccagctaattttttctttttttttttttttttctgagacagagtctcgctctgtcacccaggctggagtgcagtggcgagatcttgacccactgcagcctccgcctcctgggttcaagcaattctgtttcatcctcctgagtagctggaattacaggcgcccgctaccacgccggctaatttttttatatttttagtagagatggggtttcaccatgttggccaggctggtctcaaactcctgacctcaggtgatcaacccacctcagcctcccaaagtgctgggattacaggcatgagccagcacacctggctactgttatttcttgatctcttaa

SEQ ID NO: 62080 - DNA, 1373 bp, Homo sapiens
gagtctttgaaggaaatattgaattggatgaacaaagaaggagagttgagaaaatattttattttttggagacaggatctcactgtcacccaggctggagtgcagtggcacgatcaaaactcactgcagccatgaactcctgggctcaagtgatcctctcacctcagcctcctgtagctaggactacagacttgtgccaccatgcctggctaatttttaaaattttgtagaggcaggatcttgctatgttgtccatactgatctctaactcctggcttcaagcaatcttcctgcctctgcctcccaaagtgctgtgattacaggcataagccaccacaaccagaagagaaaatattttagatagaaggaatggtattagcaaaggttcaaaagtagggaaattcacaatatcagcaaaggaaagtgaaattttgtcttattggatatagagaacctcagatgctttttgagcaattcagtgacatatgaaagctgtatttttggctaattaatctggctgttttttgtaagcactgtttgaaacgcaggcagagactgatgagggataaagaaggtagtacaaatgacaaggaaagaagagtgtctgcagaagacatgtgcaagaaggattcagcagagtttagttattgattgatgtagggacgatgtgggagtcagagaagcctgaggtcttgagcgtgagtgactttgagtctagaataggaggggccaccagggtagggaaaactcttgtcggggagacccagctctgggaagaagttcagctaggtgagatgtttgtcctgcctggcaggtggcaggttttccaaaggcataccaagagaacgaaccactgcttgggtacagcagtgggcacagtcttgtaggcacttttgggctggctgttaccctcaggtcccgtagggtagtggacaggactgagcggtccttaaatacccaagggaatgaaatctagtttgtagattggtagctcagggactagttcaattgaaagatcagaaccacattgatgaatactgacctactactggggtttcttatttgttttgcttaaggataggaaatggatccagagcctagaacaagtctgacctgtgctggggtctaagtggattcagctgtaacgctcttgctgctgctgacgatgttaaccataaaagatttagtagctaatatttattgaatgcttattgtatgttatgcttttttgggtggggggtagtcatcccctcaagcatttattctttgttacaaacaatccaattaaactcttttagttattttgaaatgtgcaattattattgattatagtcaccctgttgtgctatcaaatcctaggtcttttttttttt

SEQ ID NO: 62081 - DNA, 1218 bp, Homo sapiens
ctctgtcgcccaggctggagtgcagtgatgtgatctcagctcactgcagccttcatctcttgggttcaagtgatcctcccacctcagcctcctgagtagctgggactgcaggctcatgccaccaccccacaactaatttttgtatttttggtagagatggggttttgtcatgttgcccagggtggtctcaaactcctgggctgaagcaatccccctgcctcccaaagtgctggggttacaggcatgagccactgtgccaggcccagtatatgtttcataaacactggtttcctttctgtttttctgttggtattttatatctcctaaacatgtagccagaggatcaggctaccttttagccaggatgacaaggctagagcactttccctccacaggggtagatcctctatagatatgttaggttctggagccttctcatttggcttgtcttcagtctgttttcactgttctgttagtttagacattatttgaatgtctactctgtagtgatcacacactgtgtccagtactatgtaaatgcaaagataaccataaatcttgtcctcaaggagctttcagtaataaacagtaaactgctttacctctgaccttttactagacacctccacttttatgttttgttgtttctttcaattaattttgaaaaacaacttagtattttatcaccatactgattacttttttaaaaagtgggactcacaaaattattttattcttctcaaagaactgtttagtttctttttgcctattaaaagtgtaactttttttttttttgagactgagtcttgttctgttgcccaggctggagagtgacacgatcttggctcactgcaacttccacctcccgggttcaagtgattcttctgcctcagcctccagagtagctgggattacaggtgtgtgccaccacacacaactaatttttgtatttttagtagagctgggatttcaccatgatggccaggctggtcttgaactcctgacttcaggtgatctgcccaccttggcctcccaaagtgctcggattacaggcgtgagccactgcgctcggaataactttttaaagtaggactcacaatctgctttctgaagggaaggcatcacactctgcctgacacatagtaggtactcagtacatatttactgcataacttaattgattaatggtcttttttcaaaacaatttttttctgtaga

SEQ ID NO: 62082 - DNA, 1282 bp, Homo sapiens
ctatggtgaagccaacaaattgatggatttgttagtgtgagcagccgaaactttgcaatttctaataagttagagaagtctgggtaggaaactaatgacttggcagtactctttcttagagtacacatagtccctaaagcttctctgagaattttgataactttgaggaatgtgtgatctgtatgaatttcctatcacttagtcctgacaatgtgaatggtattcatttggtaacttaattttatacgtccaggcaagatactagtttaggggatgccaaaaataatagactaattggaaaagctttagccacatgagagcaattcactccacttgatgctcttggcctacctcagtataagttggttctaccttagttttgttgaagttttaataatactgtacattcatgttggttatatgcattgtgtaagttttagtatagttggcaaatgaaagcattaccagatactacctgggagttaagtttcctaggatcacagatttggtcttctgatcacttggaagtatacttagagtgggctgtgccaggggaagttgaggtatccttcttaaataagtagcaacttggtttatctagtgataagggggaaataatttcctgtttggcactttctccaaaatatatgatactcaatgggaaaaatgaactcaggtcaagattatgtctctccctttggcccagacatgtattgagtatataattgtcttattgatgctactctgtggactgtgatattagttttcccataattcctcttaggatgacatttattaggcaatgtagtttaacagatatttaagaacctactgtgtgctaagcatggtagttgttgctggggaaacagtaaactagacagtatttctttctgtagtgatctgaggtttagtgggtaacacattaaaaaaaaaagataagagaggtgatgtttagaaaaggtgtataaagggtgctgtaggaatatatagcagacatttaatgtggtcttggttggagcaggtgggggaggcacataggatagaaaggacttcctgaggaaataatcatttcaactaaatacctactcaggcatttccgtagaatgaggactcttgatccagtcggcagtgtagaccttctgtgtctattcactcatttaaaaatggggctaataatattaccaacctcacagtgttgtgtggacaaactgagtgagcacaatgcaaagcacttgaaacaataagtacctggcacatagtaagtactcaacttattagtcat

SEQ ID NO: 62083 - DNA, 1069 bp, Homo sapiens
tgaaaaataagtttggcatttttacaagttaaaacctgttagtggctgggcacagtgtctcacttctgtaatactagcaccttgggaagctgaggtgggataatcacttgagcccggaagtttgagaccagcctgtgcaacacagcaagaccccatctctaccatcaaaacaaaacaaatctattcgtatctgctctaagaagctgccagaattgtaatgtcttaacatatctttgaacatttaaaaaattatatttgtgaaacttgagacacttataattttactgtctgctttagcaatatcacttagtcctgatttaatctccatcaccaacaatgtggtcaaaatttcgcatttttcttgacaaatgtagttagtgaaaatgtcattgataacctgagaactaagagctcttgaatgactttgtgtatttctttttatagaccatttaatttggcagagcggaaagctagcgcccattcaatagtagaatgtgatcctgtacgaaaagaagttagtgtacgaactggaggattggctgacaagagctcaaggaaaacatacacttttgatatggtaacatatggtgcaatttctttattatccactaatgtaaaataattttaatatacatattttacctggaaaatggtgtatacttagaaatttcagttgtctctgaattgtcagatggcttctagtgggctgaattatgaattagttaacatacgaaaaacaaaattattaaaatgagtaattttgaggttgatttttttttttttaatttttttcgttaggtgtttggagcatctactaaacagattgatgtttaccgaagtgttgtttgtccaattctggatgaagttattatgggctataattgcactatctttgcgtaagtaaaagggtgttttttctgatttatgaaaaagcttaaatgcttgtgttttttgttgttgtttgtttgttttttgagacggagtttcactcttgttgcccaggctggagtgcaatggcgcgatctcggctcactgcagcctctgcctcctgggttcaagcaattctcct

SEQ ID NO: 62084 - DNA, 1148 bp, Homo sapiens
cagcctcctgagtagctgggactacaggtacataccaccaagtccggctaatttttgtatttttagtagagatggggtttcaccgtgttggccgggatggtcttgatctcctgaccttgtgatccacctgccttgacctcccaaagtgctgggattataggcgtgagccaccgtgcctggccgaacttggctttttaagtagataggttccattggtttctatgtaatgctcagggatgaagatggctaagaagtgtgacaggtttatggagggtgtgaagactactgtagaacagactgttgtaaatgacttctctaacattaggttagttgtttctttttttgttttgttttaacttgctttgccatacttatgtttaaatatattataaaggaggcccatgtattttaactgccacagtaaatggcattcttcctttatattagtccttattataatttcaggatcccttggctggtataattccacgtacccttcatcaaatttttgagaaacttactgataatggtactgaattttcagtcaaagtgtctctgttggagatctataatgaagagctttttgatcttcttaatccatcatctgatgtttctgagagactacagatgtttgatgatccccgtaacaaggtaattcagtctttgagaatgaaatgtctctgaattttaatgtgtgaggctttgagaagtcagagagagagagagagagagagagagagagagagagagtgtgtgtgtgtgtgtgtgtgtgtgtgtgtgtgtgtgtgttttaaccaatctaatggatgttcttttggtattttggtcagagaggagtgataattaaaggtttagaagaaattacagtacacaacaaggatgaagtctatcaaattttagaaaagggggcagcaaaaaggacaactgcagctactctgatgaatgcatactctaggtaagaaagccatagtctcttccctagccccattttcttttaagaagaattaggaacttggagaaagtcaaattggggtgggtcagggtatgtgggtcacgtacctagagtttgtgttataaggaggggtcattggtaattggcttgagatttatatggaaggaaccaatattggaagaatgttgaaaggaga

SEQ ID NO: 62085 - DNA, 1735 bp, Homo sapiens
tatctgcttatcagtttctctgagctacaaaattattgttaggattagaagtcttatttcttttctggcttgtagttgaaaatttctataaaatgccataacaattacagttgcaactctaaaaaagtttgcatttaaagaaagaagaaaaatataacataaaagtgattaagatcatggaattttggatgatttcaaaattttaattaaattttcacttaatggctttccaataaaatggaaattttattctgtggttgattataacttaatttcatgtagaattttgagaactgaactaaagactaggtaaaatttctttaggtacatttcactaaagtataaaatttctatttttccttttttcttgtatgtagacttgtataaaggtcactttttatgaaggtatgtgacaaagaggagaagctaattaattcagttttcccaaattagagctaacttcaatgcttatttgtattaattgcctaatctggattaggaatgggtagataatggtagaaaaacatgagatgaatagtattattattattattattatttttgagacagagcctctctctgtcccccaggctggagtgaagtgatgcgatctcggctcactgcaagctctgcctcccgggttcacgccattctcctgcctcagcctcctgagtagctgggactacaggtgcccaccaccacgcctggctaattttttgtatttttagtagagacggggtttcactgtgttagccaggttggtctcgatctcctgacctcgtgatccgtccacctcggcttcccaaagtgattacaggcgtgaggcaccatgcccggtggagatgaatattataattcagatctatagtttacatttatgtttttccttaggtcttcctccttttctgtaattttaaataatttaaataattttataaaaatgatacttggctgggcgcgatggctgacgcttgtaatcccagcactttcggaggccaaggtgggtggatcacttgaggtccggagttcaagaccagcctggccaacgtggtgaaaccccgtctctactaaaaatacaaaaattagcttggtgtggtggcgtgtgcctgtaatcccagatactcggtaggctgaggcaggagaactgcttgaacccaggaggcagaagtttcagtgagctgagatcatgccattgcactctagcctgggcaataagtctcaaataaataaataattaaaaaagatacttaattttttttttaagtaacatgaaagtacaaagaagaaaattgaaacttaccagattctctgtcaattgtcagtgatattaacaaacataataatgttcaccaaatgccattggatacagaaagaatgtctttggtcatctgtataattttttttccccctaagataaaaagcacagtatttgttttgttttttgtttttttgtttgcttgtttgtttttttgtgatttttttttttgagacagcgtctcactttgtcacccaggctggagtgcagtaactcaatcatggcttactgcagccttgacctcctgggctaaagtgatcctcccacctgagcctccagggtagctggaactgtaggagcgtgccaccacgcccagctaatttttaaatttttttgtagagatgatggtcccactatgttgcccaggctggtttcgaactcctgagttaaagtgaccctcctaccttggcctcccaaagt

SEQ ID NO: 62086 - DNA, 1050 bp, Homo sapiens
acaatacatatgaaagaaactacgattgatggagaagagcttgttaaaatcggaaagttgaacttggtaagcatccaccttaatactactgtttcactcttaaacaccttatagagcagcttgaaattttgtccttgagacaaaatttttgtggtcactgggtgattagctttgtagtgggagaagaaatttgttaattacagaaaaaattattttgctggcgatttaatacattatgtatcctgtgagaatgaaagtctttgaatccaaatccaatagactcactttttatttttatttttaaaattaaaggttgatcttgcaggaagtgaaaacattggccgttctggagctgttgataagagagctcgggaagctggaaatataaatcaatccctgttgactttgggaagggtcattactgcccttgtagaaagaacacctcatgttccttatcgagaatctaaactaactagaatcctccaggattctcttggagggcgtacaagaacatctataattgcaacaatttctcctgcatctctcaatcttgaggtaagccctttgaaaggaagctgcaagtgtagtagctgtaattcttatttggctattatatattttaaaagttcatttactaggatggacacagtgactcacacctgtaaacccagcactttggaagtccaaggtgggcggatcacttgagcttaggagtgcctgggcaacatgccgaaaccctgtctctaccaaaaatacaaaaaattagctgggtttggtggtgtacaactgtggtcccagctacttggggggctgaggtgggaggatcacttaagcctgggaggcagaagttgcattaagctgagatcatgcaactacactccagcctgggtggcagagggagaccccatctcaaaaaaaaaaaagtatgtgtataaaaaaaaagaaaagtatgtgtatacacacacacacacacacacacacacacacacacacacacacacatatagtagggaaaaaaagttcatttagtagcttcattttttttttttt

SEQ ID NO: 62087 - DNA, 1050 bp, Homo sapiens
aaggtccctctctgttggctggagtgcagtggcacattcactgtaacctcaacctcctggccttaagtgatcctcccaccttagactcccaagtaggtgggactataggcacatactactatgcccagctaatatttatttatttattgtagaaacaggatctccctatgttgccaaggctggtctcgaattcctgggctcaagtgaccctcatgccttggcctccaaagtgctggaattacaaatgtgagccatcattgagtttaagaatagtctaaaggaaattatcctaagggtcgagactctgaaaattgaagagaagggaaaaaaggattgaacaacttcctttttaaaggttgggcatagtggtcttaatgactagattttaaaattagatataactataaaatattacttgtaagttattatataacatattttagataacagaactacattattctcacaatatcttcagtaattgacctttcctttccatgacaggaaactctgagtacattggaatatgctcatagagcaaagaacatattgaataagcctgaagtgaatcagaaactcaccaaaaaagctcttattaaggtaactgtgaatttttgtagagtaatgtaatcttgtttgacaaatgtgaaaataagaaactgaagtgggagataatagttaaacaagatttgttaaattgcccatggaaggctttttatatagtgatttaaactaaatgtcttacatgttaacatatttttttctaatgctagtatgttgactttaccaactttatcaactgagttggtactcttagcaaaattttcatttatttacatttacaaaatttatttatttgcatttttgaggtataatttacatgccataacatccacctaatgtaagcatacaattcaatgatttatagtgcatttacagagttgtggagtataaccacgatctagttttagaaaatttgttatcactatccagtttccctttgctcctttacaatcatgtggccactgacctgctttctgtctacagatt

SEQ ID NO: 62088 - DNA, 1080 bp, Homo sapiens
gagctacaagatgagatttaggtggggacacagagccaaaccatattaaggggttacatcttcaagtggcttactgagtccttttgattaacctagtaggctttgcttagcttatttccttgtcttatttgacaagatgttccgtattcatcttgaatattttctgcctcagtcctggaatcagatgcttttataaggaatcctggttcattttagtgtgaattactcctaccaacctgggtactggaggttgtggtttttcttgggaagtccatatttctagaatgagtgtatttaaaaaggagctttgaaagactttatttctaaacaaattaatattgattaaaaagtatggttataactttttatcatacttctttaagttttaaaagacataaaaaggctaactttacattttatttgttgcatgtccttcccaaactgaatgaaaaaagtactaaactgacacctacaacattcctcttgtgtaggagtatacggaggagatagaacgtttaaaacgagatcttgctgcagcccgtgagaaaaatggagtgtatatttctgaagaaaattttaggtaagcccttggctatggagttaatttccaagaataagcatttctgataacaggctatttgaagtaaaacttatgtagcagtaagtaaaatctttatatccagtgccgataaatacttcattttgtgtgtgtgtgtgttttcttttgagacaaggtctcgcactgtcacccagactggagcacagtggcacaatcttggctcactacgtcctcagtctcctgggctcaagcgatcctcctgcctcagcctcccaagtagctgggattataggcatgagccaccacaccctgctaatttttgcatttttttgtagagacagggtttcaccatgctgcctaggcttctattttgttttgacattaacaagtagctatcaaacactttttaaaaatcttttactaacttttaatttttaaatcattaattcatgtgaagtttcaagaagagtacaagagaggtttcatgtattcttcacccagtcttcctcagtggttatctc

SEQ ID NO: 62089 - DNA, 1051 bp, Homo sapiens
cgcgcctggctgtagaagatccatttttaataaaaagctaatatatttcatcaaaagactattagaattaactcttctcttacagctcttttctagcttttcctttagtcaacaatatctctagctaatacgttaagggaatttgtattcacggaagaatctttgtcatttaagcataatgtgaaatagaaaattgttggttgttatcaaagaattagatgagcaaatacaggcattcatttctgaaactgactaatactcaagaaatcagagacccattaaagtgggtttggaagacctgtgagctttgcgcttgagaaaagcattctctattttactttttatgacttcttttgactttgacttcatcttctgatatttttgttgaatttagaaatttttagtttctaaaaactcttttctgccatccctgtctctccttttgaaaaatatagcatccttttattttatagatctattccttatctcagaaacattattaatgttattaaagttttcttttatgtttttctttcctttgggatcttttttttccctgttgtgatatctgtcatttgtatttattttcttcaaatgtctagtgatttttggctggcaattaagatggattagaagctttgtacatgggtgaggattatggacctgtaagttcactatagatgaaaaagtggtgatctcagtcttaagtctgggcttccatcagatatcattctttgttggattttttttcttttgttctagccctcagtcttttctgagaagatttgcccagtttgcttggagatttttctagctgctgctattttttgattagagtgggtatagggggctgaggattccatcattttgtatgtagatttacacttaaatgctcatttctagtccctaaaccttctacagtccatgatgtctagtgaaagtgaacctggaaattctgctgcaattcctatagactagtggctgtcaatggaagtggtgttgggggactggtggtggtgggtggttttgtcccccagaggacatttggcag

SEQ ID NO: 62090 - DNA, 1052 bp, Homo sapiens
gttatgcggtggggtgagagtggtgtttgtgcgtgttgcagcagcagggggtgtaattgctctgtatacatactttaagtctcagtttttaacccctaatcttaccccttccttctaagatacctgatgccttcaagtcccacatttttccagcattctgtggggcatatttatattctgtatccctgattatagacacttaggttgcattccctcctctctctactttgagttatagtccgtcctctgttagctttctagcttctcaaatctggaacacacatgcttttcccctcataggtagggattcttagtttcagaattgagggcaagggaaaaatatttcatttataaaacaaagacaaggaatataatttgttctttgtaatttgtatttattgcttattgacacaggtatcaagtgacacttgggtatcaagtgatggtgataaatgttggaaatgagtttgtgtagctgtcacaattgtgttagaatacattttataggagttagaaaaaaatattaactgttaaactcatattaaactttattttagagtcatgagtggaaaattaactgttcaagaagagcagattgtagaattgattgaaaaaattggtgctgttgaggaggagctgaatagggtaagcacttaaaatgatatttactgttatgtgaaaagcaaatattgaaagaaaattttagaatgaaagatctaatattttttccttcaagattttttttttttagacggagtctcgctctgtcacccaggctggagtgcaatagcgtgatctcggctcactgtaacctctgcctcccagggtcaagcgattctcctgcctcagcctcccgagtagctgggattacaggtgtgcaccaccatgcctggctaattttttttgtatttttagtagagacagggtttcaccatgctggccaggctggtcttgaactcctgacctcatgatctgcccatctcagcctcccaaaatgctgggatgacaggcgtgagccactgcacccagctccttcagatttttttggaaaa

SEQ ID NO: 62091 - DNA, 1041 bp, Homo sapiens
aagcagttttgttaacatgtttatcagatgaaggaatacagatattgggagagactggatgttaaataaaagtaatataactagggtaggcaagaggcctgacctttcagggccaccctcatattaatacctttatttatttatttttaattattttttagagacagggtcttgcttgatgcccaggctacagtgcagtggtgtaatcatatcttactgcagcctcaaacttctggtctcaagcaactctcctgcctcagcctcctgagtagctggacttcaggcatgcactaccatgcccggctaattattttatttttttgtagagatggagtcagtctcgctatgttgcccaggctggtctcaaactatggggctcaagtgatctcctgccttggcctcccagagtgctggggttacaggtgtgaaccaccttgccaggccacattaacactgttatattcaaatccattgacaatgttgaaggaaactgaagaattaatagtactacaccagacctattatttaatctcaaagtgttgagtaagattacagaaagaaacaggatgacatatttgtgttaacctaccgggtaacttcttacaacttttgcatggaaataatttgtttcatttttctaatcttatgaactagctagatatcctaccagccagctcagcgttttttaaattcttatatttaggttacagagttgtttatggataataaaaatgaacttgaccagtgtaaatctgacctgcaaaataaaacacaagaacttgaaaccactcaaaaacatttgcaagaaactaaattacaacttgttaaagaagaatatatcacatcagctttggaaagtactgaggagaaacttcatgatgctgccagcaaggtttgtcccttgtgttgatttgtactcatattaagtagagaatgggtagaaaaaattttctgtgcttaagcattaaatattctgtttattcaccccaaatggtatttctgtccatttaaaaaacattattttactatttcatccatgtt

SEQ ID NO: 62092 - DNA, 1029 bp, Homo sapiens
ttggacattcagaaatataaaaatttaaaaaatcatctagactctagtctcactaagccaagcactatactttttggtattgatttccagttttttttttcttctgtaaacttaccataattctgtatattatttttagttagagattaattgtagaatattctaattctttgtgtactatgaattatagttatgggtctgatacacttacaaatatgttaagggcttacagagcactatagaaaattgtaatgtatatttaaatatttccttgctttgtagtgagccagttcttttaagctcgttattacaaattctacaacaagggtatacttttgtcaacttctttgaaatggtttgaacggtatttaatatatttatgtcaaagtttacatctttctgtttttgtttgttataggtaatctgctgtcttccagtgtctctgcattagataccattactacagtagcacttggatctctcacatctattccagaaaatgtgtctactcatgtttctcagatttttaatatgatactaaaagaacaatcattagcagcagaaagtaaaactgtactacaggaattgattgttagtacatcctttaaaatatttttgaagggttgcatttgataagtatttgataaaatattttgaagggttacatttgataagtctttataaacaatgttaactgctattctttcttcctgagctttactagacacagtcatagacacgtcactgtgagagactacatatatatatattttgttttgttttgttttgtttgtttgttttgagatggagtctcgctctgtcgtccaggagtgcagtggcgtgatctcggctcactgcaagctctacctcccgggttcatgccattctcctgccttagcctcccgagtagctgggactacaggcgcccaccaccacacccggctaattttttgtatttttagtagagatggggtttcaccgtgttagccaggatggtcttgatctcctgaccttgtgatccacccgcct

SEQ ID NO: 62093 - DNA, 1090 bp, Homo sapiens
gaggctgaggcaggagaatcacttgaacccaggaggcagaggttgcagtgagccaagatgttgccactgtactccaacctgggtgacagaatgagactccgtctcaaaaaaaaaaaaaaaaaaaaagaatggagaatggaaatgtaaattttaatgtgaatgtttagctaccaaagtatttaagatatcatttagaaaggtttacagaagtggaaatattctttttaaagacctatttgtttatttctgaaaccagaatgtactcaagactgatcttctaagttcactggaaatgattttatccccaactgtggtgtctatactgaaaatcaatagtcaactaaagcatattttcaagacttcattgacagtggccgataaggtaacaaatgctatgttcttaatatctcaaaattgatgtgttgtttaagaaggaaactcatttttgtttcttcaaagatagaagatcaaaaaaaggaactagatggctttctcagtatactgtgtaacaatctacatgaactacaagaaaataccatttgttccttggttgagtcacaaaagcaatgtggaaacctaactgaagacctgaagacaataaagcagacccattcccaggtatgttgtttagcggacttggggagtacagaaagagagttttaggatgatttgatatgacttgataattaatctatgttacacaatctgaatactgtaaaagctgaaacctgaaaataccatagccactgttgcttataacagtaattattgtagaacaattgagaatacttctcttaatatttgaagttttgctacatctagaaccccatgcagaaccacaatatgacaaaacagtccttttctcacatcaagatgaaagatgaatctggaaaaacatacctttagagaagaatggttataacatttaaagtgaaaatgtatctacattaaaacctgctaagttgtttctaggatggcatggatagttgtctttcataaaccaagtcctactttctcttatttctgtctcactgatagacatttaaaacatagtaaatcgatacaacttttaattcttattgattataaa

SEQ ID NO: 62094 - DNA, 1234 bp, Homo sapiens
ttaaacataacatttgtaatgttcatgatttgttttacatactaggcaagggaaactgcttaataacagaataaatgactgattgtccaatttagggactagacaagaggctgtagtagatgccctgaagtaacattgcctagtaagaggaataaaacaagtagacagattttgaaagcatcataactggaggagggttgtgaaaggtttcatgagcaaagatgatcctttcaaaggtcatttaatggcaatgctgtgaaaagacagtggccaaggcatccattctcaatgcagaagatttactaagatcacgggccctggagccagactgtccacgttcagatctgccacttaagagctgagtgatcttgggaagttatatatcctttgagtcttaattccccatttcaacagtgtcattctcttttcctataggaaatctaaggatatagtcaacaaaatgacttttcacagtcaaaaattttgtgctgattctgatggcttctcacaggaactcagaaattttaaccaagaaggtacaaaattggttgaagaatctgtgaaacactctgataaactcaatggcaacctggaaaaaatatctcaagagactgaacagagatgtgaatctctgaacacaagaacagtttatttttctgaacagtgggtatcttccttaaatgaaagggaacaggaacttcacaacttattggaggtaataactttgtaagtggaacttactttggggagaataataatcagaaagttaaatattcttggctaagaatagatttcaaaacaaatgatattttaagctataatgacttaaacttttaagtataatatttggtatgcttacagatgatctcgttttgtgctttgttatatgtcttctcaatcttggaattaatttaacatttgtacagtttctttcctgtatttatccttggtttctgacttagtagtttcttcaaagaagggcaccctgtcttttgatatgtaataccttccacttatatatgctttttttttttttttttttgagatggagtctcactctgttgcccaggctggagtgcaatggcacgatctcagctcactgcaacctccgcctcccaagttcaagcgattctcctgcctcagcctctcgagtagttgggattataggcacctgccaccacacccggctaatttttttgtatttttagtagagatggggtttcactatattggc

SEQ ID NO: 62095 - DNA, 1032 bp, Homo sapiens
aggtgggcagattgcttgagcccaggagtttgagaccagcttgggcaacatggtgaaatgccatctcttcaaaaaatacaaaaattagccaggcatggtggtacatgcctgtagtcccagctacctgggaggctgaggtgggaggatggcttgagcctgggaggtcaaggctgtagtgagcactactcatgccactgcactccagcctgggcaacagagtgagacttgtctccaaaaaaaaaaaaaattatggaaaaggtaagggaaaatatgatgttgaataaaacactggcaactttaattttagtaataaatatttatttgcatcatttacaggttgtaagccaatgttgtgaggcttcaagttcagacatcactgagaaatcagatggacgtaaggcagctcatgagaaacagcataacatttttcttgatcagatgactattgatgaagataaattgatagcacaaaatctagaacttaatgaaaccataaaaattggtttgactaagcttaattgctttctggaacaggatctgaaactggatatcccaacaggtactttaaaagagaaatagaattgttaaattttttgaagtcgaattcaactctatgtagtgtcagatgttcagaaaaattaggtcctgccattgcctgacagaaatttaacatctcactgtaatcaactcaaaatgggaaaactggaaccttaaaatagttttaatcaagtgtcatgatacaggtggtatcacaattcagtataatttcacatactttcagggagttgactttgttaataggggattttttaaaacaaatacaaacctagcactgtttgtaaaaggacattttaataccacaaatatgggagagatgtaactgactaaatctagtttaatgcaaagtttaccacattgtgcattttgttctgtgtccctctcattttgtcatagactattgccatttaggaatccctgttttaagagatcagggatcaccatggaccattagcatttaggaatcaacatttt

SEQ ID NO: 62096 - DNA, 1595 bp, Homo sapiens
gaggatcgtttgagcccaggggttcaagaccagcctgggcaacatagtatatgtatataactagttaatatttaaccaccacaccacatttatagtgaaatgattactcctatcaaagtaatcatgttgggaaatctactcattccaataatgctgccatttttttcagaacactataactccttttagagcttataacacatcttttatatatcctcagagatggtaaacttcatgttttagagagtaggatgaatcttgaaaacagtaaagtctgtcatcaaattagaaagtattgttagttgcaaacaatgtctgacaggtagcaagactgatcctcatatatggcaattatatttttatatttttagaagacaagattaattaggaagttttaggtttttttaaaaatatttacatctcatactttaatttttacctcttatctaatgtccgttaaaggtacgacaccacagaggaaaagttatttatacccatcaacactggtaagaactgaaccacgtgaacatctccttgatcagctgaaaaggaaacagcctgagctgttaatgatgctaaactgttcagaaaacaacaaagaagagacaattccggtaaatttaaaggatcatattttataatagaactcttttatgaactcttgatgtggctgacttcatgtgaagaattttactgtttacccctcaatcttaccccgcctctcattaatgataggcctagcccttaggcttgtttcttttaatcttactagtttttaaattatgctagtagataataatagccaatacttaatattgtgcttagtaacattgttatataggaacctctactctctataaaaatatattaggaattattttcattaatttgtagactttctaataattttgttgaggtttaacttttatattataccatgggcattgtgttatactcaaagctgctgttactcttgtgatgacttttaagcccttggacttagtcactcatccagtttcttcttttaggatgtggatgtagaagaggcagttctggggcagtatactgaagaacctctaagtcaagagccatctgtagatgctggtgtggattgttcatcaattggcggggttccatttttccaggtatgtcatatcagataacccttccacatctgatgtaagtcattcatttactattcattataaaggtattgttcgtggtgagcagaacaacaaaaacctttcaattattccttaggatggcttgttaacgcttatgatttgaattatttacaaaaatctgatattgataaggggttttctgtagaataaatgaaggcagaatttgacttaatctacatccttagctgataatctttagctattgtatttattccttttctgcttgctatatactcagacactgagagcagtcatttctcttccttctacctttgacatgtaagtcttggaacctatctctgcccataatcagactttgaaggcaaagtgattgaaaagattgagagactggaggcctcttaggttatattagtgatttctcctgcctgaggctcttctcttgtaaactgt

SEQ ID NO: 62097 - DNA, 2459 bp, Homo sapiens
tatgtgaatactcactcaaagccagtagcactccctgattgtaacaccaaaaaagtctctcagcattgccaaatgtcccctgtggcagcagaatcactccctgatgagaaccactaccctggagtaaaatctataactatgtcttagaaaataacacagaaaattaatatttctttcactctactccttccattagtgatcaaataaagaaggcatttggcgctacttgccaaattgttggctcaaacttgtgctgaaccttttttggttttctacacttaagtttttttgcctataacccagagaactttgaaaatagagtgtagttaatgtgtatctaatgttactttgtattgacttaattttcccgccttaaatccacagcataaaaaatcacatggaaaagacaaagaaaacagaggcattaacacactggagaggtctaaagtggaagaaactacagagcacttggttacaaagagcagattacctctgcgagcccagatcaacctttaattcacttgggggttggcaattttatttttaaagaaaacttaaaaataaaacctgaaaccccagaacttgagccttgtgtatagattttaaaagaatatatatatcagccgggcgcggtggctcatgcctgtaatcccagcactttgggaggctgaggcgggtggattgcttgagcccaggagtttgagaccagcctggccaacgtggcaaaacctcgtctctgttaaaaattagccgggcgtggtggcacactcctgtaatcccagctactggggaggctgaggcacgagaatcacttgaacccaggaagcggggttgcagtgagccaaaggtacaccactacactccagcctgggcaacagagcaagactcggtctcaaaaacaaaatttaaaaaagatataaggcagtactgtaaattcagttgaattttgatatctacccatttttctgtcatccctatagttcactttgtattaaattgggtttcatttgggatttgcaatgtaaatacgtatttctagttttcatataaagtagttcttttataacaaatgaaaagtatttttcttgtatattattaagtaatgaatatataagaactgtactcttctcagcttgagcttacataggtaaatatcaccaacatctgtccttagaaaggaccatctcatgttttttttcttgctatgacttgtgtattttcttgcatcctccctagacttccctatttcgctttctcctcggctcactttctccctttttatttttcaccaaaccatttgtagagctacaaaaggtatcctttcttattttcagtagtcagaattttatctagaaatcttttaacacctttttagtggttatttctaaaatcactgtcaacaataaatctaaccctagttgtatccctcctttcagtatttttcacttgttgccccaaatgtgaaagcatttcattcctttaagaggcctaactcattcaccctgacagagttcacaaaaagcccacttaagagtatacattgctattatgggagaccacccagacatctgactaatggctctgtgcccacactccaagacctgtgccttttagagaagctcacaatgatttaaggactgtttgaaacttccaattatgtctataatttatattcttttgtttacatgatgaaactttttgttgttgcttgtttgtatataatacaatgtgtacatgtatctttttctcgattcaaatcttaacccttaggactctggtatttttgatctggcaaccatatttctggaagttgagatgtttcagcttgaagaaccaaaacagaaggaatatgtacaaagaataaattttctgctcacgatgagtttagtgtgtaaagtttagagacatctgactttgatagctaaattaaaccaaaccctattgaagaattgaatatatgctacttcaagaaactaaattgatctcgtagaattatcttaataaaataatggctataatttctctgcaaaatcagatgtcagcataagcgatggataatacctaataaactgccctcagtaaatccatggttaataaatgtggtttctacattaacctgcttgctccataatttcttatctggcaatgggtatatttagagggttaggcaagctgcattcacattcccaaaataaactatgcaggtaccaccaaagaagaaggagcctagtaaacttgcaggcttttagttgcactccaaggggctatcctaggtgcaaggttagtgagaagtaggccctcacacagcctgaagtccagctttaagtcatctcattccatgactgtttaagttatctgagaatgctgatgcaactaatttcactgcctcacagaagcaaaaataaatctccagataattttaacatccagaaccataaattagctctaccaattttcat

SEQ ID NO: 62098 - DNA, 1044 bp, Homo sapiens
gatggggggccctggccgaggggagcggggaggtggtttgcgctgagaactgttctcgaacccggggaacttcagaacctccttcagggcttgtggaaacccagccctgttcctggagttctgatctgttaggactggactgggctgggaccgggaatttgtatttccaacaagagctgaggtgacgccaaagctgcgggcccggacaccacccctggggaaccactgatgtgagcgcacggggtgcggaagaagcaggtgggaccggcactcctcctcccacctgctttcccgggtaactttggccagcaagaggctggggcggagggctgagaggagggaaaggcgagggggaacagaggaacgaggggcttatccaggctagtgggagtgaggtttgatggctgagcagagggcgcagggtggaggaaggggcaccatgaaatggagggagaatggggtgctgaggttaggtgggtgtgggggcccaggtttctgattgttcagggtattgctagtctgtgccagctgcttgcctagctgagccatcaggtctctgacattccaggaaaaccatgacagagatctgttggggagaggcctggaaatctctctctagccttggcctccatggaggaggcctctagttgtagagttgggtacttctggctaaggacctgtgaaggaatgacccgacccctggcctggcttctagggctgtggcgcccccagatatggacactcagatgaagacagtgaaaaagtcattgctgttagggagttgtcacatccggcttccttagattctaagaaggcccctggaattgcaggggaattaagatttctgagaaaagcagtactagtccttaagcagagaggtgtggatagacttggaagtttgaagatttgggttggtgttttagttcttggcctcaaatcatttgtagaacgaagatggtctagttgaaccatatgaaccccttccagctctcaaattcccaactcagttcatgccgtccttattgttctccctactccccatgt

SEQ ID NO: 62099 - DNA, 1061 bp, Homo sapiens
tgtccatttcagttttttaaaattgccattagaaacatttttttcatttgtctttttactgtagttatacttttattttttgctgtgcaaaagttttttattttatgaaataaaatttatcagtctttccctttttagcttgtgaattttgagtcataggaaagttttccagattccggagttataggggagtccacccatgttttcttttggtacttgtatggtgttttttaatgttgcatctgattctgtttgcattttcctggggtgtggcatgaggagtggctctttatcttttttcacgtggcaacccagctatcctagtacctcttattaaaatgtaggtctttttcatgttgatttgagatggtgccattatcatgtactgaatttttatacgcagtgatactgtatgtgggtttcttggttctgttcattgtctatatgtctattcatgtgctatgcagcacttttaattttggaagcttcgttgttttaatatctggtagggctacctgcatctcatcgcttatctttttcagggatttcctggtgactcttccttatttctctaaacaaacaataaatttctctagttctagaacactcaaagtatttgattgggattgagctataattataaattaattagggagaacaggcatgttgatgatattgagtcttcctatccaagaacatgttatgtctttcaagagagttaaacttttccataaataaattttagaattccttaagattatgtgtaggtgttttttctcactattttaattgggccctcccttccttcctccctcccttctttcctccctccctccctctttttttttttttttttgagacaggttcttgctagagaccaggctggagggcagtggcatgatcatgactcaccttgtagcctcaacctcctgggttcaagtgattctcccacctcagccttccgagtacctgggactaaaacctttagtattttctcattaggagagctctggcttttgtgctgagggatttatattttatcatgttaaggaaacattcat

SEQ ID NO: 62100 - DNA, 1066 bp, Homo sapiens
aataagtaaaatggagagtaagtaacaggaagtgaggtcagtgaggtaacaagaggcaaaattatgtagggtcttatgggctgttgtaagataaactgggttttgagcagaagagagacatgggctttgccttaggttttaatgggacaattcccattagctatcatctggctgctgtattgagaacagactgaaagggaacaaggatggaatcagggagaccagttaggaagcagttgacaaatctacgcaagacatgttgttggcttagtccagggtgataccaatggggaggtagtttgctggagaaggagaatagtcaagggtgagtccaaggttttttgcctgagcaactagaaaagtggggtttactgagatgaggaagactatgggaagggcaggttttgtgaaaggagatcaggaattcattttcggacatatttgaggtgcttatcagacatctaattggagagatatatgagtttgaggagaggtcagggcagagataaaaatttagcaggtgtcagtgtgcttatggaatttaaagctacaagtcaagatgacatggagatagaaaagagaatatgtccaagatcagagcctagttctaactcagctcttacagaacctacattttttaaaaaattaaaaaaattaaaatttatatttgacgtacattagaatgtaggcatagatgccaagaacctaaattcttttttttcttttttagacggagtttcactctgtcacccaggctggggtgcagtagtatgatctttgctcactgcaacctctgcctcccgggttcaagcgattctcctgcctcagcctcctgagtagctgagattacaggcacctgccacgacacccagctaatttttgtatttttagtagagacagtgtttcaccatgttggccaggctagtctcaaactcctgacctcaagtgatctgtccgcatcggctcccaaaatgctgggattacaggtgtgagccactgcacctggctgccaagagtctaaattcttaataattggtatcctatattgttacctcttgtattagag

SEQ ID NO: 62101 - DNA, 1058 bp, Homo sapiens
gggtttcactattttggccaggctggtttcaaacttctggcctcaaatgatctgcctgcctcggcctcccaaagtgctaggattacaggtgtgagccactgcacccgctatatgctatttttatgatgtaaatttagcttagactacaaattatattgttaaaactgttagcagattttattggctaaaaaaattgtagtattattattattattatttgagacagagtctcactctgttggccaggctggagtgcagtggctgaatcttggttcactgcaacctcagcctcccaagtagctgggattacaagcatgcgccaccatgcccggctaatttcagtatttttggtagaggtggggtttcaccatgttgggcaggctggtctcaagctcctggcctcaagtgatccatccaccccagcttcctaaagtgctgggattacaggtgtaagccactgcgcctggcctgttttttgacttgtgagaatagcttttctttttttttagaatcaatgaaattctactcagcttaatctctgatggaccaggtatatttacgtaaaaactttgagtaaataaaatgttggcttattatgttaagtttcagggttgagaaacctatttccttatagtcatgtttaataatacctctttgccaccgtcaggtgcattgtaatagccatgaagatgtcctctaagtttgaatgttttgtccctgtctgataataaaccttaaaaattgggtactgatggaatgagcaagagccaaattcagcttattcccctactgggctatgtaaaatagagaaataaagggaagtagaggtcagccgtttgttactgctactgtcttcgtttttaaggctaggccgcaactcttagttcatataagtattgtgttcctaatggccacctccagaactacctgctttcctctattcatctttctgtcctactatccacttataaatgtgtgtgtgaggcatcatggtaggtattggaactataaagttggaaatgacacaatctcagcttttgaaggatcctacaatctgt

SEQ ID NO: 62102 - DNA, 1155 bp, Homo sapiens
tgtatttctcaagtttgagaaactttatagtactacatttcatcaattgtaaggcatttttttttccacataacatttcagaatataggatacatcttaaagatgatggtgttatagttttaagtggtggtgttttttctttcttagcagtctgtaaaataatactgatagtgtctttaattcagtgcaataatgaccaatcatatgacatagctgcgtaagaacaggaactttgtctatagccaaatcatgaaatctgtgtatcatttttacccaaaacaataataaggtatctagttatccatagcagttttctgtaatctatcatacatattaaaaatatacaatttctctccttggttaccttaagttgaaaacagtccacagtgataataaacatactacaaagaataaactgctgaagaaatgccaaaacaaaataaagaaggttttgcgtttatagtgtatgctttctatgggggaattgaataaatgttgtaacacaaagttcatgaatcttcttgcctatctttaactttacattatctaatggtggtctaatagtttgacctataatttttttaaaaatggtttaattttcagatcttaactgttcaggatcttgttgatttttcccctgtttatcgatgtttgcacatttattctgttttggtaagtatgttttatatttatgtatatatagctttatattatttaaaaggcatgtatgtattttaggccctaaaaattgatcatatgctgtaaatcttcacataattctttgtgaaatatccactctgtgtaaggcacttacattttttgtttacttatcatagtgtaatttcaagtgatataccatttcatgtatattttaagaaccttgtaatagtatacttccatttctccctattgcctttgtgctgttgttacatcacagttcttataagttacttttacatgtgtattccatactacattgctcttatttttgatttaatgttcctttttaaaaataactgctttattgagatctagttcacatacgaaaaaacttacccttttagagtatacaattcggtggttttagcatattcacaaggatgtgcaaccattaccactacctaattccagaaatacccattacccacccctcca

SEQ ID NO: 62103 - DNA, 1067 bp, Homo sapiens
tggcatgcatctgtagtcccagctactcagaatgttgaagtgtgagaattgcttgggtccaggactttggggctacagtgagctataattgcaccactgtactccagcctgggtgacaaagtgagaccctggctcaaaaacaataataaaaataataaaacaacaaagttactatcccatgatggagtcggaatttaggaataattttgtttccttataccaagtcctctatgatttttctgtggttgttaattggataaatttaaattatgccatatatgaatattctactttatggaaaatgtcccttttgcaaagttaaattgaagtttgtgatttaataaatatgggtctttgtagtttatttaaagatataaaataatgatggggaaaattattttagtaaactgtgttaaattatttaggatgttaactaaccacattcattatttattaagtttaataatatcaatctttgtttttagctcaacagaaatagacgatatgcttagaaaatcaacaaatctgctgctgaccagaactttgagtagctgtttactgaaccttattagaaaacctcatataggtttgacagaggtaggttaaaaagacacatatagtgaaatgtttcattgtatgaaacaattattttaaattattgctgaacgtcattctgtaaaactagcttcctgttttaaatgtattaatataagcagatttgttttcaaaataaaaacaccagtgtaaattccagaaatgtgaggatcccaggcacagtggctcatacctctaatccgagagctttgggaggccaaggcaggaggattgtttgaggtcaggagtttgagaccagcctgggcaatatagtgagaccctgtttctacaaaaaatgaagactattagccaggcgtggtagtgtgcaactatattcctagctactctggacttgagcccaggaggttgaggctgcagtgagttacaatcataccactgcactacacagcctgggtgacagcaagaccctgtctctggaagaaaaaataaaaaaatgagggaaaagggttcat

SEQ ID NO: 62104 - DNA, 1044 bp, Homo sapiens
gatttaaatttggttttaataaaatacccagttttatatcaatctaaagttaaccaagtactttagctctgtaagtttggaggaggggagcttcttgaatctggcttttaaaagcttgttatgcatcttctcttcctgcctatattagaggcatcccaaaaaagcaaaagaaatcataaatagtggtctgagtgcagataggaaatgcagcgaaagataggagcaatcagactctcaattttctttgcctggcgatagaagggaagcaggttgagtatttatgagatgattgtacatagttctgaggtttagggttctcttatccagctgccttctggaattactgcctctcttcagttgtgtagtgaactatattcatctgcttagattcagtaaatgtagtgagacatgaatgagggaactgattatgaacactggggcaaaatgcaaaatggtaaatacatatttttatattgctttgagaaaattgacttacaaatgatgtcattaaggtgtgttatctttagttctgtaggtcataagcatttaccatcttaggtacctgcccctaatgttaatgaagttaaagagaaataggtgttactgccatgaattatacatgttaaatatgacacccctttccactggttagtgtttcacctttttttttttttttttttaaaggcaaggtcttgctctgtcacccaggctgcagtgcagtggtgcaatcgtagcttactgcagcctcaaactcctgagctcaagcgatcctcccacctcagcctcctgagtagctaggactataggcacaagccaccatgaccagctaaactttttattttttggtagagacagagtctcactatgttgcccaggcagttatttaactcctggcctcaagtgatcctcctgcctcagcctcccaaactgctgggattataggcataaaccactgtgcctgccatgttttacataaaaaaaattctgttaatgtttaatacccatttttttctcccttacgtaaaaataactacactaagttaa

SEQ ID NO: 62105 - DNA, 1008 bp, Homo sapiens
caaagcactggcagatattccatttcttctgtgatagtccaacttaattgctctcagtgaatcaggggttagatagaggtggtcttctgtgttcttggcaactttcgtttttctacttctgtttctcctaagggtcctcttagagttgtgagaacaagtcaggaattaatatctcataaagtattctatcacataaagacaaaaaaaggtgataggttagaaaggaactaagaaaagatgtgatgtgatatccagtcaaataaatagagtactgccagaaaaaaaaaaccaacagttttcctggactttgaataaatggctaaaatattaaaccaaaggtaaatgtaaaataatatctagaattgtaagaacacttgttttattatctgtttcttgtctttgttgttattttgtcccatgtcaggatgctcgacatgcagcagaaggagaaatatataccaaactgaatcaaaaaattgatgaatttgttcagcttgctgattatgactggacaatgtctgagccagatggaagagctagtggttatttaatggaccttataaattttttgagaagcatctttcaagtgtttactcatttgcctgtaagtataaaaattttcaaaaattgttttatgtttgcttactaaagtatattttagaatttagtttgaggtttccttgcttaaaccaacttcttggagtgcatgtttctttctccattattataaatccatttgtaaggaattataacttagccaaattgtttgaaattttaatttattttatttttaaccaaaataactgtaactctctttccaccaaagccaaggcaaaaccctgaaactgacaatatagacttaaatagaaataatctctaatagaaataatttacatagagttaacacaattgctcgtctccctctcccgtctccctctccccacggtctccctctccctctctttccacgtctccctctgatgccgagccgaagctgcactgtactgc

SEQ ID NO: 62106 - DNA, 1081 bp, Homo sapiens
gaaccttgtcaaagaactgatgtgttctaaatttgcttattcagtagacataagtgctaaagctcttggttttttaattctgactagacaacttgatgagagagacaaaagtttggaggaggatttgtctaattagtatggatgtaaaaactcatgcctaaatcttcaaaataaaaaattatggtcacatttatgtgatagatgaatgcctctaaattagcaacaaacacagaaagaacttgcttgttttagagtatattcccttttgctactttaaacactgattctgctgtgattagaatacattttccttttttatttgattgccttgctgacttccttctcagactaacaacaatgatcatgcagccatgtcggtaagtagatataaactaaagctagcatgtacattagaaaataatgaatttcctgcaggcttatttttctctgcttaggtatttaaattaaaggctaattactttggcaacatccttgataaatttttagttttgtggaaacctaaatttgaaggtaatattagttgtttgtgaagcagtcaagattctctgagactagattgtaaaagcactgcactcacctcaaatgcatcttaatattaaggtgcatttggaaacttctctgtggtctttcctcatctgtaaaatgaggtatgtggcaacatataccctacagatttttgtgagcttaaatgaaatagtatacctaaaatgtttagaaaagtgcttggcatataataaatactcaaaaaatattagttgttatcgttacttgtttcaaagatggtttatgcttttcctgaatgctttttctctactaccctgatcccaaactgcactcgtagaagtctaacccagtgcatgacccagtgtgattcatgacccagtgcaggtatttctttctcatcccagcccagtattggtcttctgaattgccttagctcttaccttttttacggctttatcgtattttgctttttttccgtatttgtctttttcacctttacttgtgagctcttgacagaataagaactaacaagtattctttgaatgtataaatattg

SEQ ID NO: 62107 - DNA, 1021 bp, Homo sapiens
gttgtagttatttctgtgggaatcaaagtggtatttctatgacatattttgatatccatttttatattatatccattgttatgagttaattccaggtatacaaaaatcaacatgaacaaaccattgacaatataatatatccctgtattggaaagagttaaaaaaactttgagacaaaatatttgaaaaatttggaaatagtcaaggtccactctttgaaatagaatttttttcttattaagctttttcttaatgttataaaacagttgattttcactactagatgttaattttttaaaatcttgcttcttagttgaaaatgaacatatttgtatttcgtaactttaatccttttagacatttactaagttgtctaagttagccaagttctggctaatcttggtgagaaatttaatttcataaattataagtcttaagtttgtatatagcatagcatacttaaatattttcctgatgtcaaacattgcagaaaacaatattttgaattgccctcggtcagggcttagttggaagtagtagtaatgaaagggcttttaaaaggaaacaacacgagagttttagtaggaagccagtggattaggaaagacctatataaaatgcaattgaagctgtagaccttaatgagagttacttcattcatgttaactaacagaagaaagcaaagccacgttgtgttaggaaggttgagactgtttttctgtgttttttttctattttaagttccagggtacatgtgcaggatgtgcaggtttgttatataagtaaacatgtgccatggtggtttattgcccctgtcaacccatcacctaggtattaagcccagcatgcattatctgtttatcccaatgctctccctcccccaaccccagggaggttgagactttgactgcactcagtctctgagtcattttttcccccatcataacccgtttcacagaacatgttattcaaatgtgtgcctcagcaaatgaagttctgcttgtactagactctgagagtc

SEQ ID NO: 62108 - DNA, 1038 bp, Homo sapiens
gtgtttccatctgatgaaatacctcattctttcagtatgtgtattttaaaatttaaatttaaaatttaaaagagctacaatttataacattttaaaatacacatactctttaggagagctacaatttataaccttttaaaatacacatactgaaatgaaattaaattcattaatttatgaatttattcattcattaatgaattaaaaatttaattcattaaaatacttcccttcttttgcttctgaaaaagactgtttcatattctcataactgaaatttatgtagcaaatgatgatagtgagtttgtataaaatgataatattttactgcgttaatttaggtaactttaaaaagccatacagaatcagaattaatgaagtcacttatcagtgttaggtttaatatccaaattgaccatgattttatttcgtttttccttttttctttgacaagagttagactttttaaacaaaaccttttatcaatgtaaagaataatatgttgtacaatatatttgagtctgtgtatttctttttacttaagtaaaaaagtagtttattgtacaaagttaaccttttgtgggaatataaataaagaaaaatggactctcctggaatcattaaggatgagtagaccaatacggaaagaatgtgatttcaagagcacattttaacattaaatgtacttgagagaatgaaagcagcattgtaaagtgctttcaaataattactgttgaaatcaaacctttttttaatagacctttgaaataagaaaatggtaagacacaaatgaaaacttcaaatgaaaatttaaatgggccaaattagtttttaagtgttctacatttctcttacaattatattagagtagatcatgaaaacattactttcaaaacaaaccagttttgagccataatctaataaactatgttgtgtttttaccttgttattttatgatatttcacaggaaacagagtgtctttagcctaatctatgatagtaaattattttggaaatttgtcttgacatacaagcaga

SEQ ID NO: 62109 - DNA, 1055 bp, Homo sapiens
acatggagctgatttgatggagaagcacattaaactaaaatgcactagttgttccattaggtcaaaatgacatttccattaagtattctgaagcctattacattgtaattaaatgacatgccattgatttctcctttctctgcttccccacttctcattcatattgatattattctgcttggggaatggagctgcatgtctcccagactaattcctcttgagtttgggggatcttggatcatgctgggttttgcattgtttgttacattcctttttggcagttcatcagtatctgtcaaatatattgtttgcatcggcttttatctcttaagttttcgattgagaaattgacattccgtttcacatatgcagtttttcactgtgcatagtgtctaaatgcaaaaaactcattcaaaaagttgtttgtttctagtctgacttttaatgtgtgatttaacaaatgttgtaataagcatcttgaaaatgtatttatgttctttattacctttttcacaaatcaaccctatgtaatatgtttttgtactaatatattgtaacatttctgtttgggagattttggtcacgattttgtagctttctggcctttgagataagtaggaaaaatataattatcaaatatgactgggtaaatatttgttaatgcaaacgaggcaaaacatggcatgtcttccaaaagtaattatttctgatgatattcatagatctttgaatcctatcatagtagtcattccatcatgaaatcacatgattgtcagttgaaggtagccatcctaggagcagtattatgcaggagaactttacctaaaagagtttttataatattttaaacctctagttgaaatgcaaaacctgtttaaaaaaataatttatctttgggaggccaaggcgggcggatcacaaggtcagatcgagaccatcctggctaacatggtgaaactctgtctctactgaaaacacaaaaaattagccaggcgtggtggtgggcacctgtagtcccagctacttgggaggctgaggcaggagaatggtgtgaa

SEQ ID NO: 62110 - DNA, 1048 bp, Homo sapiens
caaagggtattttgaattttagctgtaatttaaatagcaataatagtaaattatactgttaacttcctttattctgacttggttaattagctaaaggagagattaaggagcattaaatggataaaatgttctgtcagtatgacttattttatgtcataagtgtcattttaatatgcatttctaaagtgctttcagtatttcaagagatctgaaataatagtttttaactggtattttaattttcctttgtgcagttagagctttaatgatatttatatcctgagaaagccaagtaaactaagaatattaatgttaatttctatgatataaaggtataaccactcagaatacagaaacaggaaggaaagtaaccactattgtaccaagcataagcaacaaaaagaatgccaggtgtatgatttttctgattctttatgatgtatttctatgtgtgtttatttgtttgatttttggtttgattgttttaaacaggggaaagttgctcagacagcttgcatgtcagcctgccagcatctgtcaacatccttaatgcagatgctactggacagtgagttaaaacaaataagcatgggagctgttcagcagtttaacttagatgtcatacagtgtgaatgtaagtactatattggtttattcttatgtattactaggaatctatgcttaaattatatgaaaaaatgtatttagcaggatagttcagaaaggagggagaaggcctggttcagctaaacttttagcagccttaggagtagggctaacttcctgaaacaggaagataaaaatatctcagcttcacatttagggcctctagagagaggcactgaagtggcattccagattggtatatttaaaaacatgattcattttccccattattccttgtctggtcattcttgcctttttctaggactctcctaatgtttgtcataaatgaatgaaatgattctgtcattcttacttgccctgtaagtaactttttagatacttgctagaagaataagctcaggaccttgcattccaaatgaaa

SEQ ID NO: 62111 - DNA, 1087 bp, Homo sapiens
ggcggcatgcgcctgtagtcccagctactcgggaggctgagataggagaatcacttgaacctgggaggcagaggttgcaatgagccgagatggcgccactgcactccagcctgggtgacagaatgagactccgtctcaaaaaaaataaaaataaaaataaaaataattaaaaggcatgaacagacattcctgcatcatcctgatttttctacttagaacattttacttattgtctgcatgtaaagttgacttcttaccttggtgtctgccttttattgctattagctagaggtgggattttttaatagcacctattctttaccaaagcaaatgtttcaaaatatgttgacagccatggaattggtatcatttttaaatgcttctacaatcgttcacctaaggctaaaaagggtcagaaagctttacttgattgaagtacgttactgttaaattttagtaagaaaaccctcctaaatttattgtgattaggattacagtgattaaatggcagattagaaatttaaaattattaaaacacttgaggtaatggatgtggagaactttctcagtagtggaaattgaagtttataaataatcttcatttgaaatgattatgtgtaaatattataatgcatttataatgagtagaaattaatttatcagttaaactcttgtatattttgtgatctcatttttattctttttttttctttcttttaatagtgtttgccagctctgagcctgtgccaggattccagggggataccctgcagctagcattcattgacctcagacaagtaagatataataatgtacttcccatttgttgccctctaactcttgccctcccctcactttttttttttattaatgctacaggaatgcctgtttgccttgaaacaacctatcttaagaaaaatccttccttggtaactatgtatttggcacatctctttgaacctgtaatgcattcagtacctcaacttcatagagcattctcatcagtgaatattcaatttatttaatagtcattacctgctaagcacattactaaatcataactttgtagcttgctataatgacactt

SEQ ID NO: 62112 - DNA, 6611 bp, Homo sapiens
gagaagcaaaacataaactggttaggaatccttataagacaatgagttgccggctgggctgttatcccagcactttgggaggccgaggcggatggatcacaaggtcaggagatcaagatcatcttggctaacacggtgaaaccccatctctactaaaaatacaaaaaattagctgtgcgtggtggcacatgcctgtagtcccagctactggggaggctgaggcaggagaatcccttgaacatggcaggtggagtttgcagtgagccaagattgtgccattgcactccagcctgggcgacagagcgagactccgtctcaaaaaaaaaaaaagacaatgagtcgtgtggaaataattggtatatcttcaagtcaggtttagaaggagactgaaaaagccattcttatctccaaattatgtctgtaaagtatggtacatataaaatatattcatatgtacttttgtttgcagtcagtgctcagatattacgtcaaacaaggaacactgttataggtgacctagatctgtagatgattaaccttgctgagttgggaaagatagtagaaagtgaagaaggtggtctttattaggtcatttgactatttaaaaaactgtcttctctttatcaaagaataaaaaaaattttattttttgaaatctttaaattatcactggctaagtaaatgactattattttacagtcacctgtgatcctatatttatttgtttatttatttatgagacagagtctcactctgttgcccaggctggaatgcagtgtcatggtctcagctcactgcagctctgcctccagggttcaagcaattctcctgctttagcctcctgagtagctgggactacagacacgcaccaccatgcctggctcattttttttttttgtatttttagtagagacggggttttcccatgttcaccaggctggtctcgaactcccggcatcaagtgatccgcctgccttggcctcccagagtgctgggattacaggtataagccacagcgcccaaccacctgtgatcctattttaatcaagtgttttaaacctttgatatttgacatacttccccaaatttcagattctaaaattgtctttttgaactcaaacttttggatattccggaaagggcccctggaagctcaagagagacatattagggcttattcgatataagaaaatcatgtgagaaacattgtcaaataagaaatggtatttaacttgctttgaattatatttatacaaatattcatgtgttccaaaattatattggattcctgaaattctgatgtcttgatatatgttatcagtcataattattatgttattatatgtcacaaaaataacaaaattcccttgtcaattggtgtcttttaccatggctattttctttttttttttttgagatggcgtctcgctcttgtcaccaaagctggagtgcagtggcgcgatcttggctcactgcaaactccgcctcctgggttcaagcaattctcctgcctcagcctcccaagtagctgggactacaggcgtgtgccaccaagcccagctaattttttttgtatttttagtagaggtggggtttcgccgggttggccaggctggtctcaaactcctgacctcaggtgattcacttgccttggcctcccaaagtgttgggattacaggtgtgagccactgcactcagcctaaccatggctattctaagtcttttgtcatctacagaatattaattgtttttcttgattctcctcaaaaagcagtttacaattggctacagtccaaaatttgcttcttggcatacagagttatataatggactccagagactcaaaagggggagggtgggagaagggatgagagataaaaactacatattgggggctgggcacggtggctcacacctgtaatcccagcactttggaaggctgaggcgggtggatcatgaggtcaggagatagaaaccatcctggccaacacggtgaaaccctgtctcttctaaaatacaaaaaattaaccaggcatggtggcaggttcctgtaatcccagctacttggggggctgcggcaggggaatcgcttgaacctggggagatggaggttgcagtgagccaagatcatgccattgcaccccagcctggcgacagagcaagactctgtctcaaacaaacaaacactacatattgggtacaatgtatactacttggatgatgaatacactaaaatctcagacttcaccactatacgattcatccatgtaaccaaaaccacttatatttcaaaagctattgaaataaaataaaaggctgggcgtggtggctcatgcctgtaatcccagcactttgggaggctgaggtgggcggatcatgaggtcagaaggtcgagaccgtcctggctaacacagtgaaaccccgtctctactaaaaatgcaaaaattagctgggcgtggtggtgcacacctgtaatcccagttactcaggagtctgaggcaggggaatcacttgaacttgggaggcagaggttgcagtgagccgagattgtgccattgcactccagcttgggcaacaagagtgaaactctgtctcaaaaaaaaaaaaaaagaaataaaataaaaataaaaattttaaaaaagaaatacattctttatgcagaccatcacataaccatctttgacataaatcacacccccctatatgtaaagattaaataagacctcataaccaacagcaatgtacagaccatgtttacatcttaatttgaacaaaccagttataaaaaaaagggagggggcaggtttgagataatcagggaaatatggatattagatatttggtattaaattatttttaaaaggtataataatgacatggtgaatatgttttttaaatgccttactagaggcataataaaatattataggtaaaatgaaaaagtacacgtacataagttatacatgttttcaaaaaaacattagaatatacaaaaaagtagaaaaatttactcatagtctttctacccaaacacatcattattggcattctgttttatttcctgctggtctttttccattaatttttttcctcatccatgctcctacccttaccaaaatatgattgctggcatactgtcctcacaattccttctttgtatttcagatagtgtttgcctcttaaatcttaaaaaggaactttttttttttttaccagatatttcagagccataaaactcaaatataatgtgtgtaacttgttttgatcccaattcagacaaatcagtgggagaaagcagggaaatgtattctgtggtttgttttaaaatactttaaaaagaaaaattattgatagtagctgaatctgggaggtgaggatgatgggtttattgtgctatttactttcatatatgtttgaaatttttcataataaaaataaaaatattaaattaaaaaaataaaagaccctgacaaatgctcttacatacaggtgtctggtgactttggaaatcataccactggactaggtaaaaaaacttccaggactctaattaaaaagctgatacattcataaagattgctaacccaacatcaagcaaaacaagaattacatggaactgaactgatggtggactaaaataatttattattattttatttttaaatgttaatctatgtatttatttattgattgatttatttattttgagaccagattatgagactggctagtttttgtatttttggtaaagatggagtttcaccatgttgcccaggctaatcttgaactccagggctcaagcaatccacccgcctcggcctcccaaagtgctgggattacaggcgtgagccaccacacttggcccaaaatgattttttgttgactttttatttaaaacattgctgattctttctatgttttgttttccagagccaagaaaattttttcttctaagctattcataacttacagcaattagttaaaatatacttatgaacaaaatcaaaacatttacttttctctctagatgatttctccagaatttagaaactatccataaatattctagttttatgacaatctaattatttacataagttccataagaatcttttcttttgtaacaggacacattgaaaacactggttattttaccaaggatttgactaaaatgtcatgttttcatatatgaccagactgctttgagggattgaggttgactttataaagccaataaagtttaaaaacaaaaaaacaaaaaagagactggccctgtaccctatccacacagttcccttataaggttcctgaccttgggataagtaaaaaatgtcactttctggcaggcctgagaacctcaagatacttcaaggacctcgaaaagtgaaaatttcacccagttcataccgatattagaggcacagtctgatggcaaatgctcagcttgctttcctacccttgaggcttttaaaagtctaatccaaaattccttattaaaagttccagtgaagtccgtttttaaaaagtccatatggtgaatcactattcttgctgcactatacaaataatcaggccaaatatggtaagactaaaatttattttacaaataaattggtcctagtataatttgtatttgatttttttaaaagggggactagaaaaaatacatattaaaggaaaaaccatagtatacatgtattagattctagccttgtccattatttttgagtttttattatttgcctgcaatttagaacaaatcctaaattcttttttagctacaagtctccaaactaatgttttcacatttttctcacttaaaatcactaaaaattaaaactgcttttcttaaagccctaaagctagaacttaatataaacttcaacaaaaatcaccagagcaacttacatattaacagcctttatgcctacagatatatggactgtgcaaaaagtttgcttgaatacctgattcaaaccataataataataataataataaatgtgtcagattgccactgcaacctgaagatgcttcagagactccaataattagcttatagactactccagacatggaccattgtttttcttctgtttctgtagagatgcctcttattaaaaatatgtttgcctaccttacatatagaggcctagcttcgagggcccatctgcaatgctgtcttctaaaataagacacagctgtttaattggactggcctattccccaaaataagagactgatttgatgagatcttttgccattgagttactaacttgatttgtcttttcacagccactaactcagcttttaatatgtgaaacttctagggaagttttagacagggaaatgttggggctcagaaaccagtactctaaaatacagtgctttgacatgctgaacggaagaagcagcactgaggtctctctggcctctttcccacccccgcccactgccccaccatctctcaatactttgtctctcccaaagtacaggataaagttgttctctaaaattccctcatctgcttgaagtttggacctgtcaaggaagaaaacggttacctctggttccttcccttgtattagctaaactcatgcaagaagaaagactgaagtctgtcaacacacctgggcagacttttgtcacataggctcaacagactttgtcccagaccattgtatgttcttcattcccattaagttcccctagaaatcattcactaccctcctaaaatcatccacactttccccatctccctttcccataagaaaaaagatacagggtcaggcatggtggctcacacctgtaatcccagcacttgggaggctgaggtaggaggatcacttgaagccgggtgtcaagaccagtctgggcaacatagcaagaccctacctctaaaacaaaacaaaacaaaccaaacaaaaacatgtaaccatctataccccattgcatagtggaaaaatcactctgcgattctctctcatgcatgctaataaatgtatatggcatttctcctattaatttgccttttgttagttgatgtttcagttaaacttccaagggtgagggagttttcgctttatccctacaactctcaacttcattccggtttaccagaagagattctttctgttgacagtagatccatttcctttagaaggagttccctctgttgcagtgctatttccctgaacaaggtgatgtactattgaaaacaggattctttagcaagttgaaaacaggattgattgtatattcatttcccagttagtttaaggtcacttagtggggtaagtttcctactggtgtaagttgcaaggacgtaaacatattctccaatccaaaggacagctttaagaggagatgatttgagaataattctcattgtatatgaataatctgtttatagaaagtttgaaatttctcatgtgatattttctcagttgtatatgaatttttatggtggtaattcgtttatgtgatgttaactagtttataatctcattgtaggattgtgagtaggaccacatagtttatgaaactgttcataaggattctgttctttgatttttccggatagatagatggttggtttaatggagattaaa

SEQ ID NO: 62113 - DNA, 1023 bp, Homo sapiens
cctcaaggccttacatgatttggctctgataatcctcctaatttcatttgcccctcttcctcttgcacactacattatagccatactattaccctttctctttcctaacagcaccttaggactttgctcttgctcttccctctgccaggaatgctatttccctatatttcccaatttcactcagttatgtgctcaaatgccaccgccttaaagagggtttccctgatcaccaaatctgaagtggcccacctcacctccagtcactatcacattaacctgttttatttttctcataccatctaaaagctatttgaaattccatctaaaactatttaaattagcactctttgttgtggatctccctccaacaaagggggactgtgagaggagggatcctgcctatcttgttcaccactgtcttctgcacttaaaacagtgcccaaagcaggtgctcaaacatttgtcgagtaaatgaagaaacatctgaaaatacggcagctcttggtgatctggcttaatctggacagctttcagttttgctggagtagtggtgtgtagctatctatttttaggtcacatatgctgcctttgagatgaaaacattagactttcttctcagaaaaatgcacatacaaaattctgcttgaacctcctaaaaccaacccatggttctcaagttggaacccctgacgtaaaggcatgtaatgacctttgtgcaatgcaatctacgttgttgtttgctgttgtttttgtgaccctcgctctgttgcccaggatggagtgcagtggtgcaatcatagctcactgcagccttgactcccaggctcaagcaatcctcctgactcagcctcctgactagctgggactacaggtgtgcaccacaatacctggctgattttttgcctcagcctcccaaactgctggaattacaggcatgagccaccacacccagtctgcaatctatgttacaacaaattcctgtctgtggagacgaaggctaaggggggaaaaaatcaatagaaa

SEQ ID NO: 62114 - DNA, 1116 bp, Homo sapiens
attggataaacaaggtgtagtacatccatacaatatattattatttgtcaataaaaaggaatgaagtaataatgcatgctacaacgtgatgaaccttgaaaatattatgcttaagtgaaagaagccagttacaaaagaccaggtaggtctttttgttttgtttgttttgttttgtgttgttttgttttaaatagaggcagggtcttgctctgctgcccatcctggagtacagttcattgctcactgcagcctccaccttctggactcaagctagcctcccacctcagcctcccaagtagctagcactacaggtgtgcaccaccacagccagctaatttttaattgtatgtcgaaacagggtctcaccgtgttgcccaggctggtctcaaactcctagtctcaagccttggcctctcaaagtgctaggattacaggggtgaaccaccatggtaggccagaagaccacatgttatttgattcccatttggggagtgattgctaatggctatggggtttctttcaggggctctaaaattgattgagatggttgcacaattctgtgaatagagtcaaaaccattgatttgtgccctttaaatgagttaactgtatggtacatctcaaagctgttaaaaaaaaaaattttaaagttatataacaagaaatagaggtttaattatattaaagttataaaaacaaaaatagacaaaaatggtaggatagctacccaagaagagagctggtataaagtaaggtaaattctcatatgtgatagctgtaaaataataaactcaaaattagaaaaataagcctattagggatagtgagataatcactagaactaaaagaggagttaaaggccagacgcagtggctcacacctgtaatcccagcattttgggaggccgaggtgggtggatcacttgaggccaggagtttgagaccagcctgggcaacatggtgaaaccccgtctctacaaaaaacacaaaaattagccgggcgtggtggtatgtgcctgtagtcccagctgcttgggaggctgaggcacaagaattgcttgaacctgaggccaggtgcggtggctcacgcctgtaatcccagcactttgggaggccaa

SEQ ID NO: 62115 - DNA, 1102 bp, Homo sapiens
ggggcgcgcgtgcggctgcgcgcccggggccgctgggggcagcgaggggcccccgcccgactgcggctgcgagcccgacctcagcctcgcggcgctgggccgtctgcgctacgtcgactgcgtggtcaaggaggtgctgcgcctcctgccgccagtgtccgggggctaccgcaccgccctgcgcaccttcgagctcgacgtaagtgcgccgtgccagcccatggccagcctcctgcctcctgccgcctgccgcctgccgcctgccgcctgccgcggcggcgcccaggtgggaggagggcggagggattcggacggcgcggtcacctcttttgccctcagagcctcagccttccgtcctataaaatgggctgagccttgttccacctccccggatcccccgctgagggacgcaaagcctggcgagactgcaaggttagggatctcgtacccttcagcttttggcagcggttcggaacggtcaattcaatgagagcggagttttagaataaaaatactcttctatccgtgcagcaccccctcccagccagtgagtgtggatggagaacaaagagaacccctcagtatgtcctgtgctccacccctctggctccctcacaagatgaaggaacccctcattgcgaccggtccagggttctggctggggccagattccaggggagggggggattaaaataccgggtagacgcttcatctctgatcaggccggtttgggctgagcaaggttgaggtctagaactgactccatctccgtatgaccttgggcagttccctcttcactctgggcctcagtttactctctgcaaggaagctgtcttggtcctttccagctctgacactccatccaggtgggtccgggctgtgggggtacagtggtggcctcaggcagtggtgctctggctgtgccaaactgtgggtgtttgcctgaaaggctgtcgttgcagtcccctgagcaccatgcttggtggctgggtggctccagataaaaatgggcattccacagtgaacatttgtggcacattgcgtgccagggttcaggaggcatcaaagggactgggattctaccctggaggggctccacttg

SEQ ID NO: 62116 - DNA, 1073 bp, Homo sapiens
caggctggtcttgaactcctgacctcaagtgatctgcccacctcagcctcccaaagtgctaggattacagccgtgagccactttgcccagccagcatcctgtgttctaagcacctattgtctttacccaaagccaaatgacctctctgctcagggcagctcagaactaaaaggaaaacatttcacatccaagggccttgagttgagtgaaaattgtgtctgtagatatttcattactttgagtttaaagaactctgtttatgctcatatctttgagaaagaaaacaggagatgctgtgcagtggacggctatttcttcggccattttccttcctaactggaaagactttaaatgtccaccaggctccctttctctaactcaccatttacctgttcaaaatcactgtgtgcctctctcctgataagaacgttctgttcacttgtgaacaacagctgatccacttgaagctcatttggacttactgttgtttccttggctaggtttcctagaacttgacttgcgtcacacgatcattcctgcaaaatcaccagagaaatgcagattggacatgattccggacctcaaagccatgaacccccttaaagccaagacagcctccctctttgagcagaagtccatgaaaggatggtggccatgctacgcagagaaagatggcgcccgcgtaatggctgtatgaacatttcctggttctggttgaaaatcgtttatgccttttatcatttaggttttgccctttatccatagacttactccagataaaatgaggaagttttaaattggtgggagtttaagttatgggaacagtttgtctttgggatatgtttgcctttgtcttacaatataaggtgggagatgctgtgagcatgtgtttggagttggaggaaggtgaagaagttggaatggtcaaaaagtagaagcccaggtggtttcactatattttcctttcttcttcatcagggaagttaattaatgctaggcttctagtacaatttcgtatggaaaagggaacttcacatttgaatttttctcattaaaaaaaaaaggtagggctg

SEQ ID NO: 62117 - DNA, 1032 bp, Homo sapiens
ctagcaaaaaggaaaactactgcagttgattggtattaataccactactaatagtaggacttaatattttcaagtgactttgcaatctctgtggttctttgaggcagagtaacagatgtggacttcgcaatcagactgacctgggaatcctacttagttctgtcagttctgggctatgtgaccttgtgcaagttaatatattctctctgaacctcagtttcctcttccacaaaatggagatagttacgcagttgttgggaagaataaaataatgcatgtaaagtacctggttcatagaagatgataactgtgtgttaaaggtacctccattcccactctgcccctgctaaaccataatcttttctgtctgcgtgtcgaccatgtgaagggcgcacatatcattaatcttattttacagatgcgagatgaggctcagagagtttttccagccaggcctgcctcctaccatgaatctctatctatctgtggggtccaggcatcaatatttttaaaacgtccccagtcgattctaatgtgattctaatgtgcagtttcgagaaaaccatgcgctctctattgctttgacagtgtaaaatcgaatgttaccccctggtttcaaactagaagtcttcccagtagcaacaacttctttctgggcacactcattcattcattcattccttcagtaggtatttatctagtgtctactatgtgccaggcacaagcagaagaaaacttctcaaacgttaaaagttaagatgttactgaaatgaatgctcatagatatgcatgtggaaataagagctgacatcttccttgccggtatcattaatattatcatagtgaatttaagaataatttataaaaaggaagctgtaagattacttgatttgtgcttctttggtttgcttaagtaaaatatgggaaaggaaatgctaaaattttgagctaactcatattcatttaacctatcagcagtgctgaaagacactgatgagttatagttgtgaggactaaagtcatagccagcag

SEQ ID NO: 62118 - DNA, 1032 bp, Homo sapiens
tattcctctttgataccctgaataactagccttagaaacacaagtaaagctcccaaaatttcattttctacatattttattaccagcagcccatgtctatggaaaagaggaaatgttcgcagatttcaaaggaagtaatttattctcccaacctgcactgagtgccagcatccaacatgtcaagtgtcattgttgttcaatattctcttacttgcctaattcaattaaatcgtctctgtggatggctatgccttgatcatatgcctcgatcatagatgttgcgtgcagtacagcatagcgactacattctggtgctttccctactgtctgggcaaggtagttagctcgctgttcctcatctgtaaaatggtgataatgattattcttccttcccagggatattcaggtgatccagttatccaaagcatttaggacagtgcctggcacatagtattgttgctattccacgtggactgagtttgattccttgatacatgaaagataagacttgcgacatttaatatattcataaagtgagaacaaagtttcacctataatcccatgtggccttcaatcaaaactttgttaaagatataattagtatcatttaggttcactataaacagggaatgtttcatcaagttcttcattattatttttggatctcattaccattctctagggaaactaatctcagctaattatatatatgcaaatttatttgactatcataagcattatttttttttttttcaaatcagggaaacaaactcaagtaattctgaacggagagaaaactcctctaatcagagaataaagctcaacttaaagtaccttgcaaaatttggaataaaaatctaaatacgacatgtgaaaagatgaatcgtgcataaataccatgcctagtgctagacacagctgggtattatattacataccaagctatacatatacatacatgcacacaaatacgtatacctataggagctgtttgacttgtcttaaagtatgaaaagatttatgtttaaaatt

SEQ ID NO: 62119 - DNA, 1187 bp, Homo sapiens
cacactttaagaaatattaatctaggccgggtgcggtggcttatgcctataatcccaacactttgggaggtcgaggcaggtggatcacgaagtcaggagttcgagaccagcctggccaagatggtgaaaccctgtctctactaaaaatacaaaaattagctgggcgcggtggtgggtgcctgtaaccccagctactcgggaggctgaggcaggagaatcacttgaaccagggaggtggaggttgcagtgagtcgtgatcccaccactgcactctagcctgggtgacagagccagactctgtctcacaaaaaaaaagaaaaaaagaaatattaatctaatggatgcaaatattgttgaccctgacagcaaaactatggacacgctgattgcaaaagggttggcctgggctttctaggttgttttgtcacttccttcttgcttttattttgttctacatttccatttcttccttttcttactcttcctttcaccaaagaacttattcctccttctttctctcctctcaccccttagccatatgaggagtttcaagaaatgacagagtgaggaagatttctccccgggaatccacaaacccccatcacttctgcctccagcattagccacagactgtggctgggtttggggagacactggacgcctaatattctgtagagtgcttgatgaattgtagagccctgagccctagagattagttgcaggagagtcaggatcatagtaaaatacatccttttcaagagctccacttaatgtattttgatcacaatgcattaggaagccaatctagtggtttccttggcaactttcttgaagatcagtttgtttttgtctgaagacagagtctacagaacactcaaaaacagtttgaagaatataaattggtttgtacggttgatatagttttttcgtggcattcctgacctgtctggaagaacattcgagtcagatggatgggccaagtctgtgtcagtcaaagagctgagcaggacctcaccaagatggagcacaaatgtcagtctaggctttcacctccccttcctgctagccacttacctggtggtgggcactaatgaaccaatggccaggaatccttaccttttgggaactgtaatattatcattgtttgagctcctcttttgaaaatgccatgttgtttttcttttaca

SEQ ID NO: 62120 - DNA, 1029 bp, Homo sapiens
ctacccaggagggatttatgggccaggtccggaggagatacacatgtcacttctacccatgttaccctctggctgaacttggtcacatggcctcctctaactgcaagggaggctgagaaacaggcaggccatgagctcgtgccacagaagtaaatatataacgctcccacttacccgttctggtgtcctggcccctttactattggcagtccacaagttaggcttgagcctggttgggacagggctcctggtcagaagctctttctgtcaactcttccttcacaagtcaaagtttgcatgttggcactgcctgtccattttggcaaagtctgggatgaagtgctggaagcagctctaggcaatctggctgaactattcccaaatactcattcctgcttcaatgctgctttccattgcagaagccaacaaaatcctgcaccagcacctcggggcccctgaagagcggcttgctcttcacatcctcaggactcaggggctggtccctgagcacgtggaaacaaggactttgcacagcaccttccagcccaacatttcccaggtaaagggccttccctcccttgaagaccattatccctgccccaaatgcaatggcagtagttgacatttttgcgccttttatcttctttgaatactttgagatgcacagaaatagaaatgagactcaaattagcgtcatatcaaaagggaatttttttgtaagaattttcaggtaactctctaaatctagataggagattggccatgactcagaacaaaccagaaccagggtctctctgtgtctcatctgtttctctgagtctatttcatctgccctcttgctgtgatcaccttcctatgagtccagatattacagagagtccttgagtgcttgtgtgttgtaatgcagccccatctacttctaaatgcatagggatttgttgcccaaacttggctcctttgcccaccatgggaccactgagctccagcgaggtgggcagggtctgggaaagtgattgagctcggcccggt

SEQ ID NO: 62121 - DNA, 1034 bp, Homo sapiens
gacatgtattgacacaattgttttttgagcactttctgtataggcactggactaattgtctaaaaacagtaatgaacatataatcccctagaaaatgtctaaaaccatattatgtttggggaaacgtgatggattgttggtttattttctacattcaggagttgtcctctctattctgtaagtcccatccaagaataaactctaccatccaccctatggctgttaaacttgaacttggagtagaatgttcaccactgtatttctctaagtatcttagattaagaaagtatttgtcttgcagcctcccttctgtctgccccaccatgccgggacatcgttatcgaaatggaagacaccaaaccattactggcttctaaggtaggcttcagagctgatcagtggatgctgtcagttttatcttctatgcttagatgtctaagcatttggtgaattcagtcaaacaacagtttgttgcaattataatcatcagccaatccatttattgaggactgagtacagacaagagtctaaatcttgcactcatcaacagttatgatgacattgtgtagactagtagtcttcaaccctcactaataagtcacccagaatacttaaaataaaacccatgcccaggccccacctcccaagagggagagggacctagatatcagtatgtttttaaatctcctcaaatgattttaatatgctggcaggtctgagaaccacaggtgtggacagtctgagaaagatcatttgctagaaagcgaagtctgagaagcaaatttatagcattgcaacattcagatcagagataacatgcaacacgccagattcttccccctacataaagcagaattgtttgataaatttctaatgaccatatttatcagtgtatgggacacccaggtttttttattttcactgtggttttgaagtgaagaaattggttgaaataatcactcaaggccctattttagaactagctattccagccacttctacacgaaggaaagggggcaaaaagcctcagccca

SEQ ID NO: 62122 - DNA, 1004 bp, Homo sapiens
aggcaggtggatcacttgaagtcaggagttcgaggccaacccggtcaacatggtggaaccctgcctctactaaaaatacaaaaattagctaggcatggtggcacacacctgtaatcccagctacttgggaagctgagacatgaaaatcacttgaactcagggggtggaggttgcagtgagcctagttcgtgccactgtaccccagcctgggtgacagagtgagactctgtctcaaaaaagaaaaaaaaaaagtttacaggtggtcatcaatataaccctatgacagataatacgatcagtcttgtttgtagatgagacatagggaggtgagttaccttgtcagcattgacacagctattagatggcacagccaggatttgattcctatactcttaactgcattgcttttttaggggctcaggcaggagaaagaaaggggcaaaaccactttctttggatgacctacaagcttactaggataatgttcaaattaatcttaaagactttgccagtaattaagacagaatttttccttttgaatattatttttaaagtgctgagttaccttcccctctctttaaatcgttttcatagattctagcttggggcttaagaaatatgaaaaacttccagatggcttctatcacatcccccagtcttgttgtggagtgtggaggagaaagggtggaatcggtggtgatcaaaaaccttaagaagacacccaactttccaagttctgttctcttcatgaaagtggtacagtatcgattctctgtgatcacccatgcgcgttgaaatatgaaagtatgtgcctcacacacacacacacaaacacagagtttatttccaaaacctgacaaatagaaaaaccctgccttatattcagcttgtcagtgactttttccccttaaattctcccactgtagtgatgatttcttaaagcttcaaaataactccagtggcacagaaatatctgtgagcaatacttacttatttctccagta

SEQ ID NO: 62123 - DNA, 1260 bp, Homo sapiens
tcaacgtttaggaagattattttttccctcaaagttatgcagcaggggtgaagtgtgggtgttgaccccaggtgtatctgactgcagagcctcactcaaccatgagtgcagtacttttgcagagaaaaactatgggccccattaaccttggtggggacatactctaaagagtgacctctcagtacacatcagggtctcgcttcaggtgcctctgctgcagtgccagaaccttccatggggaactccctgctccctagaaaccctatctccaggcaggtggtcagagcccactgtcattatatccagaggaaaagaatatggttgcactgagtggttctggggagttagattttagccgtggccccgttgttattctctttttctgttttagatccatatgctcatatctgtttcctccatcggagcaaaaccactgagatcatccattcaaccctgaatcccacgtgggaccaaacaattatattcgatgaagttgaaatctatggggaaccccaaacagttctacagaatccacccaaagttatcatggaactttttgacaatgaccaagtggtaggtcgtttagaatttctaagataacttggggatgatggagatttgaagggatgattgtcggggaatttaaggatcactttgtttctctagggcaaagatgaatttttaggacgaagcattttctctcctgtggtgaaactgaactcagaaatggacatcacacccaaacttctctggcacccagtaatgaatggagacaaagcctgcggggatgttcttgtaactgcagagctgattctgaggggcaaggtacattgctgtgttcttcctcatgtattctgtcagctgcttaaaatgcatgttaattctaggcactgtttgcttgaactaaagtgaggcattgacatatccatgtttgtttcacaggatggctccaaccttcccattcttccccctcaaagggcgccaaatctatacatggtcccccaggggatcaggcctgtggtccagctcactgccattgaggtatgctgctccccacgtgttactcatcaaatcaaacggatgtgactgcaggacaggaatcttttgtatagaacatagaatcctgctgcatattttcttgctatctccaacttcctttacaacttgtccaaaaactggaggtattcatgggagtagaaggcttgttgaagcaacaaggacaggtcaattctaacattcctgagggcatctaaactcctc

SEQ ID NO: 62124 - DNA, 1038 bp, Homo sapiens
agattttaaatcaaacttctgccatgaaaatgtcagctgcatgaaagcaaagaccctatctcttcttcactgtgtcctcagcccctaacacgatccctgtcacacagtgggcactcatatttgtcgaatgaagagaatataacattgaaaactgataccactggtaaatcaatagttcttaagctaaaaagtaccacacgaatttgttattagttattacagaaataacatattctgatcacttaattatcagttatggcagctattagctcaggcaagacatttaaacctgggagggggcatttaatttttttcctacatatgtaaaatggagatactaatgttttacaaactatatcacaatagcaacatttttatgaaataatgaagtgaggaaacagaaagcaatttgagaaagaatccacttgcttcacccacccccaaatctgaatgaggtgcacctcctgagggtatgtccacgactgtgctgtcattgcctggttatctctctgcactcctgcagtccatcagctctgcaaggcagaggtcctgtctgtttttttcttttctgtattcctgactctagctcagtacttggcacagagtagattttgaatactgtgtatctgttgattgatcatataacctgttttatcaaaataaggaatatcatcatcatcatcgtcatcattaacatgtttacttctgttttaggccatggaggaattgcaagaccaagagggctgggaatatgcttctctaattggctggaaatttcactggaaacaacgtagttcagataccttccgccgcagacgctggaggagaaaaatggctccttcagaaacacatggtgcagctgccatctttaaacttgaaggtgcccttgtaagtactaggttgccagagcgcagatcatattggtgtagagaaaatatatgagtgttggatacagcactgccaactccatagaggtccctgtaaccctggtactataagatggcaaatattaacaggttgagggaaagccacacatcc

SEQ ID NO: 62125 - DNA, 1024 bp, Homo sapiens
tgtacctactataattcatttaatcccctctttctgggcatttaggtgcttttggttttgagtcgttggtttttataagcaatgtaacagtgaacatccttaaacatacatttttgtatgtttatgaacgtttatctgtagggaagatccttgcatttggttggtctaggtttaaatgcatataaaattttgataaaattttataaccttcaaaaaggttttataaattcatattttcaacaaaattacaagaagcccatttgcctaaatattcatcatcccgctttataatctttgccacatgaataagtggtatcctgttatttcaattttcactctcttaatttaaagtaaagctgagtattttttcatgtttatgggccgcctttatttcctttacttaggaactttcttttcataactctcttcatttttatgcaaacttaagtcaatattttagataaattttgctaattgtatataattaacattatgaacctccagtagcatttccccatactcaaaaacatgtgtctgccgggtgtggtgggtcacacctgtaatcccagcacttcgggaggctgaggtgggtggatcgctgaaggtcaggagtttgagatcagcctggccaacatgatgaaaccccatctgtactaaaaatacaaaaattagccaagtgtggtggcaggtgcctgtaatcccagctacttgggaggctgaggcaggagaatcgcttgaacctgggaggggaggttgcagtgactcgagattgcaccactgcactccagcctgggcgacagagcaaaactctgtctcaaaaaaaacaaaaacaggccaggtgtggttgctcacgcctgtaatcccagcactttgggaggccgaggtgggcagatcatgaggtcaggagtttgagaccagcctggctaacatggtgaaaccctgtctctactaaaaatacaaaaattagctgggcatggtggcgcacacctgtaaatcccagctactcaagaggttaaggcaggag

SEQ ID NO: 62126 - DNA, 1762 bp, Homo sapiens
agctagagagaaaaagccctcagaggggaagggtaaaagactggctgtggaggtggggacccttccgtcctttccagaaggttctattgccagcactgctgggtatggtgggagaagtatccactcttcatcctcaggctcagctgcacccagaacttcttcctcctacatcttcctcctttacttcctggctattctgagacttgccctggttgccagcatggcagcctccctattctgagaagaggagaaaagcagccaagttaacccagataaatgcagagcttccctgctgaagtacggtgaagggagacttagagccccatccaccccccaccccccacctcccagcctccacaaactccttctggagctagagcatggtttgaagacctctgaccttggtcacagctaagatctttttcagccctagcatcccaaggtactctttgagatctgtcctaaagccaatggctctctttcaaacaccagagacctgaatccagctgggagagttgccgactgattcatttcgaaggttagggccatgggaaggagaaactttttgcagttgtattagcctgactagagacacagaattctttttgctgttgctgcctagaggaataatcctggattattgcctttcagggggaaggagttgcctacagaggcaggatcttggttgaattagccacttttcttgagaagacaccaccagataaaaagcttgagcccatttcaaatgatgacctgctggttgttgaggtaaatgttaaagtgtgagtaatgcatggtatagaaaaggagacctccagggactgaaggggtagctgggggagtcggaaggcaacccaactcacaatgaggccctcatctggatgtttctacaacagccctatgaggatcgcttcatcctttgagatgttaataccctattgaaaactggcaagaacactgatacccacaaactgaatgacctgtttgctaactggcgttgggggtcatggggaagtggccataacagccacttcttgctggcaccaagagctgtaggtgccacctctactcatttccattttcagaggtggctggtgggcctcaggcttcccagcacaggagggcaggtgtgctgagggcccacactgcaatggctgtgaaccccgcttcctccttgaagacaggaaatcttcccagttgacttccccaaccatttctgagaatccaggtcgatgcctgtgtgttccacaaatctgaatcatttgccagcacagccagctcatggatgcccctctgcccgcggccctccttgctgggttgcaaatcaccgccagccccccagctgccccaggctgctgttgccctctgttccaagcacacaggacaggccctgccctgatttcaccactttacagcagaaaccaaacagcaacttttaaaaagctttcactttcagtttttgggataagaatacgaaaatacagtaaaaagggtgacaacgtggttgcgaaatgtggctattctcaaagctcatggggtcaggctggtgttctgggtccctgacagtcagccttcctgtctactcgcagcctgtctccttgtggcaggactgggttctccatgctctcccccaaactcccgtggtacccagaacacgttttcatctgagtccaggcccaactgccgtgagttctccagcgagccagggccttctccctctagtcgtctgatgtctgcctgttacatctgccccctttgcagg

SEQ ID NO: 62127 - DNA, 1046 bp, Homo sapiens
tgggatttttctggtgttgctaaatcacatacctggcactggatttgattaacgttttcaatgtctgttttataatgcccgtgttcttcttgtttaaccagtcatatttttactatatagatttctcatcttcgggaactggggctgcatcatatacaggtttatgcttcgtaattttgctctctgttatatcttcctagctaatattatcttattaagaatgtatcgactgtctttagaacttttttttgacattttgctgtctcaacatagttttgctaaagtaataatttttgtgtaagtgccatacggttgtcctgcacggctaagcttaaaagaaatatgctaaccaggctttgctccatgtcccatgctttcagctaaatgcacaccatcgtatttggctttattgcaaataattgattgtgagatataacattttctgttattgtttatgttcagtaagtagagaaatggaccactaaatcaattgttctgaaatgtatcaagtaactttcccccaatttcaacgtgaatctctaggttgaaaaatactgaacgttttttactttgcaccctgaagatcttcacctcccccaaaatgagggatcataacacattctttggtttgcacagaactcgtcattttttgcaagtttgctcaatactgtcacacacttgaccatcacaattctcctagggcagatgtttttgttcccctaatagatgaagactctgaggtttagagaggttcattatctgtcagataagcatgattcgccctgccataataatctcccagggttgtggtaagaagggaaagagatattgcatgtgggaaagctttgcaaactctgaagctgtgtgcaaatataaggtgatatcatgtaattatgtaattgacacaatgcccaattcttatttgctttaaacaatctatttcattataatcagactttatatgaatattaagtagtccttagatttgcagtggacttggcagatgtgcaagcactttattcctttatttgtttaaccaatcaatg

SEQ ID NO: 62128 - DNA, 1054 bp, Homo sapiens
gttcaactgctcataaacaaaagaaggggaacgtgctgaaaatgccccaagataagaaatcagggatttaattatcattaggctgtccagaatagacttcagaaatacagtcaagcatttcttgggaagaatcaccaaaacattctgagagcaattcattgttattgtttaaaaagaaaatggtaaaactacctcaatgaaggcaaggaaaagtccttgaaatgttctgatagaatttttagtagaccagccttctagcactgattggccataacaagaccattcttggaatgttctagttggatgtagcattcagcaggcacccttagctccctgacagtggaaacatgacaaatatcgttaccatcatcatgatcatcacaatcataattatgtaatgtgcctataattgattaattcattttatgacaatggtattgagtgtagccataggcacatctcttggcctctctgtacaattgcaatttcataacttcagaataaattaccttactagaccagtgtttccaaagggtgactggaggaccatctgtatcagaatcaattgggatacacttataaatgcaaattcttagtccccactctaggcttattgaattaaaaatgtgggcaggagatgagggtgagaagtctctagttgattactaagtacaataaagtttgaggcccactagacgtgattatttctgaagtctggggtattttccagctctaacttttttttaattgttgaaatgaagacatatcttcctagatggagctctgaaccttttattttttatttttttatttttattttttacacagggaccgtcttactaaaaatgatgtagttggaacaacatatctacacctctctaaaattgctgcctctggtggggaagtggaaggtaagtcactcaacagatctagaacaagactggatacagaacttttctccagtctgagaaaaaaatgaactggggtagccacctcacagtaggtttggtttcttagaagccaaatgtgatgaacctagtgaaccatttcaatg

SEQ ID NO: 62129 - DNA, 1050 bp, Homo sapiens
ttcaagtgattctcatgcctcagcctcccaagtggccgggattacaggcatgtgccaccacacctggctaattttgtttgtttgttttgagatggagtcttgctctgtcaccaggctggactgcagtggtgtgatcttggctcactgcaatctccgcctcccaggttcaagcagttctcctgcctcagcctcccgagtagctgggattacaggcgcgtgccaccacacccagctaatttttgtattttcaatagagaaggggtttcaccatgttgaccaggatggccttgctcttctgacctcatgatccaccagccttggcctctcaaagtcctgggattacaggcatgagccactgcgcctagcctgttgcaactattttgatgtataagagaacttttaaaattttgccaaatttctgggaattgaatttaatttctgctgtataactattaccttccagtggatgatgccttctcacagacagtaaaggaaatatttggaggcaatgcagataagaaaaatctcgtggatccttttgtagaagtttcctttgctggaaaaaaggtttgtacatgatctaaatgcagatgctgctagtaataaatatctaaaactactgtgctttccttggagtgaattcctgcttactctttgttaaaatagccccctgatgagccaggcactctgagggaacacagattatctgagtctgaacacgccagacttctccacaggtttattttggagtggaaagtatgcagaacacaaattagaaaattcaatcttttgagagattaaaatagggaaggctaccactgaatttctggaattgcttttcaggtccaaacgttatcttaaccttaggcaagctctctggccagccacacccatccctggtaaatgttgtaggacagagacccccccccagtgccctgttgccccttcctgtcatgtttctcaccttccatgccccagtaaactgttgaaaccagagaatgggtcagggaagccccatcccactcccctgaaaatatctgggagactctt

SEQ ID NO: 62130 - DNA, 1064 bp, Homo sapiens
gagaaaattaaatgagatagtatgtgtaaagcacctagtacagcacctggcacattgaagtgcccagtcaatggttatattaatagtagcattagctggaggagaaggaggaggaggaggagaactggacaggaaattgggccaggtgaatttctgtaggatgaccaatggtcccactttgcctgggactttagtggtaaaactgaggataacccaggcaaactgggtcatattggtcactctgcttctgtggtcccttccagccctaagactagctcattcattcaatagtgacttactgagggtcttccatgtgccacacatcagacaaggcactggggatacagagaggataagacggaaatgttgggtctcaaggaaatttaagtgtaatcaagacatgatatttaaatataatgatggcttctttaaagtgactagactgattttaaaatctacttagactactttcgattattgttttcccagattgatgttggatttgtttatgatgaacctggtaagtaatgttctccccatcaatatgaagtcttaaattcattccttctaactctgaagatgattctaagaatcaagacaatttgggggggatcaaagaattaaagttaaaggaattttttaaaaaatattttcttaatgagggagaggagaggatacttagtgggaataaataacagtagcttagaaaaaatgtctaattttttatcttaacattcaaaatagatgatttctatgttttgtgaggatattttgatcttatcaaaattaaattataaaactcgttggtacaacttagagagtcttgtttgagttacacgaggacagaatggtgggggtggggtgtagggagagtacaaaacagaagacgtgaaagtggacactcatctggggaatttggtgtgtcgtgaagaggcttccaagaaaatgcagcttatcttatggcagaggaatcacagacttatcagtacctttttagcatgtccatttccttttactccttctctattttaggccatgctgtcatgagaaagtggcttcttctc

SEQ ID NO: 62131 - DNA, 1049 bp, Homo sapiens
cttgtaattcatagggaaggattttgcctccctaatgtaggtagaaaacaatcaatagaaactgacccagaaatggcacacaatcagtagacatggacagtaaaacaagtattataattctttaaaaaaaattttttgtgagacagagtctcactctgttgcccatgctggagtgcagtggcacgatctcagcttactgcaacctccgcctccgggttcaagtgattctcctacctcagcctctggagtagctggaattacaggcacacgccaccatgcccagctaatttatgtattttttttaccagagacggggtttcaccattttggccaggctggtctcgaactcctggcctcatgtgacccgcccccctcggcctcccaaagtactgggattacaggcataagccaccgtgccccgctgagtgttggaattctattctatagattcaagaaggtggagaattgcttgagcatgctagtagggacatggaagataatttaaaaaaattaacttggactgctagagatgacaattacaatgtctgaaataaagtgaccataattatctgtctcagaatttgcatgtctagtattctttctgccctccaaatacatgtacttgtgcatgcaaaaccaccattatatatacttccacaccaatgcagaacaaagttagaaacagtttctgaatataaatctcaagcaaggcatctgttttgccgtattgtaggaaggagataacaaaaaggcctgacaatatacctagaaggaaatgtattccagttcttgtgtaagaggtgtgggcatgtggccagctgtacaatcatgagattagacagaactttggttttgcttcttgttggttgggtgactcttggcaaatttcttaatctttataatggggactgtgatacttcctcaataaatagtagatatagggcaaatttgatataattaagaaaaaattacttcaatttcctgatgaacaacaaaatagctaattcttttcttctaggtttactgtgtgtcagggacgatgttaaaac

SEQ ID NO: 62132 - DNA, 1377 bp, Homo sapiens
ctcatcatttacattaggtgtatctcctaatgctatccctcccccctccccccaccccacaacgggccccagtgtgtgatgttccccatcctgtgtccaagtgttctcattgttcaattcccacttatgagtgagaacaacaccctgcattttattcttgcagcagttgtggtagtcgttgagtccagctcttgagtatgaagcaggggtgtggtcacctggttgaagccacagaacctagaaagcaggaagccaggagttgtctacaggtcctctaagtcgacatctggtttgctttcctgccccctcagctgccttcaggtttagaatttaatcatttctgcataacttcaaaagattgtcattggtgaaaataatgacccaacatgtagtactggtgcatcttagtgtaatctctgctccttctaacagcctttttttttctcttttttcaaaacctttctgtgaacagattttggagtttgacttgaggggtataccactggacttttcatcttcccttgggattattgtgaaagattttgagacaattggacaaaataagtaagttgttttcacctgtttttctcattttaggtattactatctcactgttgtttattttgttgaagagacacatctttaataacgtattataatacttccaatataaatgtgctttaattccatgccccgctcccttctaagccaatagcagatgtggctaatccatcacagcactttttcccaatgactgcttttattccaaaaaagctgcaaacaccgagccacctagactagtttatcaaacttggcacttagagtgaagcctgttcacatgcctacaacttcttggtcaactgcacttcctacctctggcagtttatctgaactgtagtgatattggatacaacccaaatcacttcttctgattatttgtggcctatacatgtctcattcaagttttactttcagccccatttccatgttaatgtctccttcgccttttaatcccaacagacctaaacagaccttaatccttgccttactgcctctttcctttcacatggggaagggtcacggtggtgcccgtggtgacactgagggttgtcctctgagtaaaattgggagacttcccaaacaggttcccgtgggacagaatgatcttagtattaataaattcaccctagtcctggatctggactttggccttgtagacccagtcgtatgttaccaattcaaactaaccaagttcacaagagactaaaggtttttttcttttttttgactctgtcacccaggctggagtgcagtggcacaatcttggctcactgcaaccttcacctcccaggttcaagcaattctcctgcctcagcc

SEQ ID NO: 62133 - DNA, 1097 bp, Homo sapiens
gccctcagcttaggggtgctggtatttgtctggtatgggttttcctttctaatcacgggtgtgtttctcctttactgtaggatttggccctgccaagaaggtgtgggattgttatatcctctgcaacacccagcacatcactgatgttgaatatacattttaaatattgagcatgtagcaaagaactggcaggaaatttcagacaccttaatgtgacaaagtccttgatgcttagtcctgaaagagaccctgggaagtcatccaattgccctttacgtttaatatcctctcaggtgtttgtgaatgaggcttagcaaagaaccatgtcaagtattcatgaaccctgagtacaaccagttcctagcacctgttctctgggggcaaattggtgtataagacattttgcattcttgttcctggcaaggaaaatatgaagctgccagttttatgttgaaccttcatacatgaaacgtagtatatagaatgccatgatatggcagtggtcagctgactcactgtgtaatttctattgaacagctgttctgttgcactggggtgtgctttgagcaggtctgagcacagttctcaatcagaaaaagttatgggacatttgataccttaagccttatcaattaacttcttactgggcatgagggtacaaaggccctgagctctggggccagggatgcctaaatgagaattccagtggccatccctagttgctcatgagcaaatacaatctgcagcttcaagcccggtcatgatggctcacgcctgtaatcccagtactttgggaggctgaggtggacagatcacctgaggtcaggagttcaagaccagcctggccagcatggtgaatccctgtctctactaaaaatacaaaaaacttagccaggcatggtggtgggcacctgtagtcccagctactcaggaggctgaggcaggagaattgcttgaactcgggaggtgaaggttgcagtgagctgagatggcgccattacactccagcctgggcaacaagagtgaaacttcatctcaaaaaaaaaaaaaaatcagcttcagtgttcttaataatatctcctgccttgcagggctgt

SEQ ID NO: 62134 - DNA, 1005 bp, Homo sapiens
ccctgcagccgcgggattcaaactcccggaagcggcatccacacctgatggtgtgactcggccgacgcgagcgccgcgcttcgcttcagctgctagctggcccaagggaggcgaccgcggagggtggcgaggggcggccaggacccgcagccccggggccgggccggtccggaccgccagggagggcaggtcagtgggcagatcgcgtccgcgggattcaatctctgcccgctctgataacagtccttttccctggcgctcacttcgtgcctggcacccggctgggcgcctcaagaccgttgtctcttcgatcgcttctttggacttggcggtgggtatcatctccttacagataggcgcagagaggccaagtgacttgcccaaggtcttttgttaggacggctttttccgattggcaggcactttcgttgtgtgttcctcaaacatctttattttagaagtgagaaaacttgtgcctttttttgcagtttctcttttcctgtctgtctcctcaagtgagattttatgtgggaatttttaaagattggcgtcgccttgtagaagatgcggcttgtaattgaggccttgtaccatttactggatggaagcgcttgtttggtcacctgtccagcatgacttaggtcacttcagctaatcaaccaatcatttcttttcttttttctttttttttgagatggagtctcgctctgtcaccaaggctggagtgcaatggcacgatcttggctcactgcaacctctgcctcctgggttcaagcgattctccttcctcagcctcctgaatagctgggactacaggcgtgcgccaccacgcccggttaatttttgtatttttagtagagacagggtttcgccatgttgggcaggctggtctcgaactcctgacctcagatgatccacctgcctcggccttccagagtgctgggattacaggcgtgagccaccgcgcccggccccaatcaaccaatcatatctgagggcttgctg

SEQ ID NO: 62135 - DNA, 1532 bp, Homo sapiens
acgcctggctaagttttgtagttttagtagagatggagtttcaccatgttggccagactggtctcgaactcctgacctcatgatccacccatcttgacctcccaaagtgctggggctacaggcgtgagccaccgtacccagcccaagttgacatattttagaaggtgaatactcccatttatctaccactgagattaaaaaaaaaagttacaataccccagaagcctccatccatctttctccataccctgctggtttggatatatcatttctatttagagcagataggttattagacctgtttcaaacttgagatttaaatttttaaactcagaattatacagttgatttttatttttacagaccatttcagagatgtcttccagaagtaccaaagatttaattaaaagtaagtggggatcgaagcctagtaactccaaatccgaaactacattagaaaaattaaagggagaaattgcacacttaaagacatcagtggatgaaatcacaagtgggaaaggaaagctgactgataaagagagacacagacttttggaggtaaatggtcttctgatcctttaaattgtaagctctccaagaaagcgatgcatgaagatttcctgatgctaccttcttactcttgccgtgttccctgtcttgtccagttgattagttttggaaagctgacattgggtttagaatcttaaattcctactttgactttgccaagtcttagatgtactttagtcattactaacttctcaccttttaaatgtaattgagtatgtgttttgaggttaccaggtactaagtttgttctggaaataaagacattgcgattaatagttttgcacctttaacatggtctgtttcacctttagtatgctctgtttctcagttatttaaaacaaagtaataacctaattcatcattcttcctatagcttcttggtaatttagcttaactacatgaatattcttgataacttttgttatgctgtatttaagattgtgaaacattctggctaactattttcgctatttttaaattgatagcataacttagaagcattcgattttccatactttttttttttttttgagactgggtctcaactctgttgcccaggctggagtacagtggcttgatcataactcactgcagcctcaaactctgggcctcaggcaatcctcctgcctgggcctcccaaagtgctggaattccaggtgtgaaccgctatgcctggccattccatgcttttttggagtactaaattactcgttgatgtactttaaggatactgtgctgggcttatatctcttttttactgtgggagaggagaaaatatttacccaatagttatataatctggttttcctgttaatttactaaatgtaaaaaatcagatctgtccatttcagagtattaaatagtgttcagatttccttatttaaaacatattttatcatgcatattggctgctatccaagtaattctggttttcaggcttttgaaggaaaaattattagaca

SEQ ID NO: 62136 - DNA, 2247 bp, Homo sapiens
tcttcctaaattcaagttttaacttcatgctgttttgatcctgttagcctataattttaataattatttctattatctttttattttactttttcctttatgccagcagcagtttaaaaaacattacttatgtatatcttgtgaatctttgaagatgttaagcattcctttagagatcaccttctagattcaatactgaatcatttatcgaaagtaagcaggttaatgaatgcatccctctcctgctgaaatattctgtaacttttaagttccactgattcaaattcattaaggagcatgtatatcttgtgtgaccgacttttagctcttagtttttacaagatccagtgttatggaagaatgattaccaaatactcatgggaaagctagcccttctttagctttttctcaccacccttgatagaggtggtttctcctttctttgtgtctgtgctcattttttaatctgtcttaactacagcacttacaacgttgcattaatacattggcttacttctctgtgagctatctgaacataaaactttggcttcctaatcttttttggccttggtatttagcgtaatgctgacttgataataaatgcttcataaatgcttgttgaagtatatattgtttagctagatgtttgacctggctttgttctaagattcttcttagtttatgtctagaaaattcgagtccttgaggctgagaaggagaagaatgcttatcaactcacagagaaggacaaagaaatacagcgactgagagaccaactgaaggccagatatagtactaccacattgcttgaacagctggaagagacaacgagagaaggagaaaggagggagcaggtgttgaaagccttatctgaagagaaagacgtattgaaacaacagttgtctgctgcaacctcacgaattgctgaacttgaaagcaaaaccaatacactccgtttatcacaggtgctaatcatttctttaaacccagattttttttttctttctgatacagtttgtaattcttaggaggaatgagtttgttaagacatgcttcccaaatgatgagacaaatgattagtatagtatactatcaggtcacttcactttttttaatagcccagtcccttctctataagcaaaaatagttaatatggtaccctccactccttgtaccattgatttgcctggaggaatattcagaagacagcatctactgtgtatttacaattaccaagattttttttgagctcttatttctatagtttgtatcatgaaaacagtaggcttcatttttttggttatttttcatatttgaaacatacaattataatatcaagtatacttttcctaactgcacttgcattttctccccgttttgtttgagaggcactagcgtcatagaaagaacaaggatacagaaatagacatgtgagttcagatcttggttttgtacttgccagctctgtgactctgaacaaatttgttaacctttatagccttagagacaatactagacttctccagacccctgttctaaatcttagtttcttttttttttttttaaacatataagctaaacctgagtttccacatcagtaaaatcaggataggaatagtgagaattaaatgtaaatatgtatgtaaattgcctcgcatagtgcctagtatatagtaggtgttcggtaaatggttacttattgatcagacctttgattcttttggagatttggagattcgaataatactaacattaatatcatctataggctgggcatggtggctcacgcctataatcccaccactttgggaggccaaggcaggcagatcacctggggtcaggagtttgagaccagcctggccaacacagtgaaaccccatctctactaaaaatacaaaaattagccgagtgtgacggcacgcatctgtaatcccagctattcgggaggctgaggcactagaatcgcttgaacccgaaaggtggaggttgcagtgagccaagattgcgccactgtactccggcctgggtgacagagtgagcctctgtctcaaaaaaaaaaaaatcatctatagtagaaaatctgtagctttcaaatatatctcagtgctgttaaggatctttctctgtactttatttcccatttaggggagatagtgatcagacctatacatttatgtgtattttcatagatgggcgtttgagtgtttctgcagatgagttcaaaaagttgaagtttttctagagaat

SEQ ID NO: 62137 - DNA, 1086 bp, Homo sapiens
cactgccaccaaatacctcaataacatcccttttctatctaaatctaatttccctaatttgcccaatcattttattgtttcttgttttttcagtatttttctctttttgagatggagtcttgctctgttgcccaagctggaatggactggtgagatctcagctcactgcagcctccacctcccaggttcaagtgactcttctgcctcagcctcccaagtacctgggattacaggcacccaccaccacgcccggctaatttttatttttagtagagatggggtttcaccatgttggccaggctggtcttgaactcccgacctcaggtgatctgcctgcctcggcctcccagagtgctgggattacgggcgtgtgccactgtgcctggcctccattttattcttataatgtaatttaatttgtagtatcttctcttttggtttatccatgcaagatgctctctttggtttgaatacttctcttgaaactaaggtttgctttcgtaggttgaaaaggaaacgttctttgtacactcagtacttcctttctctagaatttggtatgaggttattttagttatacagtaaagctgtattattgcaaactgataaatggattggtgggttttattgggaatggaataaattgaggacacaggactgctacttacagtgtatttttttcaagttttagagatatgaagtataaagtttctgacttaagtattaggtcagtatgttggtattttggttccaaaaatattactggcatgtctatcctgatataagcatgttcttaagatttctgttttacttcatctatcaagtatcctttgaagtctttttgatcttcaaaagaagaatttaaatctcctggatgtctagccaggtgccaagtactcttatcagaatacgtaatttacctagaggtaactggaatgaaaaggaaaagttctatgtcttattacactgaagtttgttattctatgtatatccatacctatgcattagatgcacatatttagaaatatcttacacagctcctgcattccactttatttactccacctgcaccacaatggctttcca

SEQ ID NO: 62138 - DNA, 1079 bp, Homo sapiens
tttagtatttatttaagcattatgttagtataaactagacaaaccaaatagccaaaagacagttttaataggcgtttcttgctcttaaattcaaatatccgaattttaagcatagaacttagggaagataaataataattgttttaaaattattttgtctgcaaacattcaaattaacagaaaagttacaagaatgagtatgataacatataataacatataacgcccatatcccctttactaaaattcaaccgttgttaacatgttaccccattttgcactctgtttttcctctttcaaccctcacccacacacatatacatgtagtatttttttctgaaccatttgagaatgaattgtacatatccacagccgtttaaacccatatacttcaatgtgtgtttgttctcccatccaagtactaaacagactcaacgctgcttagcttccaagatcagccaagatcaggcgcgttcagggtggtatggccgtagacttcaatgtgtatttcttaagaacgaggatactcttgcccacaactatagcacagatagcaactttaataaatttaacatggatacaatacttctataatctaccattcctactgcagttttgtcaattgacccacattttttattcctccagtataggctaacattttaatctacgttggttggaatttttgtctacagaatatttagtggattcttgtcaaacctgggcgaagacctttatagcattccacaggactttttttttttttttttttgagacagagtctcactctgtcgccgaggctgtagtgcagtggcacggtctcagctcactgcaacctctgcctccctggttcaagcgattcttctgcctcagcctccagagtagctgggattacaggcacctgccattgcgcctggctaatttttttttatttttagtagagacggggtttcaccatgttggccaggctggtcttgaactcctgacctcgtgatctgcctgcctcagcctcccaaagtgctgggattacaggcgtgagccaccatgcccggactccacaggacatgttattttgccca

SEQ ID NO: 62139 - DNA, 1003 bp, Homo sapiens
ggaggcagagtttccagtgagctgaaatcatgccactgtattccagccggggccacagagcgagactccgtttcaaaaaaaaaaaaaattggccgggctcagtggctcatgcctgcaatcccagcactttgggaggccaaggcgggcagatcacctgaggtcaggagttgagaccaacatggtgaaaccccatctctactaaaaatacaaaattagctgggtgtggtggcgcatgcctgtaatcccagctactcgggaggctgaggcaagagaatcgcttgaacccgggaggtggaggttgcagtgagccaagatggcaccattgcactccagcctgggcaacaagagtgaaactccgtctcaaaaaaaaaaaaaaaaaaaaaaatttcatgaccatttaattttgacttaaattatttgtattaaaatactacttaaatgtggacaaatgtaaaatttagtataaaattaggtatctttagtatctaacacactataatttataggtatttggatatacatgtgcattgtgagtcatacagtgcttcctctcttatcaagtaaatttaaatctgatcctgggtttctcatgagtcctttcttttgaaagatgcataggttctgagtaagaacctcactggggatggcagtggagctgaataagagagtgactactgcagcctgttttaagataggccaagaatcctagcaatcttctcaactgtactaagttcactgattatttttcccaacttttatgattatttttcccaatttttattacgaaaaatgtcaaacatacacaaaagttaaaagaaaatacattgaacaatcatatatctaccacgaagtttcaataagacagactctttaaatcaaaaatcaaattactacagtgaaaacagccatccacagagctttacactattgacgatatataatacaaaatggatatacaatatctccacttgacaaatggactcttaagccatgtaaagaggac

SEQ ID NO: 62140 - DNA, 1017 bp, Homo sapiens
gagacagggtttcaccatgttggccaggctggtcttgaactcctgacctcaggtgatccaccaccctcggcctctcaaagtgctgggattacaggcgagagccaccgcacccagccagctgggcagggctcttgaagggggattctgagcagttcatctccatgtctgtcataaaacgtgttttagtttacagagaatgacatatacgcacacacaaagcaagttgtgtactgaaaaaagcaaacaaatgaacttaatcccacataaactacgatggtgtcatgttgttatgtattctgaaggcatgtaacatagaatggttgcccagaattagtctatgagccatagagtttttgttggaaaagactacatcacttggactctcttgcccattttaagattttgtttttttattttactgttgattttctttcatcttcccattaaggctctggagaaaaatcagcagtggctcgtgtatgatcagcagcgggaagtctatgtaaaaggacttttagcaaagatctttgagttggaaaagaaaacggaaacagctgctcattcactcccacagcagacaaaaaagcctgaatcagaaggtactgactggtataaaaatgttctctagggataggcctgacattttccaaaaggaatgattcatcaaatttagatttttatagatatgtgttagaaagtaaaataagagcaagtcttatagccctgaagtaagaaataccatttttgcaagttttatttcctaacgttttcagatcaaaagaaagtaccaacacaggctaatgggtgatctttggcagttctgaaatcacattcagttctctctacccatgaatgtccttcccctttttcaaagtccttctccagcttttacttcccccagagttggccttgtcacaattctcttttcactttgcttcccttcagcacttattcatatcaaccccaggagaaagaatgccttttttagatgatccttaaatcatttgaacttcaggt

SEQ ID NO: 62141 - DNA, 1805 bp, Homo sapiens
ccatcccaatccccgtttcttcctcccatcaggcaactgctcttaatatttctatttttaattttgatagttatctccacatataaataatgagcttgtgttcctatttgttgattgaacttcttgagactttccctcccaacagaatagatgttactgtttttagttcttctatttgtgagttttataacttcaaatagtatacctgaacttgttttttatttcatcaaatatcaaccatagtccctatctcttgacttttcatgttgtaaactaaggaaatagtgtgattcatttagatgtttgatgtttctcttttcaggaatattatttattttataaagtgagttgtgccgtaatgttgtttgtcataggttatcttcaagaagagaagcagaaatgttacaacgatctcttggcaagtgcaaaaaaagatcttgaggttgaacgacaaaccataactcagctgagttttgaactgagtgaatttcgaagaaaatatgaagaaacccaaaaagaagttcacaatttaaatcagctgttgtattcacaaagaagggcagatgtgcaacatctggaagatgataggcataaaacagagaagatacaaaaactcagggaagagaatgatattgctaggggaaaacttgaagaagagaagaagagatccgaagagctcttatctcaggtaaacttaaccagatccataattcagagtgttcaccgaacactttctaagtgtcagggactatttgaccactagagaactggctagggacaaaacaaattcctgcccctcatgggagttatattccagaacagaaacagaccataaacaataaataaggaaactaaagaaaatgcaacagggtgacatgacaaagggaaattggggaccagtggaggcctctctgaggagatggcatttggacaaagacctgatgatgaggaggacccagtgaggtgggtgacttttcctctcaatggaggaaattgtacacacaaaggctctgagtgaggaggaggtcagtatatgtgagaagccaaaagaagaagtgaagtaatgagaggaatcgaggctgattcctagactggcatcttaatggtgatgatatgtgctcaagtgaattcacatggcatcttccatgttcttgttatgctcatagccttatgctatggtatcataataatgttggagttactacgttaggattattggaattgaacagtactttgatggaactctttaatttagattttgctttgcagcctggcatcatggaaggaacattatttggaatccatgcctagtctctagtccaggatatatggccttaggcaaatcacctaacttctctgactactcactggttattcccttgtcaaattaataataacctctgcttgccatatagggctttggtgagcgtcagttgagagaaggtaaaagtgctttgtaaactaagcgaggtaaatgctagttattgctactattttaataataatttttaacagtcctacaaaagttgagggtgctggtgatgggacagtaacaagtccatctataacatttgccatcttagtcttttttttctttttttttttctgagacagggtcttgctctgtcgcccaggctggaatgcaatggcgtaatctcagctcactgtaacctccacctcctgtcttcaagtgattcttgtgcctcagcctcctgagtagctgggattacaggtgcccaccaccacggctggccaatttttatatttttagtagagatggggtttcaccatgttggccaggctgg

SEQ ID NO: 62142 - DNA, 1565 bp, Homo sapiens
gatagccatcagatggccagctggaatgattcacccctgactagcaggtgttgtcctggttagagatgtgagacttgtgatgtgagctttccgtgcatcccaggtcaagccggaaaaggttggatgtgacagcattggttctctttatgtcctacaggtccagtttctttacacatctctgctaaagcagcaagaagaacaaacaagggtagctctgttggaacaacaggtactcattcgggttgcttctaaattcaattctgcctgttagaaaatgcagtttttcctcatgtttatgctgttctatggagaactgtttgaaagttgtgaaaagtgtctttaaaagacttcaataaaagtctttcttcttcaataaaaaagatatttcaagagactctgctagccacttattcctgttgctgaccttaggctaaacagattcttgaggtgtgatggcagttttcttgacaggtagatgttggccttggcaaattttgctcttccccagtggctgtagctcctagcctaacaatgtctcctaagtagggctaccttataacttcaagcagaacttggagagacaccatttagtctcagaatgtattataaatggtgtaaagcagagatttttagtatattccaaaccagggaatagctatctctttcccttctccttcttcccccttaaaaaaggtggatagggaggagtaattctaatcaacaacttcttaagctgctcttcattcacctatacctcagcgttggctttgctccttggataaaccaaatcctcagccataagctgcctcgtttattaacatttcatggtgcttaggtgaattcttgctacgatggtacaataaatattttcttcatgtgctaataaaaaaatgtgagcatccagtcaagagaactagacagtctgtatcagctgtaatggtcttgttctgggccttttccagatgcaggcatgtactttagactttgaaaatgaaaaactcgaccgtcaacatgtgcagcatcaattgcatgtaattcttaaggagctccgaaaagcaagaaatcaaataacacagttggaatccttggtgagtctggaatgattaaactaaaatttgtcttcgtcttccatttatataccaaatcagttccgaacttaggaggatacagcttaacacacagctagctgtatctcaaatcagtaggtagagcctctgcctcatttgaagcaactgccctttgagcatcaattcagaggacatgaaagagggacatgatcacatctggaaacattcccccaactaccccagctgctgtgatgctggaggcactaaatagtgcctgagctggggtcaaaagggtagaatagagggtagtcacagaatcctgaactgaaattgtgtttatctattaaaaaagaaagaaaggctgggcacgatggcttatacctttaatcccagcgctttgggaggccaaggcaggcggatcatgaggtcaggagttggagaccagcctgaccaacatggtgaaaccctgtctctactaaaaatacaaaaaattagccg

SEQ ID NO: 62143 - DNA, 1293 bp, Homo sapiens
tcaaaaaaagaaaaaaaaaaagctgaacattggccctatttacaaattctattatttgaaacttatttttcagaaacagcttcatgagtttgccatcacagagccattagtcactttccaaggagagactgaaaacagagaaaaagttgccgcctcaccaaaaagtcccactgctgcactcaatgaaagcctggtggaatgtcccaagtgcaatatacagtatccagccactgagcatcgcgatctgcttgtccatgtggaatactgttcaaagtagcaaaataagtatttgttttgatattaaaagattcaatactgtattttctgttagcttgtgggcattttgaattatatatttcacattttgcataaaactgcctatctacctttgacactccagcatgctagtgaatcatgtatcttttaggctgctgtgcatttctcttggcagtgatacctccctgacatggttcatcatcaggctgcaatgacagaatgtggtgagcagcgtctactgagactactaacattttgcactgtcaaaatacttggtgaggaaaagatagctcaggttattgctaatgggttaatgcaccagcaagcaaaatattttatgttttgggggttttgaaaaatcaaagataattaaccaaggatcttaactgtgttcgcattttttatccaagcacttagaaaacctacaatcctaattttgatgtccattgttaagaggtggtgatagatactattttttttttcatattgtatagcggttattagaaaagttggggattttcttgatctttattgctgcttaccattgaaacttaacccagctgtgttccccaactctgttctgcgcacgaaacagtatctgtttgaggcataatcttaagtggccacacacaatgttttctcttatgttatctggcagtaactgtaacttgaattacattagcacattctgcttagctaaaattgttaaaataaactttaataaacccatgtagccctctcatttgattgacagtattttagttatttttggcattcttaaagctgggcaatgtaatgatcagatctttgtttgtctgaacaggtatttttatacatgctttttgtaaaccaaaaacttttaaatttcttcaggttttctaacatgcttaccactgggctactgtaaatgagaaaagaataaaattatttaatgttttaatatgtctagtgtattcgtgtatatatagatattctaagattcttgtttaaaaaaacaaatgtgttggacataatcaa

SEQ ID NO: 62144 - DNA, 1318 bp, Homo sapiens
cctgtatcatcaatcaataactgttcatcagtgaaatcaactgtatgtctattctttatacctcagttttggcatatgcattgtacagatccacattaaatgatttgatctatgtttcacttctgtctataaaatgggtataaagagacctacttcgttggattattatcagaatcaaatgagaaaacatacatgtaaagtatgtgcctgacgcaaagtaagtccttgataacctgtagctatcattgttatcagagaaaagaaaaatacagacatataaatcctgtgtttgttctctagaattgatgaaatcaaaagttaagtctataaaaatctgacctgtccatttgttaccatgattattggagacatttgccatttcttcagtggtgcaagttattagttaccatataatatccacaaaaaccaagatgatagacctactttcattattcaaaacatgtaggaaaaattgtatataattttaggcaccacactctaaagggaacattgaaaacttgaagcaggtcaagaagaaaaaaactgaggtatggagaaaacttgaaattatattgtaggaagaatgttggaggaactgcagatgtttacctgggagaagagtgaaaggatgggagggaagaggtgaggaagtagacatggaaattactgtatggatatttgcaaggctgctactatgtaggagacttattttttatgactctgggttggcagaactgcccaaaaacagatttttgccttaatttaaggaaaaacttgtcccttagaactgtctgacaaaaggaatggagaaatgggctgcctctggagtagcgagtgttccagcatggactggattggcacttattggaggtgttgcagtgaaagttcattcattggataagtgttggattaaatgacctccaggttcccctttcaactcagaaagtcagtgacttaaattctgatccctacttaccaataatcactgaatagatttgacagtgatgcattcttttgtgttgcctgttcttccaattgttatttccttagtaacactcctcccgcccctggcaggttgtaacagttatgatagcaatgatttgtagtgactgccaaccctcagggaaccaggatactatagattcatagggttataagggaccttaaaggtcatttagtccagtcttgtagacttgattctctagggatatctggccacttttttagtgggtattttttaagacagttagtttataatgttactctaaactgacttgattttttagtaaaattgactggtatcagaaaactggtgtaa

SEQ ID NO: 62145 - DNA, 1081 bp, Homo sapiens
aaaaaagtcatacctgaaaatgtttttttaaatccaaacattacaaagggtaaacagtgaagagtgattctccttcttatttgtgactgtcagttctccaatttccctccctgagtgaaccacttttaatagttaatatccagatattccatgcacatgtaagtaatagttctcttaaaacattaatatttatgtagtatgtattctttgacatcacttgaaagtagcaaaccatggttgagtttctaaatgtataatatttatattttcatgggtctagggagaagagacttgctaagaaatactatgataaattatttaaggaatactgcatagcagatctcagtaaatataaagaaaataaggtatgctttccacatatttatggaaagaggttcttattcaagtaaaatattaacttttattatactgtcatgccccacattattcttttaaagatgctaattctagactcagttgtcctgcgtttatgatgtgtcatttggaccatttaacctctgcagctgtggagtttacaaaaggcctatggaaatttatgaaggacaaggatgcttttttttgtttgtgagctgaggcatgaaaagtctaaaattaaacgcaagtgggtattggatcctgtttcatcctgactctagtctagagcctctagtgattgtaatgaatgacttaactctacagaataatgtcttatttcacagatgatgtttgaaactgatagattttaaaaattgattaccatttatagagatccagatgcacatcttctattacataaatgtctattctagtaaaattaacatttcaatcagtgctaattagtaatgacagatttcctttcccactttacatcttactttagttaatatttttatttttggttgggcgtgatggctcatgcctgtaatctcagcactttgggaggctgaggcaggaagattgcttgaggccaggagttcaagaccagcctgggcaatatagtgagactttgtctccacaaaaactaaaaaaaattagccaggtgcagtggtgcatgcctatagttctagctacttgggaggct

SEQ ID NO: 62146 - DNA, 1185 bp, Homo sapiens
aacaaaaagtaaaatgctcatatattttgttacaatgctttgaaaaaacatggcattttattctttgaatttaaaagactataaaaattgattttttatatttgcttttttgaaagtttaatgttgggatttaattataaattataaatataattataaaagttgcatcttctatttagaggctttatcattactaaaatagataaattatattttatgataatgaaagataaattctctacttttagaaactataatttttaaatttttcatattgtgattattagaatgagtggtggtaggaggctatatgcagttcagcaatagaataagaagctctatttctccccagatggaggtatatttttatcacaagagtagtatatgcttgaaaaatagtcaaaagaaagcctgtactttacaatcttcactttcaacaatttaatatatacccttctagattttctgaatgtgtaagcatgtatagtgtgtgaatatttttaaaaagctaaatagactcatattgtgcttttttttaccaccaatcagcaatatattatgacaccaaacagctcctaagagaataaaatccttaattttttgcatttcagtatcaaagacatacaaagttcgtaaatgactatattttatactatggtggcaaaaaagaagacttcaagcgtttggggtaagtatcaggaagtttacatagaagggaatgtgggttatgggaaactttaaagacccacagctactgtgccttctgattctgtcattcttccctgctttctattccggtgtgcctttttttttttttttttttttttttttttttaagatggagtctcactctgtcgcccaggctggagaacagtggcttgatctcggctcactgcaacctgtgccgctgtggttcaagcgattctcctacctcaggctcccgagtagctgggattacaggctcctgccaccatgcctggctaatttttgtatttttagtagagacggggtttcaccatcttggccaggctggtcttgaactcgtgaccttgtgatccacctgtcttggcctcccaaactgctgggattacaggcgtgagccactgcacctggccccagtttcttttttatattataaggtagagataccatccacagctcctgagtagctcttcatgaatccca

SEQ ID NO: 62147 - DNA, 1011 bp, Homo sapiens
tttgttttggtttggtttttttttttttggatgacagattctggagacacctggcatctccgtttttgagtttctccccgctcttgtcagttgattcgtaggcctgaagtgagtgagagctttttagttcaaccagtgagttaagataggtatgggtcggatggagcggccagcgaataaagaaatgggagagtgggagcaagaataggaagtcgtgtcctggggcgagggaaaagatgatgatgatgatgtaacatttactgggtttcactgtacaagacaccgttaaaaccctttagatgaggcaactcttttaatctccattcgtatgaggtcagccatcttactagcctctttttataaatgaggacactgaggcttggagaggttaaggaacaggcccaaagaaagacaaatggaaagtgcagagccaagcagtgaaatctagtaggctgatcctagaatatatctctaaacacactacagctgtcccccatcaagatgtaaagaacgtgaggacataggacaaagagtgagaggacaatatggcttgaacagatgtggtaagacagctggagttgacctaaaaaagggtgtaaaatccaggtgtgtaaggcaataacagatgtaagggagggtagagttggaactcgggctttcaaaccttcatctccaaccttaactagcatcttcctatctaggattttagtggggcagagaagagaggtatatacccacacacctatgtttgaaaatggaattacagactttaaaggttatttaaagatttaaacaacttaaagattatttcatgtagctatcttatttaatagatgaagtccagggagatgaaatgacttattcaaggtagccaggactagaaacatgtcgtttaccctagatccaatgcaatgaagtttagagagttctttcctctttttccagctgcacttgctgtcgttatattagttttaacaatttgatatatcatttaacctggactgttccttc

SEQ ID NO: 62148 - DNA, 1395 bp, Homo sapiens
cttcatgttccaaagggggattggcagcccatatggggttttcagggcactggacagccctgtctcacagaagagatctttctctgtgggatccatgcattcccacaattgttatgatcgtttcatagttcatattcagagccttctcatatatttcctacacaccgcacatgagtttattagaccttttcctgaggataggcggaagcagagaatattgggcaagaaggatggagagcagagtcttcaggcacagggtcctggagattagggacaaactttggcccctgacaattttgcataagttcagctctggcacaagtctaccatgttgaggttagccaatctgagttaaccgagaacacactgggagagaattactcgccttttgttatttctgaaacctgaactgcttttagaaataaaggctggaatgttccataggaactcggagcatggggcacgggcatggcacacactcggttgggctatttaaaaaccagtcccttggcttccctctgtgattctaaatacgtgaaatcacattaccctgcagcagccggtaactatttctataacattgtccagcatctgtgcttgccgtgactgggtccacccaacaaaaacaaagtggagatgtggtaattgattaggttaatcactccaggctttctgtgccacagctaatgtccatctagtgtctactgacactactcctggaattttaaggactgatctatgtaactagatctatgtaacttcctaggggaagggaggtgccttagcatatcaaaaggatgctttttaaaagagctatttattcatttaacaagtgaggaccagaaacacaatttatcactttctcagagacagcaaattcttatcctatggaaggatcccagcattagagactctgcccctttctgtgggaaagaatctatcttttttggatttgtttgatgtgctaactaacacttcccccagtcacaccactagccatcaatcaaacagataaaccccttaggaatatctagtcaattgctaatcatttgaagacatcagccagtagaagggcattagccaacatcattacataatgtcaaaacaactgatcaagtttgtgaatccaatgaaacagtcaaaccagtttaggaatttcatatacacaaaacaatagatgagtgacttttagctttttagcttgatataaaatttttaaaccctaccatttataaatgtgtaagcatttggcacaccctatgccaagtgttttatctacttaaaccttggaagtatgtgttctcacttccattttaaagataagaagactgaggcttagtgagatatactaatctgcacaagactacatgtttaggttctatgagtggcagggtg

SEQ ID NO: 62149 - DNA, 1027 bp, Homo sapiens
tcaaatacaggcaaagtataatttaccatatcaagaatcactaccagcttggagctgccatatcagggtgaaaagtgacagcgtgtcactcatctttgtgtccttcacaaagcccaacattgtacctgctacccagtagagcctcaaaacatgtctgctaaaatgggaggcttttgttttcattttgttgctgcttgcaactatacaataaataaatacttattttggctaagcagtacttaaatcaaaaaggaaattatctttgtgttattgatttttcttttcatattaataatgcttaactaacatttccctctggatgtccggtcaggctggataaaggagcatcttacccttcccaggacagactagtcggcctctgcagtctgactaaaaaccaaggagaccaaatgtgaagtcagcgtgggacacaagagattcgagcggtgggtctaaggaaaggcttagatgctttgcctttgaaatctggtatgctggaaatctctgctgaggaagtttgaattcacaacttcatgagcaaatatctcctcgagtttttttagttcggctcacttcccagacctccacactattagtccacgtgaattcagatagggtgcaccaaacatcagaaagagtgtgaacatgaccagcattatctgctgagagtaacacaggagtcttcagcacaaaatcgatggaaacataaactggattcaacaaatacatgggaaaacatgtctgggtttttctctgggaccacagtttattggtgatcctccatgaaagacacaaggcagatacaagcaccataactctagcaaatggcacacagtgccagacatcagtaaagtctagagaatttgagaatcaacagaggtcatagaatgagatcctgcagaacttgtttgggcacgtgtgtgtgtgtgtgtctgtgtgtgtgtgtgtgtctgtgtgtgtagagtcaatgatgtgagtgataaccttggacaaatagaaagggccaaacactatggatgccagctca

SEQ ID NO: 62150 - DNA, 1786 bp, Homo sapiens
aggatacttattaagtttagtgctcaataatatacttttattctttctgattaaaaaatgaaagtatttagaaatggaactttactttgtgtaatgcatccagtaagttttgctctgtactcatcttttaaaattgcgtatttgatttcaatgggaatttagaataatattcttaaaattgcctgtaattgttttttttaaaaaaaagctttcataatttcattattaatattgctctgggatcagaggatgtgacctgtaaaatgctaacattaagctctaattcctccagattctgctgtctgtagggacgggtcatgactaagtgacactttcacaccaaggtcataaagctattagggggttcctggttgaacggagaggtaggacacacagaatttacttcaaaaggaacggaaaagtaggcaacagggttaacatggagctcagagttcagagggaaccagggccagcaacagagaagtaaatgaagaagcagaggatctaagaatgaggatatagctacaaggggtcaagggtaaggctgcccaaataccgggtgagaggccagagacgggaatgcataagagcgaaaggactgggcaggctcatgtgttggtgctaagtctggtgggccactgaggtgctttcctgccctggggcctcgcctcttcagaggccagggaagcagcacactgaagagtgaatcaggaagcctaatataaatttgaccataccttctgtgtcctagagcataccacttttctctatgttgtaaagcgaggagactagactagatcatttgtgaggtcttttgtagctctaaagatgtgtgagtctatgcttatagcactgtagccttcattcatgaaagagtaggcatgtggaatctggggagcggggaggctggtctgcagatggctgaatggttgggggaagggtgactcctgctaagaaaacttcccattgtctcaaactagactgctcatttggtcccgtgccaggcaccctggctctaatgacatgtacttcttcagactctctccagtcacctataatatcttgattgccattagaattgtatctggcccatgagtggcctacatcccatgtttcagcctagagcagattttcctggctatggaggggagatgatctaggaggctcttccagatgattcccaactccacaaaaaccactctgattaagaagggaaaagtgagtagccagtgcctggttgtcacttggagaatgaattgattggattcagaatagagaatcaggtttctaagcttgtaactgccagttattattgtatgtttacacatcaagtaggtaaatctgtttcatcatctgttaaaataggattgaggatgcaaaaagacttcctggatgattttaagaattatgtgagataatgtgtatgagcatgtctccaatgcttctgccaaggaatagctaagtaaagagcacagacatcaaatgtcagagctggaagagctcttacttagatctaggaaaagaacacgtgtttaactgctaaggaaactcaggtcccgtgaggatgtcacctgccccaagaagactttgatggacatctaggatattaggtaggacacggacagtgtgtacaaacatgagtgtgcacactcccaagtgaacatgggtttatttgcatatgtatatgtatatgtaaatgaaagagcacaggatgcacaggttatagctgttggaagatatggagggacagctggaggggcttgccaaattgcttagagctggcttt

SEQ ID NO: 62151 - DNA, 1139 bp, Homo sapiens
ctggactcaagtggtccaaccgcctcggcctcccaaagtgctgagattacaggcatgagccaccgtacccagccttgaatacactttggtgaattctgtttataaataatatatgctcattgtggaaattctggaaaacacaaaagcttaaagaagaaaatgaagtgcaccataatcatactacccaaagacactgatatgcataagcataatgcatatatgatatatacacatatgtatttataaaattgatgtaatattatatcattgtgtatccttcttttcatttgcttattatatcatgaacaatttctcatgacaatcaatttttcaaaaatatagtttccatagatgagtaagttttgtattatggatatatcatgatgtaactttttaaattatcgattccaatgtttactattataaacatgattataaccatccttatatataaatatttttcctatctctacttatttccttatgatagacttaggatagatttctaaaagtaccattattagattatagaaggtttttaaatctctagttctttactgctgacttgtaccaaattacatgtccaactctgagtaaggaaatgcctatctgaccatatcctcaccaacatttaaaattatcatttttatttctctatgaaatcatgtcctttgaccccttttgttgctttctaagcactttttatttattaaggatattacttcatcttttcctatttcttttgatgctaaaagttttttcctactgattaccaatttgccttttcattaatgatttttaacatatagaagtttaaatttgtatttaacaaaatacatcaactcctattatgtattatttctttgcgtttaatcttttttttttttttttgaaacaaagtttcactcttgttgcccaggctggagtgccatggcacgatctcggctcaccaccacctccgcctcccgggttcaagagattctcctgcctcagccttctgagtagccgggattacaggcatgtgccactgtgccggctaatttttgtatttttagtagacacggggtttcaccatgttggtcaggctggtctcgaactcccgacctcacgtgatccaccctcctcggcctcccaagtgc

SEQ ID NO: 62152 - DNA, 1042 bp, Homo sapiens
ttcacaccacacataaataatttttaaacgcccaaacatttaaaaatgttttttagaggatactttcaagaaagccaagaaatccactaaaaggcaagttggcatggatccttgtacttctaagataattcttgatttgggcatattagagtaggtccaaaaggctaaacccatcttgggattcccatgagagactgagccaatttcaatatttttttgttttgtctttcactagtgtagggtatagactgacacaaaaatggggtaaaggacccccaatgagctacatcccacgtcacccatggagtgtgttctaacttccaagacactcccagaactgacctagtctcccaagagaactctgacccacactaatgagtggcaacctttcaggctactgtaaaccagagaggataactatggtctgtccaggactctcttggaagaatcctgatttgggcattctcctggaattaaaccatatcattcaggaattgaggtaatagacatggaggaggggctggggaaatactgcaaggaacaaagaaagtttttcattaggctactgatttgaagttaaatactgggcttggaagaaagtacttgactcagattttctttttgtttgttattggagaaaagttgttttgaatatatattctacagacaagtacctgaataattttttaaaaaagcttttgttttcatatatcctttcatttgttcctgtcttccaccttatgacatttaaatacctttctaatgttctggaaggcaaataatgaagctgaattgcttttgagaagtttaggcatatattacttgctttgcttacagcaaaatatacaaattccttgcaaagatctttcactcggaggcttaaaagtcaaagtttgaaagctcttttgtttgaaaaagggtcaaaaataattaagttcattcccttcctggggcttaagccaaattcctggggattaagcttagagttgttgttcagtctaatgagaaaaaaggcaaacttttctcccttcccccacttcct

SEQ ID NO: 62153 - DNA, 1026 bp, Homo sapiens
ggcacgcacctgtagtcccagctgcttgggaggctgaggcagaagaattgcttgaacccgggagttggaggttgcagtgagctgagattgtgccactgcactccagcctgggtgacagagcgagactctgtctcaaaaaaaaaaaaaaaaagaaaaaaaaagaaaaaagaaaagaaaagaaagaattaaattccatggccaaattaagggtgaaaaatattggaaaaatttcctcactgcaggacttctcagatccacagatgtctgtattatgaacctacaagaccaagatatggttcatgaatttattggaccacaaaatccttttcattacaaggcatacattaacattttgtagaagacacgtttgtgtaacaaatttgagacttattgatctaaaataaccttcttattttatagttaagaaaaaggggttgaggggtgtcagtgagtatgagcagcttgcccaaatagactgtggcagaacctggactagaactcatgattcaccatccaatacttttatttgaagaaaaataatcaaatatttactgtttatgtattatactagaccctatgctaagtttcttgaatatgtgttcacatgatcttattaacaaccttgtgagttaagtattaatattattcccgttttacaagtggggaaattatggcttagagaacaatcccaggtcacttaacaaatggtagagttggaattcaaatgctaaagcattcccctataccactcatctttccttgttgcccttggctgaagcagtttaaattaccactcaaaatatcattaggcttttcatacctgtaatgttgtcataattccggaaggtcttttccacatggtcccattcaaggaaaatgcattttccagtaaaaggctgagcgatgactacatactcatcattcaaataagaaaaagtgtctatggacaatgattgataaggcaggtcttgagactttgcaaattctgcaaaaataggaaataataagtaactgtgagctaatacc

SEQ ID NO: 62154 - DNA, 1604 bp, Homo sapiens
caagcactgtaaggttacaatctctatcagctgtcagatgtttagaaagaccctaaatagggtattgagatcctaattcttgattttactttctcctagaaattgtctgagtgatgattttagctgggcttatcagtcaggaaaggatgggtcttgctgtccttaatttcaaatcagtcttcttgtagtaggcaaatttctctacctttcttttaatttgtcaccatttcacctcaaattatccctaaaggccatgacctttggaaatacctttgaatgttcaaaatcagctgatccagccacagataaacctggtcataatcaatgggtaatcaatatcatattacccataattttatcttcactcattcttcacatcgtaaatccttgatccaaatacaatactattatataaaactatttcttcaacataccaacaacaagaatgaaacagctcctgtaaataattacctctgggatatgaaagaaaatgtaaacattttatttggcagttgtttctgtacacatgaataaataaatggaaaagtacatattaatatttctttttggagtaacagataccattaaacgcttatttacacatcttcactgcaaagaacagttacacaattaaattttgtcttataaaaggtaacttcccacatcactggactggacagttaaggatggagatactggtagtgcttggttctagcagtctcaatgtttgaaaggcattcatttgcaagtgtgataagaagagtcatcatgcattgagttcatccgggtcatgtactgtagaaaatttctgatggcagccacagaatttggtgtctcatgcgcttaagtcaactatgacatgtttgtaaatctgtgtatttcccttaaaactggaagcaaaaagaaaattacgcttattaatggacacatgtgtgaatgatcttggtgcctgaacatttaattcctgaaatttcacaaatttggctttctctgcatcccagttatacacttgagtaaaggagtaatcacttccaagaattgcatattggtaattatttatttgaagaggctggaacaccatggatcctcgcgatggcatcctctgaatatcctggaacgaggagcctccccatttcatgactttggaatcaccaatgaatcttgtcaagcaaatgtacacgtcccctttcactgagaagtgcttcactgcgtacacatcctccatgttaggaatgtcagtttggttagtgaataattgtgttgctttgttccactgataaattacaggacgctgggaactactagacagaattaaatgaggcgttctgagtgtctgaggtgttctgactatttctagatattccacatcagtgtccctgtaccacgcgtgtaaggattgatgggagtagaatccgtttccgttccatttgtaaatggtagtaaaaccagcttttgaactgtcagcaacaacaaagtaccagttgttttcaatcttgaatgtttcaatgtcattgggttttcggattttgagaatttcaatatcctggatttttatgaatttatttgcaaaactgtctcgcttatagatgtgagagccaccaaac

SEQ ID NO: 62155 - DNA, 1077 bp, Homo sapiens
tcatcatttttatgacctagcctcagaaatcaactatattattcccaccacattcttacaagcaagtcataaactaattcacgtttaagagtaggtgaactaggtactgcctcttgatgggatgggggagaggctgtcacagagcacatgcgatggcagatattgttgtggttatatttgggaaataaaatctgccttgcatgtactgtctcaatccttccattatctttggaagtaggtattattgtccctctttacagggaaagaaactgaggctcagaggggctaagcaactggcctatggacaaggctagtacatggcagagttggagttcaccctagtctgtacagagcaggtgttctccagtagcatatgatgctgcttacaggaaaagggaactgaaaaaaataagacattcaaaggccagttcgggagtgaggtattcttctctcccataatcctgatgtcagagttaatatcttccccatatgggaatctggttcctgtgcataactccccagggagttgcttcccagaaactatgtaagtatgtgtgtacctttgatgcctcaagtcttccagatatgcactgtgtgccagcagctgctgtctgccctccccgaccacacttatatggcaaaatagtccagcaaacaatgagcaggagcaagctctgaccccctccgtgaaggcagcacacagaaccagttcgtgccaggaatatcttctctgccgtgatccccctttaaaattacatcttccctttaagtgcaaacaagaacctagacttccagaaagtcatcttgatactcccaggatacttataatctggaatctttagaaggtacttggcactcactgcttgctctgtaggatttttgtgttctaacaccccagttagtcttctaaggcctcagagggcaaggttcatgccctattctgcctcagtcccccacccctgctatacaataccccattcttagtaggtaggcaataattaggtcaaaaggcctcagaaagtttattatattataacaggaggacacgtgcttctttaaaagcattttttgagagcc

SEQ ID NO: 62156 - DNA, 1110 bp, Homo sapiens
cttcccaggtgatgacctcaagaggactcctgaattaatgtctgtacagtaacttctcagagtctggttaccaggtaactcaacgaggaacactgtacctccccatcttcctctcactatccctccctcctcacttcctcttcctttttgctctcccttgttccctcttttcctccctctttttctcaccctttttctctcttctttcctctctctattctctctcctgctctccctcaaactgcgtagtttctcacctctgctcctttctgagctctcatgtcattctcttctcattttctgaccagtttcctcagctcttccggcacatggaccatgatggctgcccccagatggtgccttcagctccccagtcaccatcactgtggtatatgctgttggtatctcaccccgatgcctttactgggctgatgtcctcatcttgcagctgctgtgggtgtcagttaataacagctcatatgtgtacccttctctggaggactatcctttaccaactggaagcttctctcctggagatgcccaaaaggttttgccccacatgccttagccaatgactgtcagatgggtgggggcatgcaaaagtccatcctccttgcctcaaggcaggacacactctgtggtacaattcacactctggacagccccctaggatcaggtgcaggctgccttttcctgtctttgcatagcatcttcccctgttccatgttgctcctctcactcccttcaggtgtagcctcggagcactccctcaatcaatccctctgcctctaaggagcctgatttaggctcatctccttacagatcctgtgcctgtggcaaattggctcagcctttgctgtcctaattccaaatatccaggagacagaactctcttaaagttctttctctttgaactcccattcaaagaccagtgctccctacgtgcagcttggctcaggctgagctcagcccagcatctaggacaaacacctggagttcatttcaggtgaacactgggaacacattacaggtgcaaccttctgtggctgcagaggagacagagttaaatagaatagggcagatgaagggtacatggagaggggacaactc

SEQ ID NO: 62157 - DNA, 1211 bp, Homo sapiens
tgggaattactgttaaaagctccagctagggaggatgctccctctggggcatctctgagtagtactgaccacagatgtggattcctctctggggataaaaatttcaaagggcataggctttctgaaagtgctagtgtcaagcttcttgcctttttactccccatggcttaattcagtcagttcccatccttcagttttgtgaaccaggtcttaggtagatctgcagtgtgtgtgtttaataaggatttactcaggaaataaattgtgtctctttcaccttcaagcctacccaggttaccagtggggagctggcagactgtcaaatcctattcttttggggtaatccatggccagaagcttttgtggaactcactacaggggatgtggctgcttgtcagagatgcaaacaggagcactgaagcttctgggcttaagtgagttgattttcaccaagtttttggaccctcttcaaaaagtaggactattctaggagcttaggggagggatggatggaagaatcacagatttctaagacacagtcctgaccctcagagatgtgtaacctggtgggacagatggatatattgacagctaaccataatgcaaggtcaagtgaaacatgagccttgctcatggtacaaagcaaggggccaagaaacccagaggaaggagaaatcacacctaactagttggttgagaaggactaagatttcaaaagctagaaaagcagggaaagggcattctgggtggttggagccactgaagcacggaagcatgtcagtgcttagatgaatagagattggcaaattgtgtgggtaactggagtgtgggcaaggtagaggatgcaggagtgggcgaaaaaacaggccagatcttgaactccaccttcaggactttctagggccattttaggtcttcttgaaatgtgttgtccctggaggccctgatgctgttgatagaaatcatattaaaatgccttatatcccacattatgattgatatgtaatgataagagccgagttgagtgagttgagctgtagttgtttcagttacatatagatgtggtcctgggaccaatgccagtccagggagagtttggaatcagtttgggataagtacagaacttgagacattaccacatcaaccaagtgtgtgatcgtttttctagtaattcctttttaatttccaaaaagattggttcacaatatatt

SEQ ID NO: 62158 - DNA, 1763 bp, Homo sapiens
tcccagagacaggtggccactaaattagaattggcagcttgacttcacttaggaaaacatcattctgaaacaaaggacaccggtttaaatattttaaaacaatatttgatggaacatactttaaaactgcttatagaaaaggtaacagtaaatcgttataaataatagaccaagatgggaggttatattttgccaacttttgaaaaataagagctggaagggatctttgaaaccttttagtgaagggattctagacacgtctgagggtgtggccatcctttagtaactctggctctctaagcagaggttctcaaaagagaccacacctcctactgatagcatttgttgttttgcctgtctggtattctttccttccttttaatagcactccaattttactttagggaatcactcttatctcactctcactctatgtggttctcatccgtgggttccaggggtgggaacatggcccaacctgggccaataagcattctacccttagccacaacaattgcatcaggatgggcactgggccaatgagcaccagccctgagcttttgttagaactactagagaagaggagttcccagcctttctgttgggcaaggctacaccagcaagactaatgttggagctgttggtaggcatttttccaccatgaaaggagggactgacttaggaaaaagtcaacatagactaaaatagggccaagagtcagggaatgacagatttatgaaagtatcatctgagcatctggtccagatatttctgaagctagatgttcttttatgtttcaactagtttagttaggcttcagtaacttacaaccaaaaaaaaaaaaaaaattcctggctgccatgactcctcagggatcagaatctgggctgtgcatttagaaaaatcctgataattctgatacactcattgagagtggacaggatttgaaaacaggaaatgggagtatgcatttactcagtggagcacttctagttgagaataatttaagctagttgaggaaatttggccaaaatcacatggctagaatacaataaacctcttgggagcttgattctgtcttcttttggggaaaaaaaaaaaaaaaaaaaaaaaaaaatatatatatatatatatatatatatatatacatatatgtatatatatacttttaaaaagtaaaggcacacatcacttaatataaatttgctgacagggacgatgtggtaaaattgcttcattttatcattcagggatatctgacttttattgatgcaaaagccacacagaaatttgaagagctatttttcacacagtgttccctccactgatgtaaaaacaatgaccacattttaacaacagcaagttttattggaacataggtaattttctagaggccaaagtccctcaatgttcctcaataagaatgcatgcatatcacacactgtgactcctgtcatcttctatgttggagcacaccaatgctgctggggtggtcagctcacttcactgccgtcttctacctgtaacttcttggtgggccccactgcctcacctgggtttctgttccacctgttcttctagaggtccacagacatcctcagctctcacagagaaagatgtgatggggtgtaagcattttccacctatcctgatcagtgattacagctcctatacaataatgtaccgcttctacaactcataccagcttagcagaatggagtggccaaaatcccagatgcaggctcccaggtcagacttgctag

SEQ ID NO: 62159 - DNA, 1133 bp, Homo sapiens
tgttttaggagatgtggaaaagagtaagttcttcaagatttgggtgaaaataagtgcatatatgactattttgtgatagtagtgggaaagaggtctttatatttggtcttttaaaatagtatctgtgcttattcacactccattcagagtactagtccctctttactaaaccttgatgaattctgtgctaaaaatacttctttcccatttggtgcactgaaatgtcatatccattaaacaccaacataccaaatgctgcttgcagatactcaacccagcaaacccaagtcaacaggaaattggatcttcctcagcttgttcgtactgcacatctcaacagattattctgaaggattatctaaatgctaattattatcttagaactatcttagaattatgaaataaagaactcatctactataaagaaggtggtattgggtcaaggtctccaaactttcaagctgtttttttcctcctttataacaggtagttacagaaatttcagaactgaaagggacctttgggatgaccttgtccagttccaatatcttctagaaaattgaggcaccaagaaacttaagtgtcttgccatgggtaatgcttaaaactagtatgttctagagcttttggacaactttttctaaccacaggcttggagctactagcatgatactggttagtccaatgtggttatttatatcagaggctcccaaatcccagttagtgggcaggtcgtgggctatcaacatcagaatcactcaaggaacatttaaaaataagaattcctgggtttcattctttgaaaattcaggtttgatgggtttgaggtggaacttcaggaatctgcatatttagttaactttctaggtgattttggagtggggcatccagattggggaaccattatgaacagaagtcagcgttttatgttctgttctctgctgagattggcctgtgataattttagccactgactagatacttgcaggaaagctaaattaggaaaagtcttggaccactaaggagcctctaagattttaatctgcaaggccaacctcaaggtgattaaagtatagagagaggggagctagtgctgcccttgacagatacagattgatttgagatggaagcac

SEQ ID NO: 62160 - DNA, 5220 bp, Homo sapiens
taattctgtttctggaactcttcctagaggaagtaatccaaaaaatgggggaaaaaagcttcatacacaaagatgttcatggctgtattactttctatggtaaagatctgaatatattataaatatttcccaacaataaataaatattaatatttccatttaatataatattatgcagctactaaaataatactttacaaagaatatatgatataaaaatgcttattataatacaagggagaaaatttgtagccattttttgttgttttatacaagcatgcattaaaaaatagcatagaaagactaataaaaagaaaccacatcagtgctaaaaacggttgtctcttagtttttctttattttcaaaattgtgtgttatgtatatgaatcgcttttataataggaagatacctaaataaatatattaacaaaaagctgaatgatagaaggacattttaagacaggcatctttcatgattatagagaatggattggcatactacaaaacgattgcttctaaaacacacaaacagcagaggaagcttttgtgttagaagattattggttgtgattagatgggttttcagcatcagggcacaagaagcaccagtttggtgacatcgagcaaggaggcagggctacaagggactggcagatggcaagaacctacactctgcaggcaaatggccaggcgccaggatcagatgagggaaagggcaagctaggagactgcgccaggggagccagtggtaggggccggacaggagccaacacttattgaggggttgctgagtttgtgccaggcactgttttggatcctgaaatacaggtggagaagactgacacagttcttgccttcatgaaacttacagtccatggcaggggtttcaagctgtttttttttttttggaaagggctagacagtaagcatcttaggttttgtgaagctatacaatctgtgttacaattactcagttctgccactgtagcttagtaaaagcagccacagacaacagtaaatggatgggtgtggctaggtaccaatgaaactttgtttataaaaataagtggtggctagacttggatggtggcatagtttgccacctcctgatctaagtggaagacagacagtaaacaagtaaacaagttaatatgataattatggtttgtgatcattgtcaggaaggaaatcaaaagggtgatctagtagtgaattagtaatacattacattttaccttttaccgagatgtgacatccatacaataaggtgcacaaattccaggatatagaatattcttaacaccttagaactgggtcctgaagcattagaatgacctctccatccaaagaactgggcatggggaagcattccaggcagaagggaaaacaagtacaagagtctgaggcagaaaaaggtttcgcatcttccatgaacagaaagggttttcatggggctagatagcagtgagcagggaatagggtgggatgctgtgggtagaggaaaaccccacagactttagaggccattgtggacattctgtatcttattctaaatgttataggagagcaatggagggttttaagcagaatggcatgatctgattgaagtttcaagatgataagtgaactgctgtcttctttctggacttttctgtagtagtgttcagttaggacggggaactggggctaggggctgggggctgggagcatccagcctcagctggagctgagatgggctgtgtgaggaaaatccattaaagaacaccattaccatacaccacatactgaaccataaacatcgatttattttgtaaaacacctctttgaaatattactgtaactagatttattggcacctgtttccgagcacttaattaggagatactttaagaactgtgcatcaaagacaagaacctgaagaaaatgcaagcagggggttaagaggtgaggtgagctggcaggtacagatctagcagcagcaagtcatgctgccgaggtggaggctcacgggaggcaggaggagggggtcagaatatatctttagtgtccaggaagagaccccggtggtttttggaaccagagagttgaggtttgctttcattggtgtggcttggttctgatttaatgttttgaagacatattgtagggaatagttacaaagtgtccctaggatggtgaaaagaggcgggtggtgagggggcaagaaggaatggagttttgtaaatggagaattagaggaaatgataatttggggccaagagccttcctccttctctccctacctgcctctcttcttttctccttccttccctttcatttatttacttacttatttatttatttactatctaccttggttgaatgtcatctcctttcttttttaaaaatgcagaggcgagagaccaagaggaagaaattgaatcagtatgtactgccttactaaggttgtcatgaagcaagcgcaaactaaaatattgttcatgtttgtctgacattcaaatttaacagagcaccctgtatttttatgtgctaaatctggccatccgtctatgcctgtggcttggattttgccatttcagcgtcagcgagtgaaacctcctcctaattactccctgctaattggaaccagctgccaccaggaggcagccgggcgctgcttccacccaagatgaggacagtgtctgagattctagggagctctgagtctaccttcctctcgaactctcctgacacccatttccacttctagccacaactttccactgctctctcctaatcttgctttagtaaaaatagctaaactttaaaaaaaattatactccatttaaaggtaaaaagaacccataacatcacatgcatcttgcctccctaaataattgcagttagaaattaattcatcttcctttaaaaacctgaatttagcctcaactagtcacagcttctgtcactcgcccctttgacctgggggtccccttcgctcccagcttttcccgtgtccctgtccttgctccctctctccactgtgcccttccttcttcagccgtcactatggttacagggggacctgtttctgtggtgccctcttccatagcctgcttccgaggtaatttccccagtgaattccacctcctctcagttatctctgcccttatcctacttcagtgaggtgggtgggggggggaatcagagagagaaagaaagcgcatgcatccagcagctcagatatcaaaattctttctgttaccaggagactttctccaatcaatgttgcctctttttttgttttccttctttatgaggaaaagctgttcccgactctgcctcttactctggcataaacctaaatccacttataaaagttaactaaacacctcttggccttgtgactgtaacactgagcaacagtttgcttctttgcatacctccaattctggagtcaaaagggtccctttaggacagaaaaatgaactgaagaaagaacaccagctctgtcacatgggggagacagcgacacagaaaatgttaaccaagcagtccaggccacagagagatgtgtccaaagcccagggccccgtaatgagaggctacaggcaaagactttcccagagaggtggagaggaagcgtctccaacagtgtccaagcagcaaaggtgattccagaaagcttatggtgaaataacatggaagcaaagatcacaaacagcagtgttttgataaatatttggatgttggtttgtttggtttctgctaatttgagattctgtgagttagataattttctttgcttctcatgagatataggataacctactcaaattatgcaaatgctcattcaaaggaggaagcagaattatgttagtctcttctataattctattgaaatgatgattcatagggtccattctcaaagaagacttgcatcaaattaacgcagtccagcaacatttttttttaaatgtcataaaagggctgtaactcacaggaactcttcttaaaatccccatgtcctcacccttccactccctattcacagctccttctggtctctttcagaatacaaattctgacaccctcctacggcctaacctgtgagttactttgtgttattctcctcttctcccaattctgcttcatgggagtccccaaaagagggctatgctgggaacgctgtgggagaagaagaaattgactagaaaaagccggaaccttctttaagttgtagggcaactggaaagctgggaacacattgacagcagcacttttgcctggttaaacttatatttttgttctcaaaatgtaagtttcctgtaagtccagacctgttgggatagtcatctcacctagtggcgaccttgagtggtatttggtacttgctaagctgctgcacatgaagctgtgctgtgttcaagggcagtaaaattcaactacactcagtctgcctgcccttaaccaaggaggaaagcaaggtagtctgtgtgggtatgaagccagctctctcattgcgtgtacaatgcctgccatgctcaccatcacctgagccagatcattggccttcctgctaggaggatcgagggcagaggtctatgggaagatgaaagcaaagtgtttgttaccacaccccctttgttatggaggtgatgggcattgttgatataggtgatgcatgggcaaatctactgacatgctaaaaggatgggtagttgttcatgctgaattgaattaattgtttatatcttggctgagtcattaggaatctatgttacagtctctgactttgcatgatccaaagctgaattccgtgactgttattctgattttcctcttggaatgaccaggctttgggggactaatccaatcttccaaggtgggccagtggatcgatttcagggaagaacagaagcttcacgagggagacatagatatgagtactctcttcttgctaaggaacgtctatttagaataccaaagcaagatgctatttaaatactttcttcagtttcattctttttctctgtcctttactgccttccttatcatctgactgaggcaggaccttggcaaaccttattcagcaaaacaaattatcagaaccttgggaacccctggactctgttcttggaatctccataacagtcttgctggccactgtctaggaagaaaatttctttccccaaaactcattgctcacattagttataccttttctgggatccaccctt

SEQ ID NO: 62161 - DNA, 1030 bp, Homo sapiens
gaggagccggcggccgccgaggcagctggggcgccagaccgcggtaggtgctggctctgcctttcctcgccgtgttgctcccgcaccgagccgggtgagtgcgcggtgtggatcgggctctggtctcgctcgggggtcccgagcgggcgccggcgggttggggtccccgcaacccgggcacagtgcccgccgcgcctccgtccccaccctgcccggggctcgggaaacccctcgagctgtcagctggggggctgcaaagcggaattcccggcgccccagccggcgctaagacggaagaaactttccgattgttagcagtccttttgggattccgaggctgctcctgtaattagtgtcggggcagggctgtggagtcagactgcagtttggcgtaccctcccctaggtcgtaggtggggggtcagcgagagaggccatcctgcagtggggcgacgttgcgaggaagctgaccctgaaaagtgatcccggtggttaagggttctctccgaaaaggaagctgaaaagcatcgagtctagaaaaaatgttcgtcctagagttttagaatcttggaaaggcagagataagtgggaccgctagtttttaacctttagggatacaaggactttttagcaaacgatgcagaacaaggcatatcttgttaagaagctcacagccccgtccccaaagtcagggacccctcgtgaagaacactttatgttcagtccccctccttcgacacatgagcaaagtgaggcccaggaaggtgagggcttttgggttttcgtttgctttgtctcctccaagatgtggaacgtgggggtgagatggggcgcatgtccagggagcaccagggttaggatcccagcttgccatataccggcctagggccctttccactggccacaagtgctgcttcaagcacattcctcttagaagtcgaccatctaccaggagcagcttcctgcaagaagaagggaataggcagatctctttttaggacagttacacggcctgcaccaccttgtcctct

SEQ ID NO: 62162 - DNA, 2350 bp, Homo sapiens
gaaatttcagaggccagaccctaaggctgaccacagccaaggcatgtattttgtggtgcttcacttggaagtcttctaaagcttccttctcgtgggctgcgtgtgtgcagtttatttctgcagtatacaagcacatggatacagaacagaatgaggattctggcatcttaagggaaggactactgctagttccaaagcagtatcttcagctgtgcacctagaacaggaagaggtagagaagggtgcctttgaccacaaggccaggctgtagaatgccccagaaagcctgtgcatcagcatactttggtcccagtttgcaaagtcatctcactaacctgaggatgtgtaaatgtgttacctggtgtttacatttatcagagaagggcattttaaaaaacattacacaatactgttttatagctatcacattataaagtcctagattggaatgataatacgagttttcctacaagttgctcatatccactcacccttcagttccactgtgctcttaatcaatgagggccacttgtgtttccttcttaccctcaaccctgtttttgtgttaatttcaaaaaagaatatatcccgcagtgtgtgacctttgttttagggcattctctgcccaccctgctgcttttgctctctgaatgacagaggagtaagactgaaagcaggttctactcctgtgtaggaaactaagacatagtaagtggctaaacaagtttaaagctcacacagattgtcattaatgactgaatacttgatgccctggagaaagcactggtttcctcgttcagatcgagccaagagtagggattagatggcagttctgtacaaagcacttgggatccaaagggctagataacccacaccctccccttgaggagtttgtgctctgaatgggaagataagtcgtgaaagcatgaaaagttaaatatagatttgattaacagttcaaaataacaaaatggagaaccttcccagattatgctgttgccgatagtgttagactcttgagtctttccctgaagttctctcatctttcattcactgaatatttatccagtgtcttccatgtgccaggcatgtacaagacagcaagatcccagccctggaagagctcacagacttgtgggaggaagtcaaataatcaacagataactgtataacccaattataacccattttccagaaaagaacactttcttcataaagccaatttcgccagtgaggtgtggcgtaagatatcacttggaaggattttttacttgccatcttgacaagtgtttcttaaagatttctctcaccatcttggcaagcgttctacttcttgacttgtaagtgaggatgattcttcagtgagccataggaaatccatttgatagggcgaaacggcattttaaaaatgcaggtttaaattgttatcctcatctatggttcttcataattgatggggaaaatggtacaggcccagagaaatgatatgcttaggaggtaataaagcctgttgacctttgacactgttccatttttctcagtttctaagtgaaaatgataacacatacacttggaagcaaggactaaccagaatttaatctttttcagaagccaagaagaaagcaccctgtcctggacttggcttgttttacacattattgtctgccttccttttctcagtgggctctttatttgttaaaaaagtgcaagacgtccatgctgtagagattagtgcgtttcgatgtgtgttccaaatgctagttgttatcccttgcttaatatacagaaagtaagtattttttaactgcaaagtagaagatattaataaatgtgtgtatatcttttcacctgcctataattactctatctgctttatccatctcatatacttaccagttcctatgccccttggctctgcttaatgaaaagtcataagcatctacccacagaagattctaccatgagcataaaccacatacccaacaaagtggggagaaagaaattttgtttttcaccacctccccttttgaaaacagagctttctttgtataattcctcttgtcttgtatcaccctcccttctttcctttggcataactactgtttggaagttaaaaaaatgaatgaaaagaagtaatagtgtatcctagtatcagaagtttttttagaatgggctgctttcttaccagggcaaatagaagattatagtaataatatttaggtattcctcaaaaggtgatggggtaaccctgagcaaggttactttcgtatttagtttcctcttttgtaaactagagggaatgatactgtgtgacttctgccctacaaggtgattccaagggtcaaataag

SEQ ID NO: 62163 - DNA, 1939 bp, Homo sapiens
ctaatgaagtctagccctggcacacgtcagcaagttgcacctagccaggaacctacacagagtgggtacttagtaaatatttattgaaaaagaatttgaatagcagtaatcatacttttccaaacactacatgttctttttcagtgtgttttgactctttcctcatgagaacaatgaaaacttgtctcatattcaatgactaaaataaattttagcagtttcaagttttatagaaaaattcatgagattgagaatgagcattagctgggtctaagtttccttacacagggcagctgaatcttgacattgtatttatcataaaagtgatatgtttatagaaaatttggagaaaataaatataaagaaagaaaattacctatgagtttatctattaagatataaacatgattaacatttagtttattttcctttttgtcctttttgcaagcatatatatacatatacgtgggataaatatctatattaattgaattataattttactatgcatgtaattcacttgcactggttttgcttttactgtgaacactttactgtcattaactatacttagaaaatactatttttaaaaagtatataatattcatttgtggatattataattaatttactattccctcattttttgatatttagtacttttaaaataatgtttaattacaaattgtaatttaaaaacaaatattaatttcatttaatatgcatttcttcatttgaatttacagaactgggtttataggcccaaaaggtcaacgaattttcctcattctcagaggagtccttggttctaccgccatgatgcttatatactatgcttaccagacaatgtccctcgctgatgccacagttatcacgtttagcagtccagtgtttacgtccatatttgcttggatatgtctcaaggaaaaatatagcccttgggatgctcttttcaccgtgttcacaatcactggagtgatccttatcgtgagaccaccatttttgtttggttccgacacttcggggatggaagaaagctattcaggccaccttaagggaacattcgcagcaattggaagtgccgtatttgctgcatcgactctagttatcctaagaaaaatgggaaaatctgtggactactttctgagcatttggtattatgtagtacttggcctcgttgaaagtgtcatcatcctctctgtattaggagagtggagtctgccttactgtgggttggacaggctatttctcatattcattgggctctttggtttggggggtcagatatttatcacaaaagcacttcaaatagaaaaagcagggccagtagcaataatgaagacaatggatgtggtctttgcttttatctttcagattattttctttaataatgtgccaacgtggtggacagtgggtggtgctctctgcgtagtagccagtaatgttggagcggccattcgtaaatggtaccaaagttccaaatgaagcatcattgctgaaatacatatttttttcaagtacaccatcacctaattcacatacagcatacgcacacatctggaaaatctgcattttcttcattggttgtatttaataaattgcctaaagtaccatttttgaatatagtatgtctttagttaagaatagctagtctgtttggtgtaacaattttttggtagctttggttttggttttggttttttttgttgttgttgttggggtcaagttggtgagaggagagctcattgtttgaagaaaaaccaaaacattttatggctagtaatatttatgtaatttttaaaatgtatttttggtactgatgggatatgggtggggaggctattttagatattcttttagcagtgtagagcctaagaaacttggttctactaccatgatctttataaactatgccttccagacaattgataatgctgct

SEQ ID NO: 62164 - DNA, 1045 bp, Homo sapiens
tggagggtggccggtggtttggtcctagtatagatcaactgttacaggcgagggccatttggtggactaccaggattgtaagccctcctggcgtgtttttggagggtctgcatcaatctgactcagtcggaagtctttctagggaaattgaattcctcttttcttgtgggagttcgactggaactgcaaggctggtctgggggcaagaatggacatttcatttctcctcctcaagtagtggcaagcctcagtgatctcttcttagattttggtccaaacctgcctttgaagaaattattgagtaaccccaaggtttctcctttgagtaggaggagatgttctggacatttgaccttttgtgtgtagtttagcgtggcctctgcaggaccccctgtctctttgcagccagggggcatgtatacctcttgcggcacagtctctgaggcccctaatgatctttccccacctgactccctgaatccagttatcatggcttaaggtatagagcctggacactctattcgtaaatacaagattctctagaatcaaatttccctggggtttacctagtacaaccttggatgagcaactgacctttgcgtaaaatagcaatagtaattgtacagggttgctttgaggccaaagtgagatggttcacctaaagcactttgcatagagacagacacatcctgagtgctcaaagttaactactaatattactgtttcttcccccagggctcctcaagtcttcccagtctgcagtgttaggttttggggaggtggagatggtaggctagatcatgatctaccaaagatgtccaagtctgaatgcctggaacctgtgaatatgttactttacgtgacaaaagggacttttacagatgtgattaaattaaagctcttgagatgatcctggatgatctgggtgggctcagtctaatctcgagtgttcttagaagaaggagacaggagtgatgtgagcaaggggtcatgagccaagcctctagaagctggaaaaggagagaaaatgagttctttcctagag

SEQ ID NO: 62165 - DNA, 1048 bp, Homo sapiens
tgtgagaatcactagcctcagcctcatgggaagacaaagtgaggaagactattagccagggtggatgggttaactcacagtatggggagacagctgcctggatttgaatcttcacttcacctgtggttcactgtatgacttaatctgtcaaaacctcagttttcttatctctaaattggaaattgtcatcttggtacatacctcaccgcagttcctgtgaagactgaataaaattatacacacgaggtgctcagcacaggtcatggagtcagaggtcttgatatagtataggggctgctgtgtgcaaggtagttatgttttcttgaggagttatgggtaaaatgaatcaaattttactacctcaaagctgctttatcttagctgtcatccattgcaggaaagcaaccaaggttattagtcaggatagaaaaaaaaatgccagtagcaactgagagggtagaatgcttttcttgaaaaatcttttcagagttagattcagatagaaaagttcctgagatgaatggttaagtgactagtagtatgcattgcatctattgtttagctgtgggaaataataaagaaaacgagggattggtgcctgaaccagatccttaccactgccccactgggaacagggcagtcagggttgtttaaagactattctggatgttttgtgccccagtcgtttgagagtgaggcttatagacagtggtcagaaaagcttcctgactagaacgtggctcaggagaaaggaaggtaatgggagcctgggaatgataaacaggactcagaaatgggaatgaataggccaggttcagggaatagggggctagcgcaccctaactgaaatgagtgtcaaactaatgggttggagaggctagtgttgatcagaccagcctcaaacccagctctatttggccgaatgaaatataaactatcacctaaccctagtaaatttccctttgataaatatcaattaggccaattagagtagttttatggaccatttttacttggtacctaccacatagtgggtgttaaaaattat

SEQ ID NO: 62166 - DNA, 1743 bp, Homo sapiens
ctgcgaaaaaccttaacattaactgcaacaacatattgagaaaccatcagcatggccttcctcagagacaattttatgaaatgtacaactctgttgctgaggaagacttgtgtttagaaactggaattccttctccactggaaagaaaggtgttccctggaattcaactggaactagacagaccttccatgggcattagtcctttaggaaatcagtcagtgatcatagagacaggcagagcacaccctgacagcagaagggcagtatttcattttcattatgaagttgacagaagaatgtcagacactttctgtaccctatcagaaaacttaattttagacgattgtggaaattgtgtaccactacctgggggtgaggagaagcaaaagaaaaactatgtggcatatacctgtaaactgatggaattggccaaaaattgtgataataagaatgagcagctgcagtgtgatcattgtgacaccttgaatgataaatacttttgctttgaaggctcttgtgagaaggttgacatggtatattcaggtgatagcttttgtaggaaagactttactgacagtcaagctgccaagacctttttgagccattttgaggacttccctgataattgtgatgatgtagaagaagacgcttttaaaagcaaaaaggagcgatccactttgttagtcaggagattctgtaaaaatgacagagaagttaagaaatctgtgtatactggaacaagagcaattgtgagaactctgccttctggccacattgggctgactgcatggagttacatagatcagaagagaaatggtcccttactgccttgtgggagagtaatggaacccccgtcaacagtggagataaggcaagatgggagccaacgtctgtcagaagcccagtggtatcctgtaagcatttgagtttctttttaccatttctttaaacttgctttttttttcaaaaaaaagtccaaatttccattgtcataattgatgagaaattttaagatctgtcaaattatgattcttaggttaagcatttgtggttattgaaaacagatactccaattgatagctatcaagattgagttgatactgcaacaacataaaagtgtgtcagaaaataatgttattgggagtggaggaattagggagatttcctggtagtggaaaaatggctccatttgttgcttatctgtttgtgttcttttgagataaatgcctgggtcctgttctatggtgtagttcattattgtttttaggtctccagacctaacagaacttaattctgttttttttcattttccaactaatggccccacttccttccctcttaaacttttttatgccctggattcctttggcaaagtgatgaaacctatggattcagaatgatgtttttaaatgaatcagatgaaatagaaatcatcataaaggacaagttatgcggatatacatttatcatgatttttttaaattaacctgacaatttaggtgcttctttattaatacatttaataataatatctagttatgtgataactatcataatttcaaaatagaattagccctcatctgtatccacagattcaaccaactgcatatagaaaatatttttgtaagaaacaaaaaataacaatataacaataaaaaataacacagattttacaatctaatacactgtaacactatttacatagtataaggtattctaagtaatctagagaagatttaaagt

SEQ ID NO: 62167 - DNA, 1024 bp, Homo sapiens
ccttcccacacatttaaagaatgtgctgtttgtacaattaattccttggccctcacattaaacatttttttttcttggataccttggtcagaatgacccatttaatttatatttgcacagctgtgtagagaagattggctttgaatggaaaacattaatgaagattaatgcttgctgacatactaactactggtatcctccttctcctcctcataagaaattaaaaccctatcccttatccagttacagtcatactccctctctcctgctctgaaataagacaggatattttgatgggtggctaaagtctccaagctaaagattggttaggggtgtttttcctttaaaaaaaaattctcaacctgcctgaattttgaggagtttagatacatatagttatcttgaatgtgaagtacaagaagtttctgcttctgccttgctggaattgctcatgtaacctgagatccacgtgcactcagagaatgtgaaggtgccagggcagaaattccactggctcctgtattatcactttacttatttcccttctttgttccacaagatttactgtacaagaatatgtatgacaaaatagaaaaaaaactcagatacactaaagagtaaaaaacaaagaataaaaatgtaaagattgaataaaaaaattttacatcagtctagaaaagctataatttaaaaaggaaggtcaaaagcagcttctgtattgctgcttcttattctgctttcttccttttaaaagttgcctttcttcttcatactttactctcaagaacagaaaattaaacctaacaggcaatttttttttagtgtttcacaaaaatgcctttgttggtatacatgtccttgattctatattttgtctctttcaaattgaagagacctgaaccttaggggagagataatgtctgttgtgtgcaaagggaccaaccgctaataaattcatcttctgagttgtaatttttatggatgataaaatatccattgagccccactgttcaatgttgtaagg

SEQ ID NO: 62168 - DNA, 1018 bp, Homo sapiens
tttcatgacatgaaaattatatagaattgaaattgtattgctcattaataagggttagggagcacagccatactcattcttttatgtattgtctgttggtgcttttaccctctaatggcagagttaaatagccacaacagacactgtatgacctgcagaaactaaaatatttgttatcttgtcctttacatgaaacctttgcctatccttggcttagaacatccctcgctacctggctaactcccattcagctttcaggcctgagcttagtttcactttctcttggtggtcttctctgccagcccccaactcccaccctggaccctaggccagagtttctgacagtcagtgctcaatatgtatttctcgaatgactctttgaattataaatgaagaagggcggtttccacccacttctgctgtctccttctttccttccccagaactactgcaggcttgttagctgtcctccgcctgaccctcagagcttggaaccagttcttttgtgcaatacctgtaggacggaatcaggattttccattgaaatttgaaaggatctttttcagtcctgcaaacccagcaatccatgcttgtcatctccccagacttggcctgaaaggtcatgtttgcatctccttgtccctggctccccatttcaactggctgttagaacccttgagaaagtttctggatcctttttgcttacaagggaacacctgagacagctgtgtgcttcagtgggccaagaaggaaacacgcctcccgatctcaagaccccagagctctgtctctgctcttcagaacccccagtgcttcctagacagaattttccacatggactggagggaatctagcttctgtcagtgggggttcggggatggacatggtggtggagggatagggacagcatgctgtcgttgtaagttggggagatcatttcattcctggggtttggaaggtgtttgtctagttccttcaaaccatttgacaccaatacttttggtaagagacctgaaac

SEQ ID NO: 62169 - DNA, 1983 bp, Homo sapiens
agtctaaaattgtgccagtctgtggcttcctgatttaaatcctgaccctgagtttcaggttgagtattctacctccctcagcaatgcctccttgaggtttgatttggaatgaatcttgtgactcactccctgacgctgtgtagtagaagggcagaggatttggctaagcctggaaatgtctgtagaagtaagatggtaagtactggctggatgctttctgtgtcttacactgggcttcccagatgtcttgtcttttatcttttctttcctttcattctcatggcgactgtctatgaggttaaacacccccatttcattgggtcctgtgtgaccaatgtcacaccatgttagcacttgaacccaggtctggctacctctaaagtccatactcataactgctcctaagttcctctggaagattctgatgcaacttacccctataacttggcagaaattctgttctcttattaaatgtgcaaatgttgagctggatgagtccctgagctcttttttttcttcaaatgtgaactgggtgtgacttttggatgaaatgggagatgcagggaacaataccaattcttaatgcgaggggtgtgttgtctattgaaatggctaagatttattttttatgactcagcctgctaggaggaggaaaccaagccccaaggtttgaatgttttacagaattgctataatttagaagtacagttaagaagttttataagtaagtaagcaagagcaaagtccaaagcaaactgcacacatcttgagtcagaatctatagcttattcacaatcatgctgagatacccaaaaatactggcaacgtatgttagtatttttccattttaatttagttttctgtgatctctcagggttctgaccaaccgacctaagtatgaaagacatgactcagtagcatttctttccataatcacaccattagaatgaagttttcacctacttcacaaggttgtgaggcggtaggaaaaagatctaagcgtgttgtatattaaagtgcttggcaaacactatttaaacctccctgcaagtataacttttctcctcttactccatgctctaaaggattcagagtgaggcacctggaggaaaaacagacacaaaactacagaggaggcaacaaaacaaaaccagaggcaccctgttttcctttcataaatgctgcaagcgcagtcgaacccgctatggaaacccgacgctttggtttgcctttcagggtgctggcatgaatgaataataacttcattttcaacttgagattagataacttttatcaccaacacctacttcattttatccctatgttttaatagaataaggaatagagaatcaatttgttggtagaccatgctgagtagcttagcttcagaaagatttagcaccaaattataaatggtgacactttaatagtgagtgtgatgtgcattgggagccagcctgtgggagtttggcagttggaaagccccatagcttcattttttccagatttttgtacccttccatcagatagtaactccttagccttgagaaactctcttccaggacaaggggaaagtttatttgagttctaaattgtttaatagcaaatgcattatttgtctctttaatgagaccaagaaaatggcttcagaccctggttgaaccagccagttctccttttgatggccacaaaccaaatatgggcagtgtaatgatggtatgactctggcctgactaatatttttgtgaggagaatgccattattatggtgaccatattttccaaacaaaaaattgggaactttttattcagaggaaagaggggcagaatatttgaaattgagactgacccaggaaatccagaatgaatggtcttggtagctattgatcacagcataaaggaaaaagaatgtgaatgaaccagtgcaaatctaattggttgctagaaaagtcaggagcctcaaaatgaatgacttgctagtggt

SEQ ID NO: 62170 - DNA, 1034 bp, Homo sapiens
cttccccctaaataccaactcacaaagagataataaacaaatctttgagaaaaggtaagtgtgagtccctcctccctacttctccttcttagagtgagggacatgaggcaggagaggctggggaagacagtagaggtgtcctcgcagtagataaatctgttactctgtattgcctgactgtaaaatttgctgtggaacatttttattggtaatttcttttgcagatgtttctggagaaagttgaaattatgctggtaaaaacatatctagactccacattgcaaatttaaacatattgtattttatttccttaagcaaaaagggaactctttttccccctccttcttttctttctttctttttctttttttcttttttaagctagaaaaaaggaatgaggaaagtccaaagtgtcttttcctatttggactgaaaaattaattatggctttgggaataaaggtagtgagcatcatatctcatttctagttaaccggtagttccctttacatataaagagcaattacttttgaagactcaaaaaatatatagtcttaaggtgtgcttcatattatttccccatggtttcatttttatttcattatcctctgactccatgacaaaatgtttatttggtgcttgcaaattgaaaaaatctggagtggaataagccacttgccatttctgattaattgccttggatatgcttttaaatcctcccactgaacctgaagcgtactgtcccaaataacgctttttgaagagaaaacttttggaatgcccttcatttctttgagttttcataagagtggaatgtgttatacaggcagcctagtgagcagttaagagctgggctctggaaggagtcccggctccaccgttaactagcagtggagccttcagcaatttacttaatctccctaagcctcagtttttctcacctctataatgagaatcatgaaaataacacctaatctagagagtcatgaggattcggtatctgaaaaagcaacatggcacatagaaattgttcaa

SEQ ID NO: 62171 - DNA, 1043 bp, Homo sapiens
ttcatcaggtgatagacatttggattgtttccaccttttggatgtatgaatagtgcttctgtgaacattcatatgcaaatttttgtgtggatatatgttttcaattcttctggttatatatatctaggaatagaaatgctgggtcatttggtaattccatgtttaatattttgagaaattacccaacaatttttaaaaaatggctgcactttttcgttttcataggctgttttttcatctaccataatatcatgattatttatatatgtcttaaattttcttcaaaaaaatttattttccttaaaacgctcataacagattatgaaagtatttttaatagctgacctacactccactggttacataagcaaattaattgttttcctaattttggacattttacattattattataaacaatgatacaatgacatttgtatgcatgtctatttctttagtgtaagtatgtagaggtagagttatggggccaaagggtatagacatatttaatatccttgatactttgatgccgcacttttctctcagaagaattaccaacctatacttccacgaaactgtgtcctttgctaatttttctaaagagaacttaacaaaaacttatatgtattagttctattgctgcataacaaatgacctcaagtgtagtggctttaaacaatagaaatttatcatctcagtttctgtagaacagaaatctggcatggtgtggctgtaatctttgctcagggctaaaatcaaggtgtcagctggggttgcaattctcacttggggctgggatcttcttccaagctcacttgttgttggcagggttcatttccttctcctactttctattcattaagttattttctttttctgtgaattaggaaaagacacacttctattctattcacctttagtagttgaatacctatgctctgcaggcttgacatttgagaaccagtgaactagattaattttaagaaccttctaggtataatattttcagtttgttagctatgtggccatctttttacaataga

SEQ ID NO: 62172 - DNA, 1053 bp, Homo sapiens
gaagattgttcccagatttgtatgcttgccactgaatgacatagtcaactgttgtctttctgagttcaccctccagaccatgatgttctatagcagatcttggcaacacatcaggttccgggaaagtacatgaatcatgatgggactctttaatctgtacctctgaacttcataaaaaacatgtgattctattagcagatccctagctaagttccatcttccctgctgttctcacatcctttcatctcctctctttacccactggcactcaccttccattgccttctcaactcttcgctggtctccatgtccaagcctcccttcctgttgtctttgatccaatccccaatcctttcccacctggactcctctcccacatgctcccttcctaatgcctcttcttcccattcttcagaacacctcctatgctatgcgcaagctctgtgtacttctgcctcactcaccactctccctcctactcttttcctttatggtggttttgtttttaactgaagacatcacatactctgctgtattcccatgtggaagtcccaccttcttctgtgggaaaggggggaattttactttctcgtcgctctgttctgagagtggatgattgaactgccactttctccctgactctcatgggatgttcatgtcatcttccaaggcccttgctatcgcattgccacatctcgtttccaccatcctagatggaatattgacaacagagcctggcacatagtaggcattctaatatgtgccacgtgaacataataaatgagcgagtgaataattgattcttcctaaaaggttttagcaactgccacactgctttttgcctatcctaagcacattttcttgtccttatttattgattcactgaatagacatctgtagagatgctaggtgtggcttgccactgggagtacagtggcaaacacgatgtggttcttctcttggagcatgccatttagtgaggggaagatatattacatacataaattaattacagttgtgagaagtgtttgaagaaaaaagtgcaggatttta

SEQ ID NO: 62173 - DNA, 1064 bp, Homo sapiens
aactgtgtgcaggacagttaactactcctgttatttcttggcttgctaggtttttattgttactttcagctgtctttcagccttttacccatcgtccttcacctttgatgagttctctctggtactttggtctttgagaaagacctaagtacactccccttagtccctcatttaaatgcccattctcacagcacccctgaaccttgagatgtctttagattctgcatgaacacctcacaggtccaaactcctctctgcctcaggccctttgtatgtgctagtccctctgtctgggacacactctcctagctaccagcctctttttacctggttgttaacttcagtttatgttctcagggaagccttcctagaccaccacaccccttctcctagctaagatcagctattagttgtgattctttcatgagtcagtctctaccatgagattggacatgctattagcccagggaccaagtaaaatgtttcatttcagtgcaatgactatttgtgcagtgaatgaacaaatgaggcctgtacttctctggattccgagtcagcttctctgcttttagactttattttccagacctacattcttactgaaatatgtgtgtttcctcacatcattcacctgtccttttcactggcccccttcaccagcctttacactgtttccattgtaggcccagcctgcactctcaaaaacagagttatccaggcacttctgtattctgttgtttcttaatatcaacaggttgttttagagatagtttgtttgcttgtgtttatttattatggatatttcaagaatactgggaaagcacaaggagcttatgacaaatagccatgtaccactgcccagacttgcaggtggaaacatttgcagtatttgcttcaaagaaataaaatgttacagaaacagttgaagctcctactctctcctctcccctcagagctaaccactgtgtggacaattgccacatgaattgttggaacacctcaaatgaaagtaaataggaaacttgacattttggctagattatgggaggaaaatgttatctcaa

SEQ ID NO: 62174 - DNA, 1077 bp, Homo sapiens
ggtatccctttccaccttgcctgcttgtgcaggcatgaaattttattgaagtgatgccagagaagcacttccagtgtgtctgaagaaaactaatagactttgtttaatttagacctgccaagagtagattaaagaaccttataagtatgaaacagttcttattccagataatataagcattcactcaggtaatataatcacatctcagtggaacttcagctatagggagtagatcttcatagtaaattaacattctgaggaattaacaagtaactgcaatgccttccttcccagcctctctccatgaaaaagctgaggcaccttacaaagatcgacctaaaacaaggtgaaataagaagatgagaaaattaggacaaagagaaataatatggtaaaacagaaaataattattgccttagtgtcattggctagagtttggccaccacataatcctaagcttcctagcaactgaagcaaagaaaacctatccagctctacaattcacagtgggcacgagatgaaaatagaatggttgctagggggatactcagcttttcctgctcccgggactggagagaagcttgtgctttggtccccagggaggggccctgtgcaatcacagggacagcgcttacagcatcttctcagtggtgggagtgcacctcatgtgactacattcccctctactttacctcaagctccttgaggggtgtgttcttcatcatatatcagagcccagcacagtgcctgagacatagtaggtgctcataatgtatttttgaatgaatgaatgttatttgtaatttctgtcaatgaaagccaatgggtggatacaagatcaatacacaaaaattaataattttttccatacattagcaatgaaccatctggaaataaaatttctaaaagttccacttataatatcatccaagcaataaaataattaggagtaaatttatcaaaaaagatgcaagacttatccactgaaaactacaggacattgtagaaaaaccaatggcaaacatttgaacaaattcattaaaagcaattctatgtgaagcaaaaatacagagattt

SEQ ID NO: 62175 - DNA, 1053 bp, Homo sapiens
gcagtccatattttggaatgtgtttgggggtagagctgtgcttggaggagtcatcccgagttcctgcagacaggactgttaggaggccagctgggctgcagggtgttccacatgtccattgaggcaccctgcctacacctgatgagtttgtagaaacattccccagcggttgcctgacttccagggctggcactaaagggggaactagtcagcccatctgaccatgagtcctaaatagttcccatggaatattcagtgctctgcacttacttctcttagcactgaatgccagaacggccactagcaggggcaggatgggaaactgtagtagcctgtcacgagcaggctgatcatccagggcctggcctggaagacagactgggtaagtatagtcttcatttggccattgtgctcaactggcaatgtgcccacagtcaatatgcagatgtctagatgtggccaaataataatacaattttaaaaaacaaataatcgagaatttgcatgttcaaaatatctctcagtcaacaaatatttgttgagccatcccctgtgcccagtacaatgccagatcctgggggcatggcagcaagcaagctcgttggggacctgctgattgggagctcacagtgagcaggcaggcatgtgattattctgcaggcagtgacttctggtgtggttaagtgctgtgctggggaagctttgtcttttggaatctctttgggtagctctttaatctggagatggtatcattgctcaaaacatttttggagctgccctttaggaattgcctttagaactgatttgggtcacacagtaaaatctatctcacttttattttacggccacacccagcttgtgaccaaaaatggtattgcccagcttgacgacccattttattttctagtcttggctctgatttgcttgtaagccaaaattacatccaccctttaaagatggatatttatgaccactgagcatattagcagtaatttggataattttgaagcaatttctcacttgcctaagctcccattgtcctttatatctctg

SEQ ID NO: 62176 - DNA, 1041 bp, Homo sapiens
actttgaaggcacttagacccttgggaggctctgctattctgcagcatggcaggtgcccacatacctggatggctgccttctattattattcccttgatactgggttctttgcacatgtatacactttgggttctatttgctacccttttttttaaacttgactaaaacagtgagtaattgggaagttctgaatttctatttggaaaacaaattgatgagatcagaaaaatccaagtaatcctaaatttacagaagccagattactaaaacgcaaggacatttttttgtaatgtagaaaagttatgtttcacagaggtttttgcaatgccctgactctggatcgcagccctccctcgattctgggtattacatcatttcatttcagctaatgtaaacactcatcaccctgcacgttgcaggatttttcactgtgatttgagattgggcttcattcagtgggtcgtggtgattaatggtttcagaaggaagtgcagcaggaagagactttgcaggaatggaagaggtgaggcagctccacgtgagattctgcaaagggattaagatttggcaccaggcttggtttctgtgcagcctcttaggcagagagccccaggagagggaagcaggctgtcagctgtggctttgcacgctctcagctgtcttgaaggttggttggctcttcccgctctctgaggtacccaattttaccttgttaaaggatggatgtggatgctggaggcttaaagaagaccaggtaagggttcttgttgtctaagaaatcccccagtgttcttaatgcatggaatcctggggactgtttctttactagcaccattgtgcagtgttagccaaaatacaattcctctgagacattttacaaagaagatcagagaagtttctttccttgttaagaaagtttctaaaatgttttaacctaaaatgtttaactatagagatacaaattatttttcttgctgtgcaattcagctttgagattttttttgcatgttaatctacaagatctcgataggtatcctgag

SEQ ID NO: 62177 - DNA, 1031 bp, Homo sapiens
atttgaaattacagacttcaaggctagtaggcaccaggccaggacattctcatttcgggtctaccaacaaactatctcctttttaaagagaaatgtcattttgatttcagccatccttgcaggaggtttttcagtgtaaattcctcttagccttcctaagtaaaaatgaagaacagctgatccttgtcttgtccaatgtatgattttccctggaacttttatgagctgagtaggatgagcaagagaggaagtgttctttaagagagtcaatgtgcggccactctcagctgcgtggtgttgcctatagcaactaagatttattttataaacacatatatggtccttactgtacagcaggcactgctcaaaacagtgtacaaatagtaacgtcctcttcacaaccctatgaaggggaaagtgaggcagaaaggagctaattaactggcccaaaatcacatcgctagagtggcaggtgggggatcagggctcaggtagcttgccttcggtgtgcattactcgtggttagtagtgttgccaatttcttctgacatagagttgattatcttcatgctgtttttctcacacagagattaagcctgaagttcatgtatcccatgaccctggggagaaaaagaaacctaactacaataagcaatgggaaatgagtcagagcctgtttattttgatgattgattttgtgagagtgatttgttgaatgaatgaaccaaatgaatgatggccttttgcggcttctgtttgccactttgatattccaggatttatttcttttgatcttctaagccatctaattgaaatacccacaaattcagatattacgatttatatttggccttcagtcccccatctgcatctggcacggtggactcaagtacagttcacctcttgtgcatttgacctctcactctaaaaataagggccagatgaatgttcatattccttatagaacagatgatggttttactagacgagtgtggtttatactttagaacagcagctgcacatatggaatg

SEQ ID NO: 62178 - DNA, 1012 bp, Homo sapiens
actcacaatttagatctcatttatccttttatttgctatatctatagaacttggcttttcttgttttctgtgtcttgtgtctgaatataataatgatgtttaacattctgtgtgtgacctctgactgattttggaaatgggaaaaggatccatggcattggtaggaaaaggttgccaagtctgccttaagaatttttaggaatggcagggcatggtggctcatgcctgtaatcccaacactttgggaggctgaggcaggcagatcacctgagattaggagttcaagaccagcttggccaacatggtgaaaccccatctctactaaaaatacaaaaactagctgggcgtggtggcaggtgcctgtagtcccagctactcaggaggctgaggcaggagaattgcttgaacctgggaggcagaagttgcaataagctaaaatcgcaccactgcactccagtctgggcgaaagagtgagactctgtctcaaaaaaaaaaattttttttaagaatatttgcagggtaaaacataaaaaagctgatgatgaaacctgttggatgaactgatgaaaccccaaatttacccagccagtaatggccatgcccttcaccttctaaaagaagtgcatttgcttctccctggcctcatgttgaagaattggaaaggagcaatttggagagagtgcaataaaagaaaagacaaagagtttctgctattatccctgcatctctgacttcccacagtctgtttttcagctgttccctgtccactcccaggacctctgcctcctgtcttatagtgtatcatggtctctactggataacagataagcaaggttgagtcatctgatatggtcatccctggatgtggactttctcctccaatcatgagcacaacatatagagctcccatcctctctccttcactctcatcaagtgaatggctcagcaaggttgggactcttgtggtgagaccagaagatcttgagaagagtgtgaggaatgagcttcccag

SEQ ID NO: 62179 - DNA, 1057 bp, Homo sapiens
actcaccagactgtcagctaatgtgttatctttaaattggcgttttatgcaagagttggaagtttctttaactttttgctttgaagctctttggtgatttctgagaaccctctagaaactcctgctgaataatacaattagctggttgccttctgctccaagcttatttctgtagttctgacttactatcttggaaacatttttcaatttcagcatcctctcccatttggttttcaaagtctttacgtgcctcagttaaacatattcctttaacatgcagtggaagaaaatgcattagaaaaccagatgggtttctcaccaccaaaaatgataagtatgtgaggtaaagcatatgttagttagctcagttgaaccattctacaatgtatacatattacaaaacatcatgttgtacattacaaatatatataatttgtatttgtcaacttaaaaaaattaagttaaaaaaaaagatgggtcttcaaagtcaaagagtgtttacagaatctgtaggatcagcatattggttagtgggtcttgaactctgatggccatgtactctgccagaggatcaggagtacatgcagctgctgtgatgtggttgtgagcttttttttcttctttagtatgtgtcctgtggcatagatttggccaacagcttttagctattggggaatatataatacactcttagtcttcagtttataaatgggttatattctacaagttcatttcccaggagcgatatagaacttagaacactttcctggataagcagtattaaatgttgtgatttggttcacagactctagtcctcaaaaacctctgtaacccataacacagttgtgatctgcacatttcccacgaaataaagaggaaaacactattgttggaatactgagcattagcctcaaagaaaaagcaatagaagtgagttagaagacatttcttgttgaggggcaataattttattaaagatgagtaaagagttaaacttttcagagatttcgaaaaggagttttagccatttctgagattttagatgttggcagctgta

SEQ ID NO: 62180 - DNA, 1048 bp, Homo sapiens
tagggatgcccccatgggcaccaccccttccagccctcattgtaccccaaattaaaatatttacatttgaaatggtcatggatattgaacttgaaaataaatgactattctgaaataaagactgagatggtgttagttgaaatgctctttaattgtttcgaggagttgggaaaaggagtaatggctactaacccagctctctctacttcctgggaactgtatttcaagacgttggacttagaaggaagcttgtggtgtagactacaaaggggaattaaaaacctgttccctccaggcccaggtggactgttaatgctccccctaccccatgccatactcactgatgactatgagttgtagcagtgttttacttatactgcaggaacacaaattccttcttcatgggccaaatccaagccacgtgtgtttttctttgaccgttgcagtactttaaaaattgggaatcttgcattaaaatgttctggcttctctggcaaccctgggccactattctcccttggcccgtgggctgacagtgatccatactaacccccacaagatgagacacaccagctctttaccacacacctggccccacctccaggtggtgtcctgttcagctctagcctcatttcctttacctgcttggtcctgcaggcatctccattttggaccctggagttgtattctgagattcacacaagctttggggcacttcagttcaaggatttaggaggctgaactgggagttgggacaaaaaggagaagggctgtaaatacagacaggtcatctgtgaacaaccttctggttgggttcttcctgggagatacaggaagcgttccaagcagggaaagcaagtgagatagtgccagggtgagaatgtgtgcagcaactgtgagacaatgaagaaatgatgcagtggacatagtgagaggtaaggtccatttggtagctgtggttacagtttggagaatgaggtgaaaatttgaacctaaagcattagagagccattgcagacccttaagcaggttgaattttgaatagtgg

SEQ ID NO: 62181 - DNA, 1042 bp, Homo sapiens
tgatggctgtttttctttccaggcaaagagacagacatcacattgcaatccttcctctcactgtaccccaacttgcccttaagcctaattgatctcaactccattctattgcattacccagtccaccaatcctagtccctttgggcacccagaatgccaatctccaaccccttcctctcccctaccaacccctcattcccaaaggtgcttttaaaaccacatgtctcaattttgagttttgacagcatgatccctgaccacattcgtataaccaaccccctgacccccttccattattaggactccctcagcagaaacacctaggtcaccagagaaggcaggaaacgtggggcaattcattgaggggcagtgaatcacctcggttctctctctgcatcccctgaagatcctcagccccagaatatcaatccaaagcctctgagaccacattagaagccagttctgaagaagacaggtgtgactggagtctgggaatacttaggacaaagccattgcgtgggggtctagggactcactgggagatcaagagccactggctgacatccctgtggccctgggatagggaggagcgtcaggaaagagcagggagtctccatgcagtactggggttgggcggactgcactcttgggcttaaaaggcactttctcttagtaatgtaacccacacccagagttttctattctacattttatgttttagatttaatttcttttgttttgtgtattcaatcacaaaattttaattggtatgtttgttggttgttagttggctgaacacagagtagttgcctattttggtcatttagtaaactctacctaaatgctaacaggatattcctattctgagtcatatatatctctgattgtctgaggatctgtcatcctgtgttacataaacactttctggcaaggtgcggtggctcatgcctgtaatcccagtgctttaggagggtgagacaggaggatcgcttgaggccaggagttcaagaccagactgggcaaaatagcaagaccttgtcag

SEQ ID NO: 62182 - DNA, 1048 bp, Homo sapiens
tcatgcctgtaatttcagtgctttgggagactgaggcaaaaggattgcttcaggctagcagtttaagaccagcctgggaaaaacagcaagaccttgtctctacaaatttaaaaactaactgggcattgtggcacacgcctgtagtaccagctactggggaggctgagacaggaagatcacttgagcccagtaataagaggctgcaatgagctaggattgttccactgtactccagcctggctgccagagtgacaccctaactcaaaaaacaacaacaacaacgaaagataatgaatccttagctcaggatagtgcctggcacatagtaggtgttcaacaagtgctaattgctatctccattgtgactattatcatcatcatcgtcatcatcttgtgaagaaatatctagtttggtacatgttggttctaggatgagagtaaagtatgatctttaaatggatgcctactaggcagtgcaaggcgggagcatggagctcgtgtgctagattggtgatgcagatacagttttggaataattgttatagaagggatgagcgagccatgagaatctgtcttctaagacataaagtgggagagagatcacaggcttcaaggatcaagctttggtaacaccccctgacatggcagatcataaaaggatccagtgagaaggatcatgtgggcatcacaagagaatcaggcaagtgtgggtgatgagaaattaaggggccccagcctcatagggtgactaaaagaaaaaagaaaaaccaatggggaaaaattttaaagatgattatcatattaccctgagccagggaagctgagaagtacattaacagagcattcagaatggcacaatggcaaacattgtggaatggcataacattactctcctctccctaaagtgggcacacttgaattgacatttgcaggagaatttcactagagcagagaggaccccccctgccccaaacagaaaaaccatgttgtacaacagtagttaaagaaacttgggctggacgggcacaggcgctcatgtctgtgatcc

SEQ ID NO: 62183 - DNA, 1144 bp, Homo sapiens
gacacttcaaaaattgtaatttccaaattcaaagaaacaccacaattcaatgcaggtgcctcacaaaatcaaatgccatatctagaaatcattgactatatgcctattaatattagtaaaattggctaacctttcaactgtgggcttaagtatgtaaaggcactttcatattatgtcctttagtcccacagttctgtaagggaggtgttgctcgtaggcctgctttcaactgaagggcatagaagagagattaaataattgactcagtatcacacaattggtgatactagagctgagacttaaagccagcacctctgacttcacacctggcctaccctacgcatctagtacagaatatttgtccagtcaacagaccaaaaaaatgatcttttttttggctttggtttcgtttggtgtttttttgtttgttgtttgtttgttattggtataagatgtcacgttttaatatttgaatggtgtttttttttttttacttttcagtttctatcatctatgccgtaagcacttcccaagtaaatatttcttgaaagagatttcttgagccagatgtacaacatgtctttactcctctgaggttaaaactcaccctttctctacaaaaaaagcaaggctggtatttggcccccattccttctgaggatctttgtgacccctaaattatcagacccctaggctcccaaacaggtctgtcacttttacaggaactgtcaacacacccccgaaattttttaactgaccaccctgaagaaaacaagcaggctttaacttgagcttgctcaccaaaatcactcaagtccttccagctgcatggccccagtctccaaaataaatccccttcctctgctggtctgaggctcacttcagcctccccacgtcctaggctttgaactcctgtgacttttaaccttggctttgtgcctgttgagctgttaatcagggtctccagcccataatcagcagctggtgagcagctgctccctcctttcctaaaacagatcctagccagaattttccctgaagggctcttcctgccagcttcctctcttctaggaagcagaggaagttttcttcctttggcttctccctctctggccattcctaatgaagacaaatagcaatggca

SEQ ID NO: 62184 - DNA, 1013 bp, Homo sapiens
gcccctctcccttccaggatgtccaaggccctaatttgcaaagtaagtctaaatgaattttcctacagtggtagttctgcaatttaacctctgtaaatgggatgggaagtttttgttccccagttgatgtattaaagcatgtcactggaactcagcagtgatgtgaccaggacaacgggggacatgatgaaattcctgacagagaatcttgtgagttagaaaacagtcacttgggtggccagatcattattcttctgtggccgtctgtgctcttccacctcttggaattttctgggagacattaatatatttacttccccattgcttgatgcttcctattgtgttcaccatgtggctctttcacaggaggatggacggtatgaaggcccaactttggctcacgctgtggagttgtttggtggcagacggtggagtgctcgaaaccccagccccggaacatcagcaaagaatgctgagaagcccaatatgcagagaaacaataccctgggcataagcactaccaagaaaaagaagaaaatcctcatgagggtagagtgttatttgtttattaagcattaaacccatcttccaggaccgctgtatggtgaacatcaccataaaacacttaaggttgtttgggttgaggacaaagtcaggtataaaatagaagatacaagggcttaccacatacctccatggtgccatgctagtgccaggaacaccagggaaaagacaaggtccgcagaaggacatagacatgtaaacaaacacagtgcgagctaaaaagagacatcgttgagtcacccacaaagtgctgtgggggcagagagaaggaaaatagagagctgaggggcaggcacagagggctccacagagcaactgacacgcaggtcttgaagaacgtgtaggattttaccaagcaaagaacataggagaaagtatccccagcagaggagacagcatagaggcataaaagacagcttgttcaaggaagcacatgctgttctggatgg

SEQ ID NO: 62185 - DNA, 1036 bp, Homo sapiens
actagaaacatgttttctttttcacatagaacatgttttatttcctctgatacaatataggttaagagatgtgaaaagagagtactggaaaatagcttcaatcttaaataacttgcactcatccttttgctcatattgctaattggagcaagtctggtgggacagaatcacaacagtggcctgcccttgtgcccatgaaggccttgtctttgttgcagtgcttggagcagtagtagctggcacgggcggatcaaaggcggcatgaagggatttcagagcttcatggtttcagatagcaacatgagttttgttgaatttgttgagctgttcaaatcattcaggtacagtcttatgtttccttcttattctttctcaggcccccccatttctataaagatactcaatgagaggtgttttccattcctcattcagtgtcaggagccgcaaggacctgaaggatctgtttgatgtctatgcagtgccctgcaaccgatctggctccgagtcagccccactctacaccaacctgacaattgatgaaaacaccagcgatcttcagcctgacctaggtttgttgaacattttaggatttccctttgggatcaatctgtctaaaacttaaggtcagaggtccagtcacacaaactctgagcctgtcccacatagtgtgctattactgctgtgtagggaaagacttaagagaattttttttttttttttgagatgcagtctcactctgtagcccaggctggagtgcagtggtgcaatctcagctcactgctacctccacctcccgggttcaattgattctcctgcctcagcctcctgagtagctgggactactggcatgtgccaccatgcctggctaattttttgtatttttaatagagacaagggtttcaccatgttagccagaatggtctcgatctcctgacctcgtgatctgccacctcagcctcccaaagtgctgagtttacaggcatgagccacctcacctggccaacacttagagaattattttaaggtgtcatctggt

SEQ ID NO: 62186 - DNA, 1050 bp, Homo sapiens
tttcatagaaatcagccttcttttctcattctcttcttttttctattaaataaatatgcttagtataataaactcacatataataaatgttttcttttggactaaaaactacttcttaccactacgttactaaattagttcaaatatttggtttagatgtttcctgatgaaaacagaacagctttaaaaaatgatgtggtggtttctttccccctcttagtttccttaacctaaataacacttttttttttaatcccttgcagaagttcgagcctagcatcagtatgtgtcatcagggactaatgtcatttgaagggtttgccaggtaacttttaaaatatcttttgcccatcttttaagagtagatgcatttttcccatgcagtcttaagaaaatttgtttcacctaggtttctgatggataaagaaaattttgcctcaaaaaatgatgagtcacaggagaacattaaagaactgcagctacccctctcatactattacatcgaatcttcgcacaatacctacctcacgggccatcagctcaaaggagaatcctcggtagaactctacagccaggtacagggaatgccacttggaatgtggtttttattaaacctaattatttatgtaacccccaaagtcaaaaaaacctgaccccagactcctttgaagagcttatagagtaagctattacatgtcaaatgtgaggaaccatgatgtgtgggaaaactggctatactacagcagtcgttttctttacttcttttgttttgttttcccccatctatacttaacctttattctgggccaaaatgaaagtgtttgtttgagactcatagcttttagatcctagttagtctgacctactcccactaaaattagattttcccatgggaaaattatctaatcgtctctctaactgctaaataatatattgtagtgggaaagcatagtagaaaatgcaacttcctatgtacttattcccaaaatattgtttgttttgcttttcagtttgttaaataatcaatctatccctatggtaaccaaaaaa

SEQ ID NO: 62187 - DNA, 1050 bp, Homo sapiens
agctgtttatagacctccccccaggaatgcaattcttttcctagggtcttaatattatattccttgctaggaaaagaatttagcaatatctctcctacttgcacgtctgtttataggctctctgcaacaagaaaaatatggctctttttgcctgaccctgcaggcggtcacaccttatggttgtcttcccttgttccctaaaatcgctgttattctgttcattttcaaggtgcactgatttcatattgtccaaacacacatgttttacaatcaatttgtacaatagtggtcctgaggtgacgtacattttcagcttacaaagataacaggattaagagattgaagtaaagacaggcataagaaattaaaaagtatgaattttgggaacgataaacgtccgtgaaatcttcacaatttatgttcctctgccacggctccagctggtccctccgttcgggatccctgacttcccacaacaataatgcacccagatttagaagcagatattccattatacttcccccttcctttaatggtagaggcatttgtggaaatgaggctctcagtgggaaagaggggcactgacaaaatgtccccaaatattaatgccaacaaaactaattaacttttcatattgtcctggcctaagctttgattttttttttcaattaaaaaataactcaaggccaggcccagtggctcacacctgtaatcctagcactttgggaggctgaggcgggtggatcgcttgagctcaggagttcgagaccagcctgggcaacaatggagttgatataagcattgtgtctgctttccctccacccacctccttgacagacacacattctgctttggagatccatgctcaaaatctttgtgagaattgtgtctgtggttctttacactatgtggacgcaaattctacctatgtctttgtccctgctccctaccccctccaaagttttatccttttgacttgacttcatctgaaactaaccttattctacaaacaacagcctctaactgattctctgttttcttatttaatac

SEQ ID NO: 62188 - DNA, 1052 bp, Homo sapiens
ggaggcaattctggcctcactggtgccttcagctcactctttttacattggagccaggtctatgtggtttgcattcatttcctctttcagcaaatatgtattcagttcctgctctgcaccaggcactgtgccaggcatgaagcatccagggagttgttagaccaggagtgagaaagagaagccataaacatcattatcaccatatttcccatcttcagagtaaccatatgagtgagttcctatcattacacacattttgtagataaggaaactgaggaccaaagaaggaggtgttatgtcaaggctaatatcagcaggaattgaacctagacactatgacactaaaacccaagtaatagccattccttcatctctccaaattaaataattagccactgatcatttctggccacagcaccttcttttcatgcagtttttcaaaatctttctgatgcacaatcagctaagtgtgtgtgtgattttgtggtcattctgtgataagcatgcagttcttgttgcatttgcctatagagatttttaaaactttgctttaattgcctacaatgctattattaacagaacaaaaactgccagtagggtttctgtactaggttccaagggagtagtaggacttcaaaataaatattaatggggatggaaaatgttgagttgccttgcttgtagtttttggcttatttattttcattttatgggaacaggactgtcaactctaaatgcatctggctctagcagaggaaaagaaaggaaaagcaggaagtccatttttggcaacaatccgggcagaatgagcccaggggagacagcatcatttaacaaaacatctggaaaaagtaaagtcactttcttacaatatctttgcttgattctgcatgctggatgatttagatattttactgtctaagcacttcccttgaattttttaattctttttcctgaacattaatattgtctgagtatagtataaatttttgtaattgctaacttacacttttaacgtactaaaaacagcatttcaggctgggcacagtggc

SEQ ID NO: 62189 - DNA, 1050 bp, Homo sapiens
ttctcaaggaaatggaagtgcatttggttttggatgtgccctttctctggaagtgccaggactggtatagacacactggctccactgaatagcaaaagggagcaacaggtgaaggggacacagggagctgccactccatgggccatcctgcagtccagaagtacaaactaaagctgcctgtcctccactgacccttaaaggctttgcctctcttccaaatcaagttgggattgagagtacgtctttaagccgtcccactcaaatggctgtgctgtgtggttcatcctcaagtttctctgcataatcttccaaaccgggaaaaggtgctatcatataacctctctccattcaatgtgctgattaaacatctccccatgttggacaaaatacaagcaacatgcagtatcagtgtgttcatctgtaaaaatggtcttcatttctgcaaactgggggtacagcctgatttaatattaatactttgcacacagtagatgctcagtaaatgcttgttactctgagttgaggcagattatctctgtcagccccactgcaatatgaacatgtggttcttgatttttggtcaagatcttttccaagtgtttacttctctgaattgcaaattcaaacagatagataaggccaggtgcagtggctcatacctgtaatcccagcactttgggaggccgaggtgggtggatcacttccggccagcagttcgagaccagcctgtccagcatggtgaaaccccatctctactaaaaatattaaaacaaaatagtggggcttggcggtgtatgcctgtagtcccagctactcggaaggctgagcgggaagcagaggttgcagtgtatcaagattgtgccactgcatttcagcctgggtgacagagcgagacactgtctcaaaaaatacatagctaggggccgggcacgatggcttatgcctgtattcccagcactttgggaggccaaggtagatggatcacctgaggtcaggagttcaagaccagcctggccaacatggtaaaaccccatctgtactgaaatacaa

SEQ ID NO: 62190 - DNA, 1047 bp, Homo sapiens
gcctgtagtcccagctactcaggaggctaaggcaaaagaatctcttgaacccaggaggcaaaggttgcagtgagccgagatcgcgccactgcacttcagcctgggcgacaaagtgagatactatctcaaaaaaaaaaagaaaaagaaaattatatatatagatagatagatcgaatagatcgataagagtcaacagtggaagcaccatttttcaattgttgaaaagaatttccaggctggaaagtgcttgattttccatgaagcatcccaactaaatagcagagaaaccctcccagggccagcctcccaagaggtttcatggatcatctgctctgtgacttcctggatttcaggggattctaacgctccaagtgggtgtccatggacttatggccatcccttcccaagctttctgctggttccatcaactccaagaaggtctgaagtgatctggaaccaggagtttcccagatcaacactcaataaaaccaactcttgagtttagaaactgacgtgaggctggtatgcaaacccctggttattgctggcaacagaccctctaagttctttgcatctgaggcagaacaataccgcctcacacccagacttacaatgtgtaaacatgcaaccctagtcaaaagaaaaacttctttttttaaagaatttattaagcttttttgaatgacagacttccaatcctcaaatataaggataaacattatgtgaatggtgtctacataatgcagagtattttaatgggtagaagaccatcaaggcaatggtatgtttatctatcattatgtgcattgtttcagaggtgtagcagggttacactgatttgtgcacactttttcacttgattggaatgatgatttttaaactatagccccagatgaagttctgggaccatgtccaggggacagcaagagggctagatttgaggtccgacctttatttcaaaccgtgcggctctacgtggatctcttttacatgtttggtcaccaagttagatttcagttaagaaactgagcattaggggaaagagct

SEQ ID NO: 62191 - DNA, 1027 bp, Homo sapiens
caatatggagatagtatgatagtactttccttgaaggttaagtatatgtaagatgtttaatacaatgcctagcaaatggtaaacattacttaagggttacttgctgttcttactgtatgataacttagttaatattagccatcttattcaactgactttgaattccaaagggcccagacttacatttctttaacttatctttgtctcccctaaaagtacagcacagtatctgggacataattggccctcactaaacatttaatgaattaacaaatgcatcaatgaaagacattcttatattaaatgaaaagagagatcagttgacttctaaaattctttcaacatccaagactctgtgatagagatagcccagtgggacagagacgctcctgaagagcaagattctattcctcactggctgactttcatgtctgtgagcgctggtacatgcagaaaatctggttcagacctttattgttactattatagctgtatatatcctggaatctacttaacctgtcttaagtataagcttcctcgtctgaaattcaggataataacacctaattcatagactgttgcaaagctaaatgaggtaacgtgggaaattacattacaagctacaactatacaactgcaaaatgagttggatgaaatgatctggaagatccccttcatctctagtctgggccatttttccaccttaaagtttcatatagaatgaatgcaaatgttggagattctgtgtctttattcagttgatcataacttacctttcagaccttatgcaaagccaaatattcctacagcatcctgagcaaccccaatccaagcgactatgtgcttttggaagaggtggtgaaagacactaccaacaagaagactaccacaccaaagtcctctcagcgggtccttctggatcaggagtgtgtgtttcaagcccaaagcaagtggaaaggtgcaggaaaattcatccttaagctaaaggagcaggtgcaggtaaagtttaaagttattttgctctgtt

SEQ ID NO: 62192 - DNA, 1934 bp, Homo sapiens
gtggtggtatctttacattttttgtgtttgtgatttagatctgctactgaactttttgaggcatatagcatggcagaaatgacattcaatcctcctgttgaatcttcaaaccccaaaataaaggtatgggatatttttcatttttttaaaggaagaaatagaaaccaatgtatctcaataactctaactccagtttgcttaattattttataggtagttttttttttaatgtttaggatttcatcataggatggatttctgaggttgaaattctatagagatgatcatgaaactgttcgttcaatataggatatgtccaagaccttaccaagcatctgtcattgtgttgcatgtgttggtgtcagctgttgccattttcaacttggttcacaggttggctttagcttatagcataagtaacttctaactcatactttaaatattttcctagggtaaatttttacaaggggattcatttttgaatgaagatttaaatcagctaatcaaaagatactccagtgaagttgctactgaatcgcctctggatttcacgaaatatttgaaaacatcactacactagtagaggaatgaagtcagtggactttcttgtatatttgtgtgtgcagatgtacataaagatgagttgttaacttaggatcttttctttttatacaaggaaagcttcctaagaatgtctaggaagaagaggaagaatgaccctttgcatggcacagggttctgcccctattctgaatatgtcattccatcaaggagatcaaaagcctttttttctccccagtatttggaaattactttcttgatgatgctgccttttaaaagcttcacgtacattatagttttttaaaaaaatctttggactggatcttactgaagtgcagttgctatattaaaattagggcatagagcacagaaaaatcaagaccatgagaagacattttaccatttagctactttttataactaaatactctttaaatatttttatttcaatactgtggatggaaatgagaagcattctaaatttgagttaatatatttttatgaagatatttgagaaaagaaaaaaatagcttgtattcaggttcattggcttttgctggatgatccacctaaagaagttacctaatttggccttttaaaaaaggtgttagtgtttattatagctactttcaaggaaagtttgaatatgattctagtctctaaagttcttcacgttttctgacattccctggagggtgactggggaagaattgctccagggtagaagaaccaggcccaagactttaccattctgatctagagacaaaggatactcaatgaggagcttttttcccctcttggaacaggtaaaatgctttttcttattaatataattataaaacagtattttatgtaacagctattcccatattctaggagtggcctaagaaatgcgtgtttcagtgactagattataaatattctctattgtgaatagttgaataaaacagctgtttttttctgcttcctattcttgtgatatgataattttttgaaaaaagcacagcagtccaactaaagagatctcttactgtttgaaagtcatagcagccagttattttactctggagcttagagttcttttttcacatgaagtaaacgaaagtagaaaattcctttaccattccagcagagtgagaggatatgagcttaacagtgtatgtcagtcttttagcatattatatatgatttttaaaagtggttctgaggtcacattttttaaggcttgattatttaatgagaaaggtatgattcagcatatgaatatttgcttttagtccaccttttaggtataaaacaaagtccaggaatgtgataaatatttgtgtggataaccaaagggtctaatccccatcagagcacaagtgaccaat

SEQ ID NO: 62193 - DNA, 1070 bp, Homo sapiens
tggaagatttactgaaacctttccctttattgaaatctttccctaacactcttcagaggatttgttatcaggtacatttctgttgagtcttatccaaggagactttagtaagccctgtttcaagatggtttcacctatgcagtgatcctacagtatggacagcattagagtgagacttgtagaaaatagaagtggcaggtaacctgttgtaaattaacttttttcactctgaaagaggaattgctttttgatttttctatttatattgtaaaagcaagactaaactacttcactggtaacttgatttgtgttttaatcctattagcaaagataatattctttctgtgggtatgtgcttctaatgaattacatatactgtacataggtgatgaaaaaaaatttggtgtaattttatttaagaaaatctttgctgtggctagtgttttttgtaaaggactgacctgtgcagaatgtgattgtcccgttttcccttcagaggcattatcatcccatagtgcagagatttgcagcccacctgatcgctggagcaccttctgaaggctctggagcactcaaaccagagttgagtcgaaggtaatatttagcattgccttattctaaaactacagaattgagctgatagccacttactatgagaagactgtttcataaagtaacatactacaaaatgtaaagtgccagttgggtatctggattggtcttgcttcatattcctgaattgttctgaaagaaaacatgctatgattttgttgatcacttaaaacattttttttcttcttctgtcattcaacttgaaaaacatttttttaatcgtgaaaagtttcgcacatacaggatagtagaatggcatagtgaatgtccatatgccccccatcactcaggttcaacaatgaataatctatggctataggtgcttcatgtgaagataaaacacaagtcaaccaaattaagcttccttgctttctcgctcgctcggtcttttttttttttttgaatggccctgttagggcaggatgaggagaaaaaaaaaatgaggagagggaagaaaa

SEQ ID NO: 62194 - DNA, 1139 bp, Homo sapiens
ggcaattaccattcttaatattccatccccctcaccccccccttttttttttaaaggacctaagctatcaagaaagtcttcactgtgtccagactgcttttcatattctttctggacaaggtatgatattttcttaatcaagttttgtttgccttacctttgaatgctataacatacctaattggtgtttgttgtcatttcaaaggtgatgttctgaatattgatccattgaaattctacacacatctctacaaaacactgttcaaattacatgcaggtatgtatgtttagataatgtttcttttatatgtatttatgttttaagaatatgttatgacccatcattgtagacaaatgagaaataggaacaggtacataaaatggtgactttccagtgccatgcatctgtatttaatcttatgtaagacttggagaaagagcttctggaattgactggagatgcagtaagtatagcccgctgtatctccttagcagtatagcactacctcattgattagagaaatggtttgggacaggtacaaaagtttatcttgggtttatctgaagttcagtccagttgcgtaatgaaaaagtaatgagaacagctctgaagaatatgtctgctgttttaggtgctaccaatgaaggtgttgagattgtactccagtgccttgatgtcatgctaactaagcgcagaaagcaagtttctcagcagcgagctcttgccttcatcaaacgcctttgtacccttgctcttcatgttcttccaaattcaagtattggcattttagcaactaccagaatattaatgcatgtaagtagtgatacaaatgaacagagctaagttcttataatgcaatgattttttttgtttgaggcatgtcttttccccccttttatattatttcaattacagaagtaattcacacttgtaacaaaatcaggtgacaaaagaggtatataaaattgaaaaaaagcattttatacctattgacacttctcagtgtcattaggtgggtatccatttaccatttggtgggtatttttccagcagccttttaaagttcatatataaacacatacacatagaaacaactcaactttgtattttaatggaaagaggattatgctatatattc

SEQ ID NO: 62195 - DNA, 1050 bp, Homo sapiens
gtgttttatgacatttacgtattctgcctctgcttttttcactctgtggtatatgctcttagatttttgtttttcaatctattttcagtggaagaaagcagaagagaaactagagcgagagcttcgagaggcagaagcttcagagagtactgagaaaaaacttaaactggtaggcagtttcatattctgttatgcttttaaaatgcgttaagttgtttaaactagaaatttattgtttcagcttgtagctgtgtaattttggtttctttcatgaggcttagatgtgtgacttttgtgatgtgcgggaaactgtgatgtgatcagtgctagttttatgcagtcacagggtgtatatcttcattctgttttgttaaaaatttcaaagattgcattgtggggagggatgggtagggaaaaaagttaacctgttgaagtgatacttatgctcactcaggagaaagcataccaggttatcctaaagtcattttgtctgtctcctctgccagcacacagagactctgaatattgtgtttgtaacctacttcagaatattgaagaaggcccagaggtcacctctcctgccagcagttctagaaggtcttgccaagtaagggctgtgtaggttgaaatcttttagattccttctaaataggaaagaccaaagaattttcgagagttccctaatgatggcccattatcctcagttctcattccttttctgattgtcaccagcctttacttgaagctattcataacagtgggcttttttgattttctcatctcaaaccttttatttttaaaatctcctttaccaactccttctttctgcctactaaattctaggtgttcctaaggttaaatctctcagttcttgactctttctgcactgtgtagtcaattgcccatcgtcatagtttgagtggatcatgcagatgactcttaagtctattttaacccggctgtacatcatttctctagttctgtgtaatgtgtttctgctaagatagatcttttggtgtattcactcaacactaatggccttgtcaggat

SEQ ID NO: 62196 - DNA, 1051 bp, Homo sapiens
tttagagatcattgaagatcctattcaagagctgaccatagaagaacatttgattgagagaaagaagaaattacaggagaagaagatgcatattgcagccttggcatctgccatattatcagatccagaaaataatgtaggtagtattaatttctttaggctctttgtattaggtatggtgtaaatgcctaattgttaagattcccttgttacctataagcatacactaaaaggaaaagcattaactaaacatagtagctgggttagagtaagagagtagacagaatcttagcttaatgctatgtctgaacttaatttcttttgtaatcctagaaaagttacttaaactctctgaatcttattctcctcatcttcatatatgaaaatactggacatcttataactctaaaaatgtttaaatttataaaattgtattagggaggaggaacctgtttgcaaatttgcttgacatacccgtggagtttttaaaaagcgcgctacaggggaagtgtatggaattagttcaggaatatttgtaagttgaaaatattttaagtgaactagagccaaagttaaagtaaagtgttattgtgccatgtgtatagtcgttgagttagtgatggttataacacatgaactagagaaatctgaggtttaatcttggccctgataagtactatctgtgagactttgggtaagttatttatccaagactctttcatctctaaaaaaggacagtgtctttttcaaaactttgtggtgaggattatatgatgaaatatacgtgaagtcatataaaatgatactattattattgttatgctggtgtccccagcatactattataacaagtatttgtttatgaaatgatagaatagcttatttacatttatagaagcaaatttcatgtgggaatgctttggagtagtacttgtccttttctaatgaagtgaggggaagatctagagcagaattagggaagagagatttggaatatttcttatgtgtattctctcaatcattacaaaaccataggcataagagattgatc

SEQ ID NO: 62197 - DNA, 1069 bp, Homo sapiens
caaggttcaggtgattttcttttcactaaattttgttgtttctaaaattagagcatattaactgttcttgattagctttcttttttaatgtatcttcttttgtatgtgaaataaaacagaaaagttcagatatcaaagatgtgaagttacatggtttataacaaagcgcatacctataaaactactattcagacaaggaaaaaaaactactgctagcttccagaatcctcccttgtgctcacctcaatcactaattgtgctcttcccataaaagtaactgctatcctgagttttatcgtaatcacctcctagcatttctttacagtttttaccacttaagtatatatcacagttttaatacatatgttttccatatagttactgatagtaacaaagatgaagaggatcaagaagaagagagggaacttgaggaaggtaatatgtctttacagttactaaattgttaattgagaatttttttgcataatagtaaatgtgagttaattttagatgaaatctggaaggtacattttggagtactgctcatttcaaggtcactttgaacatttttccacatttgaaagcttcatcttgtggaattattaatagattctttatttttttgattatggaaaaatttacacaatcatatttgtaatatctaggcatacaagaagtgtgtcttgttaattattactgttctgaattccttttaattgtaagagaaagactacttacaaataactgttaactttttagctttaaattacaaaagcgattctgtagtatgaagtcattttggtttgtttctagcacaattatacttgcatatgtttcatataattgaatgtcagtttctattacctaggaccatttaatcaaagttgaactgaaataatgcattttattgtttgaaattatattagtttggaatttgtgacagaacaatctagttaaattttactttcgcttagcagacctcattaatagcaaaaatgaattacaggtcaactgtttaactgttttcagtcacccatcataaaaccattacagattatgctagtgttga

SEQ ID NO: 62198 - DNA, 1042 bp, Homo sapiens
ggtgagcactagggtttggaatgtggccattagagaggctggctgaaatggaatacgaagtgaaagtaattggagatgagaaggagctgaggggctaagtcattggtttccaaacgtcctgaaaggcatttcagagtatgtggagacatttagtttttggttgttacaataacctgggaatgctattggcatttagattgcaggagtcagagatgctagcatttttccagactcagaacatcccagtacgacaaagaattgtttgcctagcatatcagtagttcttccatttagaagcactgggctcagctgtgagccatggcccactccctgtaatcccagcattttgggaggctggagtgggaggattgcttcagaaagcgtaagcttttcctgtttaaacccaaaatgcagagagttctacatctctgatacttgtttctaatttttctttgtgtgtgtgtgtgtgtggtacaggtaaaaggattgagagggaagaagaggaagaagaagaagcccttcctttagatatgatggatgaagatgacttacagttaatgaaggatttaggacaaagagtatcttttctaacaagagatctttcttctaggtaatacttcatttgggttataatcattcatatccatttagtgttaaaaacttggttctgaatttcacttaggtggttcaaggtgttcacctttgagcacaatgtttacaaagaataaagtattatttagcttatttcctaaataaaggaggttcatgtataagataagctgatttcatttaatgtacatctttcttttgagtctgaatagtcaagtagagtgaatgggggaagaatgctgttctcactttgaggtagtggcagaacagttctgagttcctacggctatgatttcacttaatcctcattaccctgctggtaggtcttattcccatttccagagaggaaactgatggttccctgcagtcacaagtatctggaatttaaagttggaccttttaaactccaaagtctatgctatactctaaagat

SEQ ID NO: 62199 - DNA, 2008 bp, Homo sapiens
agctcatccttggttacccactgtgtgcgcgcaccacttcagagtatcacgaagagacaggcacggagttttgcatgcgtgggatttcatactttgaaggaatttttcaagaccgtctttcgaactcgtttttcacaaatgagaagcagggtcctaccctcagcgagtttataatgtgagtcacggtacccatgaagggtaaagagatagaaaagcaagtgatttgtcctggttctcccagaaaataagaggtagtcctggggttcaggactaactttgggatttctgaatgagtcaccagcaagagaagtggaatccaaagatccgaattcagttttgccctccttagtttatgggtcttttggcagcttcatcagtaatgtgaggataacagcagtcagtactcaactaggctgttagaggtgatttgttggagcactttgtaagtaataaaatcgtagataaatgtaagttttattaaagacagccagcattttgctttgaatgtgttaaactacaggtgtgttaaactagccttgaatagccacttaccactactagatcagtggttcttaacctgtttggggatcgtagaaccctttgaattgctgtgaattgggattgaataactgatgctgtagcgctcttctgtaggattaaagccatcgtttggttttagcttttatatgcaagtctgtggctgtgggacattgaaattgtggaattggtctaatgaaatttgtaatcagttctctttaacctgatttaaaaaataagtttctgggtatgcagtattctttctgttattttctagagaagaaataaaaaacagatcccaagctttcgcaagttaataaaaactagtaaagtcaaacttgaaaacaagctaaaaaataagcagtttaaacaacaaagcactctcaagaagtaccgaaaagaacagaggaaactaaggcaagctgtgaaagatgctgtgtctaagaaacccattccattggagaacccaaaggaaaagcgaccaggtaattgtgaaaacatcatgtgctctggtttccattgatttattctgaagtgttcttcatggaaataactttgctttctagtaatcgcttttcttgttctcagatcttcctagagtgggtaaggatagtagtcctataggactgctataaagcatatatgctttatcacagtcagtatgagaaaacatttcaatacagtattcattcaagcttctgcttttagtttgtctggaaggcagatctgaagatgcactacttgggaaaacaaactgaaagtactccgttacataaatattgggcagtgtgccagtgctgccactttgccattcaccagcagttaggtaaggtaagaacattgcttgtctctggttcattcttcacagtattgccaaggtacacttctaaacttctgactttcttttcatgtggaaacttggggtgaaattgagttgtaattgtcatggttattttgtaaaactatctaaaaattattaagtactcaaaacttgtaaggaatatgactattttgagtcaggctagttctacaactttgctggtacttttagggtattcttatttgactatatcagattattagacaactattcagtcttctcaggtccattttttaaaaattattattattattttaaatagacagggtcttgttctgtcacccaggctggagtgcagtgtgcaaaaatagcccactacagccttgacctcctgggctcaggcagtcctcctgcttcagcctccaaaagtgctggaattgcaagggtgagccacagcacccagctaaagttttttttttttctaattttgtgggtacatagtaggtgtatatatttatgggatacatgaggtactttgatacaggcatacaatgcataataatcacatcagagtaaatgtggtatccatcacctcaagcatttatctttgtgttacgaacaatccagttatacttttttagttattttaaa

SEQ ID NO: 62200 - DNA, 1121 bp, Homo sapiens
gctgcagtgagctatggtcacaccactgccttcctgcctggatggcagagtgagactgtctccaaaaaaaaagagaaaattgctcacagttgattcagattgtcaactaggttttagtgaattgcttaatcctaggtggcatcttcaaattacaggatggtatggtgcttaaaaatgctggttctaaagttaggctgcttgggtttgaattagcttactagctctttaattctggacttctctggatcttaggcaactcatccataaaatggggataataataatgcctaattcatgggattgccatgagggttaaataatattttacattctttgttttaactatgtggcatatagtgaagattcaaatgttattattcagacagtagcaagactactataacaccttcctcagcttcaccactgaaatccactgatttgaagaaaggaagatactggatgaatttttgtgtcctgtctggggaaacgttacacaatttgtgcagaagaagatttttaaacataatttatacatgggattggatggatgttaaaatagattctgatgtagtgatatgacatttcccgaagtcttgaagctttgactaaaaagcaaatctgagaaggaaccgaaaggaatgctgagaaagattaaaatatttgtatcttttattgtcttaaggaacttttatagacaggcaaagccaattttttagtttaagtccatgaaatgtttaacttggcttactcatgcatttcatacttagtatgttgtggtaggaaggttttgggaaagagtggaaacatttggagattttgagacgatacatctgttatccatctctaaatgtatgcagaaaggcaaagtgtgtcctttttgagacagcttttttctccctaggaactctgttagctacactatgagttatcttcagatagttatggctgatagttgcttggaccctactacagtgattcttaaatttagtgtttaaaattacttggaagggggagggttgttaagaatgcagattccttgagacccaagtagatcctgggtggggtccaccaggaatccaactttttaaaaagacccccaggtgattctgatgcaggcgatt

SEQ ID NO: 62201 - DNA, 1013 bp, Homo sapiens
aagtatgcagctcaaaagcaagactttttataattacttttttcttttatcattaaatgtattctattttgttctctcctgctgcaaaagaagaaaaagatctcagctgggcatggtgtctcacatctgtaatcccagcactttgggaggccgaggcaggtggatcacttaaggccaggagtttgagactagcctggccaacatggcgaaaccctgtctccaataaaaatacaaaaattagccgggtgtggtggtgcatgcctgtaattccagctacttaggaggctgaggcaggagaattgcttgtacctgggaggcggaggttgcagtgagtcaagattgtgccattgcactccagcctgggtgacaaagtgagaccctgtctcacaaaaaaaaaaaaaaaaaaaaaaaaggaaagaaaagaaagaagacctctatcagtaaggcattgcctgtaatttatttaccataagaaataagacataaggtgacttgctaacatgagtacacttggactgtattctggaaggataagaaaataaatttgtatatttgaattgtttaaaatgaaggcattttggcaatgtgtaggatggaaaagattagggattagttgtgaagctcttacatcttgattgttgtatggaggacatgaacaatatgaatgtgattaaaaagaaaagcaactatgcaagagagacctgtttcaaacacttagtagtgtgaccttggcaaagactctgtggggtcatcagtctgtcttggaagtggtaggttggtgtattgaatcctaggagaatttgatgaaagctggccaagagaaatgtttggaacttctttttttttttttttttttttttaagacagggtctcactgtgtttcccaggctggagtgcagtggcacaatcacagcttgctgcatcctcaacctcctgggctcaagtgagcctcccacctcaacctctcgagtaactgggactatagacgcatgccaccatgcctggctaatttt

SEQ ID NO: 62202 - DNA, 1060 bp, Homo sapiens
ctgggactacagatgcatgccaccatgcctggctgatttttttttgtagagacggggtttcgctatgttgcccagactggtcttgaactcctagatgcaagtgatcctcccgccttggactctcaaagtgctggcattacagacgtgagtcatcatgctcagcaggttgattgactcttaataaagaactctgacctggatagtcttttttttttttaatttaatttttaattttctttttctctgaacactctccaatgttacggatattttctaaggtccctagaagctctaaaatattatttattacttgaaaaattgtagcctttcagccttgtaatttctcttgttttgacagagtgggtgatgttgaatttccctttttgatagctctgatctcagaaaatatctggttagttaagtaatgtttattgaataaaaattctctactttttttttaatttttaggatttgtaataacaaagacaagatccaaaaacagcttgaaaaagaaaattcttggaattaaaaaagcctaagttatctggcaaaaaaccctactttttttgcatatagtcagctgaaagttttttccaagtgaaaaatgattgaggcttgtaaagaatgttagtaatctttgtgccagatctttaatccagaatactcaagggtaaccaaagtactgagtttagagacagtagttatacttctttgaattaattatgtagtcagctgtggcattccatggtcactagataatgttttctttatggctttttattctttggggaaattaaagtccaggaagtttttatgttttcagccatccaacttcccctctgttatgatttctaatttttaaaactgattttactctttcaattgattctatcccctccacttttttttttgagacaggttcttgctctgtcactcaggctagagtgcagtggtacgatcttgtgttactgcagccttgacctcctgggctcaagtgatcctcccgcttcagcctgccaagtagctggggcttcaggtgcgtgccaccacgcctgcctaa

SEQ ID NO: 62203 - DNA, 1047 bp, Homo sapiens
caatgacgcggagtgcaatgaggcggtctcggctcactgcaacctccgcctctagggttcaagcgattctcctgcctcagcttcccgagtagctggaattacaggtgcccaccaccacgcttggctaatttttgtatttttagtagagacagggtttcaccatgttggtcgggctagtcttgagctgctgacctcgtgatccgcccgcctcaacctcccaaagtgctgggattacaggtgtgagccatcgcacctgtcctgggttttgtttttttttttctagatttttcagtgagagatactttcttccttggttatatattgactcttttgtagtaagctttcttgtacatagctggcctaggaaagacaggttatgtatatatattatagcaataggggattagtagatataattttattataaataacaaattattactgtaaataatatttatccaaatattgtattacttaatcctttaactgttatatagattcttttaaatgtttttgttttcagaattttggctcttattgttaagtacatgtacagtcaattctagtatactttgtagctgatttagacaaatgtttgcatcttatttatggctatcattttccttccaatttgtttatctttttattatttctgttgatgattcttctaatacctctatataagccagatagtctgtattttactttaagttctgggacacaggtgcagaatgtgcaggtttgttacacaggtatacgtgtgccatggtggtttgctgcccctatcaacctgttatctaggttttaatccctgcatgcattaggtattaagctacatattcttaattgagccttattattctaagtaatagtggtataagtagtagaaatagttttatttaaaagtatttttgtttttgccttgggaacaaacttattataaaattactgttaaatagctctctggttacaaaaaacacaattcatgtaacttttctgtgtttcagaaacctttttccaaaaaggacaaaggaactcaaatcagtt

SEQ ID NO: 62204 - DNA, 1079 bp, Homo sapiens
ctcactctgttgcccaggctagaatgcagtggcacaatcatggctcactgcaaccttgacctcctgggttcaaacgatcctcccaccttagcctccctggtagctgagactacaggtgcatgccaccatgcctggctaatttttttatatttttagtagagacagggtctcactgtgtttcccaggctggtcttgaactcctgggcttaagttatcctcctgcctaggcctcccaaagtgttgggattacaggcatgtgccaccatgcctggcccgaaaagtttaaaaaattgttacactcttgcatgttttgttttcacctttatttacctcatctgttatcaccttgaaaaggtagtgaataactacacttctagttgcgtgtgtgttctttattgatggttgataaattattatgcatttctgtgtataaatggatttcataaaaaataatttgtgtggtctaaagattggagaggtactagtaatatttctgggcctatgcttctgggagaagggagaagtatgatcctcaagagagaagcctaaattattaaagaaaattaaaagaataaagataagttttcacaaattaaacggtagaatttgaggggacgttttttcattttatcagaaacagagacttggaaagggttatgtttgaaaatactctgaatatctatatttgattacaggaatactgttttgcttatcaacattatattaaaagttgtattcatcctgtctttatctcagacttgtatattatagcaggcttcagactaaacaaacaagattgtgctggtaactttgcaaaaatgaagtttactacggtactcttatatgccagaaagtgatgaaatgctttgccccgagactgcaattgagcttgaaatataggatgggttttttgtctcctaattcatagatctggaataaaatttataatctataaagacatcataatcagctaaaccctgtctatcccaagcataatggtttcctcagctcttagatcaagttgtgtaagagactctatcttgggcagacatggtcttgagatagtagaggtggggagt

SEQ ID NO: 62205 - DNA, 1062 bp, Homo sapiens
tgatctttttgacctaatctttgttggagtggttccagaatagcttttagtttaggagtaatttgtcctcactactgaggcattattcttctaagcactctacctagtactcttatctatcaggaggcctttccactctggctggtcttgtgtgaactttaagaatgtcctattttttttttctctggtggttctttctctggctgtagttaatcacacacatgcacagatcagtactcagccaaaaccttgagaggactctctgcagctcccttcttttctggttttctggtttgtaacttttagctgtcttggactctccaactctaaactttctcctcaccttaggattgatggaccactgagacctggaaatgtcaggtacttgtagggttaccttgcttatttcttttctcttaaagatcactttcttgtgctgcccagtgtctgttgtctggaaactatagtttaatatattttgtccattttctaatgatttaaggggaaagggtaaacctggtttcttttattccattatggcctgaagcagaggtcttaacttttattcctccctcctacaacctaccagatcaactgactaatttgagaagaggaggtagaatttataatttgaaaatttgtcacatacctttttccacactagcctgttgaaaagaaaagactgactcctaaaactggacactattatgattatatttggataagtgataatataccagtgtatttctttttgcattttttatatctaaatcactgactctgtgaagccattgatttgataaaccaaaatacggtgtagtagttaccccttattggcggttttgcttaaggcaatttcagttacctgtactcagctgtggtttgaaaacattaagtggaaaattccagaaataacttttaatttttaaattgcgtgccattctgagtagcatgatgaaatctcactgtcctgctccatcctgctagggacatgagttcagtttatctgcactatatacactacccatctggtagttcagttagtaaccttcttggttgtca

SEQ ID NO: 62206 - DNA, 1047 bp, Homo sapiens
tgtgacctccgctgcctgggttcaagtgattctcctacctcagcctccagagtggcggggattataggtgcccgccaccaggcccagctaatttttgtatttttaatggagacggggttttgccatgttggccaggctggtctcgaactcttgacctcaagtgatccacctgccttggccacccaaagtgctggaattacaggcgtgagccaccatgcccagccccagctcattttttagaagttattttgtagagatgatgtatctctatgttgcccaggctggtctcaaactcctggcctcaagcaattctcccacctgggcctcccaagagcgttgagattataggcatgaaccactgtgcctggctccagttaagtttttattaattttaaaatttttactatatgattactatgtaagataactattggtactggatgatcttaaaagcatggtatgatagggataatattgaactgaggaatcagaaggccacagctttaaccttgtttgatactaccttggtgtgatactctgaacaggcctgatgttagttttctcatgcgtaacatgtgagaggcaggtcagcttaatcagggctttgaagcttctctttcatcattttttttttgttgttggtaaagcagtggaacattctcccaagaaatcttatatagaatatgaatacataaaacaaataaaagaaagtagagattgtcggccagatgcggtagctcacgcctataaccccagcactttgggaggctaaggcaggcagatcgtgaggtcaggtgtttgagaccagcctggccagcatggtgaatctctgtctctactaaaaatacaaaaaattagctgggcatggtggtgtgaccctgtaatgccagctactggagaggctgaggcaggagaattgcttgatcccgggaggtagaggttgcagtgagcagagatcgcaccactgcactgcagcctgggcaacagagcgagactctgtttcaaaaaaagaagaaagaaagtagagattgtttacttggccttctg

SEQ ID NO: 62207 - DNA, 2059 bp, Homo sapiens
ttcataagaaatttgacttcatagatttagtgtaaatagaaatatgtgataaagtaatctacttaaattatttttctgaccttttattccacttacttttatagtagaacaggagatgttattttaaaattatgttaataactgggcatggtggcacacatgtgtagtccaagctgttcaggaagttgagatatgaggatttatttaagtccaggagttcaaggccacctgagcaacgtggcgagacccatctctaaaaaaagagaaaacaaagaatagaaaattatgttaatcaagttcatttactttcactttttccctccctttctttccctgtccctccctcccttatttccttccttcctcttatgataatattctttttgagaaagtctattttgtagagtttaggtaaatggagaaaaggattttgatctagcttatttgtattgaaataatttttactcgtttaaaacagaaattaaggaagcacataaaagaaaaagaatcatgaaagaacgatttaagcaggaagaaaatattgcaagtgcaatggtaatttggatcaatgaaatactgcccaattgggaagtaatgtaagtaagcagacttttcctaaattcccatttgtctccgaagatctcatgtttctttttttttttttaatttattattattatactttaagttttagggtacatgtgcacaatgtgcaggttagttacatatgtatacatgtgccatgctggtgcgctgagatctcatgtttctgattctgtatttttattatttccagcatatattttatgctttggctaaattatactattaattaatgcctgaaaatttccatatttgcatctgtgcctttgcttttgtaaatccctcagtgtctaccacctacttcccttactgaccatcctctgtgtctgctaaatcttttttttttttttttttttttgagacggagtctcgctctgtcacccaggctggagtgcagtggcgtggtctccgctcactgcaagctccgcctcccgggttcacaccattctctggcctcagcctcccgagtagctgggactacaggcgcctgccaccgcgcctggctaattttttttttttttgtatttttagtggagatggggtttcaccgtggtgtctgctaaatcttacctatcctttgggacccaactgaaatgctaattgatttatgaaacttttaatgtctttggttactgtgttttctttttttttttttttttctgagacggagtctcgctctgttgcccaggctagagtgcagtggcacaatctcggctcactgcaagctccgcctcccgggttcatgccattctcccacctcagcctcccgagtagctgggactacaggcactcgccaccatgccctgctaattttttgtatttttagtagagacggggtttcaccattcacaggatggtctcgatctcctgaccttgtgatctgcctgcctcggcctccccaagtgctgagattacaggcgtgagccaccgtgcccggcctagttactgtattttcttaatgctaacataccatcaattgtaagacgcactattgatgtaatagcagttatttggaaagagaatattaaatatataaatgtattagaagatgcacttattgttaaaatgatttttaaagtgtttatctcataatcaaggaaatatgtatgatctttcccttatgtaaatgtcccatcatcatactttgagactaatatacttatcttgcctttgcatttatttattcatttttaagttattttgccagcatctttttaatgataaataataattgtatatatttatatggtacagggtgatttgtttttttgtttttgtttttgttttgttttgagacagagtctccctctgtcacccaggctggagtgcagtggcgcgatctcagctcactgcaacctctacctcctggattcagacgattcttatgccttagtctccctagtagcagggactacaggcatctgccaccatacccggctaattgttttgtatattt

SEQ ID NO: 62208 - DNA, 1033 bp, Homo sapiens
atatattatttaatcatcagtaaccctatgagtaggtgttgtttttctctggtttacaggtaaagaaagctgagttccagggtagctaaataactttcttgaagtccctcagatagtaaatggcagagccagaatttgaatctaggtctgattgactccaaaaatcatttttttctgctgttccacaatgatacttcttagcagaagcatctctttctgcctcatatgtacattctgtatggatgattactctgcagtaattttatttactttctttctgagtatataatgaatagttttggtagaatcaagtacttagatttgccacttttttgatgcttgctacatcagagagacctgacctgtaataggtaaagagtaaaaattaaaatttgcaaatatatttctttcctattattcatacatttttgttctccccccaacccccagaactttatgaaatcttcctctcaagagcaaaagaacggtggaaaagtttcagtgaaacaagttcagagaatgatacagaaggtgtgatttctttttttaaataagaattttaggatgaaaattcagatactgagcatgtatcagaagctgtagtaatcgctttacatatatcatcttatttaatcttaaccctttcagtaaacaaggctagaaaaaagacttgatttacagaaaagttcatgtaagtatcatcctaagacctcttagctatgtcagctatttgtggagaactaaaagtatgtaaaaggtaaagaagtttatactggcagacagcagctatttcatcatttttgactcatttttatgaagcattgaaattatgagaattaaaattataagtattcacttctgaaatattttttcaataataaatggtgaggctgggcggatggctcacacctgtaatcctggcactttggggggccaaggcaggtggatcacctgaggtcaggagtttgaaaccagcctggacaacatggcgaaaccccatctctactaaaaaaacaaaaattagccgggcgtg

SEQ ID NO: 62209 - DNA, 1094 bp, Homo sapiens
gtgccatttttctatgtatctgtttttatgccagtactattctgtttgggttactatggctttgtagtgtattttgagatctggtagtctaatgcctccagcttttttttttcttcttttctcaagattacttttgttgtttgaagtcttttgaggttttatataaattttaggatggtttttttatttctgtgaagagtgtcattggtattttgatagggattttatggaatctatagattatattgggtagtattgtcatttgaacaatattaattcttccaatctatgaacatgggatgtctttccatttgtttgtatcctcttcagtttctttcatcagtgttttccttgtagaggtctttcacctccttggttaaatttactcctaagtttactccttattatttttgtacctattattaatgtatccagttttctgatagaagaatgatgccttatttaggcactaatgtcttttatcatgttttctgttgaaaatcttttgttttaacttggagagtttgcctttgaagcaatacccagtagattatagaatggtgggtgaattttgccaaagagatggagcagttgatcttaagacaggttgttgttaagaatacacatgggtgcagaggctcatacctgtaatcccagcactttgggaggccgaggcgggtggatcgtctgaggtcaggagttcaagaccagcctggacaatatggtgaaaccttgtctctactaaaaatacaaaaattagccaggtgtggtggcaggcacctgtaatcccagctactcgggaggctgaggcatgagaatctcttgaacccgggaggcagaggttgcagtgagccgagatcctgccacttcactctaacctgggaaatagagcaagactgtgtctccaaaaaaaaaaaaaaagaattcacatgataatttgaggagggggaagagtacagatgacatatttaaactttaattcttaacaattcacaaccagtgggtttcacgtaaatggtattaagctttaatgtagaaaaataaataatggcattggtcaaatgtgtcttctcaggtcttctttggttcaggat

SEQ ID NO: 62210 - DNA, 1019 bp, Homo sapiens
aatttttgtatttttagtagagacggggtttcaccgtgttggccaggatgggaaagccatatgttatttgccttcttatccctaattaaacactgttctttttttatagagatgcttactgagtaaatgagtcaatgaatgaaaaatttcagtgaccatttttccctctaattttaggatcttcacactatatagcaaatcactaccacttgatctggcctgtcgagtctgggatgtattttgcagagatggggaagaatttttatttaggactggattaggaatcctccgattatatgaagatattctcctgcagatggactttattcatatagcacagtttctaactaaattgccagaagatatcacatcggaaaagctgttcagttgtattgcagccattcagatgcagaatagcaccaaaaaatggactcaggtagagtgacattttcttatctttaatagatgtgttaaagcagttgacttattgtaaaaaagttaggtatttcttaaaagttagtacttaaaaatatgtcttttaaaaataatttttgacttctaagaagcaagagtttaaatcaaattgcccactttgcagctatccaaacatagggcttattttattttattttattttattttattttattttattttattttatgttattttatgttatgttattttatgttattttatgttattttatgttatgttattttatgttattttattttattttattttatgttattttattttatgttattttattttatgttattttattttatgttattttattttatgttattttattttatgttattttattttatatgttatgttatgttatgttatgttatgttatgttatgttatgttattttattgtcacccaggctggagtgcagtggtgtgatctcggctcactgcaagctccacctcctgggttcacaccattctcctgcctcagcctcccaagtagctgggactacaggtgcccgccaccacgcccgg

SEQ ID NO: 62211 - DNA, 1231 bp, Homo sapiens
gtggggaatgtaaggtatcgcgagatgacaggattttcccgcgaaggagaagcgcgcttttttccctggcgggggatttggctagaaggctgggccggcagcggttgtgaggagttagctcgcggcattgcaggctctgagaggaggggacccggttcccgggtgagtgtccaggcatgccagcggaacggcccgcgggcagcggcggtgagtgaggaaaaccttttgggcgcgggtggcagcctgcggggctgaggtgggcaagcatggaggctgcggcggagtttcggggagggagccgaccccgggcagggactgaggaggaaaggagggttgggaaactgcaacggtgagtggaggacaccccggaatcgcacgtattagcatgccggtgaagatttcacataggcaactgcattttcccgagcatcccgagttgtaaactgtggtccaggcgacttgtagacattgtgaagacttacggtgtcttctgagaggtgatgctggcgtcccctcggtcttcagcttttgctccagtgcatctcgggtgggagaaaggctgtttcttgttggagttgagtagttggtaatttttttaaaactgcaatttgaaagctttctcccccgtcaggctcggaggctccagcaatggttgaacaactggacactgctgtgattaccccggccatgctagaagaggaagaacagcttgaagctgctggactagagagagagcggaagatgctggaaaaggtaatttaggcatcaggttcgtcgtcgtgaaagcctgtggtaacctcggctttaacccggaggtgtggtttgtgttctttgctttcctatttagtgggctttttaataactgaaagaaaacagctttattacttgtcttttttgtatgtttacagatattgcctttgagaatcctttcgcaagtgctttgaatggtgtgtttctatgagatgtagtcttggtagtcccatcacttttaaatgagcatttcagattgcttgtttagccatgaaaagtctttcaaagtccatagtgagttttttcgtttgtcatccttatttcctttaaaaattaccttaaatgtatgtctcatggcaaacaggaatcgctaaaacctgcagaagtaatgtactagactgagggcaggagaagttagcatcaatcaaaggctgggctggaatccaagtctaatgatttccttatactgtagtgctgtttt

SEQ ID NO: 62212 - DNA, 1628 bp, Homo sapiens
gtggcatgatctcggctcactgcagcctctgcctcccccgggttcaagcgattctcctgcctcagcctcccaagtagctgggattacaggcatgcaccaccacgcctggctaattttgtatttttagtagagatggggtttctccatgttggtccggctggtctcgaacccccgacctcaggtgatccgcctgctttggcctcccaaagtgctgggattacaggtgtgagtcaccgcacccggccttcaattgttttttaaatggaccttccaactcagtagtgccagaaaccatgtgttcaatatttgaaattataatattttgatatacgaattgcatctatcagattgcctgttaaacccaaaaactattttttttttaacagttatttgttccagtttttggtttgaaagtgtttggtttaaaaaatgttattttagccatttttattaaactttatgccaaaaaaattaaggtatgtcagaaagtgttcataattatggaaattttctctttggataggctcgcatgtcttgggatagagagtcgacagaaattcggtaccgtagacttcaacatttgcttgaaaaaagcaatatatactccaaatttttattgacgaaaatggaacagcaacaattagaggtatgtatatgtaactgactacaagtgaaagcttaaaaaaatttaaaaatagctttattgaagtgtatattatatacagtaaaatggacagattttaagtgtacggtttgctgagttttgactagtaaatatatagatctgtgtaaccaccagcacaatcaagatacagtgcacttccatgaactccaaaaaattgtcttgtgctgacagtaatccccatggctggtgtccagcaactactgatttgctttctgtcactatagaccagtattgttttttcctagaaaattgtataaatgaaatcatggtattgtgctagtgagtaaatagttggtcttcatcaccatttcctggtatacaactcttgaaatccttggaatcttcaaagtaatagtgtttttttttttgtttttttttttttaatgctaatgatcaatggctagctgcccttaggtagcttcaggatgggagcctaagaaagacaaaacctggattagagggttgggatttagcctcaccctcaactttgaggaaaagagactgaaagttaacttgttcaccagtggtcacgattgaatcaatcacgtctatgttatgaggtcttcattaaaaacccaaaagggctgggtgtggctcacatctgtaatcccagcactttggggagcctaggtgggtggattgcttgagcccagaagtttgagaccaggctgggtaatatggcaaaaccctatctctaatagaaaaattagctaggtaaggtggcatgtgcctctagtcccagctacttgggaggctgaggcaggaggttggcttgagccaaggagattgaggctgcagtgaactgtgatggcaccactgcattctagcctgggtgacagagcaagaccctgtctcaaaaataaaacaggctgggcgcagtggctcacgcctgtaatcccagcactttgggaggccaaggcagacagatcacttgagcccagga

SEQ ID NO: 62213 - DNA, 1530 bp, Homo sapiens
tattgtatttattgtttgtctttccactagactgttatgaagatttaaaaacttgtgcaaattgagagaatacagtaagtcccggtgtccccatcacccacatttaaaaattatcaatttaaattttgctgtatttgtcaaatctcctttttcctttgtttgaaacccttttattacttttttatggtaaagtaaaacaaatggaaaaacaaatattcaacttaatgagttacacagcatctacccctttcatcacctcttggaaatggtttgaatttttggtgtctttaaaaaatttgtaagagtatgtctagaatagcttttagtctaggaataagttgatcccttttctgagcactctacttgatgccctttatattaagaggactttctactttggctgagagaatgtgaggtataccttattatgcctgaccccttggaacatgagaggttccacctgcttctttctggtgactcttctcctggccttggttaccatgcacttaccagtactcagcctgagagagagataacagctgcctttgtgcagctttgtcctctctggtacttgaccctgggaatgctactgctcttaagttttggattctgtctcctcaacacaaagagactgttgggctctgtttggatttttctccattatttgtactttaaaattgtatcaggcagtaagctgggcagtcagaagattaaccttgtttccgttttgtcagtgtttacagtccgttactgcatgttgtctgaaaaccattgtttaataaattttatctggattttagttgtttaaggcaggaggctaaatctgtcccattagtccataaaggcttgaagtacaagttcctccctggtttttaattatgatagaccttagtttctcattgtaaacataagttatttgagaattgatatgcgttttttttttaaatgttgcactttccacttgtgacataagaaaaaattgtcttacaggaacagaagaagaaagaaaaattggagagaaaaaaggagtctttaaaagttaaaaaggtaatatagccagccggaatattttttatgtcatttaaatattgaagaaatacttttgtattcttctgacttttttgatcatctgtttaattttaagtttctttagtgataaacctaactttgttacaagcaatgcagaaacatgtaaaatctgttcctcactatttaagaaatggagaaagagccaaagtatggtccactttagtttcttattctatggattattttggacgttggcaaaatttgactttcttaattggaaagaatctgcaaatttaaacttcaaggcattttgtaagtggccaccttctttgaaacctgtaatgaagttttgctagtgaaaagagaaataatttattgaatacatactgtgggtcaggtgtgctatcatgtcttctcttactctattttttttttcttttttgagacggggactcgctctgtcacccaggctggagtgcagtggcgcaatctcggctcact

SEQ ID NO: 62214 - DNA, 2006 bp, Homo sapiens
attttattttattttattttattttttgagatggagtcttctgtcacccaggctggagtgcagtggctgtgttcatggctcactgcagccttgacttcctgggtttaagtgatcctcagcctcccgagtagctgggatacaggcagttgcgtgcaaccacacccagctaattttttgtatttttagtagacacagggtttcgccatgttgtccagggttgtcttggatacctggactcaggtgatcctcctgcctcagcttcccaaagtgctgtgattgtaggattagccactgtggcagcctgttatttttttttttagtagcttttcatttgtagagggatggcgatgtctccagttttttaatccaggtgtgatcttagtcttctatacttaatgattataggactcagtagattttgttagttgcattttctgataaatggtggcatacagcagcattttgtataacacatcttattaaactttttttctctacaggatgaaaactcctcctctactaatctctgtgtggaagatcttcagaaaaataaagattcgaatagtataattaaagatagattgtctgaaacggttaggcagaatactaaattcttttttgacccagtccggaagtgtaatggtcagccagtaccttttcaacaaccaaagcacttcactggaggagtgatgcgatggtaccaagtagaaggcatggaatggcttagggtaatgaattggaatttttaatacaagatactggttttatttctatagtagcctaatgatttgaggtaccacaacttgagtcatttctatcatgtttcactattatacatttgtatgtggatacttgctttctgatttctttaccctgaatttttagaagtagaaattaccttgttaatggcttccagcacttttatggctttgataaaggactttccagtgttgttataatttatggtgtgaatatatcagctttaacataattctcatctttgggtgtgattttttaaagagaagaaataaaatattgtaatcctgtagttgtttatatccaagtttaaatacagtatctattattttgtccagatgctttgggaaaatggaattaatggcattttagcagatgaaatgggattgggtaagacagttcagtgcattgctactattgcattgatgattcagagaggagtaccaggaccttttcttgtctgtggccctttgtctacacttcctaactggatggctgaattcaaaagatttacaccagatgtaagacatgcttccttatgttaaaattataattttacatgttttcttatgctttgttgtagtaggaattaaattgtagaactcttataattatattggtttctgtataaatattttgtctgatttgacttactcaatctgcacaataccctaatttaaatttatatagtataggttttggaaatccctgacatctttcctaaaatattcctgaatgattttcagtgcattggtaatttgattcgactgagacagacttaggtagagattttattaaaaattctgcttgttcttcacttgatctttgccaaaaggctaagaagagagttttctgttttttctgtacttgttaccttctgcaatttttttttttttttttttttttgaaatggagtctctgttacccaggctggagggcagtgatgcagtcttggttcactgcaatctctgcctcccatgatgaagcaattcttgtgcctgagccaccggagtagctgggattacaagcatgtgccaccatgcccagctaattttatgtttttagtagagacgatgtcttgccatgttggccaggctggtcttgaactcctggcctgaagagatctgcccactttggcctctcaaagtactgggattatagacgtgagccactgtacctcccgggcccagcccttctgcacatttttgccttatgagaaatatatatattctagacgtagtatcaccatc

SEQ ID NO: 62215 - DNA, 1924 bp, Homo sapiens
ctttttttttgtcttcagacaggatgttgctctgttgctcaggctggagtgcagtggcgtcattctggctcactgtggccttcacctcccaggctcatgtgagcctgctatctcacacgcctgagtagctcatgtgaacctcccatctcactccactgggtgagtagctggcactacgggtgcgtaccaccacaccagctaatttttgtattttttgtagagatgggatttctccatgttgctcaggttgatctcgaactactggactttagagatcggcttgccttggcttcccaaagtgttgagattataggtgtgagccattgtgctgggcctgactttgtttttttgtttgtttttttttcattttctcccataatagttcaatgatttgttagaattgcttggcttattttgctatagaaaaatagaaataaaattttttaaaattatattttttccctcagaatgatttatattttctaaatagtcaatatttacattttgttcttaagtctgataaaaatcaatataaaatttttcagatccctacaatgttatatcatggaacccaggaggaacgtcaaaaattggtaagaaatatttacaaacggaaagggactttgcagattcatcctgtggtaatcacgtcatttgaaatagccatgagagaccgaaatgcgttacaggtacaaatgatcttcattggtttctttgtaatacataaaacatgcttttcttcatttatatcactttctcaccatctgggagcatttgtctaatttttttttgttgtcgaaataatagattatattgtgcatatacctgtagaagctggaaacttttattaacagaatgattgggatgaaggccatcatttgtaacaatataattaaagcttatggcagtttaacctatggcttagaatcatccagaaatagacctaatctcggaatgtattacagatatatttgtgacaggtactttgaatatatggaatttacttatcgtattttaatcaaataagagtatttgaagacaagttatttttagagtatcttattggactatttggtagcattttcgtttctattttcttgatgttctagctacttatttaaataatttccagttagcataacagaattgaaagattgaccttttttctttcatgccttctgttttcatttattggtgttttgaacttcttcctcactgctctacctcattcatttataattcttgactgctttttttttcctttctctggccatgtgagaaccctcttagtgcagtccccttaggtttatcttgcttgcttggaaataggaaagtatttaatggtttcaacataaaatcaaaacacataagtcataaatagaataattatgacttgcataattatgaccagtattgtcaggttttatgtgtctgctggtaaaactttggaatatgatttgcagaaatctcagttcaggagtttagcaaagtttatgaatgtgtacagcattaaaaagtatttaaaccaggccgggcatgaaggcttatgccagtaattccagcacttgggagtctgaggtgggcagatcccttgaggccaggagttccagaccagcctggccaacatgacgaaaccctgtctccactaaaaatacaaaaattaggccggacgcggtggctcacgcctgtaatcccagcactttgggaggccgaggcgggtggatcatgaggtcaggatatcgagaccatcctggctaacaaggtgaaaccccgtctctactaaaaattacaaaaaaattagccgggcgcggtggcgggcgcctgtagtcccagctactcgggaggctgaggcaggagaatggcgtgaacccgggaagcggagcttgcagtgagccgagattgcgccactgcagtccgcagtccg

SEQ ID NO: 62216 - DNA, 1591 bp, Homo sapiens
gttaaaacaatttccttgataactttatgaaagtgagtgggtgactttctgtgaaaatataaattgcttaaataagggaaaattctagtgctatttgatgtttcagcacatatggaactaataaaagctcaatttttagtagtctagtgtaacattaatatcaaaacttgggaaaatattagaaaagaaagctacaactgcgttgactaaggtgtgaatagggaaatcttaaattcaaaataggtggagttcaaactttattgcatattttagtaggtctcttccaggaacagaaatatctatcagttttaggaatccttgtaagtggatcaaatgaaaacatgatcatttcagtagttactgaaattacatttgataaaattcaacatccatccctcataatagaggttttatttttagaattcttgttagaaaaattgtgagatcattgtttaaaaatctttttcctcaattcgttttctagcattgctattggaaatacttaatagtagatgaaggacacaggattaagaatatgaagtgccgtctaatcagggagttaaaacgattcaatgctgataacaaacttcttttgactggtactcccttgcaaaacaatttatcagaactttggtcattgctaaactttttgttgccagatgtatttgatgacttgaaaaggtgggtaagccagttatttaatgatttaacctcaaaaatctgtgctgttagttaaaattactttcttttcagtgactgaattaaaatgccaaatatttggcaagttctttgtggtgtatattgtatgttctactcctgccacaaattatgtgagagcagattaagaaaagattatttaaaacttacttgcattgattaaaggaagactgctgaatgcaactttaagataatatttttataataaggttcttttatgtgttacctttgtaaaacattttaagatggatttttcttactatatcctcattaaacaaccagggacaatagagttgttaaattatttcctatctcacataaaagaaaacctaggtgtaaagttgttacaagataagactagttagttagcaccagagccaaagttaaaaccaaggtctcccaatgtaaacacagtgttttaattctggaaactgtttgaatcttagcttatataataaaatcagacataaaagtagttttcagaaagtaattagtagcttcagaatggaggaggaggtaatgttgacataatttaaaactgattacaacggaaatataacttgggcaaaaaataatttatacttgttttggcatcagtgaaggaagtaagctaattgggtgtggaaaaataattttaaattttgggaatttatttcaaatctggttaccgaatggtggctcaaggcaggctaccttattgtgactctgggcgcttttattgaaagacaagaattccaggtcctgtgcagacatactgagttacagtgtcaaggtaggagttgagaatctgagttttttgaacatgcttctggtgatccaagtttgggaacttctagtctactgcataaatgttactagcattttccagaattgg

SEQ ID NO: 62217 - DNA, 1027 bp, Homo sapiens
tcattgtaatatatatattttcaacattgggaaggaataagcatgtatattattgtcaagttatgtatatgttgaattttaaaatatttattgtagtgggccatacttagactgatggagaaaaatcatatggctttggttttcagagatagttctcacttttgtaatgtaaaattataaatatataccttaatcttatttttgatttttatactactgtacaattgttaatctatttataaatcagaaaagtgttccctttaagctcacagttcttgatggttcaaaaatgcaaccaatttatctttgttgttggaatgtgttctcttccattataaattttaaaaattgcacctaaggatttgatgcaacaataccacgtttcattatcagattattactgtaaatgataaatcatgtatcatgttgacataattgaatttatgtgatggttaacttaaacatttttctcttccagctttgagtcttggtttgacatcactagtctttctgaaactgctgaagatattattgctaaagaaagagaacagaatgtattgcatatgctgcaccaggttttccatgttttcttattctgcttaaccataggctcgatagagtataaaaggaactctggagatcacctgtctaaccctttgtagtagagatttgaaaaatgaagatcctcctacatttaaatgactcctttgtcctttcttctcccagaggtcacatggttttatgacagaactcaagtgcttacctaagttttgtccttttcagatagtatactcattttacccctaatggttactgataagtttgtcaagcacaaaacagaagtatgtggtttttatggaatgcttgccaataatacttttataatttacatccttgcatggctgctgtctaatctatttttattgcttcctgtaattcctaccccatcctacctatctttaatttagagaaacattatctttcaagggtaatctagtcatatgggcctgaaaagcttctcagttgt

SEQ ID NO: 62218 - DNA, 1994 bp, Homo sapiens
tatattttaaaatgtaaaagttaaattattattgactgtagtcaccctgttgtgctaccaaatattaggtcttattatttctactttttgtactcattatttcaaatatttttaatttttattcatttttattatttccccttttgtatggtgctgataacatctcattctaaaagttgtgggctataactgaaacttcaaccctaagaaatacaaatgctacctttatatttttacttttaaaattatttgagatagattcttacagtttttaaaagaaaataaattctgaaatgctgcggacaactgtgagtttatcatttggtctggtctgggaaaatctcaagatattttcaccttttgagatttggcattatttatataggaagtcaaaagataaggtaaaggagtatatggggacagtattccttgaaaaacaagaatgtttaatactcatatttttctgttcatgttttaattttagattttaacacctttcttattgagaagactgaagtctgatgttgctcttgaagttcctcctaaacgagaagtagtcgtttatgctccactttcaaagaagcaggagatcttttatacagccattgtgaaccgtacaattgcaaacatgtttggatccagtgaggtatagtggttttgaaatgtactgtaaatgaaacttgacatataaaatttctcttttttccctttttttttgagagaaggtgtcgctctgtcacccaggctgtggtgcagtggcacaatcactgctcactgcagcctttacctgcctggctaaattttttgtatttttttgtagagactggcatttcgccatgtttcccaggttggtctcagactcctgggcttaagcagtccacccaccttggcctcccaaagtgctgggattccaggttttagcaattgtgcctggcctaaattccagttttaaggtccccttgttcatttttaggacttgggtgaatttctaactggggtataaggcataaggcttagtggcaaaagttgtttcctagtatctggagtcctgctaaaatgttaagtgataatctttgtattaattgctttacagtcatctggaatacttactaaaaatttaggccaggcacggtggctcatgcctgttatcccagcactttgagaggccgaggcgggtggatcacctgaggtcgggaatttgagaccagtctgaccaacatggagaaaaccctgtctctactaaaaacacaaaattagctaggcgtggtggcgcatgcctgtaatcctagctactcaggaaggctgaggcaggagaatcacttgaacccgggagacggaggttgtggtgagccaagattgtgcctttgcactccagcctgggcagcaagagcgaaactccgtctcaaaaaaaataaataaaaaaaaaatgtatatttccgtacagattaactctaatcatgctttctggagatgaacttggaaatgcatttttaacaagcacacaggtaggtatttgagaatccctgtactaaggacttggcaactagactaatctccagatatacagattgagcatccaaaatctgagttgctccaaaatttgaaactttgagtgctgatatgaaactgaaaggaaatgcttattggagcatttgtattttcccgttagggatgttctacctgtacagtttccttacagaaggttattgataaccaaaaagattaataatcaatttgatgatgattattcatcacccaccatattataggagatagaggtgggatgttattatcatgtaactgaaggagacccttaagttttgtttaactttccaggttttttattgtacactataaacctacgtattttcttttcaaaatatttattgtgatgcatttttaaacaataggaccaccagactcttctccccccgacttttttttttttttttttttttttgagacagagtctcgctgtgttgcccaggctggag

SEQ ID NO: 62219 - DNA, 1293 bp, Homo sapiens
ctccgaaagtgctgggtttacaggcgtgagccaccgtacccggcctcttctccctttttaataattaattataattaaaggaagggtctagccgtttacaaatttacattatttgtctgttaatgagcaatttcataatgagcagtttcatgcagtgttacaccagtctgaagaaatatcctctgtactgcaaatttccggagccatatttcaactttaaggtattaaatccttttgtgtaagttcaaagtagttttatacacccttcatttttacctattgagatatgaaggcccttcctcttactttcagatattgttgtccatgttaaaattaaactaatttcccacaacatttgtatttgtctatagattgtcattttgtacataaaatatgccttattttgtttacatttagaacctaaggacatagctttataaactgaatttcttttaattcgttcccttttagaaagaaacaattgagttaagtcctactggtcgaccaaaacgacgaactagaaaatcaataaattacagcaaaatagatgatttccctaatgaattggaaaaactgatcagtcaaatacagccagaggtggaccgagaaaggtttgaattcaaaagtgaatttaagtattctttaaactgtgaccattttttgcatttcccatatatgcattatttgttttggtagagctgttgtggaagtgaatatccctgtagaatctgaagttaatctgaagctgcagaatataatgatgctacttcgtaaatgttgtaatcatccatatttgattgaatatcctatagaccctgttacacaagaatttaaggtgaatactgtttaattctaatttactgttttgatttccattacttttatattggtggaaagtgttactttttttgattataattattaaaaataagtatggtgctatttgtcatgaagattgtaatccttcagtaagctgagacagtcttctttccgaaatttcagagaaccttatcagggttagaaaaatggtcactttctatgagcaactagttttttaaatttttttattttttatagagacagggtcttgctatgtttctcaggctggtctcaaacttcctggtttctcaggcaatcctgcctcagcttcccagagtgctaggattacaggcaagagccaccacgcttggcctctatgcaacttatatttttatttacatattttatgtgaacaactaagaattctaaatttagtaattgatttgtactctgcatgtttacttgttatatttt

SEQ ID NO: 62220 - DNA, 1070 bp, Homo sapiens
aaatgaaagtagctctctcatgagggaatttcaccagaaggtgaaaaagtctttgtccacaatatttagattacttatcagctcctgtattttctcttaatttctggtaagaattctagcagtagtttacatatacatttagttggaaataactcacttataaagaataagcctgagtatgtacccattaagtttgacataattgttttctttcacaatgactttgagagaggagtgttgaggttagatcaaagttatatttgtactttgtttttgtgaaattgctggttttacattctagagtatgtctttgagtaataactatcttctgattttacaaagattgaataacaggtcagtttttaagttttttaagtgacttggctttgaaaattgaactttccaaatggcttttgttttaacaaagcaaataacagttttctctctattttttcttcctttgcccctccttaagatcgatgaagaattggtaacaaattctgggaagttcttgattttggatcgaatgctgccagaactaaaaaaaagaggtcacaaggtggtacttttgattggaattttggattgttcaattatttttttatcaatcattagaaatattaagatatgtttaatttcaggtgctgcttttttcacaaatgacaagcatgttggacattttgatggattactgccatctcagagatttcaacttcagcaggcttgatgggtccatgtcttactcagagagagaaaaaaacgtaagactacttatgtcatacataccaaactattcttttataattcctatcttgatttctgaagtaatattccaaatagacccacaaattgataaaaagatagaaatgaccagaaaccctgtggttttatcaaaaacaaacattttgatttagtactaagaagtcttaatttttgattcacaaatatatatatcttctggcacaatcttattaataatatcctacttaaccatcactgtaagaatattgggatagcaggaaattttttgcctttttgccctgtcctcaactttctattatgaaaatatc

SEQ ID NO: 62221 - DNA, 1016 bp, Homo sapiens
gttattatgaataagttggtcctgtacaagtctttgtggacataatgcattttttggtccttgatcttagggagggtgcgtgtttaactactggaaactaccagccttttccaaagtggacatatcattttccagtcctaccagcgaagcctgagagcttcatttgcttttattttttatcaacacttttttttgccgtccttcttaatgcaagccattgtgattggtttgtaatatgttgtattgtagttttaaaaggaattttaatgtttttaatttctcattttttttagatcatttcaaaggtggtcagtctggattaaatctgtctaagaatttcttagatcctaaggaattaatggaattattaaaatctagagattatgaaaggtgagtttttaattttagaaagatttaatttgtagctttgaattattcacatagacttgaatattttgttttctatagggaaataaaaggatcaagagagaaggtcattagtgataaagatctagagttgttgttagatcgaagtgatcttattggtaagtattatgcttttttttaatggaagcttcgaaacatacacttaattagcataatgtaatgaaccccttgtgcaattcattcagccacatgtatccaatcttgttttattgtcatttttcttcttagagtattaaaatcaaatctcagacatgacattttgcccataaatgtcattatctttaacttcttccataattcagatattttctgtaaactggtaaataacacttgtaaatgaatatattcaagttcctgtcttagttaagaataccagtgctttgttctcatatttttcgtcataccaggaggcacatcgtatctggatttcttatttccagtgagctaagattaatcaagataatgttataaagtgtcttgtcagccttcatcctttacttaacacgatgatttattttattttattttatttttttggagacagagtcttgccctgtcgcccaggctgg

SEQ ID NO: 62222 - DNA, 1690 bp, Homo sapiens
aaatcagtaatacaaatgaaaatcagatttcatttcacagctgtcatgttgataaaaatttaggagactacatattgtcattgattcaaaatgtttctcaaggtaagctttttgtggtgtgttttcagctattaaacgaatcgtgattgggcctctttttaaaacgtttctgacaacatgattcaaattgatattatttattgctctttgacttgtttatcttaccttaaattcagcaaaagcgattttgactagcaaactgatgctttagattgtatgctcccaagagtctgattctagttgttgtattaagaatagtgtacctttttgctttcactgctattaaatcttggtgattaaggaagagagtgccctgtattactgtgagttttataattttggacagatgactcacttctcataacatcatattggatgtttcttttacgatttcttcttcttatacttctaaaatgtacctgttttaatgtttttcccttagatcaaatgaatgcttcaggaccaattaaagagaagatggggatattcaagatattagaaaattctgaagattccagtcctgaatgtttgttttaaagtggagctcaagaatagcttttaaaagttcttatttacatctagtgatttccctgtattgggtttgaaatactgattgtccacttcaccttttttattatatcagttgacatgtaactagtaccatgcgtacttaaatagatggtaattttctgagccttaccaagaacaaagaagtatccatattaagtttagattttcagttaatttttgagactgagtagtattcttggatacaggctgatgtgtacttaaccacttccagatttatacagtcttcctgtggaagtttagtaaatgtctttttccctcctttcttctagtaatgcagttcatgggctttaggtacttcagttatgaagtaggcttttcatggggagagattgggattatgctctctgttgtttaagaaactgtttgattttagagtctatttctatgagatagtttaccaaataaatgttccttataagatgatctcattaaattatttcttcaggaatagcttaggtgcaataatagcaaaagacttggctgtcggtaggatttggttattttgttttcttggtttcattcactagtactataggagtgtgtcatatagagatttcaagtggacattgtgttagcacaagagaagtttctgaatgaaactttagggtcttgagaaacgactagaaattggaaatggtagtgtatcatgcaaaacaagacagaccctgaaaatttatagtagtgggttaactagaaccaaatataagagaataggccttaggaatatgtaagtaatgcacaatctgtaatagaacagcataaaggccaaaagaggcacaatttagaccctgtgtgaaaggatatcagacaatgaggaagagaaatcctgaatgtaccctggagaggggacatactccataagccatacatttctgtgttagtgtttatttcatggaaaaatattgctgttgccatgtatattcaaatgcagatcagatgatctgttaaggataatggaaccgtcacttaagaaaaacttaattttttttccctgtgtcctattggcacaggtcttttcttttaaatttttattttaatc

SEQ ID NO: 62223 - DNA, 1040 bp, Homo sapiens
aatatttgaagctgtatttgacagaataatcataacaacattatgatgataatatcagtctgaatcacggacaatatatagaccaaatactgagttttgctactatttgaacctccttttctatgtttagttctcaaaagtctatggccctgtgttcactgtgtattttggcctgaagcccattgtggtgttgcatggatatgaagcagtgaaggaggccctgattgatcatggagaggagttttctggaagaggaagttttccagtggctgaaaaagttaacaaaggacttggtaaatgtgcatgtatcgtgtgtatgtgtacatgtgtatgtactgggcagtggctatagggatggggaggatggaaaacaggcttgaagagctcctgggacagaacttgacctgtccacgtggctgccgagtgtcagctctcttgtccttgtttggattctccctcgtagcttctgttttctgttctgctaggaatccttttcagcaatggaaagagatggaaggagatccggcgtttctgcctcatgactctgcggaattttgggatggggaagaggagcatcgaggaccgtgttcaagaggaagcccgctgccttgtggaggagttgagaaaaaccaatggtgggtgacttttttttttcctgaaaaatgttttctaaaatttattttaatttatttttagattgatacataacttttatgcatatttatggggtacatgtaatattttgttacatgcacagaatgtgtaatgatcaagttaggtgtttaggatatgcatcactttgagcatttatcatttctatattttgagaacagacctgtgttctagctatcttgaaatacgcaatactttgacattaacacactgctatgttctctaatgacatccctggaaacctcctaggggcagccagatctttcatgatagtggttgtcagtcctcatatggagggtggaggtttgaagcagagagccaagggaggttttgtgcacctatgcttgttgtgtttgtacacaatgact

SEQ ID NO: 62224 - DNA, 1044 bp, Homo sapiens
ggggttaaggattagggtgattcttataatcccatagccacctaattttaggagtactgctgtggagactattggcccagcaatcgggacctctacatgggcttttgggagttctaggtggattccatagagaggtgcttttactataaatgctatgatgcatgctaatcataaaagactgttggaccaggaaattgttagttcttgaagctgggtatttgtcttaaggtagacacaagagtgctgataaatttctcaagcatgagtgtttgaataagtgaagtttcaaatttgggtcttctgtatattagctgtgggacactgaaaatgaatttgtcattctcttagctcagtttgtttgtttaaaatagagcaaatagacctgctgaatatgttggtgtgagggttaattgtaatctgtgtagcaattgtctgaccattgccttgaacatcataggccatctgagtggcaagtataataatcatcatcatgtttatatataaaattcagaaatatttgagcctgtgtgactgaataaaagcatacaaatacaatgaaaatatgaatctaagtcaggcttagtaaatggacaaaacagtgacttcatttgctgttaactgtatctccttttctagctctcaaaaatctatggccctgtgttcactctgtattttggcctggaacgcatggtggtgctgcatggatatgaagtggtgaaggaagccctgattgatcttggagaggagttttctggaagaggccatttcccactggctgaaagagctaacagaggatttggtaggtgtgcaagtgcctgtttcagcatctgtcttggggatggggaggatggaaaacagactagcagagcttctcgggcagagcttggcccatccacatggctgcccagtgtcagcttcctctttcttgcctgggatctccctcctagtttcgtttctcttcctgttaggaatcgttttcagcaatggaaagagatggaaggagatccggcgtttctccctcatgacgctgcggaattttgggat

SEQ ID NO: 62225 - DNA, 1018 bp, Homo sapiens
ggctttacatttaagtctttaatccatcttgagctgatttttatatatggtgtaaagaagggatccagtttcaattttctgcatatggctagccaggtctcccagcaccatttattaaatagggaatcctttcttcattgcttgtttttgtcaggtttgtcaaagatcagatggttgtgggtgtgtggtctcgtttctgggttctctgttctctgttcttctaccagtaccatgtcgttttgattactgtagccttgtaatatagtttgaatttgggtggcatgatgcttccagctttattgtttttgcttaggattgtcttggctttttgggcttttctttggccaggtgttaatctcctattttatagaaaaataaactggggaccagagaggctaagttacttgcccaggatcacagagcagagtcactccagttcccatggccttgcttgaacatatatttataagtggttctgaagagctgagtgatacttatgcaattctgcccttcctggccaatgacagtgttttcctcatttcaggggatcccaacaagccctcaggattcagaagtgttaaagctcctgtcactaaagtggctgcgtcgattggaaatgctcagaagttgcctatgtgtgacaaatgtggcactgggattgtgtgagtatctgcttcccacagcctttgcagaccctgcaggttgggtaaaccatgaaaatgtggaaagtgctggatgttgcacattttgcttgtgagggagacaaatccctcctggaaaaatgcaacagagaggccagaaaggtcctgtgtcccagagccaggttgtgaaggttttccttcactgcggagcccttaggttatgaacatgtaaaatgagaaaaatcagggctgccctgttgaagtaggaggggtttttggaaaaatgtctctggaccctgggaaggagaagcaagtcccttatgattggaggccagttgggaggccctggtttcccctgtgatgggttcctggggaga

SEQ ID NO: 62226 - DNA, 1108 bp, Homo sapiens
tcaaaatcagaaaattcagagcccagatttcattgtttatatgatactgcctgatacttcctaaaggcttggtagatagaggggcctgagccttgaattccagctctgcctcttactagctgtgtgaccttgggaaaaccatgtaacatctctgaaactcagtctcctgagatctaaggtggaaataatactaacttctttaccaccaggttgttgagacaatgcaatgggatgtgcacagagcactcagcacagtgcctggcccctggtaggtgctcactaaatgctaattattgctaactttagtttccatgaggaactccatccccatcacttctgagaactgggggctacagaagtgtggaagcacatagacaaatgtaatggagaagactttgctgtggcttatggtacacttctttcttgcccattaaattcagccagcccacacagctaatcagcttactgatggggtggtggtgttctcttcaaggaatgattggagagctcctgtaaccaacatactaggccctagataatagctcttccaaattgtgttgtaaggtgttgcccccaaacattcatgagggagatttctaagcagctgccctggaaataaagggatgcatcattttctattcaaatattatcacaaggatgatgttaaccctggcttcttcagagctgaatcagaagtacacctctatcatgaaggctgcttgcccctctagctaaacctgcctgccacccacagaaaactggctctgctgtgcgggcattcctctctcttctcctggtgcccacaattacccctctggtttcttattgcaggaccaatatgtgtgcctttgaagaccaaaacttaggaagcacacaggccaggcttcccttctgaaaatgattacatagggtttcccagaatggcgtttttgggtgaacattggggtaatcaggctgggacatctcatttcttgggatatgagataggaaagatttttctgggtccgcctacctcctttcccccacctacataaaaaacaagtattcctctacattatttccagctagcacttaacttccaccatttggggaaaatatttcttaaaat

SEQ ID NO: 62227 - DNA, 1089 bp, Homo sapiens
cacgctcggcccaaaagagaagtcttaaacataaaaatattttcaggttgttttcttttattttaaattaggtactcaataaagcttttagttttcatgattttttttttttaagaaagcataaaagacttgaatatttaacaaaaaaggagagaaaaaaggaagtgcaacagatgacaggaactcttttggaggcagctgttctgggcctgggtgttttaagaaagagactagagttcaggaagatttttctggaaaacacagacactaagacacattttgagttcagctggctgcacagagcatgcatcacctagaagccatgggttgtccagacacccatatagaaaggaccttgctgattgggctatcagaaaagctgtgatgctggcaggagggaaagaaaaagtagaaaagctgtagttttagaaaacaggaatgttaatttccaaagtggctttgcgggtttgtaaaggagctctgagatgttgtagctgtagtaattattcacctgactcttaacaagtctagggtgggggtggagggaactttctcaaattacagaaagaggggaatgagaacacaaggaactcaaaagtccttttctgcagctctgctgggtaccgcccctgtaacaggtatccccgaccttctatctgattagccttgtctttctcccagaagaaacaatagatccttaatttcctttacccttgctctgcaggagactgagaccatctctgcctagtcagcagctgcttcccctgtgacaccacaccctcttaccttgcttgtctaacttgctcacttatggagaatttatctccaccttttatcatctcctgcttttgcactgaccaaagtgactgcatatttctcttcacctagtgctttaatctctttggtatgtgccctgaaagcgtgttttagctctgacttgaatcttacagcccaaagcatcaagggctgtcctgcccgagggtgccttagagggcaggctttgctgggcctcaaggaagaatcagaaggtagagatgattcagggggtgtgaactcgcacaggtgcccattgtgggaaacttccccagt

SEQ ID NO: 62228 - DNA, 1070 bp, Homo sapiens
agccagcatcaggactttgtgacactccaggtcctatgtagaaggccactgcagatgagtctcctggattttttttttttggctttgacagttgagtttggagcctctgcttgtggcattgtgctaaagcaaaaaggaatggaatttgcaatgagagagcctttcaagttcaggctcagcctttagctgtgtgaacttgaaccactcacaatttttctgaatctcaatttcctcatctgtaaagtttatctaatatgttggtggtgaggtaatcatattattatctcaaataggagattgtatatgaaagggctttggaaaggcaaatcccattatttgtttaaatcaattttttcccctaaaaaagatagctcataaaagaatgtgaacttaatctgtatgtgtaatttctttcaagtcctatctgatgttgcttgtgactttctgagatttcctttggcttcttaccagtttggctttaaaaaaaaaacaaagaaattatactgaaagataggatgaccagacctcaattactcaggcttggggcgcctaagactggttctagcttgtccaggacctgttgggatatacttagcagaaatgtctctcccacaaaacagttggaaccaaatgctggacattctggacttctcagcagttcaccgtaaaaaagtgaaaggaaacttctttttcatcttctcaacctctccagttccaatctcatttgagttttgtgagtggtcatgcttcaggatagcagtgtagagggaaatgattatttcatttttgaaataaaaatatttttgatgtttttgaaataattcattttaaaggataaaatgaagcaggctgattacatatttaacaacactaggtgttttagagccaatcatttattatacagatatttattgagcacctactatgttccagttattgggtgttgaggatactgtaactgcccagtggattcttgcccattgcccagatagagctgatttatcaagacaggggatttgcaatacagaaagtttaatacacgtagagctggctaaatggaagactagagt

SEQ ID NO: 62229 - DNA, 1102 bp, Homo sapiens
tatagacacgaccattcgtatcaagtaagacaataagaacatagataggacctagtttagataaagatattgaaaatgcatacagaggctgggcttggtggcttatgtctgtaatcccagcactttgggaggccaaggtgggtgaatcacctgaggtcaggagtttgaggccagcctggccaacatggtgaaaccctgtctctactaaaaattcaaaaattagccaggcgtagtggcaggcacctgtagttccagctactcaagaggctgaggcaggagaattgctctaacttgggaggcggaggttgcagtgagttgaaatcacgccactgcactccagcctgggcaacaagagcgaaactccatctagaaaaaaaaaatgcatacagatagattaaatatggttgatgcagcaaatagtttgcacccatttctttaaaaaaataataaaaaatacttatgcttctgaagctgagcatacccataccatataacccaacagttctcctagttaaatagtcaatagaaactgggtccacatgagtgctaaaggacaagtttgagaattttccaagcaacactattcataatagccccaaatttgaaacgattcacatgtctaacagcaatagaatagataagtagtgggtgtaattatatggtataaaacatcacagcaacaagagtgaagaaattacaactatgcacagtgacatgaaggagacacacacacacacacacacacacacacacacacagagaaaaaggccatacctaagagtgaagagtaaatactgtgtgattccagttacataaaattagacagaattaatctacagtgttagcagtcaggatcatggcagacctttgccggaaggtcagtgacggaaggcgggcacagggaggtttagcagttcaggtaatgtcctcttctttatcccatgctgtttccttgggtgtgctctgtatgtgagaattcaatcagctgtatcgttaccatttgtgctgtatacatgtcatccttcagtaaaggttacatagaagcccgcgtaattgtttaaaagatcggacaatataaacctacagaaagcataaggtaaaa

SEQ ID NO: 62230 - DNA, 1068 bp, Homo sapiens
caccacatgtggctaatttttgtatttttagtagagatggggtttcgccatgttggccaggcttgtctcaaactcctggcctcaagtgacctgcccaccttagcctcccaaagtgctgggattacaggcatgagccaagagcccacttttttattgttagagtgtcctagtctctcatggcattagttgtaccttcaatcataagttgatttagaaaacactgtgatttcaggaatgtttcagatgtatttgtcttctgttaatcacagcagcatccatttacatttgaaagatttgtgtgagaaatatttatttgatctgcttgcagtaataaccatagttaaaacatatataggacttttaatatgccaggcaccattctaagaccataatatattcagtgatcttcacacgtattttgtgaggtaggattaagatccccattttacagatgagggaactgaggcttggagaccttaagtacactgcctgcatcatatagcagtgagtggtagagctggagtttggctggggagtccggcttccaagcctgtagtcttaatctctatgtcatagtaatatattaataacagctaacattttttgagtgcctgctctgtgctaagcatgcacttacattatcttcttctgtattccccacaacccatgacagagggacacagaacacaaagtcagacaattgcagagctgggaagtgaagccaggcagactcacttccaggccagctttaaccactatattctgcctcctaataagccataactgtcaatatttcattgctaacagtgttaacccagcacacagctctgaaaagtgctaagggtggtgcaggcttcaacatgagggataagacactcctgggctccacaccctggagcctctcattctcctgaggttggttggggtggctctccagttgccttgtggcctcagctcagagcacctcagaaagcagcacctcccttccctgtccctcctgaaaaactgaaagtcatggccccacctgggagaatttacagtccagttatgaggttccatgcccacttg

SEQ ID NO: 62231 - DNA, 1628 bp, Homo sapiens
tttaccttcatatattcactcatttattatttatattatttatttatggcgtgtgcacgtgtttaatgagcacgtatcatattccagaaactgtgcaaacgcctcagaaatgagagggcacagctccattctcaaggtgttcatggtctagtgatggaaactaatctttataatgcccttggcaggtgctttaattgaaaagtggaagtgactcagaagaggtaacattttcatgctgacagtaatttatttgtttctcttcagctccttattaatacatggaaaaattgtgagcctgttcacctcatgggaatgggaaagtcattgtcataaagggaccctggtgtggccatctgagatctggtgctggtccagtgtcttcttgcttgagctgtacctggggtgaatcttccactgtctgaggctacttaaaaaaaaaaacctctgcagtggggatagcaccagcccttggctgtgagttaaggtatgtgagagtgctccgtaaatagtgatagtgaggaaatgtgagcactgacaaagagctgtacacactttctgattggtaggtatgctacattatttatcatcctgggcaatttgctggtatagttttgtatatgatagactttgagtctccacaccaaagcaaaccataaaattaggctgggagaggagtgccttttatttaaataaccatgtttgctttctcttgcatgaattattgtggtattggctccagtcttttgctaaactgctaaagcttcttaatataatgctaatcttatgtacttgcaatttttttattttttaacttattttttattgtggaataaaaaatcataaaatacaaatgcacagcaaatgattataaagcaagcatctgtataatcactacccaagtcaagaaatagaatattgcagcacccaaaagttccctaaatgtaacgctatcctgacctatggtaatcccttccttgcttttcttcatagttttaccacctaaattaggtatcccaaataccatagcttaattttgcctgtttctgaacagactcatacagaacacgtgtgtgtgtgtgtgaacagcttctttagctccttaatgttttcatctagtatcgttatcaacttaaaatttcaacccaggtttccaactttaagtggacataggctagcttcttttacccacattctcgtttagtgctcttgccttgtgttccctgatgatccagccacacatttgccactgttctctgatatttttttctgtcagttcctgcttcaaatcaacacttgcccatttccttgaggtatttttttaattaaaaaaattttccatgttaatttctccttccctctagttactttcaagggaagccttcagagaaatacccaggccaacattgcaactcagtttatgttgactgtttttctctcccagcaactgataaaagacaggaaagggtgaggccaagatcaagggatgcccttagttggaggagttgctcatttgtctctggagtcctggggaaccctttgctaagagctgagcggttctgtggcaaatgcttatgctttttctcaagtatcccaagggatgcttaataatggttactgtggccagaggg

SEQ ID NO: 62232 - DNA, 1063 bp, Homo sapiens
taaacgtcccggttgcctcagcatcaaatgagatcgttcgaaagcaccttttaaacatcattaccgattacaaaaagcaaatgggaagtcggagccgacctcagagggctgacttggcacagcacttcaaatttctcgttttacaaagcacgaggcgcgagtttgtctcgctgtcaggacctgcttccctctcacctagcacccgccccgggcccgagagccgcggtgcggccgtgcgtacaggagggagggaggcggtgtggggtcccgggcagagctgctgagagccccggccccgcatctgactcgcgctctctcggcgggactccgggccagggcccccaggccggcgcgcagggcggggagcggctgcgggcgggaggacgggcggggcggcgggcggctacgcggcctgggcggagccgcccccgccctggccctcgcggttgccctgcccccgccagccccaggctccccgggcccgcgccgcgccgctctttctccgacagccgccgggggtgccctgcaagctgttccgcgcgtcctgcccgtctgtccccgcgggtcgtcgcccgccacagccgcgccatgaccacccagcagatagacctccagggcccggggccgtggggcttccgcctcgtgggcggcaaggacttcgagcagcctctcgccatttcccgggtaagagcagctgggacgtgcgtggaagcggggcgctatgggaggtgatatgcggagactggggccccgcgggcgcggtcggggacggagtcggaaccgcagccgggcgcgtccaggtgcgctgttagttgagcgctctccgcgcgcccgggccccgccgctccccgccgccccttcgcggaggctgcgctcccgggctggtcggcccgccgcgggcgcgctccgtgtccgccagaaaaaaagaaggcagttttcgttctttggccccggaagcgcggcggggcgggtgttagttctttgtcaaccagcgaggggacgagggtccccgcagatcccgcgcgctgggagatggcacttctcccttcttcccagatcgcag

SEQ ID NO: 62233 - DNA, 2405 bp, Homo sapiens
atacaaggtcggctcccagtcacccggcaaagacctaacgtccagagtcattgtagaagaagcatgacgtggctcatttagttccgcctcttcttttactcctgtcagagtgcaaggtgactggtttgagtggttgcagtttagaaggtttttggagaacttgaggaggcttcccaaaaggacaggggtattgaaatgatgcctgcaacggaagttagtcctgcagggcttgctaacggttgaggacatttccaggggaggtgaacaggagagggtggtctggtggagcggaaagagcagctgagccactttacctcttactggctgtgtgatgttgaggaatgcatgaaacccctctgagcatcagcttcctgggttttttaagaaaacaatgataaaccctgtcctgcctgactccagggtttctgagggagtcactgaagatgaggtcagtgagcacacttgataaggcagaagatggtctgaggataaaagacaaggtcagttgggacaatagatgaagccaggagaaaagcctaccactgacttgatgtgtgacctcaggggaggctcccactttttctatgtctctctgtgaaacaagtgggtcatgcacaaaagatttctaagcgcccatctagaaggccctggagttgtggcctattgctttatttttttatttttgagacagggtcttgctttgtcacccaggctggagtgcagcggtgcaatcatgctcactgtggcctgaatctcccgggctcagttgatcccaagtagctgggactgcaggtgtatgctgccacatccagctaatttttgtatttttttgtagagatggggttttgctttgttgcccaggctggtctccaactccccggctcaagcagtcctcctgccttggcctcccaaagtgctgggattacaggcatgagccaccatgcctggccagcctgctgctattattgcatgttacctggaggattttttcaaggatggctcttcagggtatttatttagaaaaacttcctagagcttggaattgagtcctgtctgggggacatggttccaaacactctccaagtgaaggctggcctctacaatggaagccccactcaaaaggcaggtttgcttggccatgtttgcacctgtgtttctatgttagcatgtggtacctgggttggtaagtgaagagtgacagtttcgtcacacacagtcctatttctggaagcaagctctgtcctacaagctatctgaattcatctcatacctcactggagtgtgtcatttgcagatttttccaggggaatggtcttggttggtacttcatatattaccaaggaagttttcaaaaatgttattccctttttcagtttttataagtttctgaaatacagcagacttgatggttctatgggcctgctctgctagagggggcttccagtcaacaaaataaccaaaactggctttgggttcagccaccttccctagatgcttactagctgagcgtgaggggaccaatatgtgtgaagggacctggctaagatggcctttctgagtctctctcctgccaatctggggaccctgtgttgttcatcctcacctcactgcagccatgtttccaatttcccatttcatttcctggatgcttgcttctaactctacatttgcattttcttctgtgcacccaccctgttgttgtggagacttggtggccataggccgccggtatctggtgtcatccaagcgtgatggtgtggtacgtggatttgctcatgcttttattttgaatcctttccaatgtgacatctgctaaaatgtctcccttataatttgcttggtgatcacagctttctcatcattcattgagagcaggaccagatctcacagaatctgaaaagagctatgtggtaagatgcctgttgaataagactgcagcttttctaaagagaatttttactgatccttacttctggaatctagactagagtgatgcctggttaacccacagaaatattatttataagaattctgtggctattgtagtagagcgagatgttaggccactgcattacccccagcccctggaaaaaagcagaggaatttagagacgatatttctactctgcctatatgtgggattaaattaatgtattagtgcatgattggggatacatacttgcatttctaccctaaagtattccatttgtgacagttactcactaatttcaggcttttatgctgctgcctttttttttttaatattcttactaaattccaaattcttctgtatcttacctgtttttccatgcttacgcctggatccctcctgcactccactactggaatatctatttttttaacctggatcttcaactctgttttctccctggacttatgtgcttc

SEQ ID NO: 62234 - DNA, 1061 bp, Homo sapiens
tcacattcccaattcacacacggcaggtcttcgttttctcatttgtaaaatgaggtcaatgttgaccaccttcttgagttgctatgagaattaaatgaaatataatagagatgaaagcagctagcgcagcctgtaacgggaccataaatacctgttgtgtgatgtcgaggtaccagggaaatgaaacaaaagtagtttactttatccaccttaccctgttccacctaagagagaaaaatggtgggtggggaggatgggaagagaagaaaatagagaatgatgggaaaatcattttactttgggttacacaaatcgagaatttagaaaatctggaatttgtgctccccaaattagtttattctaccttcagtataaaggcataagctattcttggaaagcctttggtttcttcacacttgaatatgtatctgccattaccccccaactgtcttatgaaaggaagagaagactgtatgatagtctatgaagagaaggctgagcattggttgagtatttactgagcatttaagtttagtgttgtaatcagattcaaattacaacaaagttaatgtgttgtctagtgagtgacttgcaaggagataaaatctagatggtaagcaattgaactagttgtttgtaattagttttatatttaagctgtgatctttttctcagtaaactcaataagataactcagtggagtcagagactgttttgagggtgctctggtggtttcctggagctcaaacccaggagactgactcattcgggcctttctactcctctggaagagtttgcccatgatgttccagtaggtgcaaatctatcactattttggggcagtcgcttgggatacttccagaagtgagcactccatccatatctggaggctgcagtcgaaagccttcctcctcccagtcttcagtaagcaatgagtagagtgctgcctcccttaagccaagtcagcccctacccagtcctacttcttaacccatgggacaggcacattgcaatcatagagcattaaagccaaaaagacatttatgtaaattatgtccaat

SEQ ID NO: 62235 - DNA, 1039 bp, Homo sapiens
tcagtgttgagtcatcatcccggcccaattccaggatcctgtgtgtataggaagtgcgcacggtgccggatctccgagtaaggttaggggtatacgcttcctgcttcctaaggcaggataggaggggagtagctggcaacactgaagattatgttgattggaaagccaggcttgttgaaacttggtgttcctttcttggtgggcctccagaccccaagtgtaccacttcctgtcccctcccttcctcctgccctcctggcacaagccccttctccatgggtgtgcacaggctgtggcctggggctcgctcccccttgagagctggcatttgtgtgaaaagggctgctgcccacacctccccttcagccccctcactttcccctcctgtggctggagcaggagctgacaactctggaaacggggtccttcagaaggggctcctgtgtcttgggccccctttgggtgacagacatgctaaaaatgggaaggacttgtatgacaactgttctctggcagccccatcaggatgacgtgaccacaggctgtgttgcttatttggaaaaatgcattccagaccagtttgtgtatcaagaaaattgtcagccattattctccttgctgaactaaagagctgaaacaaaagttcacttttattgtaggtattggggaggtaggttgagaatctgaccaataatgggagggaattttacctgagaaccttaaatgaaaagatattctgaaatgttatgatcatttattctttgaagcatttaggatattccaggtacttagctgcaagagatagagaggggtgaacatcatcagggcttccatttagatgtaacttctaggaagctgttggggccaagggaaagtttccctcttatccttgaagtttccctaaaaattactgacaagaagcaaaaatttttttctttctttttttttttttgagacagggtctcactctgtcacccaggctggagtgcagtggcacaatctcattgcaacctctgcccccaggttcaagactccttca

SEQ ID NO: 62236 - DNA, 1047 bp, Homo sapiens
ttttccaggaagtgaggctgagcagacagagcggcatagaggtggcgagcaggcggggaggaaagctgctcggagaggtgggagccaggtaggactgcagcatgccgcgtgtgcacttggcgtctcacttggcagggtgggctgcacgtctcgcccctggtccatctacggaggccaagtgaatgctggtgagaccatttgcttgcctcaggagcaaagagatggccccagagggaatgggaggacatgaattcaggtgccaggactggatacagttggagggaaaggacaggctatatctggccacttgaggtcatttggaagttatctctactttgaatgcctcctggcctgctgcaagggcctctgagaaggcagaccttcctcacatcccatgtatgccttagagatgaccctcagtttgctttgactaacacagctgagaacaccaggctttggtgtggtgtggtttgcttttatgtaagatgcactttgtttccataacccatggtgctctgctagtgctcggctctgtcaggtctttgtcctgtctcgtgtttgtgtgggagcgcggggcctttgtttgctatgaaacaaaggtgttttggttctggagaggagaatgcaggtctcctggggccctgactgacatggggtatcctcgaatagccatgccaggttttggggtgagtgtaccatcttctctctgggtcagctacaaagacccagagagcatttggacaaaggtagccttagggtgttttgagacctgaaaatttttttggagaaatgaacttagcaactaaacaaatcacaattctgattttggctatgctgttgactactgcgaaagtcaaagactttcggcaacttctcagaagcaaccaggtttgaatgccagctccacctcttacagtctagtgacttgggagttgcttcccctgtctgagactcagtttcctcatctgtaaaatggagatgatagcacctacctcaaagagtggttgattacaagggcttatgatcctgggaacatggtcagcactt

SEQ ID NO: 62237 - DNA, 2234 bp, Homo sapiens
caacatggtgaaaccccatctctaccaaaaattcaaaaattagccaggcgtggtggcgggcgcctgtagtcccagctactcgggaggttgaggcaggagaatcgcttaaacctgggaggcagaggttgcagtgagccgagatcatgccactgcactccagcctggacgacagagcgagactccatctcaaaaaaaaaaaaactgcaggaaagcagactgtacactggactttgtctttatgcatacaaatggccttttccagtgcttggttgcagatatatctcaagggaaaaggaatagtcaagtaattgctctgggaataaggtgactagggaaagagaaacagagaaacaagagcctttatcagttggcccctcttgggtgaagctgttggtgtgggtaccaccactgtgtcataaatcccatggtccaaatgcggtcctcagtcatcttggccaaagttgacctgcagaagacaaaggctgaaagagagacttacaccttctcatcagccatatagaccagatccaaagtattatttgcattcactggaaccaggtgattggaacaagtaacttacagcatctcagtctctgtgggctgaaaggatataggtttataggcgtaataagatgttggctttcccaaacattaattatgaacaaacttgtttagaaatataaactattcctaactgatccccactttcccaaagccaagaaaatgtcagaaccttgagttcagggtgacacggtgggggtgacatccctgtgaaagagcctggacaaaccaccatgtatgttgtaaggaggttggcagaggaacaagagtaggacctgggggcccaggttgaccctgagatggtgcctcttgtctggtcctctaattgtttcctcctctgccacctgctcatcactgaccccagtagagggttcttggcagaaagcattaaacgggctgacccagggcttcctggacagtgatagccgcatcctgttgtcttataggacagagtgtgtgactggagtgggacattcttctttgtaaggatgcagggaactcaactacatttttcacttgactagccaagagtgattgtaaaacaaaactagtacactactcatactcctctctggaagactctgctgagctcccagagaaaataaaaccccagggaagggccatggcagtgtggggccacctttccccgtatggttccgggtcagggatctggatgcacaggggctgggttggctgggatggggagcttccaatgtgtccctttgaaaatctgattctgcaaagcagggcggcctcatccgtcactactctgacgggaacctctccccatctccacacctctcactgcttcctccaccccctgcctgcacacatcaggatcacgctcgcacatgctcaaacgcacactcacccatcctggtttctccccagatgtaacctgaggatttcctttttggacaccagagtgtccttgctcatcctctccatttcattcctctttatataccccttgtgattattttccttctttttcctttatgctgacacttgtaccttttgcttctttcttttgttttcctctcttttcttctttttaagttttccagtcacagcaagctcatcacgccagccccctcatctctgccccactcccgccgagccctgtcccccgagatgcacgctgtcacctctgagtggatctcactgactgtgggggtcccaggcaggcgttctctggccctgaccccacccttgcctcctctgccagaggcttctatctataacactgaccacctcgccttgtcaccaagggccagtccctccctgtctctcagcctcccccatttgagttggtcagatcgtcccaccccacgatcagtagcttctccactggccctaccttccccacacaaaacctactccctagcacctacttcccaggcctcccttcacatgaatggagacggtggtgtccacacgccatcttcaggcatccaccaagatagcttcttgcagctgccgctggggagctctgatagtgtcatctcccagcttagtgatgcctttagcagccagagcaagaggcagccatggcgcgaagagagtggacaatatgagaggaaagcagagaggggggcaggcgaaagaggccctggtggacccaagatctctaagaagagctgcttgaagccttcagacgtggtcaggtgcct

SEQ ID NO: 62238 - DNA, 1536 bp, Homo sapiens
gtaaaatggatgggtggacaaatggtgaaattgatggaatgatagaaggatatcaatatatcacaaataatttgagggcaatttaaagcaacgaaggcatgccctgctagggcgtagaagaggatagtgaaggtatccaggagacgttttgtttaacaaacatcagttaaggcagctgagtgcattgctctgtgttgcataaattttctgagcataagacaacattcacaaaaaatgcatttagaaaaccacaacaaattaataaggcctctgagcactttcaagggctagtcaatttgaatgttaacatccatcctgcaaaagagtggaaaaatgccaaatgtgatgtaatttcctgaatagtggggttcttacttccaaatatggaggcccctctctggaatttgtaccctttgaccccacttaaaagtctccttttgctacaaaactgaagtgtcttaatcttacacatattgaaacatctgctaaaatgccgttgaccttctgtcaacagggagcttcctctgcagaagggagatattgtttacatttataagcaaattgatcagaactggtatgaaggagaacaccacggccgggtgggaatcttcccacgcacctacatcgaggtaccgcagcctcttttctttctaaggaaaagcctgacagtgcccaaagcaccatttatttaccaaatgcttatgttttgtttcctccttttcctcttgtttccctgctttcttctcttcccttgttctcttttacctctttccctttctcagcttcttcctcctgctgagaaggcacagcccaaaaagttgacaccagtgcaggttttggaatatggagaagctattgctaagtttaactttaatggtgatacacaagtagaaatgtccttcagaaaggtaagctgcacttctcatgccttgctttggggctctcttggatggcgcagctatgtggggaagcgtggtgttgctatcacaccccagtctgggggtgctgtctgtacccttaagagaagtatgccaatcaataattgcattaagggctgggcacggtggctcatgcctgtaatcccagcactttgggaggccgaggtgggtagatcacttgaggtcaggcgtttgagactagcctggccaacatggtgaaaccccgtctctactaaaaatacaaaaattagctgggcatggtagtgggttcctgtaatcccagctattcaggaggctgaggcaggagaatcatttgaacctgggagacagaggttgcagtgagctgagatcgctccactgcactccagcctgggcaataggtctccaaaaaaaaaaaaaagaattgcattaaggcctgtaatcccagcactttgggaaaccaaggcaggaggctcgcttaaggccaggggttcaagaccagcctgagcaacgtagcaaggccccatctctactgaagaaaaaaaaaaaaagaattgcattaagggcaattggagaattttctgaggtaaggtatttttaaaataaaccctaggctaat

SEQ ID NO: 62239 - DNA, 1161 bp, Homo sapiens
ccacctgctctgatgacgtggaccgctgttcaaatatctccactgacagcagagaaggcagtggcggcagtgttcatggagatttccccaaacatcgcctcaacaagtgcaagggcacctgcccggcctcatacacccgcttcaccaccatccggaagcatgagcagcagcagacctctagacagcctgagtggcgcctggatgccagaggggacaagagcaccctcctcaggaacatctacctaatgagcccccttcctttccggctgaaaaagcccctccaccaccaccccagacaaccttcccctggtgactcctcaggcctcctggtgggccagaagccagacctccccagtcagccccatcaggaccagcccccttctggggggaagcccgtggttcccacacgcctgtcttcccgacacaccatggccaggcttagccgcagctcagagccctctcaggagagacccacggccctggaggactacccaagggccattaataatggaaactccgtgccatactcagaccacagcctggacaggaacaacaacccacaaagtgaactggcaccatcccgtggaggtggcattttgtgtgtttgcctagtctcacctgcccgtccctccactttgcttgcattatcccgtcctcctctgtgcccttggtgctcattttctggtctgtcctttgttttctgtttgttttgcttggcaattaatcatggctcgtagtggctgcacttctttaaaaacaaagcccccatgtcatttagactaaccaccaaactgtgtttcgaaagaaaaattggccgtttagctcaactgagaaatgtgttcatttgaactcttgaaccccttgctgtttgcaccaatccccaacataccccatggttttttgagaggcagcctctctcaatggccctatatgtgtgtgagtgtgtgccttgtccctataaggtcctgcacgcctctttgtagggacactttacaaagaaagttctctcattttgctcaccttttgccttttgagtagttttctttgcattaaactagttcacaaataaatccaaaaaatggggtggggggtggaatttttttttccttcagaattcgaccattgatcattaatcaagaatgacttcaaaattttgatatt

SEQ ID NO: 62240 - DNA, 1017 bp, Homo sapiens
cccctaaactgcacaagacggaaagggcttcatgggacagctggcagagtgaattccctagctctactggatccaaggcactaagctctgtattctaataggaatgtagatatagtcccttaatagttttgggacaaaacacacacacacacacacacacacacacacacacacacacacacataaggttagtaaatgaaaaggccaagtggcaaatgctaccacaggcagtcaggataaaggagcacaggtatcgaataacatcattttaacaatttatcaggcatttactacgtgccaggtcctgtgcttggtattttatctaccttacctcatttaatcctctgaacattccaagatgaggcattatttttaatccccattttatagatgaggaaataggcacatcaaagcagtgtaatgccatagttcctcagcaggttcagggcagagccatatccagattaggaacggtgaagctctaggccaagggactagggttggcagtaaactctcatctgccccatactgattcaaaattttgtaataagttagcagaagatatactaaggtttaatgttttcaagctattaaaaaacaatttagacctggcgtggtggctcacgtctgtaatcccaacactttgggaggccaaggttgggggatcacttgaggccagagttcaagaccagtctgggcaacatggcaaaacttcctctttacaaaaaatactttaaaaattagctgggcttggtggtgcacgtctgtagtcccagctactcagcaggctgaggtggaggattgcttccccgggaagcggaggttgcagtgagccaagatcgcaccactgtactccagtctgagtgacagagcgagactctgtctcaagaaaaacaaaaagcaaacacccccccccacacacacacaatttaagcaactatttatgatattgggttagcaggattggagggtactaatgtaagctgactaaaagagcaaattgttttcagacactgt

SEQ ID NO: 62241 - DNA, 1074 bp, Homo sapiens
tcctgtctttactaaaaatgcaaaaaatagctgggcatggtcctagctacttgggaggctgaggcaggagaatcacttgaacctgggaggcggaaggtgcagtgagctgagatcgcaccactgcaccccagctcgggtgacagagtgagactccatctaaaaaaaaaaaaaaaatagacggggggagggaggtgccgagaaggggctaatttacctgattctcacatagatgggcatctgttttcctctgtcagttcttaggactctggatgatgcatgcataccccactcctttgtggggtgccaccagcctcttcccctgccaaaccatcctgaatcctatagcagattgcctttctcagcactttgctgtgaagctgttatcccagctgaaaatgttcagtgctaccctcacctcctgttctatatgtgataaatagcaaacattttagcttatatagataggccctcgtggagccttcctgtacccaggctcacgttagtacctctgtggtccttacttctgttgctgtatacctgacatatactcttgtatttttataattgctagtgtattataaactcctcaagggcaaggccccagtcttcacagtgcctggggcacccagtgaatttaggaaaggagcttgttctggtaggagcttttcttattttgtcaccatcgcatctgtgtcttgttctttgaaatatgacaatgaggggaagacacacctattacctatgctagtagggttggataaatccacaatgagcagagttgctgagtgtataaggtttttttttgacagatattgtggtctctgggacatatcctacctacattgctggagaatgtgctttacaggaagagtttcatttgaaagtcagcagggatttgggtattttggtggaaaaatggaaaaatttaatctatttagggtagtgatcaaaagctctagctagatccatcatgttaatttttcttctataaatatgtgtgtttcatgattaatatacccaggagcataagaagaaattaagaagacatattaagacagcagctagagaaggact

SEQ ID NO: 62242 - DNA, 1040 bp, Homo sapiens
gagcgagactccgtctcaggaaaaaaaaaaaaaaaagatacaaaaggaatatggagctgaggaggccaggaaggtccacaaaccatgacaggaaaagtggaaactgctgatggacccatgccacacttaagcagaaccaagacagatctccagccccagtgacttgggcacaaaagtcatgagagcagcagagactcaaaccagggaaggggtgaagagaccggggatttggtctggggtaagagagtcaggagccaaggagctgcaggttgcttgagggtgttaggaattggggatccagagacagcagagcatgaggaagccagcagggccaggggttaggctcaagctctccctcagcacttgaaggagccaccagaggcactgcacacatgggtgaggcagacaggtgatgggtggggcaggtggggtggggttaggggctgagtttccaattagggtgaaggaaccagattagccactgtggaattgaaggtcccaggtgagaagagatcacaactagccctggagtgagaatggtgactgtggctgtggtgagagcccttgctgggtgtgccagcatgcagtgaggagggcagatgcaagccaggtcactgaggatgttgcagtgggatagtttaattaactggtgtaaagagcaaagaattgggggatgggattaagacaaagacaaccttaaggttttggccaggcagatggaagaatgaggatgtgagcacgtcacagaggacagctgggaagaagatcagggcagaggcaaggtgagggagttggctttaggtaattgacctttgaggtgttggttgggtgtcatataggtaatatccggtaggcagttggaactctaaaactagagttcttggaagaggcatgggcttaagatggggattggagtcacctgaggagaggcgatggttgaagccctggggatagaagaagatacccaactagggagtagatgaaagactgaagaggggattgtgttgagagaaaggatgtgaaaccaagaactacccatg

SEQ ID NO: 62243 - DNA, 1244 bp, Homo sapiens
cttctccttcaggatttaaaccgtaagtccctaaagacatttggaggaagtcttatctggatgcaggaggacagaccttgtgtttcagtatgattttccctccgatttcaacctagcttggtttcagttaaaagaaggttccctgccatatttccatagtcctctacctgtagcaaaagtgaaagtaatgctaaagattcttttaaagatcttagaaaaagggatggtaaaggtcactaagaaagttagcagccatttttctacaagctgcaaaggggatgttaactgtgttgtaagtaaagtacaagaagagctgctttgtgaagcactagcattaaagacctgcacaccacacatggcaaccccctccctcaggtgttatagcccagaagtagtgaagtttgttgtgcagtgttttcaatctcagtagaaagtgtatgcattttatatttcaggttattgtagaaaatcaccccaactctctttttgcgattatcaatgttttttgaaacatatatacatacttaattagtcatgaacctcaaacacttttccctgatgtaaacatttctccaatttatgaaggggaaaacatgatttgctttgcacacattcattttccaactagttatttccagaaacacgtgttattccatgaaataaggtgccagaactttatacttatttggttaaatattatatcccatgaaatcaaattatcagtctattgatacctcatagtgttatataaagtgagaaatctaacttatttttgtcatataacccagaagtttttttcccctttgttctgttatctgtcttgtctagcttttctttcactttattttttcccaattctttaacatttatttgttaaaacacgaagtatattctgtctgtattcatccgccatggatacttgtttaaaatgttttttcactgtgtcctctgtctttacttatatcatttttcactttcactttactgtgtacgggacatggtttcctacctactcatgtgccattaaagatgcagtattaaccaattggcttttataaagtgtcaatatttgtgtttatttcgaaaaccttaaggcagctttgcaaataagtactaaagttgtactagcccataaaaatcagctctactcaactggcatagatggctaaatgtttggtgtgctcaccaggtcatttgctcataactaatagttctttgtaaagggctttcttttcttccacatt

SEQ ID NO: 62244 - DNA, 1275 bp, Homo sapiens
ttagcaaggggtgtggcaggatttgaaccacagtcaactggctccaggacctgtgttctctctcactgctctagtgtgaatgggaagtacaggcatgtctgtggaatgaaaagcccatagagcgaagcaaggtgaaagatttttccagagccagctttgctgctgccgcctctgttcctgttgctttgtccactccccttcctggtgcctggttttgagcacaggacatctcaagccttgtgagaagcgaacaccaaactttaactggttgttttgagaagcaaaccaacacaactaaattgttcaccctgactccgatgttatgctttggatataacagttctttgattacactacagccatccaaagtcagaccgtgtcggaagctaatgccagttgtcatgaaaatagctctaatagaattttctttctgcagaaatgactgggaacccccagataagaaagtagacacaagaaaatatcgtgcagagcccaagagcatttacgaatatcagcctggcaagtcttccgttctgaccaacgaaaagatggtaatgtgcatattaaagttattttgtctcaccgtgcccatgttctttaatcagaatgcattgtgcagttggattacattctttccccttgagatagacttaactttgttttgaagataatgacaaaaatgaagtacttttacccttttcatttttgcaggtgttcataaaataagtcccgcgagtctgcttttaaaaaaccctcttattgtggctctgttgctttttttgtgcatggttttaactaatattaatttttctactaacataaagattgattttgctgctgtctttttttgaatgtctaagtgttcatttatcaggcttgtcattaagtggactgaagtccagttttttttaagtgactctgaacaggcataaattttgtacaagttactagaatgtcattaaaagctacataactaataggatgttgtgacttggaaaaaaggcccaggctgttagaatatatcctttaggtcttccttttttgacaagtgcaatattgaggacaaatttcatattcgacctggtttatgattccctatacaagtttacatctctaagcaattatgagtggggaaaatggtttgtatgcatatagcagaccaccctggaaaagcggcctcttctgtgaaacaggaagaattcttacacattgattagtttcatacctgccaatcatgcatccttttattaacccttcattgggaaaagctgtttt

SEQ ID NO: 62245 - DNA, 1019 bp, Homo sapiens
tgcctcgctcaaaaagtgagatgagctacattgatggtgagaaggtagtcaagaggtcggccacactacccctcccagcccgctcttcctcactgaagtcaagctcagaaaggtaagtgcccgcttgtctctcattcattcagcctgggccttgttgttcattgagacctaggagcctccattcttaggaatgtggaatttgagtctgtcccttgtcacctattagcagtgacttatttcttagcctcaatgtcctcctctgtaaaatggggataaaaatagcatgattcctagtaaggatagtgcaaggttaaaatgagataatacctgtaaacattcctggtagcacttagctcctagtatgggagccaagttaagagtatgggcttaattaatattgactatcattatcataactttttgcattttcacaagagaaatcttaactgcaagatttgtcacatgttgtcatattctttttgcatactgtgttcacatattcatagcaatgactataacttaaaaagaagccacactttttaatgtccatttactcatgcaacatgtattattgagacataagccttggacttgttctagtgacagcattaataaatctcttaaaatgcctgcagcaaacaaaacagttttctttttcttgagttttttttttttttttttgagacggagttttgctctgtcatccaggctggagtacagtggtgtgatctcggctcactgcaccctctgcctcccaggttcaagcagttctcatgcctcaggctcccgagtagctaggactgcaggtgcacacaccactcacggttaatttttgtatttttttagtagagacagggtttcgccgtgttggctaggctggtcccaaacacctgacttgagttcttatctctaaaaatgccctctgaagcaatctcctcatgctatttggacaggagttccatgcatcttctagccccaacttacaccacttctcaacacacaaaaggctctggccaaac

SEQ ID NO: 62246 - DNA, 1017 bp, Homo sapiens
agcttcagaaatgcagtcccccactttcttccctgctgctttaaggaacagcagtgtggtggccaacatctcagcagcccagagtggtaatcctattaataataatagtcttataatgacataaccaccacctcagtgactatgtggctgtcattaattgagcccttgccacatacaagtttctgtgctgaatatatcactattgttatctcattttcattctcccagcagccccatgaagtaactcttcattttatcaatgaggagtatgaggttcagagagattaagtaatatatgcaagattacacagtaagtagcagaaccaggattcaaacctaggtgtttggggctccattaacacaggcttttactcaacgctgctatactgccctgcagattcctttccccttcctgactctgtgttcttgcttgtccccttcttgtccagaggctctctggtatctgactgcaggcattcagcttcccctgagtcagtcctgcctcagtctgctaagccagtacctcccagatggtgcctggaaatatatagttagggacccagcacggtggctcatgcctgtaatttcagcactttgggaggccgaggtgggcagatcacctgaggtcaagagttcgagaccagcctggccaacatagtgaaaccctgtctttactaaaaatacaaaaaaaaaattagccagtgggcgtgatggcaggcgcctgtaatcccagctacttgggaggctgaggcaagagaatcacttgaatctgggatgcagaggttgcagtgagccgagatcgcaccactgcactccaccatgggcaacagagtgagtctctgtctcaaaaaaaaaaaaaaaaaaaaaaagaatatatagttaggaaaactcctcaagtgattgacagacaggattgagaaccactgggatggggaaataccactcttcccagcccccaaaaagagatgaagaaaattggccagatgcagttttgggaatatggatataggatgagaa

SEQ ID NO: 62247 - DNA, 1036 bp, Homo sapiens
tttatttcactcatttgcatgatgtgctatgttaaaataactaaatcctttctaattcattaatctatttttaagtgtgatgcctgtgtgctttaataacactaaaataggtaatcagtcattcgaaagagtcaattgggatttgtcacttcctctacttcctggtggatagtttcaaaatccactgcttttctctgctacagaggacaatccttacactcccacctaccagtttcctgcatctactcctagtcctaaatctgaaggtaattaaaggaaaattgtgtgcctctccgtactggtgctgctactttcttttttaccttggggtttttcctggtggctaagggctgtttcccagtcatttgcttccctctaaccttgtgttttgtggtggtgtctcactccttgctgactgtatcaccggagtctatccagatggtattttagtcctattcccctagggtttacatgattaacggggtagccagtgttagcttagttacaatgttttgaacatgtggggctctggtcaaagctgcctttacccaactacccaaggctttgtacctgaggtggtcacctgatgctggtggttgagcagtgactcagggaagctgagtcattatagcgggtgggcaggaggtagatctgtaaccgtcaacaggaaaattacccagttctcatgcctgcaactaactcttttcatgggccctcagggtatctctctttggtagggaattcctaaagaggtatccaggtataagattcagtcatagtgggagatgacatttcttgaaaataagggttttagctaagctggaaaacatttaatgaaagagctggataggaatttgtacctgctggggaagacagtcacatttgtgtctaagaaatattatttctggggaaaaagtctaaatgtcaaggaagtttctaaaatgtgagttaggggcaacatcttgagaattatcctaatagcagggattatctgatctttggatgagtaatccagatgagggtgaatagatacggt

SEQ ID NO: 62248 - DNA, 1370 bp, Homo sapiens
gtctgcacctgttcctttcttaaagacgagaacctgtccatagtcaatcaataagcaggttttaactgagcaattactaattgccacagcacatcttgatgcccttcatccttacctcatgggcctcattctcactgacaggattttaggctcccttggcctaaactttttttttttttttttttttgagacagagtcttgctttattgctgaggctggagtgtagtggcatgatcatggcttactgtagcttcgaactcccaggctcaggagatcctcccaacttagcctcccaagagctgaagcaacaggcatgtgcctggctaattttttaattttttgtagcgatggggtctcgctatgttgcccaggctggtcttgaactcctaggttcaagcaatcctcctgcctcagcctcctgatatgttgagaggcatgagccacggcacccagccagcttaaacctttttgtccctaatcctttgacctcttgaattaccatctagtacattccttcctctgtgctgaactccccactcactcccccaacttcctgcttacaccttcaaccctctgtgcaatctggcacccacccccactgccctcctgaagttgctccctcagagtgttcctgtgacttctctcttgcctaatctaatgccgcctcctcctctgcttcaatttctggggtttttttttttttttcttttgagacatttaaccacccacttcttggagttctgtcttccctggttcagtggcaccttgtgtacttttctggttcatctcctgtccctcggattactttgcatcactttggggattcttttgccttgcagctataactgtggtgcccttccatgcatgactttagcgctttactctggccttgcttctgtccaccactgagctctgccatctccctggcgtcagccatcacttttgggctgatgcctccaaagttgcactcctgttagggtgtctcacctgggccccttcatagttcctctagggatctctagggcattcctacttgagtatcttgctgtcttctcaaagttaccatagtccatatggaagcagccatttctccctcccattcctaacccaattctaacttctccatttggcttaggccaggcttccagacttgaaaccttggtaccatctttgaaagaggcaagacaggatgtggttcagagaggactgctagagtcaggtggacattaggccacatcacagcttggctatgagctggttgtgtggccgcaggcagggtactttaacttctctgtgtattgatcctttaactattaaaaaaaaaaggtgataatagtttcttcctcatagatctttgggaggataaaatg

SEQ ID NO: 62249 - DNA, 1054 bp, Homo sapiens
ctgtcatggttgtgattataattacatttccctcaaaaggtaccaagactggggtcatataaggccttgctcacttgaagctggagggttggatggattcccttctatgatggaatcatcttgagataagatgtaaacagctagaaaattgtggcagtcccctgaatcctggtgtagatctggaagcggggcaggctgggagacaccacactggcataatgggagccacgctaatacccctgcagtcagctggctgcatgcacattgtaccatctaagtccagaggacagtgaggactcagggttgagatcctaacgagttatgccagggcttcttggtcttactatgtgctgtataaatcttacttacactgtgtgttcttttatcacagaacagcaaaaacgactcagtagcctttcaggtaggtgagaaatatttatttatgtgttaatccctgttcctgttgaaaccgtcttccggtcaccgcccgatattcaatcagcaatatcttccaagatcctctgatgtcttggggagactctttgttgctggactaccaagatgatgaaaataggcatagttcctgcctccctggagcttgcagggtggtggacagaccagaccagtgagccacactagtaaacatgtcccatggaactgtgataagggccttgatggataagaacaggatgttctgggttaaaaagaaccaggagtccagctttagatgcagtgttcatggcaggcctctctgaagaggtcatctttctgctgcttctgtctcccttctggatgtgaggagtcaggggttgggagatatgggcaagttctctcctttttgggtggcaagcccaaatgccagtagatgcccctggggtggtgggtccaggtgagaaccttccgaccagcagtgcccagaagacagtgtgagaaaactgcttcttgaatttgagcaggcatcagaaattcctggagagcttgtcgaaactcagattcctaggccatccccctagagatttggatttaatggtgggtatgagtaagaatttgcatt

SEQ ID NO: 62250 - DNA, 1179 bp, Homo sapiens
taattattgcaaagtctcctgagggaataactttactccacttctggaattctagttttgtcatcctaaaaaatgcctccctccctgccccccccccccttttttttttttttttttttttgcctagactgtcccagggcatagtgtggcaataatcctgtctctccaagccagcttacccctactagaaacagaggggcactgagcctctggcctggtactgatggttgtgaacaacacagccctttccccttctttcctgagttttcacaccacatgggtatgaagacaaatcgcttaccatctgtctgggagggaggctttgaatcagaaaactctcaggatgaaaagaggtgcgtgggtccccttgcttagggcttctcagtctatgtgcgtcggatcctgagagtcttgttaacttgcaggttcagcctcaagaggtttggggtggaggagacgagattctacattttcagcaagcttgctaggcataccagtgccactggcccaccgaccacattgagaactagagctcagaggttcccagacttacggacacatgaagcagtctagggatcaccctagggtttttcattctaatgctttaaaataacaccactagaaagtggccactgttacctgtgttgcatgtcatcctatgaaagaaaggctatttcacacctcaaaactggagacaacatagtctttttttttttttttttttttttttttgagacaaggtctcactctgttgttgaggctagagtgcagtggtgcagtcatggctcacttcatcctcaacctcccaggctcaggtgattctcccacctcagcctctcgatgccagtagttgggaccacaggcgtgtgccaccacacctggataattttaaaatattttttgtagagacggggttttaccatgttgcctaggctagtcctgatcccctgggctcaagggatctgcctgcctcggcctcccaaagtgctgggattataggcatgagccaccgtgcctggccaacgtggtctttttcatttatttatttatttattttttgaggcagggtctttctatgtcacccaggctggagttcagtggcacgatcttggctcactgcaacctctgcctcccaggttcaagtaattctcatgcctcagcctctggagtagctgggat

SEQ ID NO: 62251 - DNA, 1536 bp, Homo sapiens
tatcttttacaaagtatgttttcttatctgtcactatccaagaattttctttctactggggttcccttttaagggaacttggtaaattgctcataaagaggttttatcctttatattcaatgtaaaatcagccattcaaatttcaggaacctttaggtcatgcattacctcttaggtgtgttttctgaatggaaacatgacttcttgtctatatagtgattgccagagctgtaagtatgcactggcttagaggagggaattggtagtttatagaactgtataaactataaacataccaggattttccagaagcctcatattttcactgacccaccttctgaaaagataaatagaatttcatttatagccaactgggcagaatgcagactgcctgtgtggttcctacaatgtttacaacaaaaagtagttccctgcatgtaaagtcactgtgcctatcccctttcttcttcaggactaaaagaagccccagggcaggagacctttggatctgagtgcactgttgatgctctggggaagcgtcctctctacagggtcaaagccctgggaaggctcatgcctgatgtaatgcaccatatatggcgagagccaaaataagttagaaactcactgaagctgatttctatctttggacaagaagaaatcacatatgggacatttgagctgaaagtaaaagtaaatctgagctcaaatcaaaatgatcttttgcttacctccctactgccattatcagcatacccgccagtccctttggtgcgtgctagcccacgtgttttgtttctagaatcgtttagtctgtaaacatgttcactgaaaccaagtgagttcacctgaaagcttttgctgttgctgaatactagagaggggctattcattttgttttttttttggctggtgcatattcactggcactgccatgggtgccctgtggaaaggataggcattgaattagtcaaggatatccaaatgagctgcttgtccaatgagcttatatgtgtgccttgaaaactgagtttaaggaataggttatttactatttctgggttgatgttctaatctggactcaaaaaactttttttttttttttgacagtcttgctctgtcacctaggctggagtgcagaggtgccatcacagcttactgcagccttgacctcctgggctcaagcaatcttcccttctcagcctccttagtagctggggctacaggtgtgtgccaccacacctggctatttcttttttaaattttttgtagagacagagtctcgctgtattgcccaggctggtctcagactcaagtggtccttctgccttggtcttccaaagtgctgggattacaggcttaaaccacagtgcccaacctataaaacttttaaatatttttcacctattcaccctttctaacattctttcttcttgccacctgtatgccacaaatataagaatgaaataggccaggtgcagtggctcatgcctgtaatcccagcactttgggaggctgaggtgggtggatcgcctg

SEQ ID NO: 62252 - DNA, 1050 bp, Homo sapiens
tggatctatccctaaggatcttacgttcttaaagctatttatcacatggcagagatcaacaatgctcatttttttccatggttttttcccccttatgctttgaattctgattttgcaaagcacatgctttatgccaaatactttcatttagtcctcttgattcaaaagaggtagatattatctccatttcacagacgtggccaggtcatttgccacaggatatgcagttagcaagatagagactcagggctgaaactaggcaatctgatgtcacagtgatggtcccttcatgatacctggagatttagaagaacagttcacatttcagctttccgtgacatagctgtttgctagtgtcacttgaatagaaccaacccaactgagaaccagaaagtgggcaaaataatgtgtccccaattgcatgtacgaagtttacatccttcactagatagcccttcactcagaacctgttgacgttagtatatgcataaatctaataaatttgatagacttatttgacaaaggtggactagaaatagcaacttagtaaagaagatggaacggtaaaagtgatagctgtgagggaagaagtggaccattgtcatggcatgtcaccaggtgtttaagggcctgccaggtgtgaggggagctctgagccagggagccgtctggatgcgacagggagtgtggtgcactcagaggtattttcatgtacctgatctttgattctcaaagattctccaattcttcaattggagagaatcaaagaatcatactccctgtgaggagtatggggtaaggcttatattttataggtgagaaaagtaaaatttagcatggctagtgaacttgctcctggtcatacaagccggtacattgcagtaatgtgagcaaaacacatgtcctgtatgtacctttcccaactacagttgtccctcagtatctgccagtgattggttccaggaccttcacggataccaaaatctgaggatgctcaagtcccttatataaaatggcattgtatttgtacataacctatgcagatctcct

SEQ ID NO: 62253 - DNA, 1055 bp, Homo sapiens
tgaggaagaagtgtatgaagtgctgtgtatcatgcctggtggcatggaatagactgttagatgttagctgctatttgattatgattagattattttggcctctccagggacgactttgcacagcccaagtattctggtagttggcaaatgctgactttgagatcaggcacagttagtttagggtgagacagcacctctccactctgtagggcagtgactttcacactttagctgcatcagaatcacttggagtaaaaaggtaggttgctgggccccagcctggagttttagaatgtagggttcccacttgcaggtctgaggtagggtctgaaggttcacatttctgacaggttcatgctgatgctgctagtgcaaggactgcatctgagagctgctgctgtaggggatgggagcttgctttcttgaaggaaagggagggagaaatggaatggaggggaggaccattcccttgggaccagagaggctaggcagtagggtatgcagacccctctggtgcagcgggagtggtgtgttgtgataagacagatatgatatgtaggatggaaatggccagacctagcatcctggaaactgattttcttccttcccagctacccataacaggtgccagggcacatgctggtggatgaggccaggctagggtttgagcacaaacccctttctggtgatgttggtccccgtgagggcttctttgtccttaggctgagggcaggcccgagcagcccacagccctaaaagtcaacagagtagcttcttggtcctgcatccctgagcccagccctgactcctgacccgctggaaaggtgggggtgaggagagaaggcaaagttattttattctaaggctaacctcatccagcctctccaagcctaactgggacgacccacttccaagctagagagcatttggagaagagagaatcctaagggatgatgcaaagagaaaggctttaatgtgcagtcccctggcccagtcaaataaccttacaaaccaactgtcccgtcctctggcagcaaatggaggtggtggagagg

SEQ ID NO: 62254 - DNA, 1199 bp, Homo sapiens
ttgttgctgtgagttttctttgttatgtttggaaagtgagactgtcactcgtgagctttctcgccaggcagcatatccttctgtctcagcattttgggagtcttgacttgctgatccaaggagatttgcttttccttttcccactggaaaactgcaaaggggtagttgttctccatgggaccacccgcccccaccccccccaccgcccccacttccgtagttgccagcctggtcttcaatgagaagtatggtctggaagcttgaaacatctttcataaactctttcttgaactgtgccttactaactggtcagaagtctgctcatcaacctaaacttcatttaataaaaggaataaacctgctttcattttgaaatgttttcagctgatagtataactcatccatttactcagaactcaccattgccgccatgttcccctaacttcatgatgcacagtaaacctctgaaaacttgcccctctccaccacccacagattaatttcattgaccacaggtgttcaaagacttcgcatggctgtaaccaggttcatctcattccccggctgtaacaatttgctaaccaactgtcctttaatccttcaggagtcttggattcagtcttcaattttggaccttttcttttcagacatggatcttacaaaaatctgcactgggaagggagcggtgactctccgggcctcgtcttcctacagggaaaccccaagcagtagccctgcgagccctcaggaaacccggcaacacgaaagcaaaccaggtgcgcggaagctagggaaagctgttcaaagccacgtgggaagggcgggaggaggctctggtgtttttgctcaggagggtgtgagttcatcagatacctcttggggggggggggtgtgtgtgtgtgtgtgtgtgtctcttacggtcccctgggacagtcaaatcatttggatgggtagtggtcaaagcctcaaactgacagtcacatgctgcagatgaaggcacagcaataaccacactttatgttagctttgactgagcaggtcatcctgtgaccacagccagtgctctgcagactgctctcatgcagactgaaatagcttagggcatggggggtaagtaagcggtgcgatgggctagaggttgggcttctcagagctcatccctgcttcctagaggttcactgtgacctgtccaggctggg

SEQ ID NO: 62255 - DNA, 1032 bp, Homo sapiens
gagctccagtctcagcctctccgcttgagaactgaatgagcctgagcagttcactgagcctcttgcttcttcctctgaaaatggttacaaaagtctcccccaagcccatctcccaggtggagcagacaggaggatgctgtgagagcacatttgtgtcttaatccatgcagcagcgtcattggcaacctagtcattgatggccaggcgccgtgtgactgccccatgccttatgaggtgagctgacagcgggatggactggaaggtgcactgtctctggccgacatgcctcccttctgttgccttgacaggctcaccagcacgatgctgactttgcagtggcggtcttgttcccagacagccctacccgctgtgtttctgtagatctgtggccacagtcgactctggcaccttcacacagagctcccatccctctttatgtgctgcccttgaaagagaggacgaggggaggcctcacaacaggctcggtgtgaggagagttagggaacgtgcctaccatgagattacagaatctgggcaggcagggagcccagagaccctgcagatagataagtttgagcacccaggatgttcgagcggtagccttcaccacgtcccaggcaggcattcctgctctgccttagctcagctgggcattggggtcctgggctgtgcacttgggtgctgcccagagactacatatgcacttggacacttggcacctcctgaccaggaaagggtgggtttgagcaaggccatctgccgtttaacagatgggggctttgatttgcttggggccagagggctacaattatcggagcaggcacaagaccccggaagttatgctatgggggaagtagctctgatggctgaagggaccagacaactcacgatcttgttccttcgttcttccactcatctggagcccatgggccacagccctcctcctcggaacccactccccagccttctcccaagaggccctgtggaccctgagtgctctccccttcttctgtttgccaggccatctgtgtg

SEQ ID NO: 62256 - DNA, 1869 bp, Homo sapiens
aagatctggatatatattagggcattgtcagtataatttcagctttctttgagaccctactaaattaaggggttatccatttgaacatcagggattggttcccacctccaggtggtagagcacagtgcataggaacttgggccagaaagtcaggctgtctgggttccagtatcagctcctccactgcagcaagcacacagcttcacctgtctgtgtctcggtttcctcatctgtgtaactaacctgacattagtggttacctcctagggttgtgagggtcaaatgcgttaatatattcaaagcatttagaacatttccttgtgcatagtaagctatatataagcattcagtatgatcagtaagttctcaaatcagtttgtgttgtgattttacctctttctcctaaaatgtgttttttcccctttcctttaccctctctttaaaccacgtgcactcgtgtagcttgaggtttttaatagaatgtttgaaagggatgtcggataacatcagcaccaaatatgggcaacaaaactgaaaccagtgaggttgagtgatgtgcccaaggtcacaataatatgtgggtgaccacaaaccagaagcctggccaggtgactcctggttcagctctgttttatcaagggttacagtgtttgcatttttaatactaaccattgggatttatcgcgaacctgccattcatcaattgcattgtgtggtgtttgtttttctacagagcagttcagagccccagttgcagacgacttgtcctgccaccaccatgagttctggtaagtcattttaaactcatctttctcttatctaccaaactgggcagtttacccagatttcccacgcaccctgaaggccccactctggcattttattttttattttttgccacctgggtgaatgccaaagctttgtcataagttgtcatcatcactctcatcaccttcatggttaatgattttttgagtgcctactactattgccaaagaactgtgctatacactttacatgcacattagccctctctttattgagatgtaactggcatactataaaccacagatatttttagtatacaatttgataaaatttgacatatgtgttacaccttcatggcatttcttaatctgggtgactgcagcaaaagtaaactgattggccataattgcccaaggatgtgaactaatctaatgcttccttcatctaggctagtagagtagtttgctccctcttttgctttgcctttggtagtaaaagtcaagacctaaagaaataatcagttttgagtatttttagttttgagctgaggtagaaaacgtgggttagggaagacagagatgggaacagatccctgctcatcatgcagctaagagctgtcagctttccaacccagaattggagcagagaagtttccatctggagattcagccccacctaggctactgagcatgccctggaccctcctgagacctgcaggtggggcaggctgtggggtgggaagatgatcatgtggatatctcattccggagtctcccaatcctgccgtatttcgtgagtgttgtcagtgacctctgtggattaaaaatcacccttttccatttatttgcatacaatgccgttttaggcaagttctgagtaggacagtatgtagttcagacctaggaaggctctgggctggaatagctgaggcccacaccctgacctcagtgtttactggctgcatagccttgggcctgtggtggacccttctcctctgcaaaatggacataataaaaacaccagttcattgggatttagtgaggattaagtgaggcaatgcttttatttatttatttttgagacagagtctcgatctgtcac

SEQ ID NO: 62257 - DNA, 1154 bp, Homo sapiens
aaccagcattttgttcaagtggggagctggctcccttttaaggagccatggtggagttaaggaggctcttgattatcttgaaggtaagactctgaagttaggttccgaaggttaaacagaggcgagagcaaaggccgtgactgagcacctactgcatgtccagtgctgaggatgatgcagttttcctttccagatatttacaatctattgttggggatgggggagctatggaggcaaaacaccatagtgcataggagaagctggagcatgctggctaggagatttaaaggctgtttgttttccaagaacctttgcaggaccttgaattcatttttacagacatgctcaatttcttcctagtcatatatccctaaactacccatataaggaccttctttcctttcccagtaaccaacccatatttagttgattgtttttcagctggaagcatgagtataactttggctttttagtaattaatcactttgtgtcatcaaaacttatcttagaattatagggtcatggaattggcggggtaggggggacaatatggaatgattaattatctggatgctttcttaacaactctggccacttcacatcttgttcttctcgtggaatgtctgtgttgatgccatggtactttgaccaagtacggcaggtccaagcagctcaaagcgtggaatggcggtttgactccccgctggcacacccaagctgtgacactgcataggttcctgcaactcactaggggaatttactgcccacttgcagttgtgtcattttgccactagatggtacactgttggtccttttggcttttacccaaaggtgcctggctcatttggaggggacttgtaagaggcattccaaagacgtgccatcatgtactcaaccaaatcaggctctttacagcttagtttttaaataaatattaagtgttagaggtttttatgtaaaataaactctcaagttctcatctgattgtaatggcccatattatctctaaataaacagcagggactagactatgattttcaaagctttcagtgttccggtcaagctcaatttgtgtagtttcatggatgcgtcctcactgcccaggctctgagcacttaaggttgtagagacacaaccactgccgagccacttgg

SEQ ID NO: 62258 - DNA, 2149 bp, Homo sapiens
tctaattttaagctgtgactggctttctgggctcccaggcataaccatacagggctgtgttagtgactcagatcaggattcagctgtgctgaccacccagaacttattcccactcctactccccaagagaccagctcttcaggactcccacccagggcagggctgggtgggtccaccaatgcctctgccagggttgagttctccaggaccatctgggcctctccctgagctgaggtacaagaccgaggctgcccagcccctaggtcagagacgaaaggaaggaacaggctaggggtgggctggcagagagttcaggctccctgagctgggagtatttggggaagggaaaagaggaggaggtcggaaagtttgtgatgactctgaagactctcaggtttgtcccggggggactcaggccgccaaactgttcacttttctgcagctcggtgttgggagtgtgctctcttttggagtcacccatcctattttgggatgactgagtcaaaggagtagctctatcttggtgcctggaagtgcctcacatttcctcattttagacttgccattcttttcttaaggtgcttttcttaaggtgcttaagaaaagcaccttaattccattattaaagattcaggatcattaagactcaggctggattgaaatttatctctttactgtctatggaaaaagatttaaggagaaaaatcactgtgagggatgtcgatttaggaaagctttctaaagaacccactttaggaatgtgcatttgcatacaaacaatgaaagtgctaattaaaatgattctcacatcatcattttagcagtgcagggactgctgcttggcaacacttatgaagtggaaatgagtgtactttgaaaataataaaatattgttccatccattgaatccactaagacattaggtccttttatttgcaaggcactgtgctagaaccactgtgtgtgtttgtattggtcaagagtataaaacctagtccttgctctctagggtgaccaactgaggggtttccctgggataaaagactatcaggaaagcccgggaagaaccaggttgaattgggccaaacctacctcgggagttgaaaggctggtaggactgaacaatgttcctcaaatatttcacctgttgagataggccacacctgttcacattgttttagaaacagcattttgccctgtaggacgtttttgccctggaaattgagtagtctaattcccttttaaagcaagagcccaacatttaaaatatttctgtcatcattgtcgttattggcatcagctatcactgggcacctgctgtttgaggctgggactttgccctggagagtgggggtggggctgatctggcctggagatgatgtgaaaaccttttagctcctgggcgaataactgccaccttatctttttttaaaaaaagaatagtgttttagaacacggagcctggagcgcagtagatgcagagtcaatatttgtggattgaagtttattaactttgtggttgagagttcagggtctgcagtcacatagacttaagtttcaaatcctggctctgccatttgcctgctcgatgatcttggcttgtgacttacctctctgagcctcattttcttcatttgtgaaattgagataaacataaatttagttattatataatattaatgttcatatgataattatgacaggctgcatattgtggtatatagtaccacaaactcgagtcaggctgctaaagttcaaatcccccttcctagtatcataacttccagcaagttattgaacctctctgggccttaattttcttatctacaaaacaaggataataatagtacctttacagagggttgttagatgtgagaattgtcaagcacctcatcccagccataagaaaacattatatacatgtttgctaaaccttaaagactgtgaaactattattaattatttcattttggttcttatagaaatcctgtgaggttagatacagggcaagtattactccccactgcctcattccctatttgttgttattgcttgtttcgtatttgagggggaaaaatggagttctgaaaggttaaagtggttggctgaagggaacctggctagtaaatgttataactgaaactagaac

SEQ ID NO: 62259 - DNA, 1043 bp, Homo sapiens
tatcctaagtggcagccttccttgcaccctaacctcaagctctcctctcctccagatgtgcataattttcctgtgtggtgccagggaactgtggttataaatgagagagaaggggctctgtgggggtcccagaactgtgttgggatcctgtctgtgaagttacgctcatctgagctactggtctaattctatttttaaaaagggaaattaattgataccttttgacagtgagcctgtgtcagtttttggagtgacaccaaaatagagtcatcactttcttttcataggtattcatctatttaatattccaggctagaattcttcaggatgttgatcccaagcttcttagtgtatacttctagacccttcttagtgttaattatttagttcctcaatttcatcacctttccttttctcagaggtttctgaaggattactgatagtgattcatcagtgacagttcagattcttttagctgtctatggatgtggttcacctgagcctgaaaacccaaaaaggagtagctctcacttaaaggggctgcgactctcctagctccacacctgtcttctgcctcagtcacctcttaccagagtctccctttccagtaagatcattctcatagttggtggaggtggaaacaacacgaggaagagtggcttctcttataatatgacgagggcttcttcaagcaggtctgttatcatacgctttgttttcttcttggtctgatcatagatttttaaaaaagaacctccaaaacaaaaaacctaatggttatttcaatttcttatgttttaactcttcccagaccttagaacaagcttgtccaacccaaggcctgcaggctgtatgtggcccaggacagctttgaatgtggcccagcacaaatctgtaaactttcttaaaacaatatgggatgtgtgtgtgtgtgtgtgtgtgtgtgtgtgtgtgttgttttgttttagctcatcagctatcactagcattagtgtattttatgtgtggcccaaaacaattcttcttcttccaatatggcccag

SEQ ID NO: 62260 - DNA, 1031 bp, Homo sapiens
aactaaaatttaaatgatagggaaaaaaatgttgggacagtagggtgaaacaaatatttttttctttaaataaatttgtgtgttttatggctgggcctggtggctgatgcctgtaatcccagcactttgggaggccgaggtgggcggatcacctgagatgaggagttcaagaccagcctggccaacatagtgaaatcccgtctctactaaaaatacaaaaaaattagccaggcatggtggcgggcacccataatcccagctattcaggaggctgaggcaggagaattgcttgaacctgggaggcaaagtttgcagtgagccgagatggcgccattgcattgcactccagcctgggcagcaagagcaaaactacatctaaaaaaaaaaaagaaagaatggaatttgtgtgtttttaactaagaggaaggaaagaaagcaacaatgtaatttttaaaaagtattctttacaaatatcaagtcattatattagttttgaaacatataatgtcctttgtataatgtgatttactcacaaaaataccatgttgggaacatttatacaaatttactaattacatttgctcttaaatattttcattttatttttcaaatagaagtgaactactgaactcaaaggagttgaatgtttcttaggtttttttccttttaatagacaaaaatataaaactggacaacagaagtcaccagtgttttaatgaaacaaagaattagtttttgggtctggtaccttctaaagcatctgtagattttagaaaaggaatttcacaccaccaccaccaccaagaaagcccaaccaacctaaaacttgaataactgaacttaatccgagtcattcctattttatgagccatcatgatccacagtttctgtttcttctcatgtcgtcgtttcctttctgaaatcattcttgtagactgctgaagactaaatgctagcccagatggagactgaatttcaacctttttcatttttggcttcttggttttggggtgagagttcatcagactgtt

SEQ ID NO: 62261 - DNA, 1102 bp, Homo sapiens
aaacattaaattgtgttggggtcgtcactaaaacaaggagatcagcatcatctccggtgattactgctcgtcatgggaagaaatcattctgattgttccactgactaatttagacaaggcaccatttgatgcctacttcacagcagtgccctcatcctgctgtctccttatcaacatagagatgactcactccatgtttttctcactcagagagaatttctctagtctactgattatggcagtgattaaataaaaaatgattcctgcagaggtgtgcttgaaaaaaatgattgtattatttgtgcttgttgaactttggataattcagcattcactattataatcagtaagatattggtttttaggctttttgggtaaagggtcaggaacccctttaaggtacatatgcacgtacacaatttccatgtataacacttctacatttttaggagatgacattcccctgcccagttaccatgcttagtcacacatcccatgctaaatgtgcttctggatagctctgtgtggcaggtaggtgcctgctgtaaaagatggcttttctgattagatctaggtgaaagactggggaagatagctatgttcaaggcagcctaacttcaataaaatttacaacttccagaattgtcccaacatggactcaaaagttggaaatagtctcttatatgagttgctaatccttttaatttaaaaaggaagcagaagcacctttacactttttgtttcctttctatttgagacagggtctcgcactgttgtcccggctggagtgcagtggtgcgattatggctcattgcagcctcgacctcccaggctcaaacagtcttcccaatcagccccgttagtaactgggactgcaggtgtgcgccaccatgcccagctaatttttgtatttttttgtacagacaggatttcaccatgttggctaggctggtcttgaactcctaggctcaagctgtgcacccacctctgcctcccaaagtgctgggattacaggtgtgagccaccacgcccagcccctttttgttttctaacagctaatttcattttccagcagatttcatgtttctggacattgtattta

SEQ ID NO: 62262 - DNA, 1076 bp, Homo sapiens
tcttagaagagcacctcacacctgatgggtgttcactaagtattgtgagcaatacttatgaaggaagcaaacaaataactaaatagacaatataatttcaggtggtaatgagtggtatgaaaacagtaaaacaaggtgaagggctggcggggctctttttgaaagaatggtctaaaaaggcttctatgtatgtgagagagaaaaagaaggagattggttttgtgcagagacctgagtggagtaaaggaaccaggggaggagaagtgttcaggcagagggaatagcaagtgaaaagaaaggcctttgacgtaggataagcttggcttagtagaggagcagtttggctggacttgggctggggggtgttcatagggagggagagtgatgtgaaataagagcagtaggtgagagccagaccctgtaggccatggtaaggagtttgatttttactctgagagtgattggattccatagtccatgtgatcttctttgtgctttaacatttttcctctggatcctgagtgcagaatagatgctaggggcaagagtagaatctgtataacctatcggaggtccttccagtggtccaggcaggagattagggtgtggcttggattagagtagtgatgattgaatgatacgaagaagcggtcaggctcaggatacattttgaaggtagagccttctaggttgcatgtggcatgtgagtaaaaacaagagtcaggattagtccaatgtttttggctaggtgaatgacgttgccgttcactgagataaggagcaaagagggaccctaagggttctgttgggccgtcttaggtttgagatgctcattcaatattctcataaagatgtagagttggctggggctggaaatggtatctctcatagtcattggcatgtagatgatatttaaagccatgagactgaatgagatcatctagggagagaaaggaagagatgcgtaggatttttgacagaggaaagagggaagacgaaggcaaagggtatattttccatataaagtccccactaagaagtaaataaagacatgctaatgaatatggtttccattt

SEQ ID NO: 62263 - DNA, 1012 bp, Homo sapiens
taaagatgcagattccctggctatcccctcaaaggttttaatttctcaggtctggagagatcgcagaaattctgatgcaggggtctgagaaacatacttagggagataatccaagagaattggacctgcttttcagtctgctgacaagtggataccactttactccagctacccagtgcccacgagcccctgcttggacatctgtcctctttagagtctgtgcctgaaagcctatgccccatatttgagagatgaagctgtagtgtgggaggggagtggggcttgcttaatggttgccttcttggttagccagcttcagagtttccattatggcctgtaaagaggtctttttacctgcagtgtcttccatcgatattctgcctcatatacactctacttctgcctcaaggcccagtatgaatctgaagtcgaagtgacttttgtagcccatacttggttcctgctcacaacttctctatgaatgatgatgggtcttctggtttttcttttgccttgtatggctgtctgattagcttccattgggctgattttatctctgaaattatattgtaagcatcatgaaggttgtggggtctgcatggtgttgggcatacagttatcgatgattatggataacttggttcaccgtgatgtttctggggtggagtgaccactgtttgatacctggtttgacagatatcaaaaccatggcaataagggtctagaattggcttgatctccacagtatctcttagatgcaaagatgttttaggtatagggctttgagtatcagtgccatcaaatagtacttccagggggaaccccagacaagtctgggtcctaagtgaaaccagaggttttagccagaaataaaccagcatcaggaagggagctggtcaaacactgttccactgcatcagtgggtggcagaggttgctggcaggacagagttagctggcatcagtcatggcagaagatgactcataaggctagttgaatgtgtgtgtatgag

SEQ ID NO: 62264 - DNA, 1043 bp, Homo sapiens
agagaaaaatcgattggttttggcatgcctttgtcattgtggacgcacattgccttttcccaacattcacatttttttcgaaatgttcccaaaccatttgttctataattttgccgggaaccattattggtctgtagtcgtccaggcttatttatttgtagatatcaggatcacccactttcctgctttaaaattgagacattggcccatgtctcctactcttagaccccgaactttgtgtgattttgaagttgatcaatagcagttctaagaaacttttataatcagttaaatatgcacgaaagaaattatatgttgtcaaaagaaaagttggagccacatcaaaaagtggaaatcagccatggtcttgctgctccagtgttatccctgctaacattttggtgttgcttttgccaaatacatgagaaataatcaaagctcacaatcatatcgctctggaaggggtatggcttatagggggagcctgatgtgtaagctacttaaccttttagaggggcacaattcatgtgtgtttaagggatggtgaaggcatagaggagaagggtttgtttcacctgaacaagtggatgtctgggaaaggcacaatagaacaggtgacccttgataatcaagtagaagtagttgaaataaaacagaattgcatatgggctacggttacaaccatgtgctaaatgtattttttaaaaactgcagggaactgtcctaaaataatactgtggttggaatgttgatgaatgtggttttattttctctgggtttccaaatgggagtctattgcctcttataattatttttcttaatgcaacacatgcatgtccctgtcctcaggaactcagggctgcagagcttggctgcagtctgctgcagggtcagggagcttagagccgtgttccatgcaccgttgtctttttcattagtggtagctgaggatgaagtagagaatctaataattctctgatagcctagccctgggagtagtctagtcttgggcgtggaacctgaaagttttagacaaatcttgg

SEQ ID NO: 62265 - DNA, 1060 bp, Homo sapiens
atcctccacttgtggcctgaccacagcagggtacagtgtgagtattaccattttttctgtgaaccagatgctgtcctacttttaatgcctttgaagattgtattactctgggcactgtgggctctgatgaaccttgtggtcaggatggcacccttctctgtttcccatgaatggttgccagggcaggtctcgtggacttcaggaagtttagacctgcccccagcccgtacttttgcacaatcggctttgtttttcgcccagaatgctgggctgttaaggtcatttgaatcttgattctggcatctatagcattagctcttcttcccagttttgtgccatctgaaggtttgataagcctgcccttcatgtctgtctctagtcaagtcattgttaaaaagacagtggacagtgtgtgcctaagaattgaaccctgcgtcattccaccagtaacccttctctagcttgtcatcaagtcattagtgatgccaatgtatacatttactcaccagatgtttattatgtgcccattatgtgccaggcactatgccagtgccgaaggtataaaggagtaagacaactgtcctgcctggaaagagatcatcagcttgaaaagagatcatgattggcacactttttctctaaaggcctagatggtaaatattgtcagctttgcgggccatacattctctgttgtaactattcaactctgccattgtggcaccaaagtagccatagacaagatggagacaagtggcgtggctgttcctataaaactgcaaaaacaggtgacgggctgggttaggcctgtgggtgtgtttgctgacacctggtctagtagaaagacaagtaactcaatcaagtttaataagtgctctgagagcatatgcacagagcacaatggcggcccaaaggagggagtgatgtacggtcagtggggtagtaaccacctggctacatagacagtggtgcaagcagcttcactctgtttcactgtcttatctacaagtggatcataggaggtttttctagatgctttgctgaaatctaggtgcatgatatc

SEQ ID NO: 62266 - DNA, 1056 bp, Homo sapiens
caaatgatctgcccaccttggcatcccagagtgctgggattacaggcatgagcccctgtgtccggctaattgttaaaattctttcatatgagctgaaatcatcctgtaatacagttttctcatttagaacccatgtcacactagtttttacaccccatgattcatttcgtcattcaaacgtatgtattgagcaccgactgttttaggttcaggaggaatacgagtaaacaagatagataaggtttttgccctcttggaatttagagcctggtgttagtacagtggaaagaagattgaactatatgtcagaaaacctaagtataagccaaagaattttacagaaagaaagaaaagaagaagtgaagattatataacacttataaacttggctaagacacttgagtatcagttttcacttcatttaacagaggacattatcccattggaccttccagaacagtgaaggctcgctggaataatgtaccttgaaaaatgttaattgctatgtattaccaagaggagtagtagtagctcttgcttctgtagagtagttcttaaagcatggttcttggaccaccagcatcagtatcacctggaaacttgtgcaaattctccagccccaccccagacctgctgattcagaaactcacagggtgggggccccaaaatcttttttacaagtaatccaggtgaattcgatgcctttcctagttggagaactactgctgtgggttagagcaataattctcagccttgcctgcacattggatgcgcctgagagaggggggcgctttcaaaactatatctgttccccccaactcccctcaaaagttagatcaggatctgtggtggggcctgtgcagaggctgcccaggtgatctgcaggtgcgccaggtctgagaatgctgctgtggccacagggcccagcccggagggacaggggattaagataaggtgcggcagccttggagttacctgggttggtttgagtctgagctctgccccttcctggctctgtggcctttggcaagaggactctggcctgagtttccttat

SEQ ID NO: 62267 - DNA, 1120 bp, Homo sapiens
actattactagtgcccccttttcctcttaagtgtccctgcttggatgataaattacatggtcttgcaatcctcaaggccatatggcacccctgaaggtttcacagtgggccatggtcaagctggtcttaggaaggtcagtgtccacagtgcctgctggagtctaggggcaggagatgagatgtctcctggtctaggcacttcaggccttagctggaggagctgtagtgacttctgaaaggaggagatggttacaaaagagattaaaaatccaagtgacacccacacatggtctctaaaaaggctccaaagtggctcttccagcatagacccattctaaagttcagggatcccggacaggcatttttctaacttgaggttatgactgattaaaaaaaacccccaaaaaaccaaaaaaaacattgtgcctacttcctgagcaattagaagttaagagaagcttctgcccagcctctaaaatggcctggtggaactcactggtattcactttcctaaaccccggcattgttccttggaattcaaaataggttatgaatgtgcttgatgtcaggaaagataaatctgtgaggaggactgtagtcaatacatttcctttttaagtagaaacaatataaagagcttaattcagccctgaatcaatctcactttgttgccatgattgtgtaaaacctgaactgctttacgtctgtcttacaatgtttatattcccctgatgttccccgtctcagccggccgtgcagagtcccagcctttttaggccatgcacggctctctcttcttgaggctgttttcttgtgtgctgccaaagggctgtgcgacgagcagtgattttatttcatatctaggggttctcttcagggtggctattcagtggtgcccgcaaatgagcttccttgtctaagcaagttggaaggctaaattcttttgccttttcctttccattaaaagattattaaatgtaaaaatagtttgatacatacacatggtttggaaattaaggcactataaaaatgtatacattgaaaaatttcattcttacccctgctgggtcccctatactccctccctcaccccacctccattagctggaatgaactagtt

SEQ ID NO: 62268 - DNA, 1046 bp, Homo sapiens
ctctcttattagcccatgttacagataaggcagtaggattagaggggtgaaccactttgcccaaggtctcagtggtagggtgggatttcattttattcagatttctgactccaatggcaacaaatagccatgccactatattctgctggctctctgggaatataggaacaacagataatgatttgtctacatgactttattcccaagttaaacacttacctaaaacgcggctgcggctgccacccctgctgcagctttgcagtactgtgcaagaccttagaggccagtgatgggaggccgttagagctcctctgagtctgaaaccctcatttatagatgaggaaactgaggcccacaaaggagaagagaatgtgccaaggttaggggcagaatgggaatgagaactagaggagtctggagactttggcgcttgtggctgtttaaaggccccctaggctccctgtgtaaaagtatgtttttagacaacaatgggaacctttgtctggagggttggtctgaccagggttgaatatgaaagggtctgtgtgtatgtgtgtttctttcctttgctttaacctcagatacctttgaactagcaggaaggattctttcagaccaaaggttaagactaaaggcatttaacaggtggaaagagcataggaaggagggggaagatcagaagccacagaaatagaagactaaactccaggcttggataaaaggaattttccaagcctgtaaataatcactaacgtttattgaacacccactgtgccaggcagtctttacatgtcattttatgtaactgccatcgcttccccatgaggtaggtgctgtttaattgttcccattttgcagatgaaggaactgaggctccaagagtctaagtgacctatttaaagtcatggaattagtacaatgtagagccaggactccaactcaccagatcctaaactctccctttaactcccaaggcattttattggactaggtgctcccaggtgcctgagcatatgaggatatatgaaatagcaaacttagggagg

SEQ ID NO: 62269 - DNA, 1055 bp, Homo sapiens
agacagctgctccgggaggagggtctgcagccgccagcctgcattacagtttatgttcttggttttgtctttaattattaaaggcacgggctatttaaatactcacctgaagcatcattgtgagtaattttcccttcctggggtcaaaggagctccagcagggaaggggtttggtggcctatggttctgggttctccaggtgcttccctcaaggaatgcaaggatgtcatgaggacgttgtaagatgcccttgacagtagggtgcagacctccctgggctgtcttgcagattggcatttattttgagtgagtccttaatttgaggagtatagggtgttcccttttatcataggcaaggaagaaacagtgctgttagaagatgtaaaatatttaacactctctttaaaaaattaactgtccaggaacctttgattgctggtgcctatggcaacatgcatggttttcaggagtgtcttctcggagtccctgggctcctcagaaggggtgatatgggggtccatgggttaggggtgatgtgagggtccagtcttgggagggctggctgggaggccaagagcccacctgttctgcttggcttagaggctgggcagtagcagggctgagccactgcctcagagggtggtagtcgggggtggtctgttttgacaagtggagaggagtgaaggggagaaggagagctcgccatccttcttgggcttgctgagtttatgcatttgttttgttttactggcctctgttagtccctggtgcctaccgttctccgtccagcctcaggacttttgcgcatgtggtttccttagcctggaatgtaaagggagccttccttcctgacctggttcgtgcctcttacccctcagatctcacctggagcgtcatgttctggggaaattatctctggccctgcttcctaggtgacactctcctgtttgagggctcttatggttcggtggtctttgttacacttttttggaaaatcattgtttgcccaccctaccagcctgtagggttatgacaacagtggccagggctctttc

SEQ ID NO: 62270 - DNA, 1018 bp, Homo sapiens
ttttatgagatagtgtttcgaatactcccttttcagaggagatacttggagatgaatgatttactgaattgtagctcatttgggggagcttctggcttgtgacctaagctaagcctcagaatgtttcaatgagcaattaaagagctgtgaacagtggttgaccagagcactaaccattcaaaggcaaggataaaaggtgataatagttcaaggtctggagctacagccaacagctggccatgaacaatgtaactgactttggctaactcttcaagccctagaaagtgtctctgtgggtcctttggtggctccccctttttgtgtgcggttaggcatgtggacccgtccctgaatcttgctgtctcccattcttcttttgctacatctccctccactatccatttctttttcttacctctttctccttgccctcctccctcattctttctttattatcaacaatatatctttgtagtttcttttaatctattgccattaaaatttcatgttctctgttcttcatttcaaatcagtcgagggccaggcaaggtagctcatgcctgttatccgagcactttgggaggctgaagcaggtggatcacctgacgtcaggagttcaagaccagcctggtcaacatggtgaaaccccgtctctactaaaaatacaaaaatttagccgggtgtggtggcaggcacctgtagtcccagctactcgggaagctgaggcaggagaatggcatgaacctgggaggcggagcttgcagtgagccaagatcgcgccactgcaccccagcctgggcgacatagcaagactccgtctcaaaaaaaaaaaaaaaaaaaaaagacaaaaattagctgggtgtggtgatgggtgcctgtaatcccagctactcaggaggctgaggcagaaagaattgcttgagcctgggaggtggaggttgcagtgagccgagattgtaccactgcactccagcctgggggacagagtgagactccatccaaataaataaataaataa

SEQ ID NO: 62271 - DNA, 1034 bp, Homo sapiens
ccgcctgaatgaacggggactagtatgcgccggggacacggcgcctgcccgtgccgcccgtgccccttcttctccccgagtggctgacagcatcttgctaggcagctcatcaccgacatggacagcaagcaactcctttctccgaattccccgggcatcccctgctaccacctcgctgctttccgatgtggcttccttgatacgtggtagcgccattcaagatagaggggaaagaggcttgaagtcattatgtttccttcatgggggaatgtgctgtcgaattctgcatccccatgcatccgctgtcgtaagatggctttgaaattcaccagtgcatgctttctccaggcagacaagaatttattacgctattacattgctacgtaaaagcagaagggatcccactgagcatggctcgttttgttcagtcctcggtttttcccagcatgttctgggcgagcctttggatttttgttttaaacactgagcgttgggatgcccctgttgtcacagggccgacctgctgaaattgctggaattggtttcatcgtcaataggagggaggttcatctagagacatcatggaacctatctggcgtgtcaggcctctgactccatctctcccctcaacacccccccccccgcccagccccccgcgcccttttttcctcttaagtggaggcgggggatggattggctgtcttcactctccttgtgttttgagctcctctgcttagattcaattctgtggttttggttggaaaggtatcttggtggtgatcgaagagaggagggttggattaaaagtggggtggacacagaggggtcagcagcatcaatgacagaagacagatgatggacatatctacagccttcagacaccgatgaggcagatggctgtctacagagtgaggggcgtgtgtttgggctgtgagggggaggggtggaggaggaggatgcctccagcagttttctgccccgccctctggatgctgccttaaatagccccttgccaaccaagctctgatgtctct

SEQ ID NO: 62272 - DNA, 1140 bp, Homo sapiens
ttctttgagacggagtcttgctctgtgccccaggctggagtgcagtggcacaatcttggctcactgcaacctctgccttccaggttcaagcagttctcctcctgcttgaacctcccaagtagctgagattacaggcacctgccaccatgccctgctaatttttttagtaaagacggggtttcaccatgttggccaggttggtttttgaactcctgacctcaagttatccacccgtctcagcctcccaaagtactgggattacaggcgtgagccaccatgcccggcccaccttgcacatccttaacgttcaaggcttcctgcttcaatccctgttccaactgtcttgagggcccattgctggcaagtggccagtcagatcatgctggagggaggaaagtaggactagttcagttgttgaggctacaggagccactttgggctgtggttttacaggctcacctttctgttctatcctagaacttgcttatttcagttgtttttatgttgttgcccctggacttcctctgttccaggtaaaaattcatgcaggccccaaatttgcctcctatctgaccttcagcccctccgaagtgaagtcactccgaactgagtatggggacctggaattatgcattgaagtagtggacaacgttcaggatgccattgaccacatccacaagtatggcagctcccacacggatgtcatcgtcacagaggacggtcagtgtccagatgcttcccgcatacagtgtctgcctttgctgctttctgatcctgctcctcttagccccccttgggctgcagaaaaacatcatttgagtaggcttatggtaatgtttagtagtggttgcatttggtactttgatgagtgctttcacatcactttattatattgtcacagctggaggaggaggggcagggatgattagctctgcttcgaagatgactaaccctgtcagaggcactatcatttaatgcgtgcagcaaatcttacaaggtagttaaaataaacccattttacagctgaggaaaccaaggcagaaccaactctgcacattcattcattcattcatttattccacaaatatgtatgcagggacactcctgggtgtcagatactggagcctcaatggtggagga

SEQ ID NO: 62273 - DNA, 1087 bp, Homo sapiens
tcaatccatggagtcaaggaggccgtgcaactggtaggtccctgggaatgcaccaagtcaggcccagaggggccagatcaggtgtttgggaatttaaagcaaaacttaggccacacagagccaagacactactacaagcagacttgacactccagcaggcctgtgagccttcagactttaggccattctgcagagccagatgggtcctcagtggcttaggaaggcccctcccttacagctgcgtcttggcactatttatttacaagaatgtcaattagaccttcattctttgggtcacaaggcagcaggagtaccagaactagagtgtgaggcctaggttcctgtcattggcagagtgatctagggtaagtcagatgagaaactttacaaaagtttgtcataaactgtcatgcggtgtgttgagtatgagatcatgctgttatcactattattattaaggtcatcactttaactgaccatttctcattctcctcaactgtcaaatgaagtttgataataatagctactacttgttgagtacctactatgtgcaaggctcattttatccgttaactcatttgatcgtcacagcagtcccataaggaaaatatcattaattattagactcattttctacattgggaaaaaacagattcagaggtaaagtaattccccaagagtcacatggtgtgtgatagagtttagatttggacctaggctgactccagatccttttttttctttggctcatttgctccaacattccaggattctgttggctactgggaggatgtctacaaacctgctcattacacactcagtgaccagaatctggtttttttcttatgcccacatagtggttggaaagagcgcagattttagggattcaaatcccagccccaccacttcctagcttacacaggtgccctccctccttttcttcctattgatgtgtaacatacgtacagtaaagtatacagatcctgtgaaccactctgcgactgttcacacacacacatgtataaccaccagccgtatcaagatacagaacagtccaacatcctggagggcccccttgtgcccttcc

SEQ ID NO: 62274 - DNA, 1091 bp, Homo sapiens
gttgttattgccaatggaacccacccaaaggtgtctgggcacgtcatcacagacattgtggaggggaagaaagttggtaccttcttttcagaagtaaagcctgcaggtaaatagttcttcataaggtcccaaggcctgtgatgggaactagtgacacctggcttagttagagatcacaaaattgatatgctaatattatgaaatatggcattgttttgaacgctatttgcaaaatcggattttgctttgcttttgtgaaattctatctaacctgcctatctagacctattctctgcaaaatcactcggttaaaatatataagcattgattttctcaagaaacatttgctaggcctatgttagatgccaagtgctaaataagcactagagatgcaaagatgcatatgatacagtatgtgctctcgagtgttcacaaaggacagaattgcctcataatctgcattcagaagtgtaaacacattaaaaaatatcgccaaagtggaattcagaagaattctagaaaacaaagtatattgtctgccccagaaatacaggcaagttcttatgtttatacctgagtgaatctggcacattcttttgctattttattggtcatggtgatcccctgtgtgaaacaagcataccaagacatcatgtgttccttctgtgggcgtgatgagcttgtgcatgtgctggtagttctctctctagtagtagaactagagagagaactaaggtgaccatgacctgatatttgcacatattcttgcaggccctactgttgagcagcagggagaaatggcgcgatctggaggaaggatgttggccaccttggaacctgagcaggtaataaccttaggtgataatattgttatagttttcagagtgagtcatgctgtgtagttacaggagtcaaacctgctgactccatctttattcctagtgagccacagagttatctgagttacaagtctgattcaaatttgctctgccttttttctttttcttaattttattttccgttttatcttttatagacagaggtccaagataacttttcatcactatgatgttttgatcaagagcatcata

SEQ ID NO: 62275 - DNA, 1541 bp, Homo sapiens
ttgaacaagactctagcaaatcgttttgatgcagcttcaagcaccaaaatcgggtcattggtagactggcattcttattgtgattatcctaattcattttctactgagtgttgattttttagaacagtatctgaattttaactatgctcttggtggggtaaggggaaaagaggagtaggcacattatcagaatgctaggaacccctcactgtctttggagaaggtttggctagaattgtccaatctttcctgtactaatatatgaaactgaaacagcttccaaatctaaatctgtgatctcatagcactgtatcttctgggaagatcctaaccctaaatcctggagagttgtggagtagtaggttgagactgacagattgtgaaaggttattttttcttttcctgtaataatttgcactgcttatagttgccactgctttgctctacaatgggcattgatttcctcacttccctgattcacttactcctgcagagaggtagtatgtagcaagattgtcttaaagatttggaataatagaggggagaggtatattatagcacaggaaaagcagtaacttgagaccagaaaaatcactgcccaaaatgtccttcagccagtccccagcctccccatctgtgtccactttaggtcttgatttaactctagtttctcagccctttcttacccccactttttcttgtccaagctcctacttactctttttcaaagtgaaattgtgagggtttttcatcttggattgtatgcatgtaacatttcaggtaactattttatgtcactccacttagttataaaagggacatacactttatggtaataaatccagactgaatgccaagagtcacgcactctcctgctgactgagcctaacctctacagtgactcactcataaaactgggagtgtaaattagtgactgtttcaaagggtactgtgagagttaatgagtacctctgttgcatttcatcctgcttggaaacagtcacattaaacagtatatggctgctatgctgtttctgcaatagccacccttctttttcagttctgtccttaaagcacagcatcataagtagcaatggcagaattaaggacaccttgccaggaatatgggcagggctaataaatgttgtgctgaggatatggccatgatctgatgttgggaaacatttatttattaagccaggttatagaaataatgtaaggtgagtcttcctggagatgtttgtcagtgtcgaatcccttgttctctttttctggttaaagcaggtggtagtgcagtggaattcatttggatgagtaaagtacagagtgattggcaggtgccctggggaggcctgtcttggagacacttccatcaaagcagtattactgactcttgtctattttttaggcctttttgacagccccccaggttcagatgatgcaaagcttattgatatattttatcccggagatcagcagtctgtgacatttggaaccaagtctagagtgggaatgggtggcatggaagccaaggtaagaat

SEQ ID NO: 62276 - DNA, 1156 bp, Homo sapiens
tcatgcattttccatctatttaatccttttagattttggtgaccaatttggatttccatgatgagcagaagcgccggaacctcaatggaacacttcatgaactccttagaatgaacattgtccccattgtcaacacaaatgatgctgttgtccccccagctgagcccaacagtgacctgcagggggtaaatgtgggtaaagtatttctaagggtttagcatgctggagacactaacaccatgctatgctgcatgcactaacaccagaagtttggcataaacaagatggaaaagttgtgagagaaacttgtcatggagcagtgactgcataagctcttctgaactcgtggttgcattcaacagggtgaggtgctatagtcactgaagatggtgcgatgagcatggcttgtatatttcagtggctagaagactgcatgtttggaaaaaggattgccagtagacagtgtgttctgcagacagaaggggcctgcaagagccgtcatctacatatttgggttcattggttttgcctgatcctagcttggttttgcctgagcttggctgtgttcttccatgaatttctttttggactgcttagctcactcacttatgactttttaatctgcattctaggttattagtgttaaagataatgatagcctggctgcccgactggctgtggaaatgaaaactgatctcttgattgttctttcagatgtagaaggtacaaagtaatgcttttttcctttatctgccctttgttttaaatgctacatatgtgagcacatgagtttccctctttctttgagtccctctgatgtttttttgctatagatcattagccatatgttctgacaaagggcttttatgactcaaaacagggtgggtgagtctaagagatgtcatttgaatcctgaaatgttacttccaggtgctttcagttgttttccttaaataacagctttatggagatgtaattcacataccatacaattcacttatttgaagtttacaattctgtcctggcgtggtggctcacacctataatcccaacactttgggaggccaaagcgggaggatcacttgagcccaggaattcaagatcaacctgggtaatatagtgagtccctgtttctacaaaaaatagaaaagtcagc

SEQ ID NO: 62277 - DNA, 1011 bp, Homo sapiens
ttagaaacataacagtctttaccctttgcgagccagaactgggactccccacacattaaggtgactgttcagggcagtaaatatccaaataagtgggcccaaatgacagtgagcgatgggtccagaggtgggaaactcagatgagagtatggttgttcctggggcttcctaggagagctggaactcagcctgggccttgacaactgatgggatttgcacaaacagaggggaaaagttccatgctactaagtacacagtgtgaggtgcccctgcagttgtgcaatccagtggttctggggaagggacaggctctaggagtgtattccaggtagaggacaggcaggaatgagtatggcatgctgtgggccagggaggagacaagctggaaagcagaggtggtggtctcattaggaagaatgaaaaataaagtggatcattccattaggcagagctctgaagccaactaggtgagttggagttcagtctcaaaagcaggctgaagattttgaacggaggagaaacttgatgaaaacggtaggaaaaacctggtaaaggtttgcgtaggttaccagctttctttctagggctgcgtgtggacctaatggaagagctgtctccatcagggcctgactaatagacatcttatcatgtcagatggactcaggagccaacttaaactggcttccactggccataaatgggatgatgtaaacatcaagaaagggaatcacagctgggcacagtggcttacacctgtaatcccaacaccttgggaggccaaggtgggcagatcacctgaggtcaggagttcaagactagcctggccaacatggtgaaacctcatctctactaaagatacaaaaattagccaggaatggtggcacctgcctgtaatcctagctacttggtaggctgaagcagtagaattgcttgaacctgggaggtggaggttgcagtgagacaagatcgcaccactgcacttcagcctgggcgagagtgagactcagtctc

SEQ ID NO: 62278 - DNA, 1069 bp, Homo sapiens
gcaacctctgcttcccaggttcaagcgattctcctgcctcagcctcccagttagctgggattacaggtgtgcatcaccatacccagctaattttgtatttttagtagaaatagggtttcgccatgttggccaggctggtctcgaactcctgacctcaggtgatctgcccgcctcggcctccctcccaaagtgttgggattacaggcgttagccactgtgcccggccccatgctatttttgttcattactctttttttgtaattaagttttagattttgagctaattataaattcacttgcaattttaagaaatagtacaaaaaggtcccttataccctttacccaatttcacccagtatctgaaccaaggtattgacgttgatacgatcaagatacagaacatttcaatcaccacaggattttttatttctctttaacagccactgtcctcttccctattactaacccctggccaacattaatctggtctacatttttataattttgtccttataaaaatgttatataaatggaattatccagtatgtaaccttttggaattctgttttcttcagcataattctctggagattcattcaagttgctgtgtgtatcagttagttcctttttattactgagaagtatgtaatgctatgagtgtatcacagttagtgtaaccattcacccattaaaggacatctgggttgttctcattttttggctgttatgaataaggctggtatgaacattgatgtacaggattttgtgtgaacatagttttcatttctgtgggataaatgcctaagagtgtagttgctgggtcagattgtagctacatgtttagttttttacatagtttgaatgtatgtccctaccaaatctcatattgaattgtaatccccagtgttggaggtggggcctgtgggaggtgtttgagtcatgggggtgaatccctcatgccttggtgctgtccttgagatagtgagtgacttctcacaagatctggttaagtgtgtggcaccaccccctcactctctcttcttgttccctctctcgccattggagatgc

SEQ ID NO: 62279 - DNA, 1070 bp, Homo sapiens
acaaagcacatgctggctctaatgaaaggtagcagccagtcttcagaacatagaactttttcttagtttatacttcataaaagaaaacaacacaggtaattttatagttctttatgaatagtgctcttaggaaataagtggattttgagaaaattaagcatttgaatatatttttcttatttgcagctcaccaggacatgattatagcttctcaagcttatctaaaataaaagataacatatatatcaacatttttgatgaaatgatgactgaaaaacatgaggtaaagtagaataattacaatagccaatgctgaaataattctaaggtcaaactgaatgaagtctactaacatgtttgtaaatatgcttttagatgcaatgtctacatccaacattttcttgaaaggatttgaggcaatttgcaataaaatcagacatataacaagtcagttcaaaaataacagagatcataaaccacatacaggaggaggaggaataaatattatcaagaacttgggagaagtaggtttctgcaattgaacattacaattaaatgtgagcttcctgtagccaatacagaaatataaacagaaataggttacatatatcttattatctgatcaaagaaaatataccactcctgcaaaagagatcaaattattcctaaggctaaaattcagttctacttaatctaatttctaaaattactgtcatcctcatagatgtgtaaaagttcctagcacaatgcccagcaccctagcaagctccaaaataaacgttagtttcctcactattgaacttgctactaaaaatataaagatgcatacccatagtatctactcttttaaggtatgtagattaaatgctttaatagaaacgttttccaaattctatggcaatgctactgaaggagcaattaattctacctggagggcctggggatccatgtcagagaagttgaacaagaccttgaagagtaaggttcaggaacgagccttctgtaaaaaccactgcaaatcataatggctatgttttccaactcagttttccaggagatacaacacacat

SEQ ID NO: 62280 - DNA, 1037 bp, Homo sapiens
cggcctgccttctccttctgtgtgtcgcgccagttgttctgaatctcggctctctagaaggtctagtcaggttctttactcactatcttccgggccagaaaaggcgagtttgctcatttgctcaaggttaattaacttcttggctccttctctgggatgtatcaaaagaacctgcaacctgaatgagtagggagatggtagttgggccagggaaggtggaaaggggcgttctggcttccaggtgggtcatgaatttgatcttgtattttaaaagatatatacactgaatttttgttgggcagaacagccctctttgttcgagagttgccgttgcatgcagccagtttaagtcgcttttgtacataaattcctcagcctttccgctaacttgccgtgagacgtggacaagtgaaatttctgtttcttgatttcctcatctgtaaaatgaggaataatgagtgtgccttatgattctggcgattgtgaaacttaagttagtaccgtacatgtgcttagaaactgctcttggtatatagtaagcactaagtgataacttcttatcacttacccctcaggatttgggctgttcaaaagccctaaagtggagggagttggctgccccttcctgctgatatcaaaggcagaaagtagacttaatagatattggaaaaaaatacttttccaacacaaagcaaagtctgtgtattgttgctattaagtaacggttttactctgcatgtggcaaggcagattaatgagacatttctgcctcttcgataaccaaaagagagaccagatccaaaatgatctctagcttaactcagtttcaccttggataaagaaagccatttgttaaatgtagaaaattgagaaagaagcaaaacagctgactttcaataaaaaggattctgactcttggggttgagatcctggaatgataatgaacttttatcttgagtttctgaccaggtcaagtagattggaaaacctaattctgacttaaattgttacccttttctaggcctgagatttctaaa

SEQ ID NO: 62281 - DNA, 1023 bp, Homo sapiens
ttcttatattagaatactttctactgactaaataatgagttggcttaatgaactaaaagttaatgtgcaactactataaatgtgaaaacttttgcttatgcattagaccaactgtgtagtaggctccaagatacaatctgatacaaccatatttgttacttagtacagaatatactggtggatcttttggcccctctttctctttacatcttcctatacctcatttcattgctcgttggtactctcactgaagatagggcacgtaaaggaattgaaattgtgtttttttttcttttaataatgtggaagattgtatttgatatggaagttgaatcagtaatatagtttctatattcatgttattacaatgaaatttatagtatgtagatgtattgataaccttcacttttaactctcacttgagggataaagattgtatttgatattgaagttaaatcagtaatgtagtttctgtattatccatgtcattataatagaatcttaaaggagtatgtagatatactgataaccttcacctctaactctcccttgaggttttggggtcaaatatggctgggatgaaataaggaacattccccctatatccatgccaccagagttctttagcacttctgtgcctggctgcttataaatctaaaaccaaatgtagtcctatgtagtatcatttctggtactaatctcttctcagattttattttctgacctttattcttcctttgatctgatgacctcaactacttattttgtccccagaatgtccctttgtaagttatttcagatccattgtagaaccaggctgaatgtaaataaaacacagctgcagcatgacttcccactgcctatatattaaggtggaaactgcttaatgtagtgtttagaatctttcatctggacccagccacctttccagtctcatccccatgtacgttgagcaaaattcttagaataccatttacttcctgaatatctacatttccccttaatctactgttctctaaaatt

SEQ ID NO: 62282 - DNA, 1048 bp, Homo sapiens
gagaatggcgtgaacccgggaggtggagcttgcagtgagccgagatcacgccactgcactccagcctgggcgacagagcaagactccatctcaaaaaaaaaaaaaactatcttctactctaaaatcaaataatttattttaccagctaccacccacctgcaaaaaaaatttcctgaaaatattcagctgatgagattgagttatttttttcactggcacatgactatttccattctatactagaacacagatcaaaatgtttatgtatttcaagcatttttttttaggggattggggaaaggttggggatggtggcactgggaaagaaaacacagggttctggcacaattgtatctgtgtaaggtaagtacgtctttggatctaaatcctggcaataagacagcaaatcccattttactgactagaccaataatgatcacttgcctgacattttctctcccctcccatccccttttcttataaggtaaatttgaagaaaaagaagacagtgtgcctaagctggagcagctcaacagcctgggttgtatgactaatatgaatctagtattaacaaaacaaaatttgctacatatggaactattattattagaaacctttcagtggaacctctgccttccaacagccgcccatttcattgagtattatctctctgaagcagtacacgaaacagatcttcatgacggctggccaatgatttgcttggaaaagactaaactctacatggccaaatatgcagattacttcctggaagtatctttgcaaggtgggttgttgtgaataccagtaagtgacttgtgcacttgtgactcgtgtattctgttccttaagttcatttttggtgtctccacagattatgcctttctaaattatgcaccttctttagtagctgctgcatgtgtggcttcttcgaggattatacttcgtctttctccaacgtggcctacaagactacatcgtcttactgcctactcttgggatttcttagtgcagtgtattgaacgactgttgatgtaagcctttttattct

SEQ ID NO: 62283 - DNA, 1056 bp, Homo sapiens
gcatatctcagtgcaatccatgatttatactcagaatcgacattcttaaaaagttatttcaagggatggcataactgtaagaggtcagtgctagaataaagtcctgtaggtttattttggaagggactgtggccagggtagttctcaggttgtgctagagcagcactttgttatgtggaagacaggttttttaagcaacctttgaatccagctctagtcagtctaagcaggcaaaggtaactgatgactaaatttcagtagctactttcattggattgaccctacaactgccctgggacatttcactgtaccagtattaactgcaaacagcaataattgtcattacagcaagggcagtttgggggtaaagcattttggaggaataaccttaaaaagttaaaaagtcattgtaataactgataaactgtatacattgtgctcctttctgtgggagaagaaagatttggtggagggaagctttctggtttaaaaattagtaaggtgtgtctttttgttttttttaagatagcacttgaatagaagggaaaactgcatggcagatacgtgactgccacaatatgcatcgaagacaaacttactataaagatgttgtgggtatgcagcaggagtctcagtaatcaagccaatggcctttgtcaggaagggaaggggctcaacacagtgatggactgatccagatggctcccggggatgaatgtgggtgggtagcttctgtcagtatcaatgcttagagaaatatcctttccttaaaaagaaaataacttttatatttagagtacatagggcatgatgtggatttattagtctggtagataaaatgaaaaaccactcaggtaagaacactcactcatggcagtttttaagcatgaaaattgttttctgaaagtatcatcacttttcctttttaaagaaggctgctaattggattttggtagttcttacctcaagaaaacttgaattatttgggggaaagtaggctcaaaagagaatatatctttcacattcacattcagaacccagcaacctggagtccaa

SEQ ID NO: 62284 - DNA, 1130 bp, Homo sapiens
attaattgcaaatagcaagtatggtgctaaagtctacaccaatggaattagatgagtgctatgcacttaattttaaaataaaactagttttcagtaaaatggcttcggtatttttgttttaaatacaaacttgtatatttgcagctctagtgaaccatctcatcatgtaattcagacttggaatcatgattttatttactaaaagccatcaagatgtagaatatagccattagtggcataaaacatccgttcattgcgtattccatactgagcattaaagcccacaaaagtatattggacaccactgttgcctttttgagcttaaaatcagttgttagtatgttagcaactacagattctaatttattcaacaatcatgcaagcatcagaaaatctgaagtttgatgtcaaaagtagggacacagaaaatggttaaagctatgagaaggaatatagggtctacagtgagtgagaatggtctatttacctgagtataaatatcatttgctacttaattcaactcaaaccttagcagatggaatttgttttgaaaagtaaaatttaacaggtttgtacaagcgggttaggaatttacactgcctttttaaaaaacatttttgaaattagtctcaaaactatcgtattgtcacttgttctggcacagtgccagggtttagcagccctcaagagttaatataccatgttctttagggctgactttaagaaaaagaaaaagcattccaaaccaggccaggtagctttgccttgaggtgatctgagccccatgtggcaagtttataaccaacaactgcctctcaggcacgtggtaaaagcctccctagcctcaagcagcttacatctagtttgataaatacgactagcacacttgcagcaattaggctagtagaggcccgcacggtggctcatgcctgtaatcccagcattttgggtggctgaggccagtggatcacttgaggccaggagtttgaagccagcctgggcaacatggtgaaaccctgtctctactaaaagtacaaaaactagctgggtgtggtggcacgtacctgtagtcccagctacttgggagactgaggcacaggaatcacttgaactcaggaggtggagactgc

SEQ ID NO: 62285 - DNA, 2339 bp, Homo sapiens
cgccggggccgcgcgctagatggagaggtcagcggcgaacccagctccatggcctagtctcgtcagaccgagcgcggaccctgccggcctccgttctcttccgcttgtctcaggtaaagcgcagatccctccgccgcagcgtgcgctcccggtagcgctgcgatcagcttttcggcaatacccggatggaagtgtaatggccgccatcagggactcgcaggcaatgggtactacgacaggtattccccgtcagcgggactgcccagaccttttaggatgtcagaacttctagagggccacccagcaggcaaacggcgagtttgtggaccgtcagggtcccccaaacaggtccagggatccgcctcttgtgagaggaagcgcgagttaaatagtcccggccattcagcgcttccgcttaacttgccgcaaagtttttctggagaagtcggggtttttttgccgagcgcttttgccgactgctagagcttacccttactttcttaacctggggttgttttacttccgggctttttgaactctacactctcctacattctaggagctgggtgggagtaggagacggtgtgcctccgcgctccccgcggggcagccgaaccccggaggaaggggcggatcgggcgcggtgtttggggcgaagctgggcgcgcggcgctcgaagcactcactcggcgggtttcgtggttggtggagacagcaagggcgccccgcagaccgcacccctcgagctataggttcgcaggcccgactcgacggcgtccctattgctggcccagcgtatggtcattgggggccatttcttgcagagatgccctgctccctgacgcgctcgctcttctccagagttggccaaaggtgctcttccccgcagaccctaaccacacccagtggcagttggatttctttgtaactggctttctcacatgtagggttcattttgactctattcgttacatggtgtcctctttgtcaagtagacagtctcttcctaggtggctgtggtaattgaaaagtacatagagcgaaatgtatataaggaaaaatgttttaactcttaagtggaccgatcaaacagatgtagctttaaagttcagaatacaacagttaagactcagttttctttttaggtttaaatttgagagcaagtagtgtatgtgagctgttttagtgcaaacattgttgagtatgttgtcaaacgtctaaaaaaccctagaaaaataaaataagtcaatgttcaaggaattcataagaatgttggaatttgtacagttgtcgcagtgataaaacatgaagacaccaaactgtcaggataggaattctattaacttgaaagtgtgcatgttagatctagttactggtaattgttgaattgctttttctgcagcaaggggtctgatttgagtgtactctaaggttgatatcctcaggtttaatttaaaacatttaaattgattcagtgaaatttcctaacattttttgagtttaactgcaaatttatagaaatgcattcactatctttcagcaaaattgtcttttctgaaatttataaagagacattgcgttctgttaacactttgagggtgttgggatttcctggggaaggtaagcatagtaaacgatgttgatttttgccatagaaactgtaaattagatcatccctagatacagaaaattgccaacaaaaggggagaataaaatgtaggtatgttacacaaccaaatgtttcctgtttgttgcgtgaaaataagtataattaccaaataaaacgttttatatctggttttatggaaggacaaaagacagtaaccacaatgaacacccactgtgtgcattgataatgtatgaacttttaaatgcttcaattttttgccatggtcacacttcggattctgttctagtctctctggtaatagtatgctgtaatcccagaagtttctatattttgaaatattacagagggactatactttagcctagatctataatttgacttcaggatatgctttaaatgccctttaagtgtatttttgttgtttacttttctgtttatagttgtttagaattgttctcattgaggcattgtgacattgcatactttagagcacttaatactactttttttttttttctttaaatgataggagacttgaatcttgcccacattccttcaggtatgctactgaaggttttgtggcaaagtgctattagcagaacaaaaaggttttaacaccgtcttgaaatttttatttattatctggtcccaggtgtgtaggctgtgagtatttcagttctatatggggtattggcttctcatggtgagc

SEQ ID NO: 62286 - DNA, 2598 bp, Homo sapiens
tagtgagaccccatctctatttaaaaaaaaatgtttttaaagataaggaacagacttaaagtgatgattgattgctcatagaacgttcattttgggctccagaactaggaatgatgtagaatttattgttgtgtcattgtctcattaaatgctgtagtttcctatgtccttgcctaccttctttcctcagagcctcgcatctgaccctcagagagtagcagttggattattccattataccaaggttggcaagcttttgctgtaaatggccagatagtaaatattttaggctttgtgggccatatggtttctggtgcaactattgtaacacaaaagaagccataggcaatatgtaaatgagtgagtgtggctgtattccagtgaaacttaatttacaaaaacaggcagcaggccagatttggcctgcaggccgtcatttcattccacaaactctctcagtcacatctgcgcacctgctagcatctttatttatcctcccctctagttactatagatggatcatgtttgctcctttctaagttcacctcttcagctcgttcactagattccgtccgttctaacctgaaggacttcactgctgcatttctttcctatcctttatcatcaatttttttatttttactagatcattttaataagcgtgcagtcatactgtaattcctcccacctttaaaaaacaaaaaataaattgaaacaaaacaaaacaactcctttatcttaaaactccttgaaagagttgtctgcactgcatcactacttcctctcttcccattttgccttacatccaagcttgtcagcctttctcctctaaaactccactgaaactgttctaatccatggtaccagtgatcttcacattaagtctagttagtcatcttcttacttgacagagttgttcaatcccttatccagtaaacattttcttcattttgctttgaggataccacattcttgatttaccttaactcttattggtcatttcttttctgtctcacttgctggttctttttaatctctttctgttggatgtgttatagaatcttgaggctcaggccttggactgctctttttgtttattccccctggtgatttcatcctgctccaagtacttgaaagtacatatgtacatatacacacaccgataactccccaaatttcatcatccacctagccctctgtattctatatccagccacacagtccacatttcctcttggatgtcaaatagacatctcagatattacatgcctaaaatggaacttttgataaactttcctattactttaacaatcttttatatctcggtgaatagcaactcagttctttccaatgctgtcagaacttctagagttatccttgacatgtctctttctttcagagaaagcatatcaggatatcttgtaggtgctagcttcaaaatatattcaatctgaccatgcctcattgtctcagccaaaccaccatcaactcttacttggataattgtactgtgtagtctttgtctttactcttaatccctcctgaatactctgttcttagcatagcagcccaagtgatagaagtaattcgactcatggtaattctctgcccacaatgctccagtagcttcctctctgattcagaataaaaccaaagcctttacagtttctatcagggcctgtttctgtccccttgttacttctctgacctcatcttctagctttccctctaatgctttctgttgtggtcatactgattttcttgctgttccccaaatgtgttaggcacattgcacactcagggtcatgtcactaacttttgttttcttggattgttggcttcctcagctctttaagatactgactccaataagaccttttcaagtcgagggctccctgacttaatatgtaaaattacaacactctgattctgcctttctgtctttgctttatttttctctgtagcaattgttgcctttgaatatactttataatttacttactttgtttattacctaaataatcagtaaaatgttacctccgtgaggggagggatttttgtctgtttggtttactgccatattcccaatgcttagaacgtagatgtggtgctagctacaagtctggcagcatcccacatgctggtgatgtagtaaaggacattacagatgtagttctcacccttacgcaacttatattccggtggtagagacagatagaaaataaatgggcaaataaataaaatattgccagagatattaagtgttacaaaaaaagaaatagaaaaggataaagtggcgaattttttttttttttttttttttgaggaagggatggtttatagggaagggcccttctgaggtggtggcatttgagctgagacctaaaagatgagaaggatgtagccttttgaagaatggaagaaagcacatttcaagtagggaacagcaggtgcaaaggcctgagataggatggataggaagaatatttgaggagctgagaatctgtggcagcttgttggagtatatgtacaatggggagagtggtgtgagatgaagttgaagaaaaagacccaagaccagataccgctgtttcttgc

SEQ ID NO: 62287 - DNA, 1334 bp, Homo sapiens
tggtctcggctcactgcaagctctgcctcccaggttcacaccattctcctgcctcagcctcccgagtagctgggactacaggcgcccaccaccacacccggctaattttttgtatttttagtaaagacggggtttcaccatgttagccaggatggtcttgatctcctgacctggtgatctgcccgcctcggcctcccagagtgctgggattacaggcgtgagccaccgtgcctggcctgattttttttttcttttacctcaatctgttacagctgataattttaaagcataataaaaataaattgccagaataatgaaattttaaaaatgaagacatacaaaacataagtacatgtttttattattagattcaacagataagtctaactctgaaaagtttataaatgtttattttcggttttggtacttaccttgtcatggactggtgatagatggcttatgggccatcagcagaccatagtttaaggagcattgctgtcgcctaggagccaacttagaagcagaaaaaaaggggatatgaggtgagggtttgtgtctcatgtatatggtcgtttaatcctcttggttttggcatagtgcctactctctcccctgtgcctggtctcccctaaaacaaagattcgttttacccactgtagagagtaagcctctagacttctgtagtggggaaacaacagtaaccaatagcatgatagagtggggaagagaatcttagcatccaactataagtcaaccaactttctccaaatttctttctgttttagcttcccccttcctccttcctcccacaagctggcagttcttaggcctcgtaaagattcagaatgtaaaatgtgttagttcctagctttcccagctgtctgcaaggtcatttatctgtttttcagtatccaaaattttgttgctattgctccctcttctgttttccattgtgaattctgctgtaagggattctaaatatttgatgtcacaggtgttctttttctccatccagtcttttctgcttttttaactatattaataacaatgtttatattcaatgtatatattttcctcaaagagtacatatgtagtatattttctgaatctttgcatatctaaaattgtgcttttccctcacatatgggagcttttctggatgtgaaattaatcttgggttacctcagaactctatataaatgttactccattgtcttctcgtgtttagagttgtgaataaaatgtctgattaatattggtgtctgggccgggcgtggtggctcacggctgtaatctgagcactttgggaggctgagacgggcagatcacgaggt

SEQ ID NO: 62288 - DNA, 1582 bp, Homo sapiens
atttttagtagagacggggtttcaccatgttggtcaggctggtctcaaactcctgacctcaggtgatccgcccccctcggcctcccaaagtgctgggattacaggtgtgagccagcactcccagccttactgcagtaactttcattatggtcactgctggatgggagaacaggggagaggtttctctgagggttcagattattttctctttttagagctgctgcatccagtgatgtttctgcctacttatcttttttgttggcattgttgggtgggatgaattcctaaagaatacaccaagattttctcagtgtttttgttaggagaaggggaagttgagagttaacctcatttatttttcttacagtgtagagataattcagttatgtagcgaaaggacagggctcttaaacagaggaagatagccatgggtgtaggaagattcgtctttgttcagaaataatgtcctctttgcatctctcctaacagttggtgctagcaatcccctactctgtctggcctctggatctagcttgaagttctggattcatttccttcttccttgtacctcagcctgagccttctgtcacccaaagggctccagctggtttttcactcaggcctcactttatcttccaaggtatgtttaggggaagttgtaggcagaattatgtctctcacttccttacttgggcataatgggcagatcctcattaaatattgattggatgaatgttcctagtgaactccctttttaaaaatggtgtttggcagtgggtcggcatttgtttttactcccctctcaccagactgtttgctgtcagacaccttgccatatgtatatggaatgtttttctagttcctagccattttgtaggagtttttaaattatattttttggttgtttcaatgggcagttaggagaaggaggaagtcagatgttttcagttgccatgttcatataggaaactacagattattttaatacttttacaaaattgtattatttcaagacttattgagatgttggtcaagtcttatgctgtaataatacatatatagaaggcagtagtttaaatagcacatttaaaaccagtaatctgggctggacgttgtggcacacacctataatctcaacactttgggaggccaaggcgagtggatcgcttgagctcagaagttcaacaccagcctgggcgacatggcaaaacctcatctatgcagaaaaatacaaaaattagcggactgtgatggtgtatacctgtagtccctgttacttgggaggctgacgtgggaggattacttgagcccaggaggttgaggctgcagtgagctgagatcacgccactgcactccagcctgggcgacagcgagaccctgtctcaaaataaataagtaaaaccagcaatctttgttggtgggtagagattggactgtagtaaaaagagcattagctcataggttggaggattacaattgtaataaaatttttctttttttatgttgagacgttcacaacatgccaacattttttgtccatacgtggcaaccttagtataaattgctgtcagatatcatgttt

SEQ ID NO: 62289 - DNA, 1992 bp, Homo sapiens
tgattaacattcctactttgtgccaaaatgaacttacagatacgaatttactattatttttgtgatgagaatttcaattctttgtttaattttaggtgagttattgtgggaaaaatcctgtatattgaagatgtctctacacagtatcgtttcctgtttaaattacagataacttcaagagttttcagaaaaaaagaaattgggacttttttggttaaatcatgccatctgaacagaaacagttattttgtgatgaaaaacaaactactttaaaaaaagattatgatgtgaaaaatgagatagttgataggtcggcacctaaaccaaaaatttcaggaagtattcattatgcactaaaaaatgtgaaaattgatttgccaaaaataaatattccaaatgaagtcctattgaaacatgaagttgacaaatacagaaaattatttcagagtaaacagcagactgcaagaaaatctatcagtataaagactgtaagctgtgtagaggagtgtacattgcttcataagtctgagagagctgaagaagagggtgtaaaaatgtctgcaaaaatactcaatttcagctgtttaaaatgccgagacaacactcgatatagcccaaatgatttgcagaaacactttcaaatgtggcaccatggcgaattaccttcatatccttgtgaaatgtgcaacttttcagcaaatgactttcaggtatttaaacaacacagacgaacccatagaagcactttagtaaaatgtgacatttgtaacaatgagagtgtatatactttactgaacttgacaaagcatttcacatccacacattgtgttaatggtaattttcaatgtgaaaagtgtaagttctccacccaggatgttggcacatttgttcagcacattcatagacataatgaaattcattataagtgtggtaaatgtcatcatgtatgttttaccaaaggagagcttcagaagcaccttcatattcattctggtacttttcccttcacttgtcaatattgtagctatggtgccaccaggagagaacaccttgtaagacatgttataactttgcacaaagaacatttatatgcaaaagaaaaactggaaaaagacaaatatgaaaaaagaatggcaaagacttctgcaggacttaagctaatactgaaaagatataaaataggtgcatcaaggaagacgttctggaaacgtaagaaaattaacagtggaagtgacagaagtatagaaaagaacactcaagtgcttaagaaaatgaacaaaacacagactaaatctgaagaccagagccatgttgttcaagagcatttaagtgaagaaaaggatgaaagactacactgtgagaataatgataaagcccctgaatcagagtcagagaagccaactcctctgtccactgggcaaggtaatagagctgaagagggaccaaacgctagttcaggtttcatgaagactgctgtactaggacctacactgaaaaatgtaatgatgaaaaataataaactagcagtttcccctaactataatgctacgtttatgggcttcaagatgatggatggaaaacagcatattgtattaaaattggtgcctatcaaacaaaatgtatgttcaccaggctcacagtcaggtgctgcaaaggacggtactgctaatttgcagccccagactttggacactaatggatttttaacaggagtaacaactgagttaaatgacacagtttatatgaaagcagctactccattttcatgttcatcttctatactttcagggaaagcaagttcagaaaaagaaatgactttgatatctcaaaggaataatatgcttcaaacaatggattatgagaaaagtgtatcttctttgtcagcaacatcagaattggttacagcatcagtgaatttgaccacaaaatttgaaacaagagataatgttgacttctggggaaatcatctcactcagagtcaccccgaggtat

SEQ ID NO: 62290 - DNA, 5021 bp, Homo sapiens
ttaaaagtccagataaagtcaactgtgttgccaaaccaaatgcatacaacagtggagatatgcataattattgcattaattatggcaactgtgagttacctgttgaatcctccaaccaaggatcattaccttttcataattactcaaaagtgaataattctaataaacgtcgtaggttttcaggaacagcagtgtatgaaaaccctcaaagagaatcttcatccagcaaaacagttgtccaacaaccaattagtgaatcatttttatcactagtgaggcaggagagctcaaaaccagatagcctattagcatctattagccttttaaatgataaagatggaactttaaaagcaaaatctgaaattgaagaacagtatgttttagaaaaaggacaaaacattgatggacaaaacctgtacagtaatgaaaatcaaaatttagagtgtgcgactgaaaaatctaaatgggaagacttttctaatgtcgattcacctatgatgcctagaatcacatctgttttctctctccagagccaacaggcatcagaatttctgccacctgaagtaaaccaattgcttcaggatgtattgaaaataaaacctgatgtaaaacaagactctagtaacactccaaataaaggcttgccacttcattgtgaccagtcatttcaaaaacacgagagagaaggcaaaattgttgaatcttcgaaagatttcaaagtgcaaggcatcttcccagttccacctggcagtgtgggtattaatgtgcctacaaatgatttgaatttgaaatttggaaaagaaaaacaagtgtcatcaataccacaagatgtgagagattcagagaagatgcctagaatttcaggttttggcacattacttaagactcagtcagatgcgataataacacagcagcttgtaaaagacaaactacgagccaccacacaaaatttaggttctttttatatgcagagtccacttttaaattcagaacaaaaaaaaactataattgttcagacttcaaaaggattcttaataccattgaacattactaacaagcctgggctaccagttattcctggaaatgcacttccattggttaattcacaaggtatccctgcttctctttttgtaaacaagaaacctgggatggttttaacacttaataatgggaaacttgaaggtgtttccgctgtcaaaaccgagggtgccccagctcgtggaactgtgactaaggagccttgcaaaacacctattttgaaggtagaaccaaacaataattgtcttacacctggactttgttccagcattggcagttgtttgagcatgaaaagtagctcagaaaatactttgccattaaaaggcccttacattttgaaaccaacgagttctgtgaaagctgttcttattcctaacatgctatctgagcaacagagcactaagttgaatatctccgattcagtaaaacagcagaatgagatttttccaaaaccacctctttataccttcttgcctgatggcaaacaagctgtttttttaaagtgtgtgatgccaaataaaactgagctgcttaagcccaaattagtccaaaatagtacttatcaaaatatacagccaaagaaacctgaaggaacaccacaaagaatattgctgaaaatttttaaccctgttttaaatgtgactgctgctaataatctgtcagtaagcaactctgcatcctcattgcaaaaagacaacgtaccatctaatcagattataggaggagagcagaaagagccagaatctagagatgccttacccttcttactagatgacttaatgccagcaaatgaaattgtgataacttctactgcaacatgcccagaatcttctgaggaaccaatatgtgtcagtgactgttcagagtccagggtattaaggtgtaaaacaaattgtagaattgagaggaacttcaatagaaaaaagacttccaaaaaaattttttcaaaaacaaaaactcatggaagtaaagactctgaaactgcctttgtatctagaaacagaaactgtaaacgaaagtgtagggatagttaccaagaacctccaagaagaaaagcaacattgcatagaaagtgtaaagaaaaggcaaaacctgaagatgtccgtgaaacatttggatttagcagacctaggctttcaaaagattccatcagaactttgcggcttttcccttttagttctaaacagcttgtgaaatgtctaggagaaaccaaccagttgtagttttgaatcatcctgacgcagatgcaccagaagtagtaagtgtaatgaaaactattgctaaatttaatggacatgtacttaaggtttcattgtcaaaaagaactataaatgctttactgaaaccagtttgttataaccctcctaaaacaacttatgatgatttttccaagaggcacaaaacatttaaacctgttagttctgtgaaagaaagatttgtgctaaaattaacactcaaaaagacaagcaaaaacaattaccagattgtgaagactacctctgaaaatattttgaaggctaaatttaactgttggttttgtggtagagtatttgacaatcaggatacttgggctggtcatgggcagagacatttaatggaagctactcgggattggaacatgttagaatagtttaccataattaccaaggaaaagaaaagtaaaattaccttagaagaaaacaacgggttcagttaccataatgcagacattttctacttcagtatagtacctgaaatcgaacattttaaaagttgattgtatttctgtggaagagtaaaagttgtatgtatgatatttgaaaatgctatccctgcactcaaaagttttgaaagaaactaatcacagcacagaagtaccttgatttaattttttaaacgtgttctcgggaagttagggctaaagaaaattttgataaaacaattttcccactttagttctttagtgactcttagtagagggtaatggctgacacccccattccctctcttcttccaccagccttatgcatctaagtgtagctcctctggagatggagagctctttcatcgtagaactgaaggagtttctcacatttgtgaagatactttgagagaacctgggtaaagaagtcactctatatctgctaaatatagttattttgaaggatattaggctccttgaaagtacatttaactcactacagttacacctcatacaatgcttgaagagtttttggcaagtaaattttttttccagttgaactctgtcacttgttagagattgggaacactctcccaaggtgattttctttttctaagtgactgtgtcaaatgttgcagtagatgggcagcttcaagagaagaatttaaactctttgtctcattgaaagtttggttaaagaacttgaacatatttctaaatttgattatattctctgatgatccctttgcacagaactatgcttatctcatgtttgtcctccataaacaaatggccatttttttcttcttggttcccatccctttaaaaagagtggaacataggagcacttccaagggagtggcttttcttgaaaattaaaattgtttaccaaaacagtattttgaagcaagatcatatttttgtctgtattcactttattatttgaacatgtccaaattaggacaaagcatttctgttagctgcttctcagtgtgactgacaacccaaaacatatatacagattgttggcatttgcaaaaggaagcatcaatagtggacccagaggcagtgcataaaaccttaggatagattcctaagggacatgcccaacagagttttaaaatggatgttttcatgatgacaacagaatcatagatttagatttttcaccttgtaagtttggatcaaattttgctggttctttggataatggagttcttgtgttaacaaattacgtgctatatgattttttgttacattgttacaagtgttaatgacattttcattaatggatgaaaacttcagggcttcttttctgtatataacaaattaagtctgtacatatttttgtaccttttatgtaaattttgcacagaaatttttggcataagtttattttctttcagtttagttcagtgcatgcactaataaaactggttgtttaatttaaaaggaatatataagactttacccatgttattttcttggtttttatttcagatgtagattttgtttttgaggtaaattcgttcttcagggattgaacactattgttagcaagtgcctaaaaaagatgtgaaacagtttacatatgtcaactgtaacagtaggtcccaaatgggcccattcccctaatagttttatttttaaagaaagccatacatagaatgcttcaagctatcttgctatgcacattatacttgtactgttttgtgcagtttgtctactttcttagtgaagtattttttgtataaaatgttacaattgtgtttcttaaattgagcctaagaatggagttaattggaaatatacagtatatattaataatgtacatggtgtttaaagaatggtaagcattgttaatttctgtaatgaacattttcaattaaatttatcttgtttgtgtttacacaataatttttttactgtgctaaaatctgatggaaattttgttctctaggaaatacagattttaaagtgtatgtgttttttcaatgctagttaactctacaagatagataaaagtgtgggattttttttcttcccaaaatcatagatgatatattgtttaagaaaggtaacatataccataattttactatggttatgctggcaaggtgagccatagagaggcttatagtcttcagtaccctaacagcaataaaattaaaatgctctgtttgttacatatagatctgttatgagacatcacctgctgtaaatagcaaggagagagaaggaactttcctgctaatattcgcagcactataacattacatttcagaatagccatatcaggaaa

SEQ ID NO: 62291 - DNA, 1039 bp, Homo sapiens
gctgtcagtgtgtttttcttcgtacttaatacagcaaagtccaaggtctgccaccttgaaggttacagcctttgttaaactagatttttttgtgcagaatgtcagctggggtgtaataacttttactaacttgagaatgagagaagatgggaggagtggagctcaaatttaacacaaatgccaaagtataattcatctatgttttcttcctctagtactttggaagtgttgctgaaatcatcaggaatcatcaacatagtcctttggttcttattgacagtcagaataacacaaaagattccaccagactgaagtatgcagttaaagtttcataaagggggaaaaaaaagatcaataccattgcttcagacactttcccaaagtttctccttttgagaaaaagtcccaaaacttcatattttggattatgaatcatccagtaataaaatggaagatggagtcagctattgaagtggtcatccatttctttttaagaagctcatgtggacttgttctattgcctgacctgatgaactgttaatatctggtgaggttgagttatcatgctactaatattttccaaataaatatttttatttttaaaaataagtgtaaagtatattatcaaaataagaaaataatgctcttgcataaaacaaagtggctggaaatttaaacctccacaatgatcattggtacactaatgtagctgggctctccactgccaatgcttgacaattaagtcttggttaaaattttaatttgtagaaaataaggtattaaaggtaatgtatgatatctgtaagtataggcaagaaggatgtaatggttcctttttgtgagcactctcaaccatgggatatatatatatatggatatgaactttctataagttcttgtctaggattatgctgttagttttgcttactaaagataattataccctctttgatctacatgtctatcaaatagaacctaaacttgatatgaggtttgtattagtccattatcacgctgctaataaagacatactcaagac

SEQ ID NO: 62292 - DNA, 1986 bp, Homo sapiens
tgtagggtttattgaaaatgtgtgggttaaatgctttcaggtacaccaattctttctactaaattgagctctatttgaagttctttggaatctgtggtgaaaaataattttctgatttccaaatacattaagagcattaaatgaatattaatcacctttaaagtcttttagaaaaggacttgtattggtttttggctgcatagaggggttgaataagtgtatgtatgtgtgtgcgtgtgtgtgtgtcttcttaaagaagatgtaattcacaaatagtttagctccctagcgctcagttgtagaatagaaaatagaacattattcaagttaattgaaaggtgaggtttttatacccccactaatgctgtgtatctgtctttcgtttgttaacattatttgcttaatttctttcaactcacactttggataatactatcaaaaactaaggctaaacattccttgtgtatctttaagcatgcttctcctgaaatttaactacattagtagttgacatttgtatacatatatcctaatacaagagtaggataaggtggaaatgtaatggcctgagggatggtgaagcattcttttagtatttttcatcatgttgggctcctagattgtactggggttgcccataaatcaaaccccatactcttagaattcattatattatggtgatatccgaacctagtgaatggtatgcttgggtgttttccattgagagtggatggacctctttataaagttggttgctgcaaaatccagttcttccaaaagccactttatttagggtttattcacaagtcatatccattttggtacagtgtttgtttcctaatatttattaaccaccttataccaaatgtcttgcaaagaaatgttattaaaaccttgaatttttacaaatgtaaaaaacaaaaagtgtattaatgtatttgttcaggaaaagctacataccgaagggcttttgtatatgaattctgtggtggggagacccatttgtaatctatatggcagttccatctgggttttaagtttagatttcaccgtgtcttagtgcttcattctattggtttattggaacatgtaataaataggagtagtgatgtattaaaacacaagtattcattaatgttttatatcttcactaaaattctatagttatgaaactatcaatcaaggtgttatatttcagtcagaagtgaaaatttatgaagagtatttggaagtgtgtacagaaataaactagacttacaggtaggctagatcagaacgttaacatatgaacctgcagaaatctggtaagacttaaattcagtgtgaggaataactctagttctctcctatgagcatttcctaaaagccatctgatttggcattcttactggagctgcagacagaaatctacaaagacaaaagtaaacaaaattaagttattattccactgttaggaatggaaataaacttgtgaagtctgtttattttgaagtattggtgaactaggcttgctaattgataactgcagcagtttgtgtttactccagttcatcagcttaggtcatttgaaagatataagagcttaaggcaagaaagaaataacatggaattctatttgaaggacaacagaacattcttggaaaagcagctccagttggtttttcaactgtcaaacttgaatgtgtaagtccccacagagcatggacagtcggtgcagagttccaaggaaacaattattgcctgatgaccacttccattttgtatacactctttggttcgtataggccatattccaactggctttttagtaatagaaatccagtatataatgtatcaaatacaattgaggttctaacctagtgtgttaatttatctgaatttggatttttaaaaagtaataaaaagttaaatgtacttcctttggattccttatttctttcctttttgaaacatgaaccaagcataagggataacccattattgaca

SEQ ID NO: 62293 - DNA, 3219 bp, Homo sapiens
aggcatttgtgtgtgcacttaatattactaattaatggaaggttttcttttaagctttcaataatattgggctacatcataaattcctgaggccaatggagatttcttctctgacagttcaataaccaactgcattgtcctaaagagcccttagtaggttggtacaaaagtaattgtaaagctgcaaatacttttgcaccaacctatatttgcaataaagaaccatctagttcattcattcattcaacaaatatttaccaagtatcttatatgccaggcactcttttagacacaggagataaatattttacttaacaaaacaaacatccctgatttctggtgttttaagctctggttgaggctaattgttaaaaaacaacatttcaaaacttctgacccacttacctctctgtcctgtctattcccgcaaatatgtcatccctactaccaactacacagcttctacaacttaaaaataaaaaagaagctgtcagaaaatgcctcttctctagagcttcaactgctattgggacatggttccctgtccttccttaagagaattttcagtcacttctaactatttatctattggattttgggaagatatattgatttttactttaatgacctagaatagtatatcttcaaatcaaagaaggcatgttttttgatttaacaaccttttgccattatcaaattattcttgctttataagagatgtattttaattctgtagttactgattatacaagaaataattgctacttgattagacttggcgtatgatggtcagactcagtgtattatggtatcaggtgatttgcaaagcaaatgatacagttttagtaagttcagagagaatactaacataaggatattttctttaaaaaagaataactttccagagcatagagtatttagtgtttttaaatgatggatactgctctgtatgtatttgtttcaaaacatcttattttatctttgcaggagcgattggttacatgggaacaagtgcctttgtccgaaaaatctatactaatgtgaaaattgactagagacccaagaaaacctggaactttggatcaatttctttttcataggggtggaacttgcacagcaaaaacaaacaaacgcaagaagagatttgggctttaacacactgggtactttgtgggtctctctttcgtcggtggcttaaagtaacatctatttccattgatcctaggttcttcctgactgctttctccaactgttcacagcaaatgcttggattttatgcagtaggcattactacagtacatggctaatcttcccaaaaactagctcattaaagatgaaatagaccagctctcttcagtgaagaggacaaatagtttatttaaagcatttgttccaataaaataaatagagggaaacttggatgctaaaattacatgaataggaatcttcctggcacttagtgtttctatgttattgaaaaatgatgttccagaaagattacttttttcctcttatttttactgccattgtcgacctattgtgggacatttttatatattgaatctgggttcttttttgactttttttttttcccaatccaacagcatccttttttttaaaagagagaattagaaaatattaaatcctgcatgtaatatatctgctgtcatcttagttggaccaacttcccatttatttatcttaaaactatacagttacatcttaattccatccaaagaagatacagtttgaagacagaagtgtactctctacaatgcaatttactgtacagttagaaagcaaagtgttaaatggagaagatacttgtttttattaaacattttgagatttagataaactacattttaactgaatgtctaaagtgattatcttttttccccccaagttagtcttaaatcttttgggtttgaatgaaggttttacataagaaattattaaaaacaaggggggtgggtaataaatgtatataacattaaataatgtaacgtaggtgtagattcccaaatgcatttggatgtacagatcgactacagagtacttttttcttatgatgattggtgtagaaatgtgtgatttgggtgggcttttacatcttgcctaccattgcatgaaacattggggtttcttcaaaatgtgtgtgtcatacttcttttgggaggggggttgttttcttctgtttattttctgagactcctacaggagccaaatttgtaatttagagacacttaattttgttaatcctgtctgggacacttaagtaacatctaaagcattattgctttagaatgttcaaataaaatttcctgaccaaattgttttgtggaaatagatgtgtttgcaatttgaagatatctttctgtccagaaggcaaaattaccgaatgccatttttaaaagtatgctataaactatgctactctcatacaggggacccgtattttaaaatctccagacttgcttacatctagattatccagcacaatcataaagtgaatgacaaaccctttgaatgaaattgtggcacaaaatctgttcaggttggtgtaccgtgtaaagtggggatggggtaaaagtggttaacgtactgttggatcaacaaataaaggttacagttttgtaagagaagtgatttgaatacatttttctggaactattcataatatgaagttttcctagaaccactgagtttctagtttaatagtttgctatgcaaatgaccacctaaaacaatactttatattgttatttttagaaagactcaaaacacctgtatttaaaccttaatatgaaaatcatgcaattaatagttacacaagatgttttcattacaaaatatgtacctatctattgatggactctacatcctatattgtgacatgtaagtcctttaaaaggtgaaaagtatgatttcttaccacttaagtatgattgatatgatccaacaaatttgatcagaagctgtaggtaaatcctcttctgaagccaaaatggtatattaaatataatttattggtacttccattttctcttccttcttacttgcctttaagatcttataaaaaagaaactaaaagttaatatttagttgcctatattatgtaaccttttaactatatataaagtacttttttggtttctttctcaccacttttattcaaaagtacttttaacataccaatacatagtctgtctgatggga

SEQ ID NO: 62294 - DNA, 1106 bp, Homo sapiens
aatcttaaagccttttcccttgctgtcctctgaagacagtgtgaatcttcttcaggcctgcttttcctaattttatacattattgctctaacttatttttctacttattattttattttctatttaataaaatacaaactacattgcttgaattgtgttgtatctacaaaacaatatggatacaaatacggattttttagctattttcatttgttcttttctacattatacttcttgaagcttctgttttattcagtttgtgtagaggtgaatgccctactgaagaatctgtttttcaaagattatccaagaaaatattttttgagagaattctagtggatttaattgatgaagacatggtaagagaagctgttggaagatacttgaaagaaagtcattaagtgagaaaaaaatgagaactaaaatgtgagactcacgaagagcagagtgagctttaagaataaagactggaaacctgtgtctttattgcatttacttaggtatttcatcttcacgtctttctgggcatataagatctattatgtctatggcttcatgatgctggtgctggttatcctgtgcattgtgactgtctgtgtgactattgtgtgcacatattttctactaaatgcagaagattaccggtggtaagtacctatttgtggatagaaatttggggaaccataatattttaaaataagatttcctttgaaatctatcaagtggagtaaagagctgtatagaaatgttgttacttaaaatagcatagggatttttttccagttataaaaatgatacatattttagagaaaaaatatcaaatttttaatgtattaatggagtactgtgttagaaatattttttacaaagtgcttgatatgaaaagagttttatgagaagcattgctccattctaaacacaaggaaacttagatatgaaaaaggaaatggtgtatttatggtcactggtaatagggaatctgacaaaattcaagattgagctttctaattcttagatgttttccttgttgataaatttgaataccatgtctatgcatttgttttttaaataagttttaaaggactttaaaggatgttttattaaat

SEQ ID NO: 62295 - DNA, 1078 bp, Homo sapiens
aaataagaactcataataccttaattgtataatttgtaggaaaaggaattatagaaccaaggagagagtgagcaaagagatggcaaggccacaatttgggaaacattatttcaaatggaggtctctagactcttcgtttctttccctttggctttttgtgaataaatgcctgtagagttctaagaagttatgggagtctagtagaaccagagggaacacttagagactttttgaagttctgccagtgtcagtaatttgtgttcttcatatacttgtctcagtctttaatgcagaaagaatattgattgtaacctatggctaatttgaagtcccacctatgtattgtgcctctttgggttttggcttttcattttactggtttgtttctatcctttagagatgattttttaagtgtcaagtacctgctttctgttatcagtgtttatataacatggaaatcatactagaagtttactattaattttaatattttccaggttcatggagcctgcggttattgtttgcctgggtggaattttaccttttggttcaatctttattgaaatgtaagttttgataatgtatttatgttttgagggatttgattatagtaagacaatttaggagttagggaacatgtaaagttatcagttgggagaacatctaataatctgttaattccatgattccagaaagggaataggctatataaaggtagctgttggctgtgttcttaaatattcaagtgatgtttatacctttttgtattgtattctagacctccctcacctaagaggaaatcttagaaatcaaaactatgtgttaaagaatggtagaccagcctttgatcatatgcatgatttaaggaattcctggtttttattgtattttaaaaatatttctgaggatctagggaactaggtaaaccaatacctactagtccgtctaggccctgacatcttttgatgcatagtcatttcctaggttccttccatagaggcctgcaggagtgctaggaagtgtgtatgtatttagagataagaggtatgccaccttgtgccacttactgtgctttaca

SEQ ID NO: 62296 - DNA, 1714 bp, Homo sapiens
ttctactccattttacagaagttcagagtgaaatgatcttaattagatggttggccggaaaagagctgattttataaagaaaaaaagtcacaaaaataaatgtttctaattggccactttggttctaaaatctccgtatggtcttctctgtaattttagactttgcactactaatgggcaggaaaatatttgtactattttactagtgacacatagatagcgatctccttctattaggattccaaggtagtgtaggatagaaaagagtgtgggctttgaggctggcagatctgagttgaaattttggtctggctctccactagctatgcaattatgggaagttacttatccttctctgagtctcctttccttcatttgcaaaataagaaaataacacatataaagctcttagtgcattttatgagctcaaaaagcatagccagataagtaagttggttataataatgaaagacaatggataaatatattaaaaaagcatgacagctgagagtgaaagaggagaaaaagggattgtggcagagatagtctggaagaataggaaagaatggaaaaccaaattggataagaactagttcaacttgtattcagtttagttctaatactttaaagcacacctttttgttttcattagtgtacttcttgcacaattttagctcatattgaacttaaacattttcttttgtggtcaaattgtgtttaaattgtgtctcttttatttgtttatattaatgttattgttctctgagtaatcacacatttttatttaatttacaggtggccgtttgttgcatctgtttttttgttattcttcctctaaatcttgttggtacaatacttggccgaaatctgtcaggtcagcccaactttccttgtcgtgtcaatgctgtgcctcgtcctataccggagaaaaaatggtaaagagaatgctaaatcttatgcgattgtttcacacaatatataagttcttaaggctgttgtgtacatgtaactttagaattggtatgtatttatgataatgacaatcttaagtttgagcctaagaagttcattttactatttcctttaacctacattgttaagagtaataataaattatacccttattccactttctgaatatcgtgccatttagagttaagtcaaatgcttttctatggtgtagaagtgggtgtgaactaaagctgcagttttactaatctgcaggccaaatctggcctgctccctgtttttatctataaagttttgttggaactcagccatgcccatttgtttacatattctctgtggctgcttttatagtacagcatcagagctggcagatcagtaatgtcagagatactatcacatgcagaacctgaaatatttactatctttccagatattttagtactgtacaatttagtgtacatttattacattccctatttataggaatagttgtatagtaagtagactgcatttttatgataacggagatatatatatataaagtctctgtccctagatattttaccagattataaatacagcatattcaggtgcttatacaaataggtgataattttgctctgtcccttctagacatggaggcatgtagacatttatagaaatggaggatgaataaaatagcccctatagtttgaattggccatattcttttctttccttagattggtgcttatgagagacttta

SEQ ID NO: 62297 - DNA, 1212 bp, Homo sapiens
cgttcttggctcactgccacctctgcctcccaggttcaagtagttctcctgcctcagcctctcgagtaattggaattataggcacctgccatcacacatggctaatttttgtatttttagtagaggcggggttttgccatgttggccaggctggtttcaaactcctgacctcacgtgatctgcccaccttggctttccaaagtgctcggattacaggtgtgagccactgtgcgcggcctaaaaatcattttcagcagcatgagggaaacagggaaagcctcagtgttattccatctaaaataatagtatttaatatagattatactactgttttatttctgtttgcaggcaagattcataagcagttgaatcaagttatgaaacagactattccagtcatttttcttaacagatgaacatcttgttccatattatgggattggtttacagggtcacaaaacagttttagtgtcagcttctagtatttttgccaaataaatatgaaatacttgcttagaatatatcataacatttaactgcaggataaaaaaattaggatcagccaggtatcatgtaaatgcagttttaactacaaattcattcactatagagaatcttttgagttttatttgtagtccaggttgtgatatttttgtatttctgttaaagttatctttgaaattaaactaatgctaatataatagactatgatgttttctttaaattgttggttttaattttttttttcttttttgcctttttaggaggggatcaatgctcagtacagccatatttgtctatgctgctacgtctccagtgaatggttattttggaggaagtctgtatgctagacaaggaggtaacttacgaattctcacttcatgttgttaattatagatgctaatattttactatgagattttttttgtttgttttgagagagtctcactccatcacccaggctggagtgcagtggtgcaatctctgctcactgcagtctccacctcctgggttcaagcgattctcgtgcctcagcctcctgagtagcttggaattacaggtgtgtgccaccatgcccagctaattttgtgtttttagtagagatgagatttcaccatgttagccaggctgctgtgaactcctgacctcaagtgattcggcctcccaaagtgtctggcctactgtgagatatttggaatttaaaatgtgcag

SEQ ID NO: 62298 - DNA, 1067 bp, Homo sapiens
ttctttaatataacctttctaattcatttaccgcatgagctttaaaataacccaaatctaaacttcagagttctggcgagtagttcatattttcgggcataatgtatttcagataagctggaccctaaatataagaaaacatttcacatctaccaagaagttgtgctttacattaaacactggattaagttaatcactatcgaattgacactagctgtactgtcacagtcttaagagccactagaagataatctcttctagaatccaagtttttgctgcttccttttcaaaatgttagtgttacaattcggcagctctttttttttttttttttttaaaatgcagaagctcttctacttaaagaccttcaacttttataaataagaaaccactcactaatgtataatattagcaggcaagtcatgcattgttattttagcctataattactgtaagtggtttttctgtgttgtgtttatttgaagtgaatgtaattcattacttatgtaagtactaaagcattaaggatttattattatataaaagtggccaacttattgagatttcactttaggtgtttcatgcacatttgatcccttaatcttcacatcaaccctatgaaggaaatattctatttccattctacagaccaggacactaaagctcagagaaataatctgactgagatcaatgagcaccctttactagtaaagagtgttagtgagctgggattggaacctaggcaatcttattccagaactcttttcttaatttgctatgttacggaaatgaaaatagagaaaataataatacaaagtggtgagaaaatgaaaaatttgcacacaaaattgggataagtcacttgaataggaatgattctaaaggataaagagcagataatgtaaagtaaaaattactttgcctctgtggtcactatagcaatcagaggaaaagtattttgagggtataaggtagaggatcagtatcagtgtgggtgcctgttatagtgtgatattgagaaggcatagagtttgagaaggtgaggagtaagcttgttagtgctgctg

SEQ ID NO: 62299 - DNA, 1067 bp, Homo sapiens
tagtactggttttgatactcttctctttcatttctccacctagcccctgattgtatatgagctacagctatgatgtgaatagcaagaatagtgtctgaaagtggcattaagagagtcagtgcactgttctcccaatttgaccatttctttttgttactaaaccttttctttttccgttatttgagattctctgagcacaaccagaagtcaacttcctgaacctcagcattttaacattgttattaaggcagtgatcattctaagtttggaatatactttctcaatattttgtatttctttagctataaatttggagggaggaaacttacaactgtaatttttacatactatgttttagtttgattctgaatgatttgcttttctctctctatatatatatttgtatataggatagagacctaggagatgaatatggatggaaacaggtgcatggagatgtatttagaccatcaagtcacccactgatattttcctctctgattggttctggatgtcagatatttgctgtgtctctcatcgttattattgttgcaatgatagaagatttatatactgagtaagtgcctacacttaactgtattatgtctttattgttcttaaatagttttaatcactggaatcttttaagtcaatcataattaaatcgttacttatttcctttatcttacagtttatgataaatatcataaatgcagacagacaaattaaataatgaacagtaatctgtatttttctgttacatgccaaaacttagtagcattactgaacattgtggttagttataaaggttatatgttccattaaagatatgaacagaggttactttcaatccagagctgtttgacaaagtaaatagccttttttttcctaaagttgaagatccaattagagcttcatcagaagttcaagaatttcagttactaagttacttcatatttaccttcagatctggaaaacatcagagtagaagaaaacattgtaaataatagtaaaaagagtgatgaaatagtcacataaggttagaaaaataattgatgacttctttg

SEQ ID NO: 62300 - DNA, 1049 bp, Homo sapiens
gaaaagatagttctggggcctcagggggctcatgtccatgtccatcgaatcttccatggggtggcagcacgcatttaggtgggaaagaaggcagacggagataaatgacttctgctcaagagaacagccacgcaggacagaattacaccaggcagatgtacagattcttattttaattgatttagacacttgtgatatgagcttatactaattcagttcatatcacatttatcaggtcataatatgtaagtcaacaaaagtaaacagtccttgagaactgaaatcacccctctgaggaaagttgttaagttttgtcaataaacagaaaagttgattagttttatcataatcgtttccacttctcatgttgtaagtaactttcctccatttctctagtgaattttaattctaagtgtgtgtaaatctatattttgctcagagttttgtcatcagattattaatttgtttactggcctttattttcaaatgaaaaaattttttttaggtaaaatggaaaaagtcagatgtgaaatttgaagatcgatttgacaaatatcttgatccgtccttttttcaacatcgggtaggtaaatagtgtattttaagacattgattatgtgcaccaattcgttcaacaaacattgagtatctgtcatttgcagggcactgtgttgaggactgtggattaaaagatttagctaatggtgatttaaagtatgagcttgaaatcataagggtgatggggagttttagaggagcaatcaaaaacttccttctttgtgcttgtggtttaaaccaattaagagataaacgaagaatataacatacgggaagccaaaatatcactaataaggtgaatattagatggctgcgttgcacaatgaatagcgcattggccttctaatgaggtgaatattggagaatgtggcttatatctatctgtgatcaagtgggcttcttactactgaaactcagaattagacttaacacactcagagagtatattataggcttccctacatgggcacttgcccttatacaacttacgg

SEQ ID NO: 62301 - DNA, 1050 bp, Homo sapiens
gggtagatcataggttattagagaaagtactagactagggatctggaaaccttgattttaattttggtttgaccactaatagctgggtaaccttggcagatggtgatgtaagcacttctctgaaattttgagatgttagggagtggtattagtccattctaacaccactataaagaagtacctaagactatgtaatttaaaaagaaaagaggtttaattggctcacggttctgcaggctatattggaagcatagcggcatctgcttggcttctggggagacctcaggaaacttacaatcatggcagaaggtgaagggagagtcaagagtggccagggagggagagagggcggaggtaaaaaaaaaaaaaaaaaaaacttaatgagcatttagcttgtaggatattttaaatattaagtggttttaccttgtataaagtgttttttcttttgtaggtattgttggtgaggctgatgaaaatggagaagattactatctttggacctataaaaaacttgaaataggttttaatggaaatcgaattgttgatgttaatctaactagtgaaggaaaggtgaaactggttccaaatactaaaatccagatgtcatattcagtaagtattcaaatagtttaatgtaggaagtagtgtttgtgacccgatgtcaacaatttgtggctttgaactttagtaaatgaaaatgtagcttgaaatgggatgcaacagaatattattaaaactatattttctcagtgtacgtaagtaagcctcctgaaagcaaagagaggatttgcttcaggtctgtagtattagataccagttatgcctttgcaggagctaaaccatttggtacagccaagtttactgttgtagctgggtaattagactaacccagtcatgtatttttatggttacatttttagattgcagtacttcatgttgtttccctttcctttttaatgttgcagatagaagtgatgctgtattgaaagttgctggatagatgtagtttatcatggattgctctgtcagttggaataatatactcct

SEQ ID NO: 62302 - DNA, 1836 bp, Homo sapiens
gtaagaaggtatttccctgacattcttccatgggactttaatgtttactgccatctttggtgttgtagttttggggtacccactttaggttggtctataatatgggaagctactctctctcttaaggattggggagacatactgctgggtatcttgagttataaattagattgctatttctttgagccactaaatgatgtagctacaatttatgtttaagaacttttgatcaataaaaagtttaataatgtatctttagagaaattgcatttcatgtttcaaataaccaatattatagtacaaatatagtatagaacttaaaaacaaacttgtgcttgcttttttgttcttgttcagaatgatttcttaatttttttctaattgcttaatataccaaaacaacttcttttgattgacatgtttagtatttgtaggttttttggattttcttttgttttattagaaacaggtacatttttgaaatactaggtttattaagttagaaaccatctgaatagaattatagtagcagtatctttgaaagcagtcggggtggaaaatgactcatcttgaggggactttaaggcaatttataaacagtgatgtttgctgaatagaggtttgccttttaatcttcctgcttatgaatagtcactgggtgttttcatagaatctgtggcttccagtaacttgtctttccaagaatgttaaaatcagtgtttatctcagagagatcttatagctacaaatggttatctctgtttatgaccatattcttgagcttttgtatatattaaataaaaactttgttatgtgtttaagctttttttgtttttaaaatcaatttattttgaagttactttataaattttcttgtataatttgctttgtataagggatgatttcacttaggtaatgtttgaaaataaagatgattaaaattttttcattataaaaagtcttaaagatacacaaaaaaagggaggaatagtacactgaacccacacttatttatcactcagattcagctattgtgaatagaaattttaactgtaggaaatgttggcttttttcttgtcttttttttttttaatgtaactattttgcaaactagtgggctaatttgcaatttttattttgtgcagatgatgtgatgccagccacttactgtgaaattgatttagataaagaaaagagagatgcatttgtatatgccataaaaaatcattactggtaccagatgtacatagatgatttaccaatatggggtaagtattgtatgttgtatttaagatttgggaaaatttgcataatcagaatttataaaatgactctgttaaggtgattgtgtactggatcatggtgtaaatgtgttttcactgttttttacagaatgattttaataccagttttatggtcacctgttgcttgaagaatttttgacattgccatgccttacatgaaacttgcctaaaatataacttttttatagtataacttttcagattcaagaatgagaaggtgcttagaacaatctaaaaatttcttctgcttccattttttttcatatcttaatttgttcttttaaatacagttaaagggactaataggattttgaagtttcattctgtctttttctcatgttggtactgtggtagtatggtttcttggtatgatagtttcttgaatggcttattttgctaaaaaatgtttatgtttttgcccttatttatccatattaatggagaagagctatggaatagttaatgccaatttatgaataatccaaaatcatttatgttggacttgattaaattatttataatgcaaagcaca

SEQ ID NO: 62303 - DNA, 2180 bp, Homo sapiens
tgacaggcctcccacttgtaccttggaactactcaaagtcattactgaccacacttcagatttagccatgtataatattcactgatatgtagttccataattacttattcaaagaaatatgcatatagtgcatgtctttcaggctgctaacaagatagaatgttggcttgaatggacttgtggaggttctatagcagtcttcttccttgtcctctgtagtactttgaccagtggctgtgtgaaagtctcgcaaggagatgaaattttatttatgcttgctggcaacattaggtttttttttttttttaattgattaacatgaggttctggataaacttgattttgtttcctccttccttgtccatgttagcatggtgaatcatgctggttgcaggtttgccactatttgatagtgtaaatgtaaataatagacacactcttatgagctattgggcttagttcaaacactgtcttctataaaacaagtttggaaaaggtgtatctgcctgagactacaatcagaggatataattttaaaattcacaaagtttcatttttaagatgtggacattcatcatcagattaagcttccagtatttattttatagcttcctgaacagagatgatgcacttttgtttagaacacacaacaaatattcccttaatttgaattagtgtgttttttttttttaattcttgtttgcttttcttgtttcagtatcaagataaagaggaagttgtcttatggatgaatactgttgggccctaccataatcgtcaagaaacatataagtacttttcacttccattctgtgtggggtcaaaaaaaagtatcagtcattaccatgaaactctgggagaagcacttcaaggggttgaattggaatttagtggtctggatattaaatttaaaggtaagtaaaccttaatagtccttacaatgcaatttggattgtagacaagggtttcatattttggcactattgacactggtgttggataattctttgttgtatggagctgttatgtacatgttaggatgtctagcagagtccctggcctgtaccccccagatgccagtagcaccttccagttgtgaaaaccaaaaaagtcaccagacattgctaattgctgtcagttgagaaccactactttagactctaaaatgtgttttagtctgtaaatgaggtgtattgcatttaggaaagtatattagtaattaacaaagatttcctttgaatatttataagataataaaatagataattgttaataaaattgtatttccttaacatatttccttctgaaaagtgttgtctagtaaaccccctattgattagacacatgtggcccgggaagaccttcatggatatttaacaaagtaatttctggaggtctgaggctgtaatgggatgcgtggatacttaaaattcttgtgtgacgcctcaaattcaaacttgtaccataggcttaacatgtattatttatcagtgttgtattaatttatcctgttaatacctataggatatttaaattttaagtcaaagacttgttaaatttggggaaaatacttcatcgtatctagttattatgcaggtatccatttatcaggtcctttgagtgtgtttatacttttcatttttctctgtgaagtttgtcagagagtgtatttcctgcacaggcatttttagcatggtgaacagaagcttgagtaattgaatttttgcaggatctttgattaggtgtcttggtttttgaatacatcatggatcctgtaaacaggagctttggattttaatcctccttttttttttttttggtactgtattcattttagtaaaattgtttactgcagttttgacttcattgtctccatgtgtaagatgaatagtaactgacttctggtatttttagtactaaagatgttattatttagtactttgaggagaagaatgtcagtgagattttaaagataatgttactttaatttcgatttgttaaattttattcttgtttttaaaattgctcagttattgttgaaaataggtataccgtatctatttacattctcccccctccccatccccccgtttatagtctttggggcttaattataaaattaagttgtaaatttaaaccacagtggcatggcctgtaattttatgaatcactgtaaacat

SEQ ID NO: 62304 - DNA, 1084 bp, Homo sapiens
attcctaggcctttcttgtaactttctcctcaccttccagcccctaagtgagacccccatcccgatagtctctaactaaggcagcttctgacagtaaagggtcttgacgtttcccagtcttcaggtcagggccagaaacagtcccttttgcatttggcctaaaggtgattggcagtttgtttaattggtattctcacatcaaaacgtgcatgtgaacgactcttcaaatggctttcacttagggctgtaactgtggttttcagagtggtagacttgagcaaggcaggaaggtcaggtaaattgagagtttgcttgacgagtaattgttttttatacctttaccattaatgataggagtttctatgagagactgtgtttgtactaaatcagaacgatctgagggagtcttatgtcatttctggtaagtgaggaaatgaagcagtcgtccttacctatttaatggatccgattttatttgtaatcaacaaaacttttcgctggatccttggctagctgggatcttattttagctaataaaagctctaaacttttgactgttctaccttcggtcacagccagaaacttcttacctgtgtaggtatgtatttctttagagacacaaatctcgaattggtgacatgtttttgtactgtacttgtggtgtttcacctaagataattttgttgggaggttaaacagcttaaaacgatttccttttgtgttctttcatcagataagctgtctcaaagtttaagaactgctattgtttcacatagtatacagggaccatgtatagatttgggtctttgagtatttttaaattttcagtgggcatccatccttctgtttaatgatattattactaatatatttccaattaaaaaaacacttaggaaaagttaccatatgaaactcagaactctcaatgtgtagttccgtgatacaggcatataagctcaaaagtgtactgtattctactttttaatcttgtaatcttgtgacttacactgctgtgattagggaaaccattaaaattttacaaattgggtgtatataaaggctttagaataatttacaaattaaa

SEQ ID NO: 62305 - DNA, 1048 bp, Homo sapiens
aacggtgattacaggagcccgtgattcattcacagcggcagacgagcgccaggaaagggttatttgatctgatccctcaagttccggaggcagcaggtcagacgatcggccccatttggcagccaggaaaaaagcttaagcattttggccaaggttacacaacccgaaacaccgggacgcggcccggaggcggcttcggccttgcggtccaggctaggccactgcgccggggcccagcctgctcggcgcccgcccgagtgctcggcaggcccgtagcgccgcggctcccaggagccgaggggcagccggcgcgcaggcggcggttgccgggccctccctcggcccggcggcggtggcggccccgcgtcgcgaggcacttccggcgcgtgccggggtggccggatgacgtggctgagtcagaggaagaggctgaggaggcgcggggggcgggggaggctcaggagcgggcggtgacggcgacggcggcggcagaggaggcagcggctgggccgggccccgtgcgtctgtccgcgccccgtggatgcgaatcggccgcggcggaggcggcggcggcggaggaggcggcggcgggaggaggagtcggtgagccggctccgggccggaggggcgcggaggatgaggccgctgcctggcgctcttggcgtggcggcggccgccgcgctgtggctgctgctgctgctgctgccccggacccgggcggacgagcacgaacacacggtgaggcgccccggccggcgcggccgccccgggctagctccccagttgcccactgaggcaggccccacgcagcctggagtgcccggcggcccggtggtgccccactgcggcccgaggactccttccggttgggcctggcggagcaggaaccttgggagcgtggaggaggcatttccgtgcgctcccgggacagggctccgctcccgagtgacagggtctccttcccccggtctgggcctcagtggcgccgcaccccagggtctcggggttcctgggaccctggggccaggaaggagcctgggaagggttg

SEQ ID NO: 62306 - DNA, 1322 bp, Homo sapiens
gacctggcacggtggctcacacctgtaatcccagcactttgaggggctgaggcgggaggattgtttgagctcagggttcaagaccagcctgggcaacatggtgaaacactctctctattaaaaaaaaaaaaagagctttcccaagcggctgccgaagatggcggaggtgcaggtcctggtgcttgatggtcgaggccatctcctgggccgcctggcggccatcgtggctaaacaggtactgctgggccggaaggtggtggttgtacgctgtgaaggcatcaacatttctggcaatttctacagaaacaagttgaagtacctggctttcctccgcaagcggatgaacaccaacccttcccgagtcccctaccacttccgggcccccagccgcatcttctggcggaccgtgcgaggtatgctgccccacaagaccaagcgaggccaggccgctctggaccgtctcaaggtgtttgacggcatcccaccgccctacgacaagaaaaagcggatggtggttcctgctgccctcaaggtcgtgcgtctgaagcctacaagaaagtttgcctatctggggcgcctggctcacgaggttggctggaagtaccaggcagtgacagccaccctggaggagaagaggaaagagaaagccaagatccactaccggaagaagaaacagctcatgaggctacggaaacaggccgagaagaacgtggagaagaaaattgacaaatacacagaggtcctcaagacccacggactcctggtctgagcccaataaagactgttaattcctaaaaaaaaaaaaaaaaaaaaaaaaaagaaaaaggaaaaaaaagagcacgagggaactagagactaatggaaacattctatgtcttggctatagtggttattacatgtaatacaaatttgtgacaattagtcaaagtgtatactttaagtgaatgaattgcattttatgcaaaatattcctcaaaaatgattaaaaatagaatacataagcaagaatattaagaaaaatgtggaaagtaaacaaaatcaggtggttttgattttctagctattttaatttgctataatttacattaaaactgtgcaataggccaggggcggtggctcacacctagtaaccccagcactttgggagtccgaggcaggcggatcacgagttcaggagatcgagaccatcctggccaacatggtgaaaccccgtctctactaaaaatacaaaaaattagccaggcgtggtggtggacgcctgtagtcccacctattcgggaggctgaggcaggagaatggtgtgaacctgggaggcggagttt

SEQ ID NO: 62307 - DNA, 1831 bp, Homo sapiens
ttaacttggggtggttggaaaacacattgattatttactcatcttagagttacacgttgttcatttatttgaaactgaaacgtatttcctccaaacaccgtagaaacttaaaggccgcaaaagactcacacccaccacctagcggcgaaaaaaggaagtttcaggtgatacaagatgtcctgccatcacacctgaaggatggttgtccacagccattttttaaaatctcgtattagtcctcttccttcaacactcaggacagtattatgtacccagaaactcaatacttcctggcgtcttcatttgacaatactcttaagccaatgaaatcctgtgggacgtttgcgaattttataaagatcaatgttttaagattggcggggtgggctgggagtggtgggggggaaggtgccttcctacccttgcatttgcatctcaagccacccgtacccgaggcccacccagtccatctgttcattggtagatacaccattccgccattccgccagtggctggtgcagagaaccaggaccaccacctttgaaaagacctaaatcaatactccaatgggatcctgatgtcaagtatttaacgactttgctttacctactacagtaattaaaattaagtcttcaaacttaaatttaaatttctaaaagcaggaatgcactgtccttaatcttaaacaccaaaggtgggagaaagaggccagaatcctagggtactaggcctactggtatagggcgatctcttctgcttttttctttccaccccatttcttttccctttctcctttcgtttcccatcttctctcttctcgttctcttcgaagtaacagtgacaaaattaaggtgattcaattattccaagaggcttgctcatataaaatatttctcttcaagccctttcctgaaatcccaaattaaagcatttccaatagtctctgctttaagtattcctagttaagtctacttttggaaatattaaatattctcactttggcacaatattccaaaattccttgagaagttcgcctacgatcagtcttgctagtagaaacctttttttttttttatttaaaacgctcgatttccactttttactaggtttcccaatgttggcgatgtctcccaatgacttaataacgtgtatccacttcacctttgaaaatcttagaggtcagtgcatccaccggcatccgggaatttattcttatttctgcttcttaaacaggctctggggaggagcagtttcgacggagaagttcatagcagcagttattacggaacttgcaacagttggtgccgggcgataggcaggttggaagtgataaatggggctggcgtaaaaaacaaaaagccccggggagggcgggggcagccgtggccttgggggacagtgcgaaggcggcgcggggccagcgggactgacttccggctgtgggaaggcgccgtcccgggcggccagaggcggcggcagccgcgtagaaggacggcgggatcgcagcccggcgggcggcgcgcggggcgggtgagcgggcccaggccgcccccgggccacgccggggccacggtgaggtgaggccggccctgcccccgcaccgcccccggcaggaggcgcgacgcccgggccgcgggtgcgtgcgcggccccgggcgacgcggctgggcgtgcgcggggccgcggcggaggctgggccgggcgggcggcagaagatggcgagggtgtgtaggcggcagcaatgctccgttgagagacgcggctttcggcaagaactggattcgtggcgccacaagctcattcactgtgtaggtgagaccctccgccgaccg

SEQ ID NO: 62308 - DNA, 3268 bp, Homo sapiens
cccacgcccagtcctcggggaggcccagaattccagccccttctcccccaggggaatattcttgggaaccaggtctttcccggcagaatctaggagagtctatccgttcgcttgggcccctcattccctccttcccgacagggtttcgttggaaggaattatgcaaatcctgctttctggtgtccattcagcggcaatttcatgcggtgagaagttctctttgttgtgcgagggggagaacagacactgatttaatagacatatctgttggggggaagggtggagggggtgtggagaggctcagtttggaagaattacagcacttggttagctcagtgtctttgtgtttgagccttctggcttgacaggagggtctgccctttacaatgtcccacaagggatgttttcgataatagattaaaaagcaaaattgaaactttaaacaagtgaaaaatcaggtaacctttacttaaagaatatacgcctttccatttctacagggtttcattacgaaaatgtatagcgtgagtttcgttaaggatttagactgtaacaccgaaattaatataggcaacaatgctttaaggtatctgataccagtttggttgtccaaaggttaaaagtgcattttcaaacatatgcttgtgcaaataataaaggcatgagtcagttttttggtataattcgtctcatgaatatattttaaaattcccctcctgccaatccaagaccagtgctgccctccaggaaacaaacagccttttgcctatcagttatcctgtactctgctctatctctgcttgttttattctttcaaagtattattatgcatgtactaaaatgttacgtcggtttaagtactttttgaattacttggtatttcggactatcatagaagagagcatatagcaggttttgagaagcatgaaattaatgcgttttcagaattgtgggttagtatcaaatgctggaattgttttgaagaatttttagttcttgtatgttttacatttgttagtgattggttttttcagcagggctttttagtctttgaaagatttttaaatttataatgtagtcctgtcctgtagattttctgagttccatgttgctttaatttagatggttttaattagtgtatcttattctaattctctttgcatttaatcctgggctcctgcctcaggaccccattttttcagtcattgctagttagtggttagttactgctgcttgacaagatgtgtttttgtttttgtttttgttgttgttttttctttattgagacggagtttcactcttttgcccgggctggagtgcagtggcgccatctcggctcactgcaacctccgcctcccaggttcaagcggttcttctgcgtcagcctcccgagtagctgggactacaggcgtgcgccaccacgcccagctaatttttgtacttttggtagagacggggtttcaccatattggccaggctggtctcgaactcctgacctcatgatccgcccgcctcggcttcccaaagtgctgaaatttacaggcgtgagagccactgtgcccggccgtgtttttggtttttaaaattatgactgataaattatttctgtaaatatctgaatggaatatcaacattttgattcattttttgaaggcaaattttaatctggtgatcaaatttcttaaagcatacttttaactccaaatttccactttaaagatagtaaagttcagaagattatagagtccagagtgcagagcaatattttaatctgagcagtaacatatattcatagtctctcaactaaaatcagtggggcctcatattttctcttttattatatgtaattttgttttttaagaggagagttctaagtaaattaattgtagtgttaagaactttctatatttaaaaggactggcagtgatccttaggcaattcaaaaggtaacttgtttacttccagatgtaataattttttagtgggattggttctaaacggtcaacctgtttgtttctcttgactgattatcttaatactttagggtcatttggtttctggaaggtatttaatttacagcagtttggattaaaaattaattctcatttctaaaatcgaattctcccttctattagtacttttttggagggtgtgggggcaggtggtggtggtgatgttgctgattaaatgattaggttcagttgaattggagttagtcctgggttcagacagtgattatgatcaagatggatgatatttggttaccaggtgattattaaggagtcctctgagactaggatgatcagtttagattccaggaagatctaggctctctctgcgcctgatatgatgtaaccttttgctttcctgcaccttgcccttgctgtattttcaagaagctcttcctaatgtggggaaagttgtggtgatttcagcttagctctagcttggctaaaaataggacagcagatgagtctctttgactttcagaaagttatttcagattgccctaatttcctgaaatgttcttgtagctggagcaattctaggaagtatttgaacaatgccattttttagtcttatggtgctacacaggggggcctggaatttcttacatagtgagaattggttatttgatgccacttttatttttatttagagttttttttagagacagggtttggctatgttgtccaggctggtctcaaactcctcctgtctcagcctcccaaagtcacttgcctgatagaacttgccacttcagagtacctgcctgatcatttagctgtttgtattgatgctgtttttaggatgaagggcagttaggtgtttacttcatttaaacaagcatctgttttttaccaggcactgtgggcaaacaaagtctgggaaagttgcctcaaccttcaggaacttttaaaccttagagaaaatgtaatgtaatcgatcagttattgtacaaggcatagtgtgtcatatgatggtgcaagcaaatgctaggggtgtttagaagtgaaatctctcccgagttgatggacgatttcgtgaagaaggtggtggatttttgcttcgttctgatggaaaaggcattccattcatgagaaatggcatgagcaaaagtggagaaggacagcaatgacttgtcaatttaaactgcagttcatgattagtgtaagggatatacacatgataggtttgcaaaggtaggttgtaggattttctaatgcaggttagaaagtggagactttttgttaggcaacttgcagtt

SEQ ID NO: 62309 - DNA, 1020 bp, Homo sapiens
gctgcggcacctggcctgatgtgtctctttctgtatagtaccagccaaactgagtggatagaaggacattggccaggcctgggtcatgtggcccatccctgagccagtcagtatggccagtggagtgtggttctctgacttgaccagggacaagtgcccgcttttggagaggggcttaagatcagccttcacttaagggcttgaaggagaagagtggttcttcaaatgaaaattggatgctgttatctaacagaaatggatataggttaggcaaaaattgataaatattctaaccatgaatctagatctaattttgaagaaattgactgacttgggccatgtggtgggttgaattgtgtcccccaaaaagatacaatgaagtcttaacctccagtgcctgtgaattttagcttatttatacataaggtctttgcagttaaaattaagatgaagtcatactatattagggtggcccctaatccaacaagtgataactccagaagaagggggaaatgaggatacagacacggaagatggaggcagggattagagttacactgccacaagccaaggaatgccaaggattgccaaggattgctggcaaccaccggaagctaggaagaaacaaggaaggattcttttctagagcctttggagggagcatggccatgccaataccttggtttctgacttctagcctctagaatcgcaatgttgttttcagccagttacccagtttgtggtagtgtgttccagcagtcctagaaagctaatacagactatatttggcacatgctgaaatttaattttgggtaagtccatcgttttgaaataaaatgctgaccataagttttcccggtggatatcttcagaaaatgtgatgttactttgtggttggttatatttatggaactttacattttagtctatagttacagtttagctgaacctgtgttcctagttgatggacagctaaacatttcttagtgtgtcctactcagcagtcatgtgtgaaaacta

SEQ ID NO: 62310 - DNA, 1051 bp, Homo sapiens
attgttagtgctgtggaaacgtgaagtgtgtggattgggatagcatgatcaggtttttctgaggttgacctttttcaagaaagcatagactggtgttgtgcagtctttaaactgctttaaaggagtttagaaaagttgctcaaattttgcccaaaggcttggtcttgtatttaccttaggcgtttgctaaaatactttttctctagtaagtttaagttgatatttttggtttgatttagtatgttctacagaatgctagttgccttctttcatgatgctatcttttgtctctaacctgcctattttgtcttttgtttttggcactttattctttctgtatcagttagcattatgtttactgaatgttggaggaactgttctgagcttgttggtaggaatgtcactttgtatgtttacattctgatgtgaaacacctgtccctgagcagttatgtttctacagctaatgatgccattaaatattaacttggcagtagtttatgaaccttatcgcctaatttcttaaggtccaatatcttagaaactccggaagcacatcataaaatacacaacagagattaaaggttataagaataaatgtgcccaactaagaagggaccaataggtagaagaatgaggataggaaataatgacacagaggacagtccaacattctgagagccaagttgaaaaggaagtagatactcaagtaatgactcatagatggtaatccaaaatgttctctgtcaaataaaggtgtattgactttcagttgatttttcaaacaaggaaaaatccttatttgctttggggacagtctttgtttagatggtgtggttggattgtatttttattcactgagccaaatgttctgtgaacatctttactagctaccaagcactatatggggatatggtgatgtgcaaagcagactctgttcctgctcgcatggcacttagaatataatgggaaaaacagggacatcagttacacaaggaaccagataaaagctctgaaaagagacgttgttctctgcatgtatgtatggtcat

SEQ ID NO: 62311 - DNA, 1054 bp, Homo sapiens
aactaaattacaaccataataaaatctcccaaagtccgtaggcactgacatattacagccttgccaaatcagaatagatttctcatgtgttgtcaatttaccagacacaaagagtagctcagatctcatagactcttcagatcttgtagactaatttcaagtctttttaaagttttgaaaaacatgtgctatttggaattacgtcatcctcgaatattaaacctgagctcaaaaacctattgtttgatattggaaatagttaactccagttttcttctattaagataaaattctttcatcatgtctgtgccctctaaaataatactcctattgctttgtcttccccttctcccctcctagtccttctttagtcattctatttagaatcaagtcgctcatgagtttaagaattagagcagcaagaaattgagctagagatgtacaaaagctttggacaatagtagttttgcttgtcctcattcttattagaagtgctgttaatttactgataaattctaggacggaagacaaatctttgcaactggtactatatcagtcggtaattatttgttttccttagaccatattgagctcccgaagtacagaacaatgagtagatgtgaaccaagatgctgggattttttaagtttcaaatatgtgtgtgtatatataagagacagaatcttgctctgttgtccaggcaggagtgcagtggtatgatcatagctcactgcagccttgaactctcaggctcaagagatcctcctgccttagcctctcaagtagctaggcttacaggcatgtgccacacctggcttttttttttttttcctcttgtagagacaaggtttccctgtgttgcccaggctagtctcaaactcctggccactagtgatcctcctgcgttggcctcctgagatgctgggattacagtgtgagccaccactcccaggctcaatttttttttttcctaaagaatcagagtaggaaaaagtcactttatttagacctttacttttttctttttttgaatcagggtctcactctgtcgccc

SEQ ID NO: 62312 - DNA, 1027 bp, Homo sapiens
gttgcagatatgagcaaaagaggagtgacttgtttacagttgctattttgagcaaaattagttgtgattaaatctttgtgtttataaccagattttttttgtttgcttttgttctttgtcattgctttttcatctgtgactcaaatttttgttagtattattgatcttctgcccaattttcttatgtcagattctgttcttctttaaaatttttatctcccaaagctttcatttgcatttttctttcctggcattatttcttgctatatttacttttttccttttcaagaatttacgctcagcccgaaaatttggaatttgttacaattttatataaacccaggtgaaagaatattagatttgctcttcaggataagacctacttaataatttcctttagctatttgcgttgtgtatttgatgcttgcaaggtgttgaaatactttattatttgtgaaatcagattttcttttgggagggcaggtaggggggctttaagaattggagataggctgtgggatttatttatttttttaagtcagatcgttctgaaaatatctgatctccagggccaaaataggcagtatctagcattttcttctcttctcttatcactacctccccacccccacagccctaccccaaccctttttcctccctagtgtggaagagaggggaccatagcaatttagtggaatatattttaattttagtaggtaaataatagacatagatacctcccatttgtttgagtgggtagtttgattttgttaatgtccttggaataatcttgatgggaattaaagagagttgaaaaacaattgctccctaacaataaataaaaaatctggaatctaggatatatcatatagtatagaaaaaccagctctctaattacagtgtaaataacacaaactagagattactgaaaattatggcttaataccaaggcaaagaaatcccttacattaccatcttcttcttcttatagccagataaacaaaatgccattttcagaggccatcat

SEQ ID NO: 62313 - DNA, 1060 bp, Homo sapiens
agaactggaagaaaacaccatctttttttttttatgcaaagattattcaatactagaatgaatattattgtggtaatggattttgtttttatcctttcagggtttgaaagtattcttgaagggctgtttggacctgcattattaaaagatctcagtttatttaaaggtattcaaaatatttttggtatttcaaattcttcctggtgccatacatgatacgttggtgttttaagcctcagtctcctttttattcacggtttcatgtgggttaaagctatattcatgtaagcatctttttgtgtttagttgatattgttaatatatgtatgaataatgtattaactagtgagcagttaagacttaagaatttaagagttaaaatttttaagacaaatatggcctaactacttagttttttgttaaacaatatttttgaaattaattctaatttattttcctaaaaattctcttttatgactattaatttgttactatttttgcagactgtgaacctgaaagcatttctgattggacttttgatgaaaactgtttattctgttgcttgagaagagataaagtaaaggtaactaagaagcctgtgaaacttttatttagtgtagtattttaaagttttcatcttttaaaacattgtgttactttgttggaggatttgtaggaaaaggaaggtatggtttcatacttagttatgaaagagtttgatagtaatcctgggttttgcaatttaagttatttccatcctgttgattagcctattaagaaacctatatcctaccatgcatttattgttgttattttgtttttttgcttttttgttttttttttattttgagacggagtctctctgtgatgcccaggctggagtgaaatggcacgatctctgctcactgcagccgccgcctcctgggttcaagcgattctcctgcctcagtcccgagcagctgggattacaggcacctgccaccacaccagctaatttttgtatttgtagtagagatagggttttatcatattgggcaggctggtcttgaactcctaacct

SEQ ID NO: 62314 - DNA, 1073 bp, Homo sapiens
tgaaaaataaaaagaagaaacagttactaatttttttttcaggttaggatgaggaagagagccattctatgcttggtagttgtatatagtatattcttgtaatatgattgagagttttcctttgctgtatgagggtaaaatattgtatgaattttttttaagagacagggtatcactgtgttgcccaggctggacttaagtgatcctgcttcttcaaccttccaagtagctaggactacaggtacatgccaccatacccagcttgtgtgaatatttttagaagaaaatacagatagagaaagtcatgaaatggtgaagcacttaaaacaactgttttactgtttgtagttctacagtttttagttggttttctaaatagaaataatttttccatttgacagctcagctggttctgggaaagctatttttctccgttagatactatatcctgtctttggcatttattattttcggagacagtcatacatctgtaatggaaaatagtaaaagagaaagcctatatcatgtgaattgtcagatttacagtatttctttagttgtgttagacttaaagtgtttatattggaactctttgcagtcacttggagcatcttgtccgagaaggactagagtctggaaattaagtattttttttgttttgttttttggaaatgtattatatccgttggactgaggcttgcattttaaggctggcttaagattctaaaatagaaagaactatctggagaatatggtaatagccaataggtggcagcatagagcatggtactggatcttgagtttgagattggcatggtgagataatctaggtagtatttggaaaagcacttagaaatattgacctgatatttgggaagcagcagctatgcatacttttagctagttggattttcagtaaatactaactctgtagaatggataaagcaaatacattatttatatttacctttaaaaacacgtaggtgaaaaatacgaagtagcctctttgggaagtagaacagggattcacctagagattagtaaaaatttttgaactgcacttcaggatcgcg

SEQ ID NO: 62315 - DNA, 1057 bp, Homo sapiens
tatctttttccttgaaacttttgtaggcttgttttacatttctttcaaaatacagaaaagttcttcagtcatggagtcttgaggcttatcaatccttcatagaggcattcaggtttattctttattcacaaagcataattaccatcagccagaaccttcaggaaagttcccttcatgttcctttctagtgaggagtctttacttttaagaaattctaaatggatttatacttcttagttacacttttcctccatttccaagatggtggttactgtgatgggttctaaaaaagtttcatacaaactcttgataatcttaaatattcttacttaatcttcagcagactcagtgattccattttctttaataattcttcatatgttctagtttacacctctcattcctctggaaattccctccttccctttgacattggttaaaagtctgataagtgctggttctgttgggtttctttacagttggacactagctgggcttctgcttaatgtgatcagtatttccaaaaggcggtgtgaagtgtagtgtcatataaaattaagaaatgcagagattattttctgtggcactttttttcccattttcttccattagatccctaggcagaattaaattgtttagtacatccttaattctctgtaaacacccactagcacctcctgacctaaatctcccagctgagtctcctatgtcttattatccctgcacattgctcagaattctaaaattatgttcaaaataatcattttcttagttttatgaacatctgattgttaaaagcaaatttaagtataaacaacttatagagcagttctatcagtttgcttaccaaataaaatatctttacagctcctctcctgaaggatgtacacagagtcattgatctgttgtgttgttatagcaagcttcattatctgaaaagaggacttcctctccctaatttacatggaggaaccacttttcatccactctttgcttaggggacattaataaagtcaatcataagactcctacagaaaaattctgtcgtacttttctg

SEQ ID NO: 62316 - DNA, 1087 bp, Homo sapiens
ctttggtaatgggttcacaaacggagagcgcgcttagtaaaaaattaagggctattcttccaaaacaaagtagaaaaagcatgttagatgctggacccgattcttggggctcagatgctgagcagtctacctctggacagccatatcccacatcggatcaagaaggagaccctggctccaagcagcctcggaagaaaagagggcgttacagacagtacaacagtgagatactggaggaagcaatctcagtggttatgagtggaaaaatgagtgtttccaaagctcagagtatttatgggattccccacagtacactggagtacaaagtaaaggagaggctgggcactttgaaaaaccctccaaagaaaaagatgaaattaatgaggtcggaggggccagatgtttctgtaaagattgaattagatccccagggagaggcagcacaaagtgcaaatgaatcaaaaaacgagtaggaatactgtagagtgccaattactgtacaaactgggtgagcactactgcatcattgttcagctatcattgcttgcacgtaatttcatttactgtgacacttgcttctttgcagattttgcattgacttgtgtgtacagagatgaaatgtgcattctgaatgttgcatattttaaatttttcatgtgcagtatggctcggaatatgtttggccttttgcatgtttctctacaaaagagaattgagttacctcacagagaacagatacatggaagtggactccttgcctgtagagcctgcatgcttttttgtttttttttgttgttgttgttttttcttaagttatatttgtttttactttttaaaaaagaagaggaaacaaagcccccttttagaaactacgtctgtcatactgggagctttatcactgcaaattggaaagccatcttatacaaaattattcacatttttcatctacgattcaactaatcgaaggattaaactaaagaaaaaactaagaagaacaatgaacctttgactttgagaaatttggttattcactgacataattattgggtcatttatagttacattttataattttcttctcactatt

SEQ ID NO: 62317 - DNA, 1069 bp, Homo sapiens
tgtttagcacacagttcaggacctttgagatcatgtttgtataagcactccttgaagaatatctaagctttttctgagatgggcttttaaaattataataagggaagtttattttctgcggtttttgcaagaataagcaaagcccatggaatttaatttttcattgtgatcagattaaaattactatttgtgcaaaacaaattccacaccacatgtactgtatattctaatctgctgagaaaggtggtcaggcccttctaaatgcttaaccaaaaacaaacattattggagtttcagtgtaaaataaaattaaaattggagggttggttagattgatttcagatggatactaacagtttgaggggaggtccagatatttccaaggcataaattcttgcctggaaactttggagcaattaattaaattaggttaagttttccctcagcaacctgtgtgttcaaaggttaggcacaccattgctgttactaaaatacatgcactgctcattcttgacatagcttgggtgtgggttcctcttgttttggttattttgtgtagcagtttaatcagtggataactgagcctgtttcctcttagctttctagacttcttaacagaaaaaacagtttgggttcaatagcattttatgattctacaatattttgtcacctagctggaagttgcaataaaaattccttatgaaatatatggttttcatctgtaattgaaggaaatcatagaaagtttgctgaaagcaaagggctaagcttatgaaggaatgcctcctttgttacacactcaagaatttgtcagcacacaattaattgcagccatagtacctttttgcgtaatgtttgggatattcagtagcccaggattgctacaaaaaggtcctttgagaaaattaatttgtgcttgcttttatcccctctcagaaagacatcactaaaggcccattaaaaatctggccctaaaagttcaacttttgtagagtttattgttcagagaggtttaatcctatgtggtagtctatataagtgatgtatgagttgagttatgtaaattttg

SEQ ID NO: 62318 - DNA, 3007 bp, Homo sapiens
gataggaaataatgtatttaaaataattttttgcattttcagagaccttgatgttatagggtagataagctatggcactataaaatcaaaaacactaattctgtggaaggatatctagttggtatttttatctttagctttctcatttctgagacagcatagtcatccagcttgatggtaatgtagtatattactttgttcagtgggcttataagtgactctgaattatgtttgtgatgagctatacactttttttctgttccccaaataccatgaaggacaaggtcactctttcaggaaaaataatttatatttgtgtataatactttttaatattaagtttgttgttctgaagtttagatgttgcttgataaacctttgctgcagcagatcatgaatatgagtaaggctttgtgtgataataggggtccttatgtgaagttaattactgttcagttctggtgagcaagctcaacaagtgtgaagtgtgtattagctttatttggtacacttttactttacaatatcgaagtgcttttagaactctggttatcttatataaaccattacctcaaccaattggcatttcttttccccaacatttaccttagctataatatgagctatgtgggatcagatggtaaaactataaaaggcacaatgagaagtttagttcccaagttttggagagaactctaaattagactaaaaacaactacctgttaacaccaatatcataactaccttctgtcgttaggcagtacatagcaacctttgagctgctagtgagctatctgttctccccctacccccaagtaagcacacagtgccaggcctggttctaagcctttgtgattctcttacatctcattgacccataatagtgaagcatggattcatttattttcataagacaaattgagtcagctcgatgtcagaagttgaaaatattttgagtagtttaacagttatatgagagattggcatcattttctttaacagcttttatctttgtagatttccttttgagacatgtatttttgcttttataatcctttcattaaatgccagaggttgttttcatattaatcactcttttctgtatattcaggttgctgtcattggtgatagaatatggcaatagacagaattgtgctccactttatgttttttaggagatattgaaagttataggttaaattttggccttcttgaagatatcaaagattgttttccttgttacctttaattagaatttggtcttcattaatgctttggtcaggctagcattactaaaaacttgatggcttcagcagaacagcccgtttaggagactattaagctatctagggattttttttcaaattaattgctttcaaaatctgaaaaggaaaaaagtataattgtggtacaaagaagacagatctccaggctctttcttctcagtttattttggtttaattctgtactggagacttgaataggatttgtgaacatggtgatggaaagaaaaatagaggacattatttgtgtaccctcattcctgaataatcttgcagtcaccttttaaagaagcagacattagccctgtaacacaacactgtagctataaactctaagtgttaggaaggagattggggtggggagggtggagtaggatggaaaaagcatgtagacttctgagaagaggctaaaaattctgccctataatactaaaaatgagtcacaagataatgtggtgaagttaggccatcttgatttgatagaaaaatcttttacattgtttaaaaatgagaatcgaggctaattaatgttgatttgacaatagaacatgagctaattctgcaaccgtttggggggtaattttatggtttccagttcatttagagctgtatcaagaaaagctaaaaagcaagcacttttagttaatcatagatttattggatatagcaaatattattataatatttaatctctattatttgaatgtggaaatgaactcttttaccccatcttgaactgtcattgaacatgctcaagatgatcaacactggaaatgaccctacacacataccaaaaaaatctaaagcagtaagacatatttgaagatccatacctcttaaactttttagatttgtcttgggaaagaatttatgaacctgtaaccagtattagtgcagtcttgggttccttgttctgcataattgcaccctttctcaggtatgtcctgacaacataaattttaaaataatctcattagagattagattctcagtggatagtgtgtaaggggactaggggtggggggttgggggtagttggacacaggacactgacacagtagagcagggatttttaacagtcaatagccaaatagaatttcaatctagaatatttttaccccctcagaatgagtgaaacaacttctattatttggtgtacccggtgctacactcctaaaagtcttttttttttttcatccaggtgacgttttttatttttcctgcttggtggtggaaggttatatagtaaacttcactgtcattaagaaagcgcttgtccaaaatgtttaaagtactagaaaagggataattcagcactttttctgttacaacactaaagtcttaatttatcttcagagtcttaggtactgtaagtttttggatgattatttaaaaatataaaacatactacataatatggggtcagatcacatttatataaataattcttattttaaaaaagacaataacattttgtacctttctagcaattccaagtgattgcctcattttctcttgttaagcatttcaagcttaagaatttggaatttgagagaaggtgagggggaaaattccctaaaataaaaatttgtttcaaaccattttagaaaaataaatcactaggaaaataggtagggattctctccccctttaagtcttcagggaatgagcagtatttagaatctttggctgaaattcaagcctttttactttgtaaattttta

SEQ ID NO: 62319 - DNA, 1029 bp, Homo sapiens
gtttatcagtagtgattctgccaaagttggtgttgtaacatgagtatgtaaaatgtcaaaaaaattagcagaggtctaggtctgcatatcagcagacagttttgtccgtgtattttgtagccttgaagttctcagtgacaagttttttctgatgcgaagttctaattccagtgttttagtcctttgcatctttaatgttaagacttgcctctttaaaattgcttttgttttctgcagtactatctgtggttaacaaaatagattatttctctgctttaatatttgatatcttacatctaaaataaattctctccacatataaaacccatagcctttggagatatggaaaatggtatctttcagatttctagaagttcaagtgtcatacaacaaaacaggaaccccctttactcttatggacctcatttcaatatactgtttacagtttgatggaattgtataatttaatatttctcttgtactgtagtttatatttatttacagatttttttgtactgtgtgatttgaactttttgttccttgctatgatcaatgtttatgtagtagagcacttatgatcacaaattaagttttttggtttgattgcactacattaaattttttaatgcagttctgatttttgactggactaaaactgtgtcttaatgtatgtgatgagtacttaaaattttaatccatgtggtccccccccttttttttttttttgcattgtatgtcaaaagcgcttgttctttcgtgcatgtgtaagatttaatggttccattgtattatttgaccatgacattttggagaaacattcccagctgtaatgttgtgtatggtagttctcactggatgctagagttttcaaaaccactattcttctaataaattttgttgtgaaaaactgtttttaaagcttggtttctacttcctaagattttaatgctttttgaaaaattcaaaaaatgggtaaaagttggattgtactccaactgtaaatacacatggtacaaagtgattttttta

SEQ ID NO: 62320 - DNA, 1060 bp, Homo sapiens
ctcatcaagcagttattggtagttagagagtaaatacctaaattcatcactcctaaattctagactctcagacttgtcacttcacctccatgccaaatctcttctccacttgatctttaactctaagataacataagcattgcccacccaccagtattaaccacaggaatgctttccatcagaaattaaatgttgtgttattgacttggtaggcaagttaagctgtgtctaacctatgatgtagataaatattgagtaaatcattaaagatggggttatgaaacaacaatcattcttaaactgtagcttttaaagggtttatgaatattatcttatccttttaccacacccttaacaattgggcatggaactgaagataggaagacagtggtcaaggtcatgcacaccgtttctcaccaaggagataaactgaaaactaatttaagtattggaaatccagttttttcttttcctttatgagaagtgggagtacttcctcccattaaccaatccctaggatcttactgtgctttagtggtggttttcaggtatttctgattaacgaataattcacttgactattacagagtcctcttgatgagcagaagcagcatgaactagcatgagctcaagtcatttcaacatctgttatgaattactgttcttataaagaccttatttagtcagatgtgaaggacatcgtatgatacagactataatctgcaccgaactaaaacagtgcttcctggaccttaggccaagttgaggaaatggtttgcagaacagaaaattgcctctctctggtttccctactagctgcccaacaatattctaagttaatgcaagtgctatatttagggtttgttacaaatctaaggtctcggaaaaattgaataactagaagcaaaagtaaagacaagctgtttaaaacaggaaaaactggctaacacctattttttaacataaaaaaatagtaatagaattaaatatcaggaagttgagattcatttttaaaatattcaaatgataaagtgaaattcatctaaatttaggtgctatt

SEQ ID NO: 62321 - DNA, 2453 bp, Homo sapiens
attccagcccctagacatacagtagatgtgcagcttcccagagaagacaaccctgaagaacctagcaaggaaatcacctctcacgaggaaggaggtggagacgtttcacctcgaaaagaacctcaagagcctgaggtttgccccacaaagattaagccgaacctgagcagctcccctaggtcagaggaaacgacagcctccagcctggtgtggcctctccctgctcaccttcctgaagaggacctgccagaaggtggctccacagtctcagctcccacagcaagtgggatgtcttctcctgaacacaaccaaccaccagttgcactgttggatacggaggagatgagtgtaccccaggactgtcacctccttccctccactgaaagcttttccgggggagtcagtgaagatgtcatttctaggcctcattctcctcctgaaatagtcagtagagaagaaagtcctcagtgctcagaaaatcagagttccccaatgggcttggagccccccatgagtctgggaaaggctgaggacaaccaaagcatcagtgctgaggttgagtctggagacacccaggagctaaatgtcgacccactcttgaaggaaagcagcacttttactgatgaaaaccccagtgaaactgaggaaagtgaggcagcaggtggtataggaaaattagagggagaggacggtgatgtaaaatgcctgtcagaaaaagacacgtatgatacaagcattgactcactcgaagagaatttggacaagaagaaaaaaggtaaaaaattccctgaggcctctgataggtgcctaagaagtcaactttcggattcttcctctgctgacagatgcctaagaaatcagagttcagattcttcctcagcttgtcttgaaatcaaagttcctaaaaatcctagtgcaaaacgttcaaaaaaagaagggcaccctggtgggacaacacctaagggccttctacctgacagtttccacacggaaactctggaggacacagaaaagccaagtgtcaatgaacgcccctctgagaaagatgctgagcaggagggcgaaggcggggggatcatcaccaggcagactttgaaaaacatgctggacaaagaagtcaaggagttacgaggagagattttccccagcagggaccccataaccacagctggacagccactgcctggagagagattggaaatctatgttcagtctaaaatggatgagaagaatgctcatatcccctcagaaagtattgcttgtaagagggacccagaacaggcaaaagaagagccagggcatattcccacacagcatgtggaggaggctgtgaatgaggtagacaacgaaaacacccagcagaaagatgatgagagtgatgccccatgcagctctcttgggttgtcgagtagtggaagtggtgatgctgctagggcaccaaaatcggtgccaaggcctaaaagattgacctcttcaacctacaacctaagacacgctcattctctgggctccttggatgcttcaaaagtgacttcagaaaaggaagctgcacaagtaaaccccataatgccaaaggaaaatggagcttcagagagtggagaccccctagatgaggacgatgttgacaccgtggtagatgaacagccaaagtttatggaatggtgtgctgaggaggagaaccaagagctcatcgccaacttcaatgcccagtacatgaaagttcagaagggctggatccagttggagaaagaaggacagccaacaccaagagcaaggaacaaatcagataaactgaaagagatttggaaaagcaagaaaaggtcacggaaatgtaggagttcattggagagtcagaagtgttctcctgttcagatgctctttatgacaaactttaaattatctaatgtttgtaaatggttcttagagacaactgaaacccggtctctagtcattgtgaagaagctcaatactcgccttccaggagacgttccccctgtcaagcatcctcttcagaaatacgctccttccagcctatatcccagttcactacaggctgagcgcttgaaaaagcacttgaagaaatttcctggagctacccctgctaagaataattggaaaatgcagaagctctgggccaaatttcgagagaatcctgatcaagtggagccagaagatggcagtgatgtcagccccggccctaattctgaagacagcatagaggaagtcaaggaagatagaaacagtcatcctccagcaaacctgcccactccagccagtacccggattcttagaaaatattccaatattcgaggaaagctcagagcccagcaacgtttaatcaagaatgagaaaatggaatgcccagatgctctggctgtggaaagtaagccaagtcgtaagagcgtatgcatcaaccctctgatgtcccccaagcttgccctgcaagtggatgc

SEQ ID NO: 62322 - DNA, 1443 bp, Homo sapiens
cctacacccagagctgatgttcagctgtatgctccaatgtgaatgtacttgttggagtagacgttcattctgattgattaacaccatcctagtagttaaatgcttgtagtatcactcctgccatgtcatgtcaggctctattccgtgtctcagaagtgagagccacaatgttttaatgactttgtttgcctttcccaggtgaagcctgagacaggcgcattggcttcaacctagtgcctgtgaccttgctccattattatagtgcagcgtgtacttgacttttccattgggccgctctacaaaaaaaggcttggttgttgaagcctcagtcagcttccttaaccggttctgtcaccaaaatcagcttgtatggacagctgctgccctgtcctttttatttgaaaattttccatttaggttgtttcagatctctttagataagcccagatggacttttttcatgcaaatcatgataatacaggccttctacccattctgttaaaggtttgctgtatatcatgggaacttctgatgattggataagactggagaaaagtatttgatttgtgagaaatttagaattgtgttgaatttcatagctagagaagcttgctgtcttatgaagccctgattttttttcatgtcttctctatctgatgagtctttttctttttagtatctttgactttggccattcaagagctacctacattaataaaactgctgagtgtgtatgttggcaaccctttctcagcattaagttgcacagaggcattaatgtgttttgaataggttcatttaatcttaaaaaatggttttaaggttttaaaaatgtcttttcatatagttgtcactggatattgtgtttgtggtgacttaaacagctgatgtttgccaatgtcaggcatgctgattcctgtacagaagaggtgccccgttggctgcataccgactaccttgtaaggtgcttggattaggttagggagaggtgtaaggtagtaagtgggtggaacttttccagttccaagtttgtaattcattccattccttttctaagttctttttcatttttaaaagctcagttaaagataatagccttctttcccattctaggctgtgtgtgagaaaaggtgttaatgtgtatgtatgtattttatatacctaacaatgcaatggatcatctttaaaatcaacttatactttataataaggacatttaaatagaccaagagtctacataattatgacacttaaaagtttagaattttttatatttgttgaatctcatttttgctgattcagttaattttgttaatagaagaaagaaaacagcaaaacttgagggctaatcctgcaaggccctttgatacctacagcaggtactggcaaagcagtttcccagatacctccaagctcaggtgtggtattgactcaagtctgcta

SEQ ID NO: 62323 - DNA, 1063 bp, Homo sapiens
cccatcttctatcctacgagactccctgctatagatggacatgcaggagaccactccctcacttggggtcctgagcctcacccctagcacttcctcagacaggtaacaatcttgcagcacagcaggaaggttgtgaacctttattctgctcctgaggcttccttcataggaatgctgtcagtttctgtaagtcaccagtcactagccccttggattccttgttaaagacttctgtgcagccttatctaaaatgataatcttaggctgtgagtctcctgctgtattgttcctaaaatcgtatggatagaagaggtgcccttagtcatccctttacatatgtggtgctttctaatgggatctctatgcatcacatactatgcaggtgaatttctcactgttcagataggtcatcagtaaaaggcatcacttcaagataattactttgaattgaggtttggcctcttttcctgctttgtaatgggttcggtcatgagggtgggagctgtcattcacatttatgggcagcattcctgttgattagtggacctaagagccaagtaggaaaatatagcatgctatgtgatacaagctggagatgctgtagtgttactatcagcaagttctgtgcagactgcctttcggattccagatgatctgtcaagggtctgccaactgtgggctggtcgcttgtttgtgtaaataaaatgtgtttggaatatagccacacccattttcttaagttctgtctgcggctgctttcgcactgcaagagcagagttgagtagctgcggcagagacccgtgtggcccttacagcctaagatactatctggaccttcagaaaacatctgctgatccctgcttgagaaagtcatccttttcaggaacaaatattcttgattttccttctctcttctgcccttttctctctgttcttctttacttctcattttccttgtctccattttttcttttcaaaggagacatgttatatcgatatgcactactatccccttaaacttgagcaaccttagcattccatcttcttaaaaaaaaccatcaca

SEQ ID NO: 62324 - DNA, 1921 bp, Homo sapiens
aatagaattctggcctgaggctccccaagtcttattaccttgtatgaaaaatccccatattagcctcacttaatctcaatagaagcctgctgtttaccctcagggaacaagtagttttcaaaattgagctcctccaaggtcattggccaatgctgtgtgcaggcattggtcatctttgtaaactcatggcattatttcctcatatgcattatgatactaagaaattcaaccccaacctgtatgaaaagcacagcccagggccctaattgaggctagcatgaatgcctttgaggggccagggggccataggaggcccatgcaatttaactgaagctcaggtgccacgttggatttttattcttattaggccgcaacctttctgaatgagtttagggcaggggctgctgatccggctgtggattcagggagctctaaaatgaatctctaccgttcctttaaaggtctttctggttcctcccagtgttgtcattgctgaggtcgatctcgtagttgttcagttgtgctctttttgctgtcttgtgagtcttagccagtgatccagctgcccaaggacagggcctccagagggcctagcgccctcctggtaccaagcgtgtgctcctggcctgtgtgacagtgtctttcccgaagcagtgaaatgagaaattctgcaagtggccacccggaagatcagtctgtagctcttgggcctggatttctactatgttagtgagtgtaggaatatactgtgtctttaatggatgaaaattcaatgtatgctgtgaatttgttggtttgaaacattgaaatttttcattagacaatgtttacatacctcacctgaagaacctttgagagtgtatatataaaattttaaaatatattaagttgctttaaaacaatatgtatagctataaaagttggagttattttaactttgaatatgtaccaagtctcttaaatattgaaatcttgtagacttcttgtgcttctgtgttttgctttcctatcaggccatgtaggaaactgtgttcttgttattggtagaggggccctcactgaaatccaagcttggaaggatgtcctgtgttgtttcagattctcttgtttggttttgaaggatgcggtgtggagccagaggatgtgtgggaggggtttctctaacactgacttctattccatgagctttttcaaggcgcttattttatggcagcgtattaaacttctttgatattcaagtgtgtctgtgtagtcactgaagagggcacagaacgccttgaagccgggcattcaacttgcagcctaaggcaaaattgatgagttgccagaaggaaccacaaagcaatacttccaccaagtgtcagggcttagagaaaccttgtttgctaatgtaagtaataaatcattttgtgagttctgcctaacttcagggaaaagaaaaggcaatggaggaatccttgagattcccatggcagggttggaaaggtgccagcatttcatcctgaggggcagggagcaatggagggcaaactcctgacctcaggctagccactgggaagtgtgcaggccacaggccagggctgccccagctctcaatgcccttgttggagtatggcagaaaaagtccttcgatttgctagcctcatgagtttttcattatattctttcaactctgcttgaagtgggtcagcgtaagggcccacaagcggctcatctgactgtgccatcactgtgcagaaccacatccagcaaaaataaccccacagctgactgccaggccacccctctgaatctgaagttggaagattacctcattccagattagttgttttcattgttaagatagacctcttttcctccagtagtcatcctgtagtggagtaatgaaaatactgacccaagaggtgcagactggctgcct

SEQ ID NO: 62325 - DNA, 1045 bp, Homo sapiens
ccacgtaatgtgaatatgtatagattttgtggcagaaatgtgaataagtctgattacggggctgcctcagctcctaccagcaggttgtataatatgcattgtctgaccttacgaaaatctaaaaagtgttgaattccaaaacctatctggtcccaggaggtttgggtaaaagttgttggtctgtattttcatcatggttgttattggcatatgtgaaaatgtttgttacttgaagactgctttatgaaggttacgcagttttaaaataatgcttccaactgcagttgtgcaaacgtagtctcatttctgggacctccccattccaccagtcaggccagcaaggggtggtcagggcagagcttcctggggcttgtggctgagggacccaagcctagggactcagatggagtcccccaggagccccctgtctagctggagcagcctgaggcccatgacaggaagcaagagcccaggattgttgaggcctggttccacggtaaatgggcccacaagagcctccatccaaatggtagacggacgctgtactcctgtgggggctcccaggggtggggcttggcaggcagaccaatcagcagtggcagattgggcagcatgcgccctccttggagggtggaataaggcaggactgcacgttgtccagcctggagctgctagcacagcccctcaatcacgaagggcaagcattgtgcttagctccggacccggggttgtggcacacagtggagcgttgagtgcgtgttctctcaactgcctgtcctggtggaaagatggaactgacatgttcagctgtgcctggcattacctggaacccaagatatatatccagtatatagtcattaaatggatgaataagtggtggcttagctactgtaacatttttcagactgtaactccagactcattagtagactgtgatcaattggatataaagggagccccagcccctgtttaatattaatgtcaagattaacattaaaagatgaaacaaagtatcagacagcaacatgccatcttatataataag

SEQ ID NO: 62326 - DNA, 1037 bp, Homo sapiens
agacaggacctagatctaaacctagatactagcattttgtgggattgtctagaatttggggaagatttgggttcctaagatgcacaagcgttttacaccagtggtgattaactcaactaaaacccactgtaggaagttagcttccccagacagctaatgccgagatcttctaccagcgtagagttgacagaagcaggccagcgaggaggtgtgggacataatagcctgagtgcttgggttaccatggagactggagtgtgtgaggccacagcctgtgctaaagagccatggagccctcccctggccatgtctggggacagatagaacctgttgggggaaatattccctcaccccagggttctttctgcagagcaagggttgcctttgtcctatccctgagcttgctcaacaagagaaacaaggtttcttaagtgttttggttaaagttttcattcttatttgactatgtatatgtaattgtaaagaaacgatcctatgcattgtctttcttttatattcttgtaatattctgaaattaaaattgttttgtttcatatccagaggatttgactggtctattcacattttgactgttgatgttgaagagagagtttttctcttgttctgaggaaagtgaagcctctagaaaggctcctctttggcttgtttttaggtgggtgggtgggttcaggaggagcggggcttttggctgataagaagtatgatttggagcctctgggatcctgagcttcctaatttcccatggctgagtctagaatgcttcacatagatttcagtttctcacataatttttatttcttcatttaaaaacaaggagtgatggttacaataacaggaaaacctagatgaagttttcatctgaggcaggaaggtgtgtttagacagctcatgttgaaatgttcctgctgctgtcttggtgggcttgggctgctttaacagaacaccatagactaggtggcttctcaacatcaaaaatgtgcttcttacagttctgcagtctggggagtccaagagca

SEQ ID NO: 62327 - DNA, 1776 bp, Homo sapiens
gaggaagttaggatcagaaagaagaagcaagcagcaacctctgcagggctgacaggatttaaaggagagaatgttcttatttggaagcagctgtggcttgtcaccaatgttcaaggagtgttactgttccgccctctctttgtcagaagggacacaggtggtaatttggagatggggccagagcttctggcttttggatttggtgtgttcacttgtgttggatagagcagtggcatggctttgacctagtatgaactggtgtctgcccagagagcagcatgtagcaggggggaatgctcaggtttgtgcctggctctgtggagctgtacaacccttctcaccctgtgggttggagccgagtcaggccactatggggaagcagttgccccacaaaatgtggtttgctgacctatttctaaactgttgaatatgctgcaccattgctgaaatgaaagatgactctgggggagcagagcttggccttgtgcccagctggcagccccctctgccagcctttctgctgcttttgctgctgtaacagcaatagtggagaaaaatgtaaaatttggtcttccagcttaatgcagtgtgaacaatagatggttaggaaaacaaaactgcttagaagcccctttctctagagcagttttatgtcatttgtaaaaacacatattagcaaattcgtttgcgtaggtttctattaaatatttgactttttttttcttattaagaaaatgaaatcccttacaccagatatcagttaattcaaacagaaaaccctttgggtatcaccaaattgaaatggtattcttccttaactcttccttctttcctttatttgtttagacgtgcttcatcccgaagtggtgctatggtctgttaaacagggctggcatcaggtagagggagcagagtggtgacctgatagctcctgtcatcgtgttagtttttgattctatttaagggaagtagctgagatttagacggatgtagatgctctttgggtgaatggaatcataagcaaaggttgtgttctggggtgaggatcatgagagagatatttatcacatgcacatgcctttatatagctggtctccttgggtggtttatgtgtgttttgtttatttattgaatatgttttcccttgctttaggggttttataggtcatttttcttaatagaagctgtgatcgacttagaatccaaatttgaggagtaagcagcataaccttctaccttgtaatatgtaactattctaatccagtggaatcttacggaaaacacagagaaaaccccttttatcatttgccacagaaggctgctgtctcccttctgatttggtgggcaggtattgtttttgagccagtatttaacagagttttttaatctataagattttttttgaatctatttcattgtgtttgtttttcatgttggaacaatctctctggaagtgcctcttcttgtggcttttacaacttcatttctttctggggtcacctgtgatgggctttgatgtggtgtcaatttggggccttgtgtttgtgccagagggatacacatattaaactgcaggccaccttcctggtccagactgtactgtgtgaaccccactgactaaattagtgagaaccataggcgttggaatttctcaccttttacaatgatagacttttgcattgggaccaatgaatctggtgtgaaaaaccctgctgtagtagtgaaagagcatcaggagatactgactgtacctgagggccaaaacaggagcaggta

SEQ ID NO: 62328 - DNA, 2413 bp, Homo sapiens
ttgaccttgtcatctgtggacttcctaaatggtctaataaagttcccggtattgttgatgcaatcttttgtgtaggtacatatgtgtatttttctgggggagagaatatatggttctaattagattctcaaaaatgttagtagttcagagaagtcgagataatgaatgaccctcaattggatcaggcaatggcattttcactttactctctcctggtcacttcctctatctggaaatgccttcctggtgttatgatgctacattattctcgttcttcttcctctttaattcttttccttatctgcagtggcttactgttgtttgcctattccactacatctttatttttttcaatgctctatcttaagttctgctcttaagttctgttcgtttctgcacctgcttctcctgcctctttgcagcttggtctccttccactgctcagctctgctctctgtatgataactacttccagcctggcaatgccaggtctgaactctcttcagacattggcagtctccaagcccacagatccaggtgcctgccatgtatttcttttatacaacaatgaatatacaacctcagattttttgatagtgatgtttataataaaagtaacatattctttgaagaagataatgtaattttattactgtgatcaacaacataatccaaaaagactattatttagtacaggatttctcaaccttggcacactactgacatgttggttcagataatgctttgttgtaggagctgccatgtgcactgtatgatgagcagccttcctggcctttaccccatcgatgctgggagcatccttcccccagttgtgataagtaaaagtgcttctagacattgccaaatgtcccatggtgggtgaggaggcaaagtcatctccacatgagaaccactgatttagcacctacttattatggccattattttcagtagtcaaaatcttacccattcttcaaagtctagcctaaatctcacctcctctttgaaactttctctggctaacacagccaaatataatactttttcctttgaacttattaatgctacaaaaatattgacacttagtatgatttactgtatttacttcacatattgtcttatctctgtaactagtttttcttctagaagacaaaggtcagacttagtgtatttgtggccttctgtctcctgttcttctcatcttccgaaaaatgacagtgccttgtgctgagtcggcttttagtaaacattgagtgttgagaggggcggtggtggtaggagcatgagttctgcattcagctgggcttgggttccattcccagttttgctgcttaatagcttatatattagtcctcgggcaaatgaactatgtaggctgcagattcttactctgtaaaatggtaggagtagtacctcatatactggttattgtgaggataaataatgtacataaataacttagagcagcacaaaatatgtacttactgttagctgttacggccattaagatgatttaatgaacgagattatatcaggcagatgtttatttggtagagtcacacattcttaattaaactcattagccttcagtttggagaaaatattaagtgtagaccctgtagcttttgagtgggatgtttgcaaaaagaaatatttaagaacatgtctaacgctcttgtttttccttcaacctaggatttctctgaaggatccagagttgtctcctatggtccatgcagaattttctgtttagtgggcaggtgttattcctgcccacagcaaagcttggacttgcagcttgcttgctgcattttgaattgtcaaagccaactaataccgtgacccgactgatacctctaaccccactcactggatgatgtttgcaagctgtgccttctgagagagtgcttaggccctgtctctcttttttaatattatggggaaaccactaactatccaaccagcttatacagcacactaaggtgggcttcagtgctcactcaatgtgtttaggcagattccacttttgaaaaaaaatatgaaatgtgtgctcaactgccagtaattttttaaaaagcactgtcccagtggattgatgttgtttttaatggatattttgggtttttctctgttttgatagtattgggtatttggttgtttttgtttgtttatttctttgttttaaaagccatgtttttggttgggctctaagctagatatctttccctctttttcactttgagctttgggaaaactctttatcttatgaggctgtattcctcaatacctaatttgtgtccaaagaatttatagcttttctggacattttttattatttcttgggtgtgacatcagagtatttgacctgcagtattgaaaaaggagaattcagaatgatacagtattttaacaa

SEQ ID NO: 62329 - DNA, 1010 bp, Homo sapiens
attgactcattcaacaaacaaacacattttgaattcaagaatgatatcactagtcacaagcagatgagtagtacagtacagtagctccttaaacaagtgctggaggaagcaattagttcttactggaagattccacaggtgacatttgagccaggcctcctaggctctatattacctgtggggtggtggttcaagatatcctaggcatgcctacttcattaagccagcagtaaatcagttaagattaatgagatataaatacatcagtctcagaaaaactcttcacattgaaattgaacaaataattcatttgttagtaaagtctgtctataggaatggcattagaacattgaaaccactgtacaattttcttattacagttattttctggctctccagctgtcacgatgacaccaacaagattgaagtggtctgaagggaagaaagaggggaaaaaaggtactaattgtacttactctctgttcttactaaatgtaattcctttctgcatctagtcagtagcatttgtttgaattcccaggatagtacatttgtagtcagaagtgacataaaaattacaaggccaggtccttgcccttgagttcattcaccagatggttattgaaccatttactcagcattgtcttgggtgctaagggtagagctgtgaacacagacccacatggtccctgtgttcttggacagacaggacacatgggggaaaataccttaagaatacttgcgaagcaaattaaaaacaagtgtaaatgaatttgtgaaaccaagttcaacagtgctgggagtatgcttatggaatagttaggttccttttctgtgtaggccagccctaattagtgaagctttctagatcaacagctcgtgcctaaggatcctggaagtcatatcatacagcatattttgggggctatttaggacaaagaggactatttaatgctgggactgctgattgtcccaggctcttctggtaaaagcctgctgtgccttcctct

SEQ ID NO: 62330 - DNA, 1100 bp, Homo sapiens
gggaatctcttaggaatttgacacattagagttctaattcctggagcaatgcagagactctggattcattctgggctgggaaaacagtttacaagagccacaaacatccacagatgtatgtagcccctccaaacgaagtctgggataaacaagaagaggtctttagggagatttggcttttttaaagtttatttttcaagctattcctgaccattgattgggttaaattcagattgtctatccatacctcaggaggttgaatgactcccaggaggactaccttttagtttggaagatctccaaatgctcagggacattcagatatgtctcctcaggaggtcaataggttctaaactaccctggtgaaaaaaggcaaaaacttacttgaaaggctttgtgaagggtcttttaagtgtaaagtagtctttagaccatttattttaataataatctttctgcttcctttttgcctgtcctctgctttgttttatgctaaacagacttgcgagtagagggtttgtttagagtaccgggtaatagtgtccgacagcagattttaagggatgctctcaataatggaactgacattgacttggaatcaggggaatttcactcaaatgatgttgccactttgctgaagatgtttctaggagagttgccggagcctctgctgacacataaacacttcaatgcacacctcaaaatcgctggtgagtataggaagtaagaaggagatgtaaatacatttctttcaatttagtaaagttcctaggaaatttctgttgcttgtgacccacagaaatacttctattaatattggttaagatttcgtgatgttgctggacttctctgggtactcataggtattggctagttaagtttaattttaattgaatggctttcttgataaataagctttgtattgagataaggagctggtagtaagatgtcgtctgagttttatttatttttgaatctctgatagatcctcgagtagtgtgtagaacattttagttggagacatgatctcactctgtcacttaggctggagtgcagtggtgcaaccttggctcactgcagccttgctctcccgggctcag

SEQ ID NO: 62331 - DNA, 1021 bp, Homo sapiens
agatggggtctcactatgttgcccaggctggtctcaaactcctggcctcaagcagtcctcccacctcagcctcccaaagcgctgggattacaggtgtgagccaccatgcctggccttctgtttgtttgttaaattaaatactaacacgctagatatctccttacttactagatatatgcttcttacttgaataagaagatggtctttcccttcagggaacctacagtctaatattgaacttagagagagctgattgagagttgtcctgctcgcgttttctggtgcacttccagttctaaggtttttgtttactgaccatgtgaaaatgcttgctgaattgtaaaataggatgcttgagtggttttaggtatgatgattttgtactatttgtgtgaaatatagccctgtcatatcatatggtttttcagaaaaaggagtgatatttgggtccccactgacggaggaaggcattgcccagatataccaactgattgagtatctacacaaaagtaagactacttgaaattttatcattctttgtttaatgaagaattctgttttctgttgagagctaactgccttgagttagtaggtgccaattaaccatcaacaaaggaactaaccagtgttaattttgggtggcatgtttttaaatatatttccttttaaacttcatctcatatattcatttgttttatactctcaaagtgtatataaattagaccgtgtctatgaagtcacatttacctcttgcctcagagagacacttctggaaaaatacattgtccctaaagaattgttgcatttatttaagagagcatggtaccttttttctccagaattctatgattaaaacacactctttactttttttttttttttgagacaaggtctcgttctctcacccaggctggggtgcagtggtgtgatcttggctcactgcagccttgacctcccgggctcaggtgattctcccaccttggcctccctagtaactgggatcacaagcttgcaccaccac

SEQ ID NO: 62332 - DNA, 1051 bp, Homo sapiens
cagcagcgccgatggacccaagccggggcacgcgccggcgacgacgacccgcatcggctcctccagcagctcgtgctctcgggaaacctcatcaaggaagccgtgcggagactccaacgagccgtcgccgcggttgcagccacgggccccgcaagcgcccctgggcccgggggaggccgcagcggacctgaccgcattgccctgcagccctcaggctccttgctctgacgcaggcctcctggaggaggaagtggaggccgctgcgtagacccaacagcgtccagttcctactaactctgagctgaagccgacgtcgccagcctgggagcgaccactttggctgcggggaggcgcgtggggagagatctcaaccagagaagttaccagccgcggcgaggccgtcggagaaaacttaagcgtggagaaatgtatgcgccagggtgcttccgtggggcatgagaatttcccgggccatccaagcccaaggacctgggataaactgggagaactatggcagctacttgcatcgacttgtacctcacttagcccttgggggcgtcgtgagcttggattgtttaaggagggctcaggggtaggaatcgcgatggctttataacaatacttgaaaactaacgacacgcatacattttcttattttctggtggaggagcttagtaagtggtgctacaattgctgtgcaaagaaattccagaggggagaagaatgtaaaagtttggtggtgggtggcttggcattgcccctttttcccaccgattcggtggctggtgaaggtgggagatgtgaactccaattaagggactggagagaggtgaagaattttgcaggtgggagatttggatttgaatgtggacttgtaaatgacttgaccttgccatctgtgttcaaggtcacggtttgctgtggggttcctgggagagcttactcaccccggagtcttttctttctcttgctccaagaagagccctgttggtgctttaccaccgcttggagtctcccgaggacacaaacaggcagagagggacgtgtaggg

SEQ ID NO: 62333 - DNA, 1023 bp, Homo sapiens
tctaaatgtttgttaacaaactgtacttcctttcttatgaattgtctatttcctaataagattttcctagggagtgtttcttacgtatttgcatgactcctttacataccaaatgttaacccttttcatattttgccgcaaatacgtctccaggcttttgttggctctgtacagtcattttttcccccactaaaaccaaattttcatgtaggcaaattttaaaatctctttgaaatttctaacacgatgctaaatttggagtctccttgctgccagaaagttattaaatattccattctattttctttagatttttcaaatgccttgatttttttttcaaatccatctgggattaatgttggtctttgtttcaaggagatgacatgaaattaattttttcctggagagcttgccagccaaaggtgtgtttcttcactaggacagaggtgtgagggtagcataaacacaagctgtctggtgagtttccagttgctggttaagctggtggttgtgaggagtgggtggggctgggaatgttttgatcagtctgttgtgtgaagtcaaaagaacccagaacaggttgtacaaagacctagatccaagtctcattcctgccacatcctgggtgtgggactccaggcaaatcagtttacaagtgttttcacttgtaaataggagaaataatccctgcctggcctccctctgaggattgttttcaggatcaaataagataatgggaacgggtgttgtcaggcattacacaaatgtaggattaggtccagcggtttactaacagaggtctggctcaattccagcgagtcccccctggggagcatttaacataataatgttgaagatcccccccatgcagcccactaggtgaaacgtaccctgagggtattacttctgtgcacttgccaggtttcttaaattctgcctcaggtctaccctgacctgggattgtgtagggctttactgaagtcagcccggaggctcccatgccccacagtgagtctccgcaac

SEQ ID NO: 62334 - DNA, 1552 bp, Homo sapiens
aaagcaggtggatcatctgaggtcaggagtttgagaccagcctggccaacatggtgaaaccccgtctctactaaaaatacaaaaaaattagctgggcatggtggtgcgtgcctgtaatcccagctacttgggagcctgaggcaagagaattgcttgaatttgagaggcagagatcgcagtgagccgagatcacggcactgcactccagcctgggcaacagagcaggactacatctcaaaaaaaaaaatgttttaaaatgcaagtttacactttatatatatatatgtgtgtgtgtgttttgagacaagatcttgctctgtcatccaggctggagtgcagtggcacagttacagctcactgcagcctcaaattccctggacacaaacaatcctcctgcttcagcctcctaaagtgttaggattacaggcatgagccaccatgcctggacaatttgtgttctaaatttgcacttgactaaagttcttaccgtatactaatgtaaatgcttcataaagatcatttccttttcttttcttttttgagacggagtatcactcttgttgcccaggctggagtgcaatggcgcgatcttggctcactgcaatctctgcctcccaggttcaagtgattctcctgcctcagcctcccgagtagctgggattataggtatgcaccacgacgcccagctaatttttgtatttttagtagagatggggtttctccatgttggtcagtctggtcttgaactcccaacctcaggtgatccgcccacctcggcctccccaagtgctaggattataggcatgagccactgcacccggctataaacatcattttcagtagctcagctttaaacatctgcccagcggacatagttcagtttacaaagcatctttgagtccataagtatgttgttctttgctgtatgcaggaatttaatgccatcactagatgccagaccgtgtgcaaaggagtatttagaaaatgccgtgatgactactctatgttctattttcgatatacattattgtgaatagatagatgactgtactccagaaaataaccctgatttgggacaatgtaagctggtttgccatttcctgaaattatgcttgacgtagctactgccattagaaacaccaagctgttagaggccagctgagttatccaaggccagggatgcagtggcacatttcctcctcccattccaaatctcaatgattcgtcatggaaatgcctggatttgggttttgaggccgtggtcaatcatcagtaaatactgactaagaacgtaggtagatggtgtagtggcttgctgctgcatactcattccagggctgaggactggagatcagctttacaagtctaaaattgggattgatgctgggtgcagtggcatgtgcctctagacccagctacttggaaggctgaggtgggaggatcacttgagaccaggaggttgaggctgcaatgcactttggtccagcctgttatagtcactgcactccagcctggaactctaaataaataaataaggataaaatcaggattg

SEQ ID NO: 62335 - DNA, 1405 bp, Homo sapiens
tattggtaggaaattagagttgtttccgactttggcccttaaattgggttatgtgtaggactgctttggaaactaatgttactagggaaatggtgttgtaaagttctagcttctgcgggttgtaagttacctttcaatggagggatgggtgggcagagggagctttgaccttctctggacatacattagaggaaaaatggaagggaggcctgtttccagggggataattgtgccaaagtggaatgtccaggtcaggacatgagccgtgtggaagctggaaccacgtgaggtctgcctagttcatgtgctggccaccacctggaggcccccttctcatccctgctggcgctgggggtgagccatcatttggcaacaggagggggcctcctattctcagccagatgtgacccttccgttccttggccctgcaggaagaagatgaagctgcagggacagttcaaaggcctggtgaaggctgcccggcgaggttcccaggtgggacacaaaaaccgcagaaaggatcgtcgaccctgaggcccagggcccctgggctgccctgtggtccagtctgaggccctttcagcccccaggctgccttgccaccagctccaggtgctcaagattctggcagagcctggactcaggatgacttggaactagggcttggctctcagaagtcctggattttggaaactccaaatggaatcacccttcagagacatccctggtgcctggagatgggaatgtggcctcagtgcctctgagtaggtgccatgaggcacctttgctttctgcccagagtggccatgagcaccagaacagatgatctccatttccgccagctgcctgtagccacgtggcatcctgcctgtggtctgggtgagatttactgtgaccagatgtagaataaatgtgtctcatcctgcattttttttctagaaactgtttcatagtctgccccctccaggggtaagaacagtgtgcagttgttggcagcagtggcctgacctcttcctgtctaactccttacatccagtccagggcatatcataaggctttgcccataggacaggctttggaacttgcccgggagcacccacctgtgtcaggaggggcagcgaatgccccagggctggtgtcgggagctgcagttcagcaccagggactgccccagctgtcctgggcacaagtctctccagcatctttgttcattgattcaacaaagtatttgctgagcccctctaagtgcccagcatagccttgttcattcacctccgtgtcttcccacattctttttttcccagacaaggggatctgtttgtgtaatgtgattcactgggccagctttgttggtctggagcagagaagggcatggcacagaagtcctgaggtcactgtcctgtca

SEQ ID NO: 62336 - DNA, 1443 bp, Homo sapiens
gcggcggcacttccgcatgaagcttcggaacctgttcaccaagttcatccgcaagtttgggtctgtgcactgagcaggggcgggggtagggcaagcgaggggccgaggatttccagtcctaccagggacactacatctgggtcgtgctgtctggccagtgcctctcaccagcccttccttgccacctccagatttgagctggtgaaaaggctgttgcccgaggagtaccacagagtcctggtcaacatccggaaagctgaggcccgggccaagaggcaccgagccctgagccaggctgccgtggaggaggaagaagaggaggaggaggaggaggagcccgcccagggcaaaggtgacaggtgagaccatgttagggccatgggacccggtgtccccccaacccaagggcctgcccaggcaatacccgctgacccccgcctctcctgggagcactctgactgggggctttttgtccttagcattgaggagattttagctgactcagaggacgaggaggacaatgaggaggaggaaagaagccgaggcaaggagcagcggaagctggcacgacagaggagccgggcatggctgaaagagggcggtggggacgagcccctcaacttcctggatcccaaggtggcccaacgagtcctgggtaagcacagggctggccagtgcactcagaaaacagacttgccatggtgccaggttctcaggtggtgggtagggggtggcatccatggcaggcccatggacagggctgagaggcgcccgtttgggatccctgagccgggcttgttggtcatgatgagggtgagtagcatgggactggccttccacctcctcatgccaaactctacaccccagccacgcagccagggccaggccggggcaggaagaaggaccacggcttcaaggtgagcgccgatggccggctgatcataagggaggaggcagacggcaacaagatggaggaagaggaaggtgccaaaggtgggcccaacgcgcttgtccattcattcaccgtgttcacttattccttcggtgatcacttgctgaggaagcgtggctaaaaacagaccagagaaactcttctctcggcagcttcctcaaactttttgagtttctcaaactttttttgagaaacattaagaaatctttttatgttgtaaccgagccatttatacaatacatatttaacttaaaggaaactatcggaaatggtacttccccttactgtgtgtgatacgctgttagtctcttctgtttttctcctcctcctccccctcctcttcctttctccttttcttccttcctcttttttttttttttttaatgcaaacttggctaaggccctgaagatgatttagaggcagaaagagccagaggctgaaaccctcccaacttcccaatcccaatgtctcacattgcccgggagtccct

SEQ ID NO: 62337 - DNA, 1081 bp, Homo sapiens
tgaaggaatgcgtggctccccacatggctgacattggctccgtgacctcctcggcctcaggccctgcccaatctgttgccaagatgttcaggtgaggatatggggtccatgttaggaagggatggtggtaccttgaggaaagttctatataatacgaatgctccactctccacctactgtgggccaggcctgcagtggcagtgctttacgggattgcaggctgcttactgaacatctgccggagcagctaccgtggacttgagcacctgccatgttttagccacacctcacctcttggtttcctagaggtttccccatctgaagttgggtcagataactacctcattggtttttctttaagcactagcattatctaaattaaactcttaacatagggagtgtgggcatgtcacaaatgttagttctcttctgttgtctctcctggggccccattcttgctggccagctagcgtctgtagctcagggtgctggccgttgactttctctggtggggggcacagggtggtgtgaccgtggccctgactgtgccgcccccttggcagggcagtggaggagggcctgacgtacaaattccatgcggcctggagctccgtgttgcagctgctgtgtgtcttcttcgaggcgtgtgggagacaggcccaccctgtgatgaggaaggtgagtggggagcggctggggccagggcaggaagtggtgctggctcttggactatgggctcctggagggcacgtgtctctgttatctctgcaccctgctccgcaccccaccctgacagggccatagcaggtgccccatgcagtatcccctggaaggtgactgggccaacaagggaggggcaggaaaaagggtggcagtccccccacctgctcactagtctttgctggagttactggttttgaaacttagggagtctatttgctttcccttatccccaccccttatcttttaaattttaattatctaagtttcctataaccagtgagtatagcattgaagttctaaacagccctaggtcccacggaggttcctccagtccagggttaaccatttaaggatcagg

SEQ ID NO: 62338 - DNA, 1038 bp, Homo sapiens
tgggaggctaaggcaggaggcaaggaatttgagaccagcttgggcaacatagtgagacgagactctgtctttataaaaattaaaaaattggccaggcacagtggcatgcacctgtattggtctcacccctgtatccagcaacggagcaagattctgtctcaaaaaaaaaaaaaaaaaaaatacagctgtaacagaccgtttatagcctgcttttttggctgttatgttaaaaccattttgttaatgtttctatctttgtttaagacatttaaagctttttcagtggcttccatgtcttactaaggtggcagtcctcagggtgtctctgtgtggggggcatgtgtgaggttcagggggccctcaactccctagcacacaggtggagttgaggggtccagggccagccgtgggctttgtagttcctttctaagcctgtgtgtccccctccagctggtgacagcctgtgccatgcaggcctttcacagcctcttccacgccaggcctggcctgagcaccctgtcagcagagctcaacgcccagatcatcacggtgaggcctgttggtgggatgtgggggcattaggtcgggggtggtgccttgggaggctgtgctgggggcactggccctgcgccttgtctacagagtgaggttggctgggctgggttgtcctagtggaagaggccagtagaaggggaaggaagattggagaccagccatcaaattcacatcagtgtccccaggagctgggaccttgacccttgacctagttaactttaatgaactgtttcagcatggtctcgtggtgctcatagataccttgagcagggctctcggccttagaggtctgtggatggatattgggaggggggatcagatcccccaaattgttagcaaaatgtacgtttttttttttcaaagaaggcctctggcttttgtcagactcacaaaggagtgtgtgacccatgatactccgctgctcctagaggctgttctcccaaagaattagagctgggagggcttcatggagaagggaaaggc

SEQ ID NO: 62339 - DNA, 1068 bp, Homo sapiens
gttagttgtagagcagggatttgaactgaggtttgtcttgcttcacagctcaggattctgtacacatgaaggccctggtgtagcactggatctatagtagtcagatcatcattggatctatatttcagccaaagctaattggttggtgcttgtgccggacacccaagatgctggtggaacgctgatctggccttgtctcctgctctccttgcccctcagatccggaaggctgcccagcatggagtatgctcagtcctcaagggcagtgaattcatgtttgaaaaggcccctgcccatcatcctgctgccatttccactgccaagttctgcatccaggagattgagaagtctggaggtggggaacccaaatggagggcaggtggatgggaggcagtggctggcagagcaggacagggcctgcggtagggcggggctggtgtctcaattcctcttctgtataccaggctccaaggaggccaccaccacgctgcacatgctgacgctgctgaaggacctgctgccctgcttcccggaaggcctggtgaagagctgcagtgagactctcctcagggtcatgaccttgagccatgtggtgagctcaggcccaaaagctggagaaagggggacctgcagtggtggcatttggggaactcactggtcagtcaaaatgcagggcctggggtctccctccctgactgtgttcttaagctaaaaccaacagcactacgttactctgtggtgtttggctaggccaggccatatcagagtccccttccagatggaagctgacctcagagatcaggtcagagtcagggtggatctgtagtgggctggtaaaccctccttctgcaccagctctatgtaccctataccaatttttttttttttttttttttttttttgagaccgagttttgctcttgttgcacagctggagtgcaatggcgcgatcttggctcactgcaacctctggctcccgggttcaagcgattcttctgcctcagcctcccaagtagctgggattacaggcatgcaccaccacgcccagctaattttttgtatttttagt

SEQ ID NO: 62340 - DNA, 1050 bp, Homo sapiens
ttgctcactttctgagtgactgtgccaccagcgccccttgccctgtcctccttagtaccacgaggggctgcaccagctgctcttcagggaccctctggggtgaccatctctgttctttcccacagtgttcccagccctgtgcttattaagaagttctctgatacctccaaagccttcatggatatcatgtcagctcaggccagcagcggctccacctctgtcctccgatgggttagtgtctggggtttagtttctcatctggcgactcccagagcctgtctgatttggtgatgcttagatgttccctgagaggggtttaggcaccctggggacctcagacagatgcgattttctggagtcagtgagaacctgggctcttttccctcctggccgaggctggtggcactgagggactctgactttcttccaggtcctttcctgcctggccacccttctgcggaagcaagacctggaggcctggggctaccccgtgacccttcaggtgtaccatgggctgctgagcttcacggtgcatcccaagcccaaggtgagactactagctccctagaaaatggggcaaggggacagccaccactcagcccagtgcagcccagacttggctagctgagtggcactggggagcttgccctgagtactggcttctgctttctgcttctgaggcaccatgcatttagatgcagaaggcagggcggctcttcctcctccaggaggctgttccctgtcagccctatctgagtctctggtgcctcatcagccattgccctgttgacgtggactctccccatatgtctatttacctcggcagggagggtggcatagttgggggagtcacacagacctgagttggatcctgaattcactgctcgaggtgtgaccttgggcaagttacttaatctctctgagcctcaacttcctgactatgaaatagagataattggctgaatgtggtggctcacgcctgtaatcccagcactttgggaggccaaagtgggaggatcatttgaggtcgggagtttgaaaccagcctgg

SEQ ID NO: 62341 - DNA, 1016 bp, Homo sapiens
agtttgccctaatggaaccatctatggcggccaggtctttttcaggttcccttagcgccagaagcggttggtacagtctggtgctcctggaggacgccctgtgccttaaagcagctgtaaccaaggcctctcaagaggcggctacggatcctagcggatcgacacgccacacagcctcgtccccagcagtaggtggaggccctgggggtgcctaacaagcctcagaacaccaagaaatccgcgtggttgtgcaggtctttgctgttcagtagcattccacaaatagtgtgtccaaaacgcatctgtagatgtaacttgagtgaatgaatgaatgattcgagttgctccttctacccaataaagtagataagattttatctttctcatctttccaaggcccctttatagttgggaaaagtgagtatttggaaagatgacttgtccaaggtcatatctgattcctagtccagtgtcctcgccctagtcctgggtgaagtaacaggtaggtgtgaggaactggtaggcttttggctaaggacgctgggcaaaggtggaagtggctgtgagataatgcttgcctatccaggcttgctcccgccccagtctgctctttgtggtgttggaatgctaataaggaagcattccctgctgccggcacggccaagaatccctggactgaagaggtgcttccgctgatgataggggcagatcctcctttgctcccttctaacctctggacaaagaagcagccattcacaagggtcattgatgaggcacaggtatttggcctcagattgctctcctagcttcttgccttcactgtaccatccttctcaaatgaagcaaaacgcaggacagtctggtaaatgtaaacctctgcggggtggggtgggcaggggagtgattgtttgagatggcctggtgtgacctcatcttttaggagaggctgggaaatggaaagtgctggtaaaggaggccattttctttagctctgtggcaggaagaactgtatcagt

SEQ ID NO: 62342 - DNA, 1013 bp, Homo sapiens
atctgcccgccttggcctcccaaagtgctgggattacaggtgtgagccaccacgcccagcctgattctccttatataaatccaaggaaacgggactcacttcataagtcagtagaatgaacaaagttttttctttatgagttgaggttcagtaggaagcttggtggcacttcagcttcatacccagcataaaagaggagtcgcaggcaaatctttggggtctgggctccaccaccagcttttcccttccaggtatccagatggttcccatcagctggtgtgagatgcagtgccctaagacccacactaaagaattccggaaagtagcccgagtacaacccgaattcttgcagacctaagaagccactttttaccctatggaagggggtaagctgttcctgagtataacaccaagatgctgctgtctttattcaaacacctggcgtcggccaacagccacttccagaaaaatcttccagtttacgctgtagatggaacatgtttctgtgaacctatcagtggatttcattctcttgagtaataaatcttatcttttcaaggcaccaacaaacaaaactgtgatattggaaatagcctatccctcctgacagtccttataaatacatattttttgctatgataaaacttttttactaaaaggatgttatagagtctgttgtcttaagcagagaaagacatctaaatggtgtcaggacatttcagtacttctgcttattgagtacttactgtgctaggcactgagtcaggtgctttacatacgtccccttcatttaggtacattgtgatttaatgaaaatttgaggacacgtggtgatacagatagcatgtgaggcaggcatggtggctcatgtttgtaaatcccagcactttgggaggccgagttgggttgaagtcaggagtttgagaccagcctggccaacatggtgaaaccccatctctactaaaaatacaaaaattagccgggcgtggtggcacatgcctgtaatcccaact

SEQ ID NO: 62343 - DNA, 1111 bp, Homo sapiens
atacagatttgggtgaacaaagtctgaggctagggcctctctccattagctaatggggtatgggatgccaggaaaattacatatgtagtaagtgggccgcaactgaacacacagacttttctttttttttttttttgagatggagtttcactcttgttgcccaggctggagtgcaatggcacaatctgggctcaccacaacctccgcctcctgggttcaagcaattctcctgcctcagcctcctgagtggctgggattccaggcatgtgccaccacgcctggctaattttgtatttttttagtagagaccgggtttctccatgttggtcaggctggtctcaaactcccgacctcaggtgatgtgcttgcctcagcctcccaaagtgctgggattgcaggcgtgagccaccgcacctggcccagacttttcatctcaagaaatagaagtaaagcaaaattcaaaaagatgtgtgtaggggagaaggggctaatctcagtgaacgggaggaaacagagcaaagcgcagctttactaccaccccaagcacaagcccgagtactctgatccttcagtaatagtcacaggccatactggtcatctgccaccagactggaggagattgctggccacaacactcccctcttcccatggctttaagtcacatctgtttcccaatgggaaagtcgactgaggggacagggaaggacagacggcaaagccatcagaagtcaggtgaactgagatcaaagtcgtggcgaatgtcatctggacaaagacgctgctctcaggatgtttgcaatctcaagtaggagatacccaacatcaataaagagtagcattttattcatgtgcagacctcccttctgggctaacacgctgagaagaaaaagagtaacaactttattttggggctgcttatcttttgatgacgggcccacacaaccagagttcggctttttcaaccagagaaagcttactgaagtggggatgaggggccgcgaagaggatcggaccgcaggactggaagctgcagtttaaaaaaccgggaaaaggccggaggcagtggctcatgcctgtactccctgcactttggaaggccgaggcgggcgga

SEQ ID NO: 62344 - DNA, 2731 bp, Homo sapiens
ccctttcctgtggcctgttgctttaggtgtgcatcaccttggatttgctatgcaaccatgtggtgtaatttaagtacaatttctgcaggctcagaaccatcagttttactcccttaatctggttggaacattggcactggtcagtccgtagaaaagtgaagtaaccttcctacttctcacagttggtgactggcctagctgggtcttagtcttaggtctttgccctccaagtgagtactctaggccttcccactagcggggtagggagggagggctcagactagatcctcacaatggtgtgctctcgtaggaaccatgcgaggccagcggagcctgctgctgggcccggcccgcctctgcctccgcctccttctgctgctgggttacaggcgccgctgtccacctctactccggggtctagtacagcgctggcgctacggcaaggtctgcctgcgctccctgctctacaactcctttgggggcagtgacaccgctgttgatgctgcctttgagcctgtctactggctggtagacaacgtgatccgctggtttggagtggtgagtgatgtccagggagcaggaaaaggggtgttgtggggagcagagggacatgtctctcacagacccaacccaggttttggaggccggcccccacccccagggaaactccgagtctcctttgggcatagctcttgcgccatgtctccctgaccttgctggtgttggcaggtgttcgtggtcctggtgatcgtgctgacaggctccattgtagctatcgcctacctgtgtgtcctgcctctcatcctccgaacctactcagtgccacgactctgctggcatttcttctatagccactggaatctgatcctgattgtcttccactactaccaggccatcaccactccgcctgggtacccaccccaggtgggtcctcacaggagcactgggggaagttgctggctatgggagctggtcccaggagtggggagagtatcttggtatagttttgagagacagaactggtgctgccacgttatgctctcccttcacacagggcaggaatgatatcgccaccgtctccatctgtaagaagtgcatttaccccaagccagcccgaacacaccactgcagcatctgcaacaggtgggtcttggctttgctctctgggaatcccagctgtggtccttctgtagccctagggcaaaacctaaccttgagtttgctaagacatgggtgaatcacccatcgtgtcccaggtgatgtgccctcttctcctgacacctcatccttaggatggtcctgtgagttaggcattattaccacttgtgaaaaccgaggtttggagagatgagttaccttgtccaatatcttatagccattaaactgcagagctgggtttgaagcaaggcctggctgtcttcaaagtctgtgccctttccacctcagcaggatgctggtccttgtagggaaggattggcactgacatctcaagaactttggccaccgtaacagagcctgtgtcccttcctcacaggtgtgtgctgaagatggatcaccactgccgtatccttttgctttctcttctgcctgaggccttctttagctccagagcactgtacagggttaatggccaccattttagcatcaccgtgcagagaacactggagttgaggagttgtggggcctgaccatctcctgggagagcaggaagctcacactctaggacggatcttcttggagcagggaatcttttaacacctctttcttttctagactctcatgctaacagctattggatggaaagagatgtttgggcttctgtggttgtttactgtgtacgccagatagaaccgtgggtctccagctgctgttccacacagatgtttggctaactccagctaggctgaaatattggcagattcattttactgaaggatttcagtttccgtgacttcttggtgggacctgaatgctctgaaaagctttgagcattttcacctcaaccttgggtgtgaacagtcttgtattttcttgcctttggaaagtagttcttagtgactggaagcctgaggcttgggtgatattgtcaggaaccagggatgaacctgaggggcctggacaccgcctgaaattgtgtttgattctagtccttaatcatttcccaaccagcctggctaaacaattgtgtgggccactataaccatcggtacttcttctctttctgctttttcatgactctgggctgtgtctactgcagctatggaagttgggaccttttccgggaggcttatgctgccattgaggtgagctcatcaggaacagggcagctcagtagtgcagaacttcgggatgtagaacctgtccctaaggaatggggctggtagcaccccatcctagaggcctgagagtataaccagcactgttttccgtccccttagaaaatgaaacagctcgacaagaacaaactacaggcggttgccaaccaggtgggctgtccccaccccactgcctcctgctgctcaggcctgggggtatagagttgctaaggcatctggggccgacctgcccatgtagttgtagaggctgccgagaggccactctagaccagatcaggagtgttcaggcaggctggctgtggtgggtagactaagtggcctacaggcaagctggaagtccctggtatgtgacagttttggctatctatcccgtcatcacctctctttgggtcgag

SEQ ID NO: 62345 - DNA, 1049 bp, Homo sapiens
cttgaactcagagacatttctctcttctcttctaggcactggcttactcgggtgctcttaccttctagtcacttgccccatgggaatggaatgagctgggagccccctccctgggtgactgctcactcagcctctgtgatggcagtgtgagctggactgtgtcagccacgactcgagcactcattctgctccctatgttatttcaagggcctccaagggcagcttttctcagaatccttgatcaaaaagagccagtgggcctgccttagggtaccatgcaggacaattcaaggaccagcctttttaccactgcagaagaaagacacaatgtggagaaatcttaggactgacatccctttactcaggcaaacagaagttccaaccccagactaggggtcaggcagctagctacctaccttgcccagtgctgacccggacctcctccaggatacagcactggagttggccaccacctcttctacttgctgtctgaaaaaacacctgactagtacagctgagatcttggcttctcaacagggcaaagataccaggcctgctgctgaggtcactgccacttctcacatgctgcttaagggagcacaaataaaggtattcgatttttaaagatatgtagcttctcactctctgcctcacgatagggcagggaaggggaaagtcagggtcaagacctagtgagtaggtgttctggtcatgcttcctacattttttttttttttggagatggagtctcactctgtctctcaggctgtaatgcagtggcgcgatcttgactcactgcaacctccgcctcccagtttcaagtgatttttttttttttttttttttgagacggagtctcgctctatatcacccaggctggagtgcagtggtgtgatctcggctcactgcaagctccgcctcccgggttcacgccattctcctgcctcagcctcccgagtagctgggactacaggcgcccgccaccacacccggctaatttttgtatttttagtagagacggggtttcactgtgttagccaggaggtctc

SEQ ID NO: 62346 - DNA, 1938 bp, Homo sapiens
gtgacccagaattaggtccagcagcagctgatggcttctctctgctcatgtctgactgcactgatgtgctgactcgtgctggccatgccgaagtgcggatcatgttccgccagcggttcttcacagataatgtgcctgctttggtccagggcttccatgctgctccccaaggtgaggagtctgaaagaaggtccccacatatacacatctctcctttgcttggccacattccctaagataatttagggcccgcttgcttctttagagctatattgtggtctgtgcctagaagactaaacttctagattcttgtcccacttcttcctttcatgggcgtatcttgcttattctgagcgtgaagggctctttcacccgtttgtaggctgatgtctcagcctcaccacagattggaattgatttctcaagctatatatctaagtccaatttctcccctaagcctttccattttttacagatgtgaagccaaactacttgaagggtctttctcatgtacttaacaggctgcccaagcctgtactcttgccagagctgcccacggtaagtcccacaggcagagcttctaagcaaaggacaaagctattcttccccagatggggctagaaaggggagggaacaagaaccaggatcttcatgatgtggccatcccctaccttgcccattgccccttagcttctttccttgctgctggaggccctgtcctgccctgactgtgtggtgcagctctccaccctcagctgccttcagcctcttctactggaagcaccccaagtcatgagtcttcacgtggacaccctcgtcaccaagtttctgaacctcagctctagcccttccatggtgcgttgagccccagcaactcttaggcaccagcatctctccctgggcatgctctcacctccttgtggttgtgttccaggctgtccggatcgccgcactgcagtgcatgcatgctctcactcgcctgcccacccctgtggtaagtacctcaggtgtccttccctggcctgggaacatctcaagagacacataagtacctttttgccttagtcaggtgggcttggccaccctggtgtgtaattgagatctgaattacaaggtacagatcttgtaattctgggcccaaggattcttttccttgggcccagaaggtaacagaaaggccatcctgccacttaacatcccttggaatcactaaagatgttttgctttcctcagaatattagttgtacagaatcaaaaaagcggtactttcagttgccttggatgagcaaggttgattatatcctctgactccacagctgctgccgtacaaaccacaggtgattcgggccttagccaaacccctggatgacaagaagagactggtgcgcaaggaagcagtgtcagccagaggggagtggtgagtttctaggtcgtggggagagatgggaccaagatgagcctcatcactaatgctgccaactttctttttgcctacaggtttctgttggggagccctggcagctgagccctcagtcctggcctagactgttctgacaatctaacctgggattactaactgttgagccatcttccccaaagcagggaaaccactggtctctgactgcctttcccacagacacagcacaaatgctaggcctctgttgcatggctgtacaaagaacataagagtccatatttctagtggatttgtaaaataagtgtgtgtgagacacttgcgtttgaagaaagatctagggtcctgggtctcttgcatttatatgtcagaaaaggggcgatatgctgctgaggggtgagtgcatatgagtgtggccctgaggaccagggctggcagatgttgtctacctgctgaagaataaagatttcttttggtaatggggctgtcagatatttcccccaccccacatatgcctcatataa

SEQ ID NO: 62347 - DNA, 1032 bp, Homo sapiens
tccttggtcatacctagtactctgcccccaggttagctgcccagagtgtgacacacattgtgcccctcttcttggatggcaacgtgtcctttctgcctgaaaacagcttcccgagcagattccagccattccaggtaacagtcttagaacttacatccttcaagctggtttttttttagggctaatctggaatgggtagaggggcagacaagcttattgctggcaggcttgatcgggctctccttcctttataggatggctcctcagggcagaggcggctgattgcactgcttatggcctttgtctgctccctgcctcgaaatgtaagtgagcacatttgggaagtactgttatttaaccttgacaaggtgactccgggctgaaatttgccacaggctaagctgatcttttacttcccccaccagagaagttagttctcatccgtcccggtccctgctgccactatgtactggttctcttggagttcaagtgttctctgggtccattacatggccaggttttctgtaggtggaaatccctcagctgaaccaactcatgcgggagcttttggaactgagctgctgccacagctgccccttttcttccaccgctgctgccaagtgctttgcaggactcctcaacaagcaccctgcaggtactgagatcagactatgtaaggagcctcccagaatcaactacccatgaaatcttatagctcagtactcattctctttttaaaaggagcttgctaataacattaacagggcttcaactgctcaagcactgtcctgggactgcccgtgggaaaagcgtcaagaccacagttgggcagagctttatagtacctaagaagagaagggagcacaaagagtctagttctgccgtcctactccctacagtggggctagtgtggataattctttattggaagtagatgaccctctcttttcaaatggcagcacctctgtattatgagaataccaggctcttatgcaggtgtccaatcattttgtccacaggcaaaaatgatat

SEQ ID NO: 62348 - DNA, 1081 bp, Homo sapiens
cccactgtggttgatccagcagctgttacatagtagaatgaatactagacttggattataacttgggcttgattcctgactttgcacttcctgtgaccctggaaaagccactgatcatgtatttcattgtgcctccatgtccttctctatagagtgagggaaatgatacttctaaggttgttatgaaaaataaggagagaatatatacaagtgcttctgctgcagagcctgggacagagcaagtctcaactatgaagtctgaatagatcagaaagaacagccaggagaataaagtgactcagctttttaataaggcactcttggtcccttcagtcactcttctttgttcctctcatctgctgtgtaattggaaacacctgaaagtgcttttaagcaaaccttacagagaacactttctcatcaacagggaatatggttgcacaatccagtgacgttattgctgtctgtcagagcctcagacagatggcagaaaaatgtcagcaggaccctgagagttgctggtatttccaccagacagctataccttgcctgcttgccttggctgtgcaggcctctatgccaggtaactttccacctctccttcctggcctttgggaactttgccctctgctggtgttgaacagcaccaccctctgggtattggtggtactgtattttgtaccatcagaggtttattttcaatcctttgtcctcagagtgagatttcacttcatagcaaagggtgccaccctgaccagtggcaggaaccaaaatccactagtgttagcaacattcaaaagaatgcacaccttttccccatgaagtgctatgtgattagtttacttagaattggactctggagtcaagcccacctggttgggttttatcctcaactctaccacttgctaacttaggtgaagatattcagcctttccacgcttcaatttcctcacttgtaagatggagataaagagtaccgtctaggctggcgccatggttcacacctgtaatcccagcacttcaggaggccaagatgggaggatcacttgagtccaggagtttgagaccagcctgggcaaca

SEQ ID NO: 62349 - DNA, 1054 bp, Homo sapiens
ctgccgggctcaagtgatcctctcgtctgtctcccaaaattctgggattacaggtgtgagccaccacacccaacctgaatgcacagttttctacttcctgagtagaaacctttctacaggtttttatcctggggatcctgttaagagtgaccttatttttttccccttactctgagttatatacactcttacccttgaggttcaatacaactgtcatggccagaactcttccactttctgcttgttgctgcttagattatttctagtatgtttcagtataatctccgtagagcaattttgaggataagtcacttccttgttgcttcagtccagcttctcctatatcaataatcctacctagttaactagttaaagctatattctggccctcttactttgtaaccttccagttataaagttttggtttttcatgttttcttttactctaggaacttggtggtgattctgagcaattttttttccttagcattaatttacagaaatacacgtattctccttgttttggtggaagctgcagctgccaatcatctctcaaaccctgtgggtagctgctaagctgtatttcagaggaatgtcacaatcataccactggggagaaagagtaagcacagtgcttattaggtgccaaactggggtacctggaggcagaaacctctgttggctcttggtgtcacgtgtgcctctaaatgatgccacttcagtctgaggatcgctcttaagccttctgtccttactggtatctgtaatgccgttacctcaggaacaccttcctgggctgtttttactcttaacagggcttggctctgcttccatgcccagggggtgagtgtgactaatgtaaaatgtttatttcttcaaacatttgaactgggtaattgcaggttctctctatcctgttttcccctaggtcctctctagagaatccagaaccccgaactcgggcacgagcaatccagcttttgtcacaggtgctactccactgtcacaccttgctcctggagaaggaaggtactggtgtcactaataggaatgt

SEQ ID NO: 62350 - DNA, 1054 bp, Homo sapiens
tctcctgaaaaaagtttcatgctgtctggctgaggcttctttagtatttgggagcacacagcctgtaggccacatcaactcctggcacagcccatggctttgggatgaggtacgtggttgaaggccatcagctgttgttgattcctttgtgcatctgtagacccacctacctccatgggatgctagcctgcctagacctgactcagaacaagctgtgggccctgtgtggggagttcccaggaggctgaccctgctgcagatccctactaggaggaaaggctttgggaaacagctgataaagcagtgttacagcttgggattctaagcacttagaggaagtacgtgcttgtagtctaatgcctactttcctcgtatttcataattggtatagaccatttaaattgacaagtcttattagtaagagttgttaattgtgacagcatgtcttctaaaacagaaaactagaaaactgggggaaattaaaaaacaaagtcactgttacacatttctcccacataacagactatttgacctttctgctcacattgtggtggccttggtccattaaaaaaaatatatacagtattggctgggtgcagtggctcatacctgtgatcccagcactttgagaggccgaagaaggtggattgcctgagctcaggagtttaagaccagcctgggcaacaaggtgaaaccctgtctctaccaaaaatacaaaaaattagctaggcgtggtggcatgcgcctgtggtcccagctacccggaaggctgaggtgggaggatcactggagtctgggaggtggaggttgtggtaaacaggtcatgccactgcattccaacccaggtgacagagtgagacccccatcaaaaaatatatataggccaggtgcggtggctcatgcctgtaatcccagcagtttgggaggccgaggtgggcggatcatgaggtcaggagatcgagaccatcctggctagcacggtgaaaccccatctctactaaaaatacaaaaaattagccgggcatggtggcgggcgcctgtagttccagctact

SEQ ID NO: 62351 - DNA, 1511 bp, Homo sapiens
actcaactgatttaagactgtaacactagccctgttgtaatttagccctcctaagaaaagaaagttggtggtgggcacagtggctcacgcctgtaatgccaacactttgagagaacaaggtaggcggattgcttgagcccaggagtttgagaccagcctggccaacatggtgaaaccccgctctactgaaaatacaaaaattagccaggcatggtggtgcatgcctgtaatcccagctactcaggaggctgaggctggagaatcgcttgagcctgggaggcagaggctgccgtgagcggagatcgcgcccctgcactccagcctgggcaacagagcgagactccgtctcaaaaaaacaaaaagaaaagaaagttggtacaaaggaatagtaacagataaaagttgaaaaggtttggtagggttggattgtgtataactttggattccaggcagagaaatttgaatgacctgttatctgtactaagagttgttgtagatccttgagccagggagccataaaatgaaaacaaatttgacaaggattaagttaatattgtcaatcttagatcacagccctagttagggttgttgaaggataacagagtgttgaagcgtttatagaataagatgtgctttctaatctttcagcctaaatcaagctttgttagcgctaaagggaccagctagcttcctgttcagtcactcagagtagcagcctgcaaatttaaatgcagaaggagcaccctttgatcacaaaagcagctgctgccacctttgttttgtacctgggttcctggtgaaagtgtcagctgtaaagaagctgcaggcgatgggagggaaataacctggcagcctaagggttaaaggcctcttgggcaagccttcaaagcctgccactacctggccccagcctttttttctcactgctccctggacgtttaattccaggcagccacctttattcgtagttccctgagtgctttccttcccaattcccttcactagctctgtgtaatcgaagttagacctgagagtcaaggcccagcttgagttccctacccctccccaagggtttcctgattaacccagccagacagcatctcatacgtcagaatctttgtagtacgcacttatttctcaaccactcatgtatttagtggactagtttagtagctgttgctgtatacatctccacatcctaccctcccagttgtaccaccagaatctcctgaaattggcatcagtaggtacacaataaaaactgcttgagtgaatgcaatgagaaatgttgaaggaagaatctgtggaatttgagttctaactagttattatagggcttgaaggagatagaggactctaagaagaccccaaggttttgaaccagaggatgaggaaaagaaatactttgtccaaaattaggacgagagctgattttcagagaatgtgatttttgaacacgttgaatttgcaggtgatggatataatttttttccttttagttatttggattt

SEQ ID NO: 62352 - DNA, 1058 bp, Homo sapiens
cgtgaccccggcgccccgcccccttgcgcttccccggagattggctcgggaggcgcatgcgcggagagcccgtctcgagccaccgcccatatcccctcccacggtctctagttcgcgttatggccgctgccgcggctgtggaggcggcggcgcctatgggtgccctatggggcctcgtgcacgacttcgtcgtgggtcagcaagagggccccgctgaccaggtggctgcaggtacggcagacggcgccgcgcgccttccgcatgggggccaacaggagggagcggcctcagtacaggcgccgggcgggaagggaggagcggggtgactttgagagattggtctcaaggctggttagtgagcaccgcgaggttcagagccgtaacaagttagagagttgcctgtgtcttccttaaaaccatttacacttctcatctccctgtagccaattatagggaatcattacattttacagatgaggaaactgaggctcagcgagggcaagaggacttgcgcagggctgcagaccaggcaggagggggaggtgggactcggacccaggcgttcaggtccgaaccgggtgctcacgccacgaagccatgctgtttgtgggaggttgacgtgtggaggtgcatcctcgcagcgtccgctcccgtcgcgtggcatcctgggagtggcagatggccccgcgctctgactggctggaattaagaggagttgaggagacgggccaggaggagctggagatgttctgggtgtcctccttaagactttctctccgtttcttgctaaagttcttgattagtttgctccatgacgttttatgtggcgtttgtttttgtcttcttcccagacccccactttcctgcttttgaccagttcagagatctcttagttcagacagcttatctaaaattagaataaaacgatttccaggcttccgtggagttctgagactttgctcttctaggaaaaaaaaaaaactactaaaaagttattgaatgttaggaggccttcagatcttgggtttaagtaacaatataaaattatctaatgagta

SEQ ID NO: 62353 - DNA, 1075 bp, Homo sapiens
cattggtggaaaatgaagcctggggtctctgctccttcctagttgtttgtgtgactttggacaagcctcttgatctctttgagcctcagtttccccatttgtgccatgaggtgactgccaccctgatcacctttcagagaggttgtaagattaaagtgagaccctggatgaaaagagattttgtgatcttagaaagtttctattattccaagctaccaggatttttacacacaaaagccatagccagtgatttttcccactagatcattgaagcttactcttttttaaggagcaaaactataaaagaaatgtttaaaaactatttttggatgggaatctttctgaaacgaatgatatgcttctgagcaaaatattaatatacagctcagaaagaacctctggtttgggactaggggttgttgagttcataccggtgtgtacagagcgcctgcttggtgagagtgggaccacaaaaggttctttctctcaaaagtgttacctcccaaagaagagacctggggtgggggagggacctagtggtgggcagagggaaattgctgggggagagcccactccgggagtgccctgcctcaaggttccaagtagcaacactggcactgcaggaaggctcttaaatcctgttcaaggctctgagtgggaagagccagtcctacccggtcagttactgtgcttatagtagtgtgaggccacggggcttgtgagactctagggcagtgggccccaaactacgtggttcccagctgttgggctttgggggttcatgtttccacctacaatcattgctgtgtcttctgcctggtagacagtagtcacttctcttttttttctttcctttttctttttttttaagtggttacctagatatgacataaaatttacttgtatgtaacagcaaatttttcagtctatagttttgtagcatgagtacattctttgtatttattgttgtacaaccatcccagtacccatctccagaactttttcattttccccaactgaaactcttttacccattaagcactatccatttcttcatccccccaaccactggcaa

SEQ ID NO: 62354 - DNA, 1072 bp, Homo sapiens
tccccctgagggagatctcctttcccaaaggagagtggtctgacgtgggaacgggctgcctctgagagcccagcctccaggggtggtgagggtcactcccagggattcttgcgtcagctggggcacacgctgcagagccttccacgacctctctgactccagtgggatctggctctgcaaaagttaagcccttctgccatagcctggtagaggctttttctaaatcaagctgggagggccaccctcaggcaggcaggagcagcagcctccagactaaccagatcctggagctctgtgttctgggtccctgatctccctgaagccccagctacggagtttggtccagatttcccccagcagcagctgggcagcagtgtgtgcctggccccctttggagtgggtcacacacccacctggccaggctctggcatggaggctggcactagaatgggcttcagggatagcatgcacctgttttgtgctgctgttgtcaagtagctggccttgggcttcttggaactacagatgtttgcgtcattggactgattgtcctttgactttttctttgccatactgactttctgtggccatatggttagctttggatacagagaggtgtgaggtggtcccacagtgcctgccacaacatcaagtttctatagatgggagcccttccgtaaacctcagaaggtggcaagagcatgtctgacagtgattggaattgagctctgcaagacatagacaagatcacctcttcaactccagagtgttgtggcagggcaccagagctggaaaagcctgaaaggtcatgtccagctgcccacgcaatgtggggtcgttccacttagcacccttgccaggcattcagccagactttctttgggcgaggctagcttttgaacgcactgaatgcgttggcctgtctctctgtagagtgagtgcctgtgccctgtctcattgcccacaccatggccttgtgagagcagctccctccgatcagtgtgaacttggctgagcccaagtgtgcttcctttgtgtctctcactcactggttctgcctgagaagtttgtt

SEQ ID NO: 62355 - DNA, 1030 bp, Homo sapiens
tctccaccaaaaaaaaaacgaaaaccagtcaggcgtgcaggcactcggcaggctgaggcaggagaatcaggcagggaggttgcagtgagccgagatggcagcagcacagtccagcttcggctcggcatgagagggagaccgtggaaagagagggagagggagaccgtggggagagggagaccgtggggagagggagagggactgggactgatctgcccttctttggcttcattctgaccacctcctgcctcgtgtgatctacctggcagcactgcttgcagctccacaaacctgagcccagagtaggctcacactgcctcctctgtctggcgagcccagcccccttgcccttttgcctggctaactccagcttgttctttggtacttggagcaaactttaagaccttccgcagagggggtgagaccacattcacgtgtccccctgattcctgtgcatatcactccccttgcatgtgtgcattagtttctaacaatctcctgacatgtctgtctccctcactagctctgaccttgagagccttagtgactttgtgtccgtgttccccagcacggggcctggtgcatactagaagctcaatacatgtttcttgaatgaatgaatgaatgaatgaatggatggatgaatcgatgaatgaatgaagaatgatgcaagctctttattataagaaatgcatcctgagctgtgcatggtggcttacacctttaatcccagtgactcaggaggctgaggcagggggaatgctggagcccaggagtttgaggctgcagtgagttacagtcgcgccactgcactccagcctgggctacagagtgagaccccatctcaaaaaaatttttacaaaagcatactttatagtgctcagcacatatttgctcaataaatatttattagatgattctgtgtgaagtaaaaacaggatttttttgaagtgttatatttattctatattttctttatgtcctgagtcgatttctaaggatagaacctagggaagagggggcacaggta

SEQ ID NO: 62356 - DNA, 1772 bp, Homo sapiens
gttgcagtgagctgagattgcgtcactgtactctggtctgggcaacagagcaagactccgtctcaaaaaaagactaaacgaaaaccctagagttagatcctgaagatttgggggctctgtttgtaattgatatcagataggccagttttcctctggaaatgggtcgggggatggctggtcagtgcccagctctgggagaccacccttccccgagcccggccagatgtggccagggcccccaggctggactcacggaccagagagcagaaaaaggcctgctctccctgagcccagccaggcagccgaccccgtgaatgtgtacgttgtatgcagcaccatgaaagcacaccctgtctcacgcatgtgtgcccccttgtccgtatctgtggctgcccgcacactgaggccttgggtaggtctgtttctcttggctgcaattttgtctctctcatggccacagaggatccgggcctgcctcctccagcaggtttcctcactgtacacctacctcagtgactggttttgtccctcctggactcccacctccacccactccctttctttctgcctcttcctattcagtgaggcttgttcacaaaacatagtcctctgttccccctttgcaggggtttcttgcagacagctctgtctactctcccatctgatctgtgcctcccctctccagctcctccttcttttcctaaactgcctgcccatttcactcgcccgtgcagcatgccaggcattaactctgtctgtaggatcaaaaagatgaactggaggatgtcccagcctcaggcagacaaacaagatcattgcagagaatttctgttgccatgggctgggcatcatcctagagccgagaagggggctctcaggggtgccaccctgccttgatccttcagctctgctcaggaccacctgggacccactgtacctctagagatgcccggtaagaagcctggcccatcacttagcaactggctccacccctttccctccctgagctggggcccgagaggaggaaaggcccacaggcctgtaaagaggccaccaaatcccagagcatgggaggccccagctgaccagagctgggccagcactttcccttcaaaagttacctaggctctgagggtcatctctgctaagtctaactataaatatcgcgcttcctgaagggattacctgggcaccacaccccctggctcccccctccccgcctgggctgatccttcttctgggccctgtgttcttcctgaccccttgttcccgctgccaggtgggacacttcagactacctgtgtttcagctgtgactgctggggtgggaggagagaaacaagagattcgagtctgtatcctggccagagggcccttgccggccagctgttgggacaaggaggctcttgttcctgccttctcccgtctggtgtgagagccgtgtctctcacaccagccagagcaagcccagacttgtcacataatcggtgcatctgggaaggacactgttggccccatccctggagtaagggcctggggacagaacttggtaaccgagtgtggaacagcttggggattgccgcaggtataaatagggctgtttcctggcttgggtggcctgactggggaaatctctgctccctttggctggtctcagatttggtgtcacatcccagtggctcacttattccagtccctgaagtcacaagaaccatctcctggggtctgagatcaagaattgaaggaggggccagcccgctgcagacctctccc

SEQ ID NO: 62357 - DNA, 1048 bp, Homo sapiens
gaacactttaaattaaatatttggctttagagttttctgcccctacaggtaactgtgaattcagatggtgaactacaggatttagtcagacctgaggtggaaccctcactcacttactatgtgacctggggcaagtcatttaatctctctaaatctgtcatatcacctgtgaaatagcaataataatacctactgcctaaggctactgcaagaatgaaatgggatcatgtatataaataaaggcttgcctggggttctttctcagcggagatcgctgcctgcaattctcttccttgcttccttttgccccagccagtgggagcagcctggtggtggcccccagcctcagttcttccactcactgtaggacctgagttatagtggaagcagagtgcttcacatctcactcctgtggctcactctgcctttagttttgagatgactgagcctccaaaagcctttgagagatacctctgccctcagtcttggctgtggtttggagttgtcttggaggtcacttggagctgggtaacaagaaaaatgacatttgacagaattgttttctttgtcagatgctgcaggaatttttgggggagtttgttggtcatgattgcttaaaaaatcctttttttaagtgggacattagtaacaagatgttaaaattgttaataattttttttttgagacatggtttcgctgtgttgcccaggatggagtgcagtggcatgaccacagctcactgcagcctcaacctcccaggctcaagtgattctcccatctcagcctcccaagtagctggaactagaggagcgtgccatcatgcctggctaatttttaaaatttttttgtagaaacagggttttaccatgttgccctgggtggtctagaactgccgggctcaagcaatcctactgcctcccaaagtgctgggattacaggcgtgagccaccgcgccctgccccacatcatgtgggaagggtgcggtggctcacgcctgtaatcccagtacttcgggaggctgaggcgggtggatcacgaggtcaggagt

SEQ ID NO: 62358 - DNA, 1026 bp, Homo sapiens
agacttttataaaaggtaatttctgtatatttcactgtgcgatgtgaatgatatgcttgaactgtcttacattttaggttcttggagaaaggacctcttttagcatagcatgacaccctcctccttgtcattgctgattagatataggaaccccgctgggttccaggttccagtaattttttgttgttgtttgttttgagaggggggtctagctctgttgcccaggctggagtgcagtggtgtgatcttggctcactgcaacttccacctcctgggttcaagcgattctcccgcctcagcctcctgagtagctggtactacaggtgcatgccaccatgcccggctaattttttctattttttttttttgtagagatggggtttcaccatgttggccaggctggtcttgaactcctgacctcaaatgatccacctgccttggcctcccaagtgctgggattataagtgtgagccactgcgctgggctcaggttccagtaattggttgtgggttctgacaccagctggtgcatggcctcttgctttcttgtgtgatttggtttttattcccaacttcatggactgctactgcttaagctatctgtacctcacccctcctttgttaaaaggggagattagtaaatgggtgttaagaaaagttgtttttataatattggcatcaaactgaagctctctcctagatataataaaggaattgaaaatctattaagagaaaaaaaacacaaaatattaaagaagagagtggatggtgaggaaaaattaggcagtagtcattttcttttccagctaaatactggtgggtgtctttccaatttgagtggttttagagtttgttctccatgaatgagaagagtattcttgattattcagtagcatagttgattttatgaagtgaacattggaaattaggccagagggtattttacctctctgtctaggaaagccaccaaatgcctgcagaatgcttgcacatcgttctccacaggctaggtcctgagcaaatgcta

SEQ ID NO: 62359 - DNA, 1036 bp, Homo sapiens
ccacaatccctttcgtccctatctttggtcttcctctttccctgttagagaaccttcacgaggcctgaggatcttttgcatcagaaagtcagcaacaacaaaaatacttgtcttggctgggctcattggctcacgcctgtaatcccagcactttgggaggcctaagtgggtggatcacctcaggtcaggagttcgagaccagcctggccaacagggtgaaaccctgtctctactaaaaatacaaaacttagctgagcatggtggtgcgtgcctgtaatcccagctacttgggaggctgaggcaggagaatcgcttgaacctggaaggcagaggttgcagtgagctgagattgtgccaccacactctatcctgggcaacagagcgagactccgtctcaaaaaaaaaaaatacttgtcttccatgagactgagatgagacagaactttggaagcttaacatatagctgctggagaatagtaagaggactcctctccctgtctccccaactcttgtgacaggactctatccagttgatcagagcatctgtcattatagaaacaaggttcacattgcattggaacttcaaatggtaaggctctaattctcactcactggctgtctctgctctctgctcctatgaggtttcaggttatgatagtttcattagtcatggggaaaaagtggtttgttaggaagaatgatagaaaataaatatgatgggggcaaaaggggatttatggcttgagagagccaggagtttcactgtggacactggcaaggtagccttaggaaagctctttttccttcattcctatgcctgagttttctgatttgtaaggcagggagtgcctactacagtaccatgcacatccattttaggtagtctattaatactagatggtagcatggagcgatagatgagaggcagttattttgcctctcaggttcatgggaaaaaaaatagttatttgtaataaattttacaaggcttaggaaaatacctttcttataagtttgattttaggtatttatatgc

SEQ ID NO: 62360 - DNA, 1131 bp, Homo sapiens
tcttgccctgtcgcccaggctggagtgcagtggcgcgatctcggctcactgcaacctcctcctcctgggttcacaccattctcctgcctcagcctcccgagtagctgggactacaggcacccgccaccatgcccagctaatttttgtatttttagtagagacagggtttcagtgtgttagccaagatgatctcaatctcctgaccttgtgatccacccgccttggcctcccaaagtgctgggattacaggcatgagccactgcgcccggcccttttttaattttttaatttgttattttattgttttagtgtatatttcctgaaatatctttttttttcctgttatctgaggactgtctttccataatttattctaattgtgcctctaaatataagcttcctatcagtgttctgtcttccttgttccatctcctaccctgttgtaactgagaagcttctggaaaggaggagaaataaatgtagggagtcagtagccccttttgcagcattagtcttccttttcagaaggaccatctcagcgtctcagtggcaagtagttgcttctagaccttgcatcttggaaggtcatgtaatgtctgagaatgagctctgacattaggcagccctgggtttgaaccctggttcctctactgactagctgtgtaacctttacagttaagagcacttgtaagtttttgtttctgttgtatgtcagggaagaggggttctcctttagaaagtgccttgactggtggaggacacagatgagcagggacttttccaacaccagctttgcctttgacttttcctcttttcagatcctttttactgggcctggttgccccaggcgaaagtcccattttctcaggagatcaaagatctgatccttccaaagatatcggaccctaacttcgtcaaggacttggaagaggacctatatgaactcttcaaggttagccctgggaacctcagccctattatcatatgggagaaggaatttttaatggtttttttaattggtcctgacaaaagccaagaggaaatggctaacacctttctgacttgagttagccaacgaatagcaagatttccacatgtggacagcaggacctggtttggatgggtttgaga

SEQ ID NO: 62361 - DNA, 1059 bp, Homo sapiens
ctttaaagggcaagaggatcttctcagccttaattctgcatttacttcttcctgccatttatctaaagacctctgatgacagcacctcctgggtttgctgagcccatttttccctggaagggggttggacagaggttttttttttcttttgagacagagtctcactctgtcacccaggctggagtgcagtggtgcgatcttggctcactgcaaccttcacctcccaggttcaagtgattctcctgcctcagcctcccaagtagctgggattacaggtgcatggcaccacacctggctaatttttgtatttttagtagagatggggtttcaccatgttggccagggtggtctcaaactcctgatctcaggtgatctgcctgcctcggcctcccaaagtgctgggattacaggagtgagccactgagcccggcctggacagaggttttaagaactacaattattgtagctgtctgaataccagtaacatggtattcctacatttcccaagtaatgtaagggcccaattaggctggcagaatttttggaagcattaaaagccatgtgatagactcagatgttatggaactcagcataaaggagtaaactggcttctccagttgatataggctgtgcctctgtccgtattgcaatgtcttatctaattccatcccagctcagtcccttgccaacccttctcccattactcagatagtgccattattcaggatggtagggaggttggggtagtgcagttttatttatctccatcttgtgctcctaatgtcttcagaggagcttttggtatcttgtaacctaaagtgcctactaccttagggtgaccatccagctccttccaacatgtacatggccagtatatcactcatgtgcttacttgtctaccattcacacatcaaagcaaaatgtgtgcactacaaaatttctgcactacagaaatctgacaaagcacagagaaaagaggtcataaccctgtctacatagctgagccattattgcaggatgggctgtagtacaagggccctgagatgtagggaaagagtg

SEQ ID NO: 62362 - DNA, 1898 bp, Homo sapiens
gggacagtcccttccttccctgaaaccctgctctattgcaattccctattatattctgcatcagaaaaacaaacaaaacaaaaacaactttaaatgcttgtagcagaaccccgggtcatctcatgtcagaaacctttaatccaggcctaaatttgcatagacctgacattcagctgccttgcagttgcttcctcccatgagccaaggtggtgtcagagggcaactggatgactcgcagtaccacagcactgggacagacagaagccacacctttcttttgggtttttgccaagcctcctccatctcccatcagtgctgtgggctggctgcaagcctcgaaacagttctcctggaagggaggtttttgctttacccccgccagcacttccgcacacaatcatagagaacctctctgctctctgctggcctacagcttgtctgtttctcaagcagaggcaggaagagctagtcttagcatttatattttaataggaagttgactcccagcatgtaaaagtgatccacgcagccggagtgtatgccgggagctaagtggtctatgggtgaacatatcccaccttgcttcctgagtccttggtcccaatcttctcatttgttcctctcgttttaaattttttccccccaactcttttgatgtaagagttcagtttgtcttcgggagtgggtctctgcaagggctctgggatgagtcttggcttccaagaggacaggctattaggttcttggacttttttctgtgctaccgctgctgcttggtggaagtaacaggacgtggattctgcctcataagtggcagtttcccttttctctctgacttgtcctaggccgatttctctatggcttccctgagaaaggtgaggcccaaaggagagaggccttcaaactgtcccaggtcctgcgcagctcagtgcgtatcttcttgcttccatgtgtcttttcccctgctgcctcactccccacccccacttgccaggtgtttgagccatttctacaccaaagcaaagtacggcctcaggagggagtaaaaagggtgccatctgtgtctggaggggcagctgtgttcatgccctgtgctactggacatttcacaattctggcaccttgcgattggtcagtcaacctcagaaagtaactatcttgaaggtttgaaaaacaaccaaagaaagggagtgaggactatggctgcatgtcctctgcttgcccggctgcagagcagagatgtgcagccctctggtcagctggtccaggctggtccccgccggtccccttccagtccagccaccaagagtccacttgtcccgggcttccacctggctgacaggaagaatttctgagagctggatgtgcatgccctgtggacgaaggtacagctcgcctgcctgccccaatcccagccccgacaatcacatgcagctgactcggacactggccttgggaacaatgttcgagagaacacttgccccttgactgtaggagccagaaggggacccaggtgtgcatagctctctgtagacatttttacccaaacctgttggtaaagtgcccatctggtgctcaagagagcctgggggtctaacagggagcccggctgcctcacctggccacagcctccacaccagatctccacattgtcttgatccagaccagctctgtgatcagaaggaaattgggtccagtgtaggagagagctggtcctgggcctggcaggcaagagtgtgggcatcctttcctggcctttctccactctccctcaagcctgtgctcaggttgccttgaatgtggactctggaagagccaggggcccagaatgccgggggaggcttctgagtggcactcatggaacaccgtccctctgccagccataggccctgcctcca

SEQ ID NO: 62363 - DNA, 1081 bp, Homo sapiens
tgccattcctggctctttccctggatcagtgtctgatctggtggaggtagcttgtggggcctgacttcctccagttccggcggatcctggcacttttcttcctagagtgcagatactgctcactggaggctgtctctgtggcactctgtgggttggccagtgcagagtggggctccaggattctgcagagaacaagtgtatgattagccaacatcaataggaagaatggaatggggacttcaagagatttcgtcatggtggaccataaaacatatgatttggagcaaaatgagagcggggctctgctctggtctttccccctctgagaactgtctgactagacaaagtttacagatttctctgcagtagaaagggttggaccagatcaggttgtgcaaaactcaacatttcttcatcctcatcctgtactcatggcagatgtcataagtcatgctattaaactggtttgataagcagtgactactaattaactggagttaaatacaagctatgacactgacttgccatctcaggacctgatgacctccaaaggcctgtttaggtctgatgttctgattgtgggccccagagaaggcagcagagagatgaagcccagagcatcacccatagtgattggttgaggccaagtggttcagctccatccctttgggttcactcttcctgggctggcagtggcctaggcaaagaagtggcccaccagggagactggggagagatctcaaggtaaaagttttcaacaatttttaacccataatgcctcgacagtacattcctaggctatattctctgtaatcccccagccaagattttaattaggcttaaaaaaaaaaaaaaaagagaatctcactctgtcactcaggtcactcaggctggagtgcagtgacaggatcatagcttactgcagcctcaaactcctggcctcaagtgatcctcctacctcagcccctggagtagctgggaccgcaggtgcatgccaccatgcctggctaatttctcttttttttggcggggggagggtgtgtgtgtgtgtgtgtgtgtgtgtgtgtgtgtgtgtgtgtgt

SEQ ID NO: 62364 - DNA, 1078 bp, Homo sapiens
gaaaaggaacattaaaatatttttaaattaaaatatttacatgctcatcataagaggcaaacagtacaaaagcttatatataaaaacttttccaatttcctatcaacccacttgcagaagtaacccttcccctaacctgccttttgttctctgtaagagtttgaattgtctccgccccactcatactcccaaaatatgactcccccccttgccctggccttctccgctcctcacctcaatagtcaccctcattatcccaatcatttctatgctcactctgtcccagtttccaggccttctatcataaaaactccaccctgttttcaaaagatttaacaactacaataaagctgcagaagacttccagatgagttaacgtcatgaaaattgtattttatttggaaaatggaaatttaaaaatctgcctctccttaggtgctattatgaaaatccagttaaaacctaatctatatggtaattaagcccccagagctggatgacataaacacactgtgacaagaagacaacagtcgccaagtaacacttttaggctgataaaaagaaaagctaactatgggatatttactctggatcaggcaatacgtatgatatcctttaatcctcaaaacaattctaggagttagggactgttatcccatttcacagggaagtaaagggaagctaagatgcaaatatgagtaccagtggcttagccgaggccagaggtggttcaaatgactgcagcccatgcttttatttttattttttttttgagagtgagttttgctcttgttgtccaggttggagtgcagtgttgcaatctcagctcactgcaacctctacctcctgagttcaagtgattctcctgcctcagcctcccgaatagctgggattacaggcgtcccccaccactcccgactaattttttgtatttttagtaaagacagggtttcaccatgttggtcaggctggtcttgaactcctgacctcaggtgatccacccgccttggcctcccaaagtgttgtgattacaggtgtgagccactgcgcccggtcagcccacgcttttaaacccccg

SEQ ID NO: 62365 - DNA, 1120 bp, Homo sapiens
ttttccagaagttaaagggtttttattcagagcaagttggagaggtgacggtaataaccacaatatctacagagttgtgaaaattcaacctttttgctaaatccttcaatggtctgctcttttattttttctttctcttttgttttgtttttgaggcagtcttactgggtcacccacgctggagtgcagtgatgtgattatggctcaatgcagtctcgacctcccagactgaagcgatcctctcacctcagcctcccgggtagctgggactacaggcacataccaccatgcctggctagtttttaaatttttgtagagacagggccccattgtattttgcatgctggtctcgaactcctgggctcaagagatcctcccgtctcagcctcccagagtgttgggattacagatctcagccactgtgcctggccaggtctgctgtttgaaaaggctcaaccttctctggattagaaactagaagaggggaggctgcgtgtttttgtgagcttgtttttaaagcttaggtgcacaggtgttagctttctctgtggaggctgcaaaggtgtagtttcagggtgtgtgaagcatgaatgtagttctagatatgttgccatcagagcacctatgtagctctattatatggttggcacgtctcaaagcattttataggtgtccattgattctctcagtaaccctaatgaggtgggttctaatgtcattgccatattccaaatgaggaggttgaatcccagagaggttaaataccttgcccaaggtctcccagctaatgagtggtagaggtaggatttgaaccctggcagcctggcctcttcatgaccaggctatactctatatagtagggtatcaatacatgttagatactgttaatgtagctattttttaaattgtggtaaaatatacataaaatttaccatcttaaccatttttaagtgtatagttcagtggcattaagaacattcacagctagtcgcagtggctcatgtctgtaatcccagcactttggggggccgaggcttgagactaggagtcccctcagccccaagtgctggtgcagtgagagcctggggtgagacacttggggtgctttggaagccctttg

SEQ ID NO: 62366 - DNA, 1318 bp, Homo sapiens
cagtccagagttgggggtgttggcagagacttcccagagtaagggagtgatgtttaagctgatacctgaaggatgagtaggaattaaccaggtaaagagtgggagaaaaatgttccaggacatcatttcatttcagcccatgggctgcctcgctgcagcgatcatttatgcttggtttttatgatttttagttttgatggatctttggggaaaagagcattggatggagagtacaaagaacaggattttaggtctgaatagttcactttcccttgctcacaggtttactgttggcaccacctgaatctgtaggtagaattgtgttgaggactagacgtgcaatgcaaatgttgggaattattatggttacaggatgcagacatcagaacgtgaggggagtgggccggagctgagccccagcgtgatgcccgaggctcccctggagtctccaccttttcctaccaagtccccagcgtttgaccttttcaacttggttctctcctacaagaggctggagatctacctggaacccttgaaggatgcaggtgatggtgttcgatacttgctcaggtacagactttgtggagttgctctggtctgctctgccttctgccgtcctgctctgtagtaactaacactgaccatttaggcagtggctgggctgtcctttctgccctagtgaggagcagttctgggaggtctgttcggcctctgggtttatctaggcctaccctgtgtctcaggcccagcccaggagaggcagatactgggaatgatcctgcctttcagcaaggttcttctttgtgactgaataagctccttcctctggactgctggacaaccttgaacatcacgccttctacagcttagagcaggcttaattttttcctttgcccccaatattagcataattaatattaaaaaattagggtataattttgaacaaaaattaaagaaatacaaaaacctgtgaataagcagataccattttcactactttttttttttttgagacagaatcttgctgtattgtccaggctggaatgcagtcgtgtgaacatggctcactgtagcctcagcctcttcagctcaagcgatcctcctacctcagccaccatgcctggctaattaaaaaaaaaaaaaaattgtagagaggctctcactgtgttgcccaggctggtcttgaactgttgggctcaagtgatcctcctgcctcagcctcccaaagtgctgggattacaggtgtgagccactgtgcccagcccatttttactaatttattgagattatggatcttaactttttccctcctatcctg

SEQ ID NO: 62367 - DNA, 1630 bp, Homo sapiens
atattccatttcctcagttgtaccatctcttttggctaaatcacatttcagtccaggagtgtgcattgtttgtacttattatgtcttttaagtcttttttcagtctaagacaatctctctcgtgacattgatttgctgaagagactgagcctgaactgactttcctggagaatttactaccgagatttgtctggtttcttccttgtggtgcagactagaagttagatttaaaggttggatttgattgaagttagaaaagtgtttttttttttttttgcaaaggtaaatgttgtgcccctggtgttgcattgcatcaggagtcacacaaaaacctgattgtcctaaagagcagaggtttttaacttggagcctatgggtgagttttagggatcagtgaatcccctgaaactgcatgtaaaattatgtgtctgcacatgtgtgtatttctagggaaaagcttctggttttcatcagattctcataaagaccctcagtcctctgaaatacatgagagagactggtaggaagcagggtgagtggagttacgttaacctctgaggatgccattgagtatttatccatgcctcagtctggaaatagtggatgttttgttactagttctctggcaaaggccctacatttttcttgttcacctaatttatgtctgtatccgtagaggtgagctagtcagtgttccagagctgtgttctctactgtaagatcactgtgctcttcccacaaggggtagggagacagtatgaggagaggctgttttctccttttataatctcagcatgatgtgaagtttggtcttctttaggagagaggctgtgcccccggcacattctttgtatgtgtgtgttgctctttgtggcaaagtacgaaagttaagtgtatcctgtcctgcccgtctccttttcctctactagtccgtagtgcgtcttagcacactaatgtgttagggtttttccattttatggaattaaaaattggaggatgtggtaggattggttaaagcaggatgcaggaggagcattggacttaaaagcccccaggagcctgcagtttctgtgctgctgggagagggagcactggtccatgaaagtggctgtcacgttagtttgtgcttttgattgttcttttcttagtaaagaggatttgactttgaagagggacctaatcttgggctctggctattaggtctgaagcctagagctgcagtaaattgttaacagactctctcctgggatcagctactctactgcttgggtctcctgggaccaaagtgtcagtaaagacattttatagaagggaagaggctttaaaatgaaagtgacttgagtggtggtgtttttatttccaaaatgggattggcttttatttcgcttttaccctggtagctgccactagaggttctgaggcgtaattagggtggtacaggtggagtgtgttgaatttcaggagaaagacacagatgtcatttcattcccttactcataaatttcattaaaaagtaaaagcccctttacactgttggtggcagtgtacattagttcaaccattgtggaagacaatgtggcgattcctcaaggatctggaagcagaaataccattttacccagcaatccca

SEQ ID NO: 62368 - DNA, 1135 bp, Homo sapiens
ttctgtcctgcccactcaccaaagcccctgtgtctgtagcttgatccagctggaggccttcctgagccgcctgtgctgcacatgtgaagccgcctaccgcgtgctgcactgggagaaccccgtcgtgtcctcacagtgagtgacccctcctctcccgccaccaccctataggaatttgcagcttgagcccgagcaaagccagctgccttgagaggacctctgcccctcttacctcaggggaagagctcgcctcctgggctcttgtgtgtatatctgcacatatgcttgcgggctctaatgtactgcttttgtttagatgcttgcttttatgtgtggtaaaaataataatagaaaaataactcaccatataatccaccatgcagccgaatctcttgtttgttttgcctgctagaatttgtcacatgcatctactttacggatgtatagtttcatagtgtatgttcaatttttcttttgttttccacttatcattatattaaagatgattttctttgttgctatatagcttttggaattatttataataccagattaatatagatggcaaatataatttgtgaaaccattctgttacagatttagtcaatttcccttttcattactaaccccatggtaaacatttttatggatttagctttaatgttttagaaaatttttcttggagtaaattcaaggatgaaactaccatatcaaacagaatgggtgtttttgaggctctttaatatgaataatagtgataactaatgtttgttgtgttcacctggtgccaggcactgctcaacactccctctgtattatctcactcttatagtaactctattaggtaggcgctacttcagtccccatcttacacgggaagggagctgtgcccagagaaccaagagacttctcagaatgagaagtggcagagctggattcaaatcccagtctgtcttactctagacttcagagtctagaccttaaggagtgatgatggttgaaccagtttatgtgccaccagctgacaccactttggcctcaccagcatcaggtgtttgcaccggtgacttgggatagttctcagtcttcatcgccattttccgctggtttgatgagcggctcttgtcagtttatt

SEQ ID NO: 62369 - DNA, 1756 bp, Homo sapiens
ctttccttttctgttctattcaaataaagacctactaaattattttcacccagtttgagaaactgtagtacctagctttctccaaggctgtttgatgctgggatcctcttgtggggggcgtctgtcaatgtcaccatttgggaagtgcgcagagctcagagcagcgcttccatgcttccttctgcttgggggcccctccaggtagcttctttcttcttgctatctttttctttctgttttctctcctcttccccgcaccttgggaggcaggagacccacttggtggtgctggtaagtggaagccttggtgggtgggcaggggctgggctggggagggtggctgaaccggctgctgccacacctcgtgggggctgccgcgcaggatgcctctgcacacgggtcctgcagccttgcaagaggtgggcaggactggaaggagctgttcccacaggaggatgatgagggcgccccgtgcccagcagaggatgagctggccctgcaggacaacgggttcctgagcaagaatgaggtgctgcgcagcaaggtgtctcggctcacggagcggctccgcaagcgctaccccaccaacaacttcggtgcggccaggggacagggctgggctggtgggggagtgggggtggacttctgggactctagtggggaacacccagccacaggggcagagtctcagaactgtgggtactgacttgtgacaagagcagggagtgaaggtgtgtccgcgggaccccggggagctagcagatgcccggcaggactgctgagggagtgggtgtgggttccttcttgtccctccatcctgattggacattcagttgtgggaagacaaggaactcagtttgggaaatgccatcccaggactgtagagaaccataatcctgacagaacttcagaaggcagtgtagcatgatggtgaggaacagagtagagtctcactgcctgctgcaaatcccagctcagccaggtgtccttgagcaaattatttcacaccccgtgcctcagtttccccttctgtaaaagggggatcatcattcttacctcatagggttgttacaggtctcatgtcaaatgagacagtagtacttacgaagggctagcacagtgctggttggttcatagtaagtagtgggtgcggttaatgtgggaggccctgacccacgctgtgggttcctaggatcctgtcttggtctttcttatccagctggaagcaagttgaagcaaacattgtttctctggacgtgatagagccctgagttcacctctccccagccagtccttattttactgagggtcgggggagagcggtcaaggaaggcagctttggagaagggtggacttgacagcacagcttagagacctggctcagatcagcagcgctgagagctgagccacatacaattatggtggaaacctagagtagctaggttgacctgggagctgctgtgctcctgaggaagggccctcctgcctgctgtcagatgggagcagggtaagggggcagtactgtgtgttctggtgttgagtgagttctagggtctgtgccctggaagaagacaatggagtttatcttgaggaatttgactcagggcccccagggtcctgccttcctacccctgcagcagccagggcagttgttttctcaggattagatgtcctggacaggctctttctttctgctgtgtgaatgtcccccagttattcaagatccctttttttttttttttttgagacaaggtct

SEQ ID NO: 62370 - DNA, 1077 bp, Homo sapiens
aaatctctcatcacagttctggaggctggaagtccaagatcagggtgtcagcaggatcaggttctggtgaggtccatttccgtcgtcatagacagcaccttctcactgtgtcctcatgagaaggtgggaggggcacggcagttctctggggcctcttttataagggcactaatcccattcacgagggctccaccctcatgacccggtcacctcccaggggccctgctttgggtgttaggattccacatgtgaatgttaggggactgtggtgggggctattctatttacccctgccagtggatgagggggtgcatggggagaatgagggcagactgcaaaggagcttctctgtggcctccgtatgggagaggtcttggtggggagggcccccctttgtcctggaggctccatgactgttgccctggcaggccccactgggccttagtgcccctgctgtcatggcctcggtggcatcgtcacgtggtgagtgaggatgggtgagtccaggctgttgctgagaaggggcagaaagagttggtaggtgttggaagggaacgtcacctggctgagctgctctcagctcccagagccctccctggctccggtctgtgagtgggttcacagctgtctccccagcccacttggctgccctggggtgcttggccctgacattccattcagtttagaggagaccttgggctcaggtcagtgtcagtctttgagtagctccttttgcctgtcccattccccttgtgtcccttgctaaggagaggctggggcaggctgccttccccaaattcttggtgtagggacagaatcttggagcagccagtttcctggtttggcaccagcagtaggcttgttcttctctttccctggctgactgacagggtgggcatttacctgaagcaccttggcctcagatttcccctggctctagcagaggtcttcctttccctgaacctagggagtctcctttagcaagaacttcaggtgattttggctggacagaggaagggaccacatgtagccgtcaataaagctttggggcctttctgtgaaagtgaggcctggtgc

SEQ ID NO: 62371 - DNA, 1233 bp, Homo sapiens
aatagctggacagacctcggcctcccctcgaagacacctcaattcacagactctcagcccacacaatgccccagtgtccccagctccgctggagcagctgcagggcacttggatcacaacttctgcaccctctgtccagagtctagggcagtcctccactggcccagcactccagtttcctttccctgcctcttgtccaatggagtgggaggccaggtgagtggagcagaggtcctgaagcccttgacccctgggggcctgggtagtgtaggatctcgctgggctgggtcctggattccagggctattccctggaggacagtctcagttatgggataaggccccctgggggtctccatttctttccaacagtttcatgttcactactggactcttacgggctcagtatctctcccttagccatgagctggctcaggcatcccttcccttccctggagctgccctgcctttctcaagtatttatttatttattgcatggttcctgggaacatgtggcacaagtaatgggatgaggaggaattgggggtgggggtcttctacctaggactcttccctggagtcatgggctgcctgggacccaggacccatgagggggctgagaggtttctacactcgaggagcaggggtccagagaggcaggctggggaggcaagggacccatcctaggcccgctttcttgccgagccaagcagcttagctggggctgtgcagccaggggcttacccaggccagtggaggtgccacagccctggggagccagacaggctttggtatcgtatcgcctctgtgtccttttaagagaggagagttcagtaccccgtgctttctttacactggagaggaactaaaaggatctctgtgtctatggagaattgtcaataaaaaggcctcaagcttcttgtttttgtcatgtctttgtgttggcattttccctgaggctggaagaccagatctctctggcactgctggagttttgcaggcctgggcaattcctgcaggaccaggctgaggggcgggcctttggggcaccatggtggcaggggcgtgggggctgcagcctggtctgggtatgagctgggggccaagaggaggaaagctgtgccttgcacgcaggagaggctcagcaaatgcttgtcggattgacttgaggcccagtcttgtgacccaattgtgagggcccagcactgggggttggggttgggactagaacttg

SEQ ID NO: 62372 - DNA, 1040 bp, Homo sapiens
gctctgtcctgggtggcttagaacagtgatttattttttttaaaccagagtgtaattttagatgattcttcagagaagagtatcagagaggcacaagtgtagtttggaaaagcagtcaatgcattttatttttggaaaatgaaaatgccaaatgttggtgaaatctcaaccataacagcagtaacttgaagtctgtgcctgcaggcatggattacagagatgggagaagcatgagtttccatccttgggtaacagcctccgagaaggggatgctagagggccttgtccccttgaggtgcccctgagagtaggcaggggacataactttaaattgcaggtaccgctgggaagcgaagtcacggagggattgtgcttcacaactggctgcgtccacagcatggagaggacctgcacgtgggtggcctacaagacaaactgtccatgtttgaaaaaaaaaccaatttgttctcaggcccctgaggaggggatggggaaccagactgctgcagccctcgtgcctgctggggcaggtctggggctccagctcccacagcctggcgtgggctgagggctctgccaatcctttttgtggttggttgtgttgagcagcctcccgtgagccatggccgaccttgagctggcagtggtttctgggatcttcaggattttcagccctcggggctgaagccatatgaagttctgtcttcatccccttgtctccctggaacctttgaggcaccccctaagagaggccctggcccagcatctgtcttacagctggtggccctcaggataacacctacattgatggagcacctgtgccaggcaccatgctgagtgcatcatctcatcgagacctcatgacaatctccaaaagtaggttctgttgttaactctgtttaactgacgagtaaaaggaggtgtggggaggttagggaacctgcccaaggtcacatagctagtaagtcgtggagccgggatgtgaattatgccacatgagcttgcaggggcctcataagagaacctttggaggaacagag

SEQ ID NO: 62373 - DNA, 1106 bp, Homo sapiens
tttcatcgcccaacaggcagttatgtgcctcgtacacagcaagtgtcatgctgggagctggggatgtaggccaagtgccacccccgcgcctccacaagaggggcatccattctagtggagggagacagaccctgaacgcatgaccacacacctggacaagatgatttcagaaccctctgagcaaggtgctccctggagactgttccagagagagtggtcagggagggcctcggggggaagactctgagctgagacctgaaggatgagaaggatctaggcccagaaagagttgagggaagggcaggagtgaaaagcgggagacaggacaaaggctttgtgtgttgaaggagcaggagggatgccagtatggcctggagatgatggagagtccatgaggcccctgtagggagtctgaattttgctcttaggagccttagaagctaaactggggagtgacatgatgtgattcacatttttaaaggctccctccagctgctgaattgcagagtggattggagggaagaggggaagccaggtattctgtgaggaggcagctgcagaaatccaggcaagaggtcacgatggcaggaaattgggtggtggcagaggaatgagaaagaggtgacagagagaggtggactggtggactgcggggcagagtggacaggctctgctgtgaaattgcacagggggcaagaaagacggagaaatcaggggtcgctctgatttccccttgagcagctgattgatgatgggggtgttgattgagctagagaagacagaacagagggccagaatatgggcagggcagggcagaatctggagttctattttggacatattaagcatgaggtgcatcttagacatccaagtggagctgtcaagtaggtcatgggttattgtattcgtgagtctggagccacggggagaggttgtgactggagatagaactttcggaatcatccatgcatgaagagatcacctagaacgattgtagtagacagaagagaggacccaggaccaagcctgagtgcccaccccctgcccccagcatgtagagaccaagtacaggaggagccagccaagggaactgaagcagggaaact

SEQ ID NO: 62374 - DNA, 1013 bp, Homo sapiens
acacagcagcagcagaagccacttcccaggtacgtggctgtgccccaagtccctgtggcagatggctgggtcctgagcacgcagcagagaggacagcgagaggggctgcatctgggactggcactcagctggcagctctggaagtttaacccccaactgtcccacaccacgggggcttttcacctgtcactgaacaggcactgtgggctccttggccctggtgctctccaggaacatgccaggaactctgtggggacataaagcctcagtgtgcttgagtctgcacgtcctttaatgatacctgcagcacccagggaactcagcacccaaacagtcacttaatgagagtgaaagggagccctcttaataattacagcaaaaaaaagaagaaggaaaaaagaaaaagaatcacagaggcaaaaaggcatgaacaaggacactcctaggccaactgcggtgtgcagggtcaccccctttcacatctagccatgtctccaacctgctcttcactctccaccatgacaccactcctggtctcccacggagattcctgcacctcccccagctgctctccttgtctctagtcctgcagacagagccgttgaaaatgcaagtctggccacacccctttcccaccgaaaaccttctagaagctccccattgcctttggatgaagtccaaactctttgacacaatccacatagcccagcttggctgcgtctccagccttgtcactttctacttccctgtttacatctaagcagcaggcacaacaagctttcttcagttctgggctatgccaggcctcaccctcaggctgcccactccctctagcccccaattatccctcttcatctgagcgacatgtgctcactcaccatggtggtctcagcttagctgacccttcctctagggagacttccctgattgcccgaatctgggtgagcttccccaactctggactccccatgacccactctccctaggccttcagccctctgaacggtggttcc

SEQ ID NO: 62375 - DNA, 1040 bp, Homo sapiens
gatgcacagagatttccggtgcccacccagcttctgactcagcacagaggaggaagggtgcctaggagaaagggcacagagtccggaatcagaagccctggcctccccactcagtagctgtgacatcgcagttcccctccttctccaggactcagttacctcacccgtcaaatgggaaggctaatgtctgtactgcctcaagggatggacagaagggatggacaggtgtgatccagactagggatcggctaagcacttcactggtgtctagcacgactgttattcttccctccttcttctcgtacaagcagcctgaggtctgtgtggtcctaaaggcagcccccaggtcctttgcgggaggcaggagaggagcttttgggttggactgtctcttatttttaattgcccccacactccatagaggagagctggcctcccgccccagcccactctcctgccactgacccccagccttgtttcctccaggacatcgcctcacccaagttctccatgccctcccctgtccgcacggtcatcaccgccgactttgacaatgaccaggagctggagatcttcttcaacaacattgcctaccgcagctcctcagccaaccgcctcttccggtagatgctccatcctggctcgtggctcttcatccttgacagctggtgggaggaacggtcagggagaaggtttaagaatcagaaggggagggttcccagggccagggggtcaggccaaggtcaacacaggtcccctgatgaagaaacagaaaggaaggaaggacgaggactgggcaagaggctgtgggaatgcagggcaaagcctggccaaggagccggcctctgctattgcagggaaagggaagggaaatgtggcccaaagtgtgcccagaacccaagcgccacaagatacaaagccacactaccacaaaaaggggctacagggtccaatcactaccaggaaaaggggctacggggtccaatcactaccaggaaaaggggctacggggtccaatcactaccaggaaaaggggctac

SEQ ID NO: 62376 - DNA, 1248 bp, Homo sapiens
aagcatggtcactttggggaaacctctgccccatccagaggcgggcctggcctttctttacacaggtgtacttgagctttcgtttatttttttaaaaatcaagttcttctggagtgctctgataactcttcttattatagtaaacaaccctttagagcagtacttttcaaactttaatgcgcacataaaccacccaggggtcttgttagaatgcaggttctgatttcattaggggcctgagattctgcaattctagcaagctcccaggtgacattcctgcaactgcttctcagacctggctctgagcagcaaggctgcagcgtccacagagccctttcatacagctcatcgtacaacatgatgttttgaaataatgtagacattgtggaatggctaagtcgagctaatcaacatatgcattatctcacatacttttttgggggtgacaacacttaaaatctactctcttagcaagttcaagtatatagtgcattcttattaactaaagtcaccatgttgtacaatggatctcttgaacttattcctcccgttaaactgaagtgttgtatcctttgaccaacatttccccaacacccctacccctagcccctagtaaacactattctactctcttcttctatgagttcaacttttttagattccacatataagtgagatcatgtggtatttgcttctctgtgcctggcttatttcacttagcataatgtcctccaggttcatccacgttgtcacaaatgacaggattttcttctttaaggctgagtaatactctattatgtatatatatcacgttttctttatgtattcatccattgatggacacttcgtatcttcattccatatcttggctattgtgaataatgctgcagtgaacctcagagtgcaggtatctcttcaacacactgatttcatttcctttggatatatatacctagtagtgggattgctggatcatatggcagttctatttttaatttttaaggagccttatactgttttttataatgtctgtactcatttacattcccaccaacagtatacaagggtacccttttctctacacccttgccaacacatgtagtctttcatatttttgataatggtcattctgacaggtgcatcttacctcatttggtcctctcaaaaccccaaagtagaaaaagcaggtcggactctcccccattttacaaatgaggaaactgaggctcaagggtaacgtaaattgcc

SEQ ID NO: 62377 - DNA, 2097 bp, Homo sapiens
ccctggaacctcttgccccactgcctctggtaacctcaatgatgggtgagcaggttctgtaggagaaaactgacaaatcacaaaagccgagatttaaagcattctttattgccaaatcgcagatgaaattatttacttacacataagcaaccaggaattgagtgctaaatccctaggcttcagctgggtcccgtctcggataactgagctcaaagaattgagttcttgttccaaaacctctccagcacttttttttgaaggcacgctctcccctcatctttctggttgggggacctattgtcagactctctgacagggagatctttctagggaaggctgtttttctaattccagcacggctgctgactaaactctgataatctgccaatagactgctgatggcagagcaatccagttcctgttttgggtgccaaaaatcaggaagccagagctgtacacaacaacttgtcatgtgaacttaagccacattcataccagacctgcacttgggacagagagatcctcttgttggtcggccttcccaacatacccatcccaacgtgtgcagcagaggcttccaaagtggcagcctccctcagtctgaatcctggggctggaaggatggttgaggggtcctttggggtaccaccctgcctccagacacctgggtggtggcatcatctcaaagtcctgcccagaaagggttgtcactgcctctcctgagtttacaatgcctttccctagccacttttcaccctggtgaaagggggagattaatgttgacctgtcttacaaagtttgtgggaacaaatgactagacaataaaatggttagcacagctcaagccccatctaagtgcctgagagctccgcgcgtgaaggtaccatggaaaggctgtatcagtaataaactatgtttcccccggaaaagaaataaacatgcaggcgcttcagcctagatttgtacagtcaattttttctgcatagttgccagttctgtgcactgggctggcttggcaattaagtgccttgatcttgcaagggaaggggggtgcactggggggatgaagcacttgaaaatgacaaggtggaagggaggcaaggactgggagagcaggctagacacagaataaaagaatctggaggttgcggctgggtttgagcatgaagggggcattgttcacgctggctgggctggcacagaaccgaggagcgggaaggaggagacccagaggaggcagatgaggagcacagtggggatggaagcaccagccaactgtgccggctgggctggaaggacgggcagttcaaggaagaagcagcagctttggtggaggaacagagggaggctggggcagctggcgtgcccagaggacgtgttcgaacagctctgcagacttccaaaagccatttggctgacaagaacctatttggcccaccatgttactattctgtctgcgcgccttctccagcccaccctttccctgcccgccaagccccccaacactaccctgtagccccccttgtcactcagctaatgacacatggacgtctggctggaaaactagcccggagtgtcccccacccccgagccccaggaatggaccccaaatgtaagggccgccatgctgagcccggcctgatggctgaggctttgggcgcgtggccagcgctcagcaccactgtggtgccagggggcctgagaagctgggaggaaagcaggcagaaggggcaggccatgtccagatgtgcactcagggagctgggaggtccctggagccaagccacacagcacctgcctgctagagagctgtatgacctgggagaacctcccattttacaaagaacagacggagatccagggaggagaagggactcgcccaaggtcacacaggaggttggtagagagctagcacttagagccccatctcctcctgatgcttaaactgccacagcccgctgacctttccgatgacctccaacttaagaaccctaccagcctgcaagacaggaggggctgtgaggggaggcccacacccactgggatgacagccccaggctggcacccggacttgaggcagccccacccgggttgttg

SEQ ID NO: 62378 - DNA, 1364 bp, Homo sapiens
tgggatctgtgttctaaaaaagacacctctaaaaaagagagcagacataaaggagacacaagcaccaagtacgcatggaaactcaccagttactgttaaaattagacgctagcctgaagtaggtgcttatcctagaggaaggagtgggatcaatgcatggagcattggtcttgaactcctagctgcaagcaatcctcccaccgtggcctcccagactactggggctttataggcatgagccactgcatccagtcaatgaatggaaccttggaagtctatgtttaaattgagtccagaattctcttccttagccatcaccaacctaagaggagaaagaactagaaaagagtgtatttgagccttggggcttagggtcataaggccctatagaggttaatttctccaagatcctgtgtcttgctcggtctcctccctgttcacatgctgagtctctcccctcctttcactctgacccaagatccagactcgtaatttgtgttttctaatatagctcatatattttggttgatttttttaaaaaattatattaaaaagttttaaacatatacaaaagtagacagaataggataatgaaacctctgtaatttctgtgagtttttcatgacgttttcccccctaagtaatgatgtcctggggtgcagtgttgttatacttcttggaagtaacaaaagatgagaaaaaggataggttgtttggggatagaatatcatgttgttaagagagaaagaagatagaagttacaagttctgttgactttcatcttctccatagggttgggggtggggtcttcaagcaggtagaaccaataacctgttaaggaaactccagcctaaggcaggtgaggctcacacgtggccattacaagaccattctcaggctagtgttgctaaaataaaattaaaaaaaaattacaagaccagttgcacacaatgacacgatggtcctggaaaatggggcagccagggaagagaacaggaaaattatatttcaaacatgaagaaaaaaagagtggatctgaaaattaaagaacagtgagttcaaacaaatggcttatacatttttaggacatagtgtggggatcaggagctaacactggctgcctaagaataatctgtacacactacccttgtttccctgcaaggaggcatttggctggtagattggcaggatgctgtagacatagtttatttttgttttagcgaagcagttaacagtctttctacacattttacattgaatatgttgacccataagccagatgatcattctcttagccagaatcatgccccaaaggtggattctagagctggaagaaaggctctgtccagggtcctgccttgttg

SEQ ID NO: 62379 - DNA, 1034 bp, Homo sapiens
gcagcagaccacgctggccctgaggacaggttgctcagtctggcttctttctctgagtgagaagaaagccgttaggagaaggattttgagccaaggggtgacatgatgcgacttgcactttaaaaggatgctctgattttcatgttgagaatagactgaaggaaggaaagggggaagctgagagctgtcaggaagttcttgcagtaatccaaatgaaaaatgatgggcttaaaccagagattagcagagtgtgagaaataaccatgttctgtgtattaatatattgtaaggtagagccgacaggatttgccaataggaattgggtatgggatgggagaggaatccagttagactcggagcttttggcctgagcacctggaagctagaagttgggaaaggaaagacagcaggagtaggtctagaagagctactgggagctcagtttttgataagttaagtttgaaatatctattaaacattcaagagcaatgttgagtaggcagttggatatatgagtctggagttcagggaagaggtctggggtggagatataaatttgagagttgtcagcgggtagatggtatttaaagccctgatactgtgtgaggtcaccaaggagtgaaaatggatgggagaggagatacccaatgactaagcctactgcctccagcgtcagcaaccatttgcaccctttgctgtggttttggcattttgagggttaccaagctgggagtaggtctgggtggggagataaggcatgatcagatctgtgtttctgatcaatggctctgtggggtcgtccatggtctatctcatcactcctgagcgtggagggattataagagcttcctatctgaggtccccagcaggcaatggttaatgtctcagatttccatggttacatttgtccaaagatcagctaacttttaatctcaagagtcatcatcaacaagcaaagcacattggcagccctttgatattgacagggaaaaatgcagacttgggagaaagagaggaggagaaagagaaaggaa

SEQ ID NO: 62380 - DNA, 2096 bp, Homo sapiens
gaatgcgataaattctggattagaggctgggtcagagtggagtaggagaggataaattctaactgaagaagtctggaacaattttgtggaagcagtggcaatggatcggtttgctcatgaatagatagaatttcaactgagggatgagcatttttagtaaaactaaaaattgctgcgatgtagtaaggtctttccatgtatccgacaccattccaagtgctttgtatgtgttagctcatctgatcatctctttaaccccatgaggtttgatgcatgtgattcccactttaaccccatgaggtttgatgcatgtgatttccactttataggtgagacaggtgaagcctagcaagatcaggaaacctgcctcaggccaaatactaccctatggggagctgggatttgaacccaggcagcctggagccagtgcccatgctgttaattatgaaacacttttgcttctacatgcaagatatttggttttctttcttattatcctcactttaaaatcactgatcaactctgttaagctttgttagaagtggaatgagcgcagaggacctactgaagatgtttgtttattcctcgctgtgggctttggagccacctataatcagtgaaggtctggatgagagtacgctgcggcggcctgcctttccgagctctagatggccaggaacaggctctccaggcacgcacctccctgtccctggagtgtctttctggtcctcagaggcagctaagctgtctctcttcctctgggtttgggggctccacgtcagtggtctctataggggcccgaagatgtaagatgtggttcggggaacgggccacacaccaggtagatggttcctctttcttccaaggcttcatgacctcaaggggcagccgggagctagctcctcattgggggcccaggagcacgctcaccgagtgtgcgtagcttccctggcaggtggagaggctcttggcacagagggcggaggagcatttagacagggcctctgtataggagtgaggggctggaagcccagtcttccctcgtctcccccagccctacccccgtgtgaggctgtgcaggcttggaggaaggggcgcctttttgtcattcacagggagagtccatcttagaactatgcagaagactggctgccagttgtaacagaaatggtgccccacgtcctttaggaaaaggtgactccattccgactgggccaaaatgccgacagggtaatcctctttctgctcttggatgccaagagatgttgagtcttccagctgcttcttccctgaagaagaagaagaaagcgaggtctgccggctccccatcccgcccctccacgccccatgcagccagcatctctgtgcacagggccccggaggtctgaagtcttttgaaccctccagccaggaggcgggtcaggaaccggccctggcgcctcccgcagcacccgtgctccgtgagggggctgaggacagccgcatcagtcagccgggccccgggtccctctgcgacctgggattgagccaagagcattttgtgttaaatgccgacatataaatttgtagacgatccttgtgcgcaaattggattccttcgcagggcccttaaatgctgccgtttagccagatttaactgtaggctccggcccctccgccgctcctcccgggccggccctccaccgccacccgggaatcgatcccgcgccagtccctgcccgcgctccggcctcctcccgcgggctccacgttctccggtctcctcctcccccactgcccgctcccttctccccagcgtctccctctgcccgcctccccttcccctccgtctctccctcctcctgtctgcgccgaggcagctgcttccaatgcagcgagatgcaccaattcattcagcctcgcagactctttaaggtcgttactaaatatatcaagaagaagaaaggggtcttttttcctatctctgaacagggagcataaatgctggccttaggatccgagcctgtcctggctccctgagtccagcttctccgggctcccggcagaggcaggggtgaccccgagcggaggggcagaggggaagcggaggggacccg

SEQ ID NO: 62381 - DNA, 1026 bp, Homo sapiens
tgctgggtaaaccatgtgaaccttcaattctagactctcaagatgactctgatatgctaacgtggtgactgagtgtgctcaggagaatggcaaaacaatattttagagaataagcaccaaacaagtatgaaacatgccaaagggcaatggtgatgcccactacagggaggaagtctacctttggagaaagcccaccagtagactctcctcagttaccagggaagccacagagagagttatggaatgccctggaatgcccttagaagtcatcccactcacccataaatacttagtgagcacctacactgtgcttacattcaagaagacaggtttagagaggttaaataatctgtccaaggtcagacagacagttaaagccaagacatctactgaaaaactagcatttcaattttttatgacaagagatagaaaaagaatgtttgacagaaatgagttacagaacaaataaataatccaagactgtcttagagcctgccaaaagtagagattctcctctccctcccctcattgggttgtgctcttttgatcacaaagagatagaaatttcaagacaccaagggacagaaatcaattctgagagcttcattcttcctttgtttctctatcaaaagacacatcaagaactaccacatttcttcttccttgtgtctgaaagtagaattcttctactgttgaaatgatccaggaccctaggcctggcaatggcatagtggtagaagacagaagattcatctattcctctggcctatgtgtgtgggtgtggccgggtgaccatatcaagatgcgggtgaagtagggtgtgttccacccactctcttgtttccatctggggcctgcagtgtcatccaaaaatacgtatgcatataacacacagcatacacacatttttttattttgggaaacctaatggcaaatatttttctaatctaaaagaaagttaagaagcaaggaaacatgatgcctatgcaaggggctttaaccagaggtttgccaatggatgttaca

SEQ ID NO: 62382 - DNA, 1090 bp, Homo sapiens
taccttcacagaagcaccagaaacaatgattaatctgggcacctgtggcctactcaaattgacacatgaaactgaccatcacaatagttaaaataatgcacacaaaatgcttggtcctatgtctgacatgtggaaagtactcagatattagccagtactgccatcataatttctttttttgctttttttagagacggagtcttgctctgttgcccaggctggagtgcaatgatgtgatctcggctcaccgcaacctccgcctcccgggttcaagcaattctcttgcctcagcctcccgagtagttgggattacaggcacatgctgccacacccggctaatttttatatttttagtagagacggagtcaccatgttggccaggatggtctcaaaattctgacctcaagtgatccgcctgcctcggcctcccaaagtgctgggattacaggcatgagccaccacacccagccaccatcataatttcttactgtcccaccttgtgtctacccatgagatcgttcagagtcttacccatctgcaaatgtctgagtgctactttttggttaatcttcatctttaatgaactggattagtcagaactcttttgattgcaatagaagaaactgtttgctacccacccctccccaccccaaaaaagagaggatctagaggaggcatactggggcacacacagaactcaaagttaagaccagattaactgagccttgagaaagcagcaaagggacagcaggggctgtcaggacagacaggagccagagaccaaatgtggccaggatcgctctctgtgtccctgcttctcatccccatgtctgtgccttggcctgtccacttaattatttcagagcatctttctccataagtctggcaccaaaactgctggcaatcctggcatatatcttcccagcctgaccaccagagagaaagttccaattacaagaaaagaattctgggtgaccatatgcccatccctgtgtttcagggacattgtgtggttgggaaagggggtaggattgatcttcaaatgcaaagggggtctgttcctagatccaagatggaagagtgctgagca

SEQ ID NO: 62383 - DNA, 1043 bp, Homo sapiens
tgtaacaagccaagcaggtaggagtaagacggatggttatctggattctcccatatattttaaagtagggaatgccaacctagaggtcacagagttattacatgacatctgagaatccatctgtgcatgggctttttatcaatagatgctagtacagctaccattatatggagattctttaacattaaaaggtatcgtcacacctgaaagtgttcaagaccatagtcttaaaatatatgcttatgtactgtcataaaaatgggattaaaaggagccggagaagggtcactgaaagaagagggaatgagagatttcagacaagacatggagaaagaatgagagaacagaagagtgagaaaagaagaacagagagaagaactgtacacaagatgtaggagagaaatgatggagtcacgcaatctgtggttacacaaatctgtggttaaactctaactccttcccttcctagctgtgggaccttagaacgagttacctagcctctctgagttttggttttctcatctataaagtagagacaataatagctaatagcctacttcatagcactatggtagtggcggtattaaagttctccaataagagaaaagaactaataggagttatggcatgcaacgtgtaacattttggccaaaggtgaaccacatgtacaatggtggtcccacaagataataaaattgtatctttattgtaccttttctatatttagatacacagatacttaccattgtgtgacaattacctacagtattcagtacagtaacatgctgtgcaggtttgtagcctaggatcaataggctataccatctagcctaggtgtgtagtaggcagtttatgtagtaggcagtttgtgtaagtaagactaggtttgtgtaagtacacactatgatgtttgcacaaagacaaaatcacctaacaacacatctctcagaacgtatctcagttgtttacatatgactctgtgtgtgcgttgggtggggggagagagagagagattgatttatttattatgaggaatcggcatg

SEQ ID NO: 62384 - DNA, 1172 bp, Homo sapiens
gcttttaccagagaggatttgtatccacctctagggccgaggggtcctactgacctgagaataccctagctctctccaagtgtcccggcttaatgtagggttctgtaaccctatcttgccaccagttcaaggattagtaatactctttatggtactcagagtccctcatttccatgtatttaccattcattgctgccaggtctaatttcagctcacttttctgtggggtgggatggttcttggagattttccttaagtttgtgaacccagtaatacactaaaaatatagttcattggggatctacttgttctgtagtggtagggtccttcagaggtctgcataccattggaaacagaaaaatagacttaggaaatccaaagcttgtgttctttctatcaccaagaagacattggagggtacgtgaaactaaaggaagtaggatttaagaggtccttccccttagcttttcagagatgctcgaactctcttcttgcaaaatagaaagagttctacagcatggaagtcttgggtataagacagatgaggaggggtgtgtgtgtgtgtttgtgtgtatgttgggggagagaagcatgtatgtgcaggaagccccatgcaccaagaaaagccaggccagactgtggtccttggactgttcctctctagaagagcatggagttcaaaatcagaatctgttcacagcacagatgataccatccactggtgtttggctatgccaagcaaagaaacatgaactgtgcacatcagaaaagattccttccccctcagcagccatcttcccatgttgtttataaaatacctatagccatatgaggtcatggacaactacacagtatcctttgatgtgcccagctgttgcagtcattctgtatgctgtccatgattgggcagtggaaggggattctccctgcttgggagctatcctggaaagcagcaatgcattccagagctcctcacacaggataaggtggccggatctgctccttgggcctccacaggaccttcattccttctgggaagaatactcctcctctggagaactgttccaatcacaggatcctgtggggctgccaatcaaagtagccctttggccactagggattagtccagtatctaatcagtatcttgatctgaaattttctatcttgaagga

SEQ ID NO: 62385 - DNA, 1044 bp, Homo sapiens
tttttctctttctctttcaagaaatgtgcctttgtgtcctctgtgctagtgaagctagaccatcatttgcactgactacaaggtttagaagtctcaaccttgtctagcttgctgtttatgtgggtcctataggactttggagtcatcctccggaaacaagaactagaccatcctgggtcttgatgtgaaatcagccatttagagagacccctatctcttcttccagggcagggttgagcaaagcagcctctgtctgagaaagcttaggctgctggatgttattctgaaagatgatatttattgctcacccccagcaaagaataagagttacacagaagacaggatggcaaaattgggcagtctcccagctccaggtcaggctttctttgtggctgttgtgaagcattgcgaattctcagcgcatcagaaagacacattctaatttgagtaccaaaatacattccaaaggcaaatataactttttattatcttcagctttggatgatttgtcactgtctccttttttgggctggataaccaaaagtggactatacagacatatttaaatcaggaccttgggaggtcatttggtccaccccttgccttacaataagaccacacctatagtattcggaggctccatttactttgagccatccaagcgaacgtggcaatcctactgtaatccagctcgatagttacttatgtcaagaaccgatttgactaatctgaatcccacatattagagtttaataagccatttcttttaggttttgttttgctattgcctttgaagatataaaccagatgatcactgtcttttcaaacaatgaaagctaggatcactgccctgcctttcatcctatgtggactttttgacatttctgattttgactcttagatttcatccaccctaaacctatatttaattctgctttattatctgtctgattgtcaactcactgtttaagaatcatgtagcaggagttgaaattttgaaaaattgcatttgaaatcttcatcaggggcacctatggttcagtt

SEQ ID NO: 62386 - DNA, 1055 bp, Homo sapiens
gcaccctttctttccttccatctggaaccatgggaaaagagtacaaaagagtggggggtggggtgggggggcacccaacgggtctcctgcaacagccagggcagaaagagggagagccagaccatgagaagcagagttggctgctcattgtaggggcaggggctgggggaggagtgcaaggtactgaaatcagagacagctttgcagtggagacagggagaggctttccatgctctgaaaggctttccatgctctgcaatctggctagctccttccagatgtccaggtcccagaaggagaagaaaatagggtgaagacactttctgttcatatctcaggtcttacttttttccacattaacctgagggaatacgagagtataccatcttccaagatgaaaggagggcataatagtagcaacttggggggcgaggaggaggagagaaggacggttgccttgccattctctgtcctctgtcagtccccagggtctatcaggggaggccagggtcaccaagtaggaggcagggcaaccatccaaacagaacatctcagagatgcatcaaagtcctttaaccagagattctggcagggtggcacatggctctgggagtcagtttgggtatggacttagtgaggagggtgtctccctgattcagagagcaactggacagtcacagaactggacacaggcaaggctgattaactgcaaccctgctcaggtcaccccaggtaaaaagcgtcattacaatgattccatttctccttttctgtcatattcagctctttagttttttccttctaaaagcccagaactgtactgtccaattcaaatgtggctatttttaattaaaataaaagaaaatttaaaaattcagttccttggtcacactagccatttcacatactcagtagctacgtgtggctggtggattccatactggacagcaccaacacagaacatttacatcatcacagaaaatgcttctggatagcacaccaatctacatctagaaggcctagaattgagcaactctactctttgcagtgtagaa

SEQ ID NO: 62387 - DNA, 1209 bp, Homo sapiens
caggatgggaggtaggaagtcacttgaggctcccctgagaggactgaggtgacatccctcccttcccacatgggagcgtcactatgtagattcctgccatgaatcttctgtgtgtcctgaagcaggtcccttagcctctggaggtcagtccctgtaatcagaggagctgggtggcaggctctttccgtcaccggcagtctcttcctctaaggggtggcacattccctttcactctggtctctaagaacaggctctttcttagaaatcatcatcatgcacctctcatctgagaagctgtgtatatccaaagaggcttttttcaggtggggaaataagagtcctcaaggagaaatgctgccttgtaaacagtatgagggagacaccgtcatttgttctcagccacaaattcagtgcctagcatggcacttggcatgtggaggggctcagtaggtgctcagtgggtgcacaaatgagtaagtgaatgttggtggccattctggggcagaggtgacccttggtattcgatttgatctccaaacccgccttccatctagctccttcccagagctggcacaaggactatgtaaacctccaaaggtcccctgatcaagcagcgcttgaggactccaggcaaggcccactccatgagatggtggctggctctgagcctggagcaaggctgagtttctcttcctctttacctccctttgctgttttccctctccttcccgcccccttcccacctggctgctgcagggaagctcagtgcaggtttactttgcttgaagctgatagactgcatggaaatttggacttccactggagacaaactaggaagtgaatcacaaatatatatctgggaggatccttttaaatagtggggtccacgagtgcattttaaattatttagggaaaaaacttgacacgtaaactattaggcctggaaaagaactttggaggtcatccagtgccctaccccacccctggccccaggatgttcaaatcctctctgtgatactctcactcactcttcagaaacacggtctatccatcctgcacactgctgcctgaagtctaaaatgccctttcaaaaatgcaagtctgatcctgtctctgcccgacttcaaaacttccctcatggtgtgactccaggctccttaccgtggcatagcaggctctccaggccccagctgctgccccacataagac

SEQ ID NO: 62388 - DNA, 1035 bp, Homo sapiens
ttccctgcagcagccaggtgggaagggggcgggaaggagagggaaaacagcaaagggaggtaaagaggaagagaaactcagccttgctccaggctcagagccagccaccatctcatggagtgggccttgcctggagtcctcaagcgctgcttgatcaggggacctttggaggtttacatagtccttgtgccagctctgggaaggagctagatggaaggcgggtttggagatcaaatcgaataccaagggtcacctctgccccagaatggccaccaacattcacttactcatttgtgcacccactgagcacctactgagcccctccacatgccaagtgccatgctaggcactgaatttgtggctgagaacaaatgacggtgtctccctcatactgtttacaaggcagcatttctccttgaggactcttatttccccacctgaaaaaagcctctttggatatacacagcttctcagatgagaggtgcatgatgatgatttctaagaaagagcctgttcttagagaccagagtgaaagggaatgtgccaccccttagaggaagagactgccggtgacggaaagagcctgccacccagctcctctgattacagggactgacctccagaggctaagggacctgcttcaggacacacagaagattcatggcaggaatctacatagtgacgctcccatgtgggaagggagggatgtcacctcagtcctctcaggggagcctcaagtgacttcctacctcccatcctgagcacaaggaggacaagaccagggtcagacctcatgtgaaaaacaccaaccaaggctgttcccaccaatcctataagagcgcctctgcccttctgggaggggaacttccagctcccaggcctgttccccttcctaagagctgtgttaaaatttgcacaacatgatgcttcctttaagacaggtctacatcaatagagggctggaatgccaaagcaggaatctccaccgaggtggctgctctctaggtaggtgaaggctgatgtaaggaaagaaag

SEQ ID NO: 62389 - DNA, 1057 bp, Homo sapiens
cttggtgccgctgtgttctttgaactctttaagggttcatggagttccagaacattagagccagaagcaaggagccttggagagcatctcatccaaccccattccatcccaacactcacatgcacatttaatttacagatgagaaaactgaagctggataaagccaaggtcacatggctatttggtggaagacatggaactaggccctaggattcccactgctcgattcagagctgtttccactccagcggcctgcttcctcttcactataaagatggacatactttctctatacagtaggcactcatagttattgactgaccaggctttggtaaattaatacatcccatacagttggggagattctattttgaatctgtttttcagagtgaggaggtgaggagaaaatacagttcttgtcatggacatacacaggtcatagaaattcctaattattctttccctgcctctacaatctcgtctcattattccaagtggtgttttaagcaaaagccatgcaagtccaggtttcagtctgtgcatttaggagtcagaagtgccgagtccctcactgtggtcttggaacccaggtctggagcgccaaggaatgttggcgtggggtctctctgcttgcagtcacaccactgctggtgagacctcccagattcagattatagatggattggagagtttccaaagagtatttgcctatttcccccacccttgctgctcccagctcaaggtcagagtgctaggacattctatttttgccaaatccttatgtttggacttcttcggtgacctgcaagatactaccatttccattgccctttcttctgttccgagagcctggctgtcgacatctgagctgggctctgggaaacaggtttgctgagtggcctgtgggcggccccctttgttctcttttttttttttttgagacggagtctcgctctgtcgcccaggctggagtgcagtggcgcaatctcggctcactgcaagctccgcctcccgggttcacgccattctcctgcctcagcctcccgagtagctggga

SEQ ID NO: 62390 - DNA, 1115 bp, Homo sapiens
gccgctgctgctgctggtgggtgcacccagtgtggcttctgcacatcccaggagatgcttccgttctcctgacaggacacattcttgagttgcacttgaggtgtcttctgggatgggtgcaggactttccacgtgaagccaagtggaaaagaagggaagagggtcccaggacaggggacagttctatagtgttttcttgagtcaggggagaactcatgtgggaagagataagcgattgacggagatttggaacccagacgacttggggctggagatgtccaagactgaattagagctcattgagagtcacagagtacctcaccctcagccatgggggagaggtggaggctggaaaagtgggaacatggtggctgttccagcatggttcttgagaaaatgttctctctctctctctgacttggttaagaacatccttctggcagtaggtcctaaagtcaatttaagaggtaatgaagggagttgagggtcttgatgatggcacagaggaccacaattagaacatttccatttccggtgggtactaatggactctggaaaaggtcgaaacggtgtgtagggagtctggggaacctgctctgtggctgctcatttgagcctgaatcctccaccttatcccatccctgaatgtaggtggatgttcaaactcctagggtacctgcttcagcctggagatattttatgggtgctatcaatctatatcccaacccccagctccatcgttgtctgctgcagtcaacatttttctgctgcatttcccaagaccttctctccactggggatttgtgcagcgaaatacctgcttgttgctctttcttcccttctccatctgggctgcacctggtgttctgaaccctggtgtttattccttggtaccttgatgtttggttaagacgtcctatggctgcgcaggggtgcccctgtaaatctgtggaccaatggcctgtgtaattctagggagtgcaatagacttctatagaaagaataccaccaaccgggaaggcagtcctactaaacagcttgtgacagcctctcatgctcaagcgctcccttgcttccgtgctgaggcggtggaagcctaaaggtggagcagactc

SEQ ID NO: 62391 - DNA, 1555 bp, Homo sapiens
cctgtgctatgttttgccagcttctttcttacctttagttatgaatcagcaagataactattttttcacaccagacttgtatacaaagctatgacaatagaaagtcacttccattaaaatctactttgtatgctataatgtgttaatttttcctttatgttttaatcttaaacacttttggctgggcctggtagctcactcttgtactttcagcattttgagatcctctgaggtaggctcatttgaggccaagagttcaagaccagcctgggcaacaaagtgagacttcatctttattaaaaaaaaaaaatcaattaaacacttttgttccttgactgttttttacttaaaaggaatttttggaaggtatgctaattctcatctatagtgtgtgagtatgtatagtggatgctcagtaatgagtgtgctgaatagttctgaataggaacattttgttgattgtcctaggtcactgaggtgcactctggagaggccatgtagcattgtggcaataacctatgctttggagtcaagacagaccaaggtctgaatccaggctcactagatgtaactttggttcatatgatcattctgaattcagtttctcatcatctggaagacagattagactaaccctgcatggttgagaagattaaagattattcgaatgaggcacatattagccaggtttagtataatattaaagattggggtggtgttgttattactatttttaatttttattttttttctgaaaggtatggattttgttgatacatctatattcattcccctaatgcttcaatgatcagtgtgtttcttagccaaggttaaggttgttgactgtgaccatggaacctagaaacacacagcaaagctaattggccagcatggagtttgagtctgtgaccttgtcctcattagctccataagctaactattcacaaatatctcaccagaatgaatgaaaagactggtatattttttatttggccctaatgcaactcattagacataagtaaatgaactagtgccagaagcaaaagtatagatttttcattagcttatataaatatatgattagccgtcacactatgtataaaactcgtgacctgtaggatgatctttgacaaccccagtaacctaagcttataatttagacatttcttttagttgttgaattatatttgttgtagacttctcacctataggagaagtgagaagaaatggagctaggctattcatgccttgaaagagtaccctccttctgttgtgctacccacgaggaaatgtgctcttcgctagtgcagaaaacatttagaattatccagtaatgagcccagcaggatggatgaagcttggggaactcctaagagcttattgaattacagagaaattccagttgtcaaagcattagatagaggaaaagttatagggtgttacttagcagcagtaagcctgcatttggagagaattttcttttctcttaataaaacatggaccaattgcttcgagtctgtggtgtccatttttcactgtctcatgctagccttct

SEQ ID NO: 62392 - DNA, 1076 bp, Homo sapiens
tatatacaatgtttaccacagtccctgtcatgtagtaagcactctgtaaatggtagctgattattcttctttctcttcctctactactactaaatcactgctctaccactacttcacttttgcttgtagggcctaaactgtaatgaaacagaaaacacaattagacatggttcatcgcggcagattttgaaaaatatgtcattgttctcttgggcatggcttaatagttctttcttaactaagtagaaactataaaaagactttttaaaatgaaagataagaatctttgtcttggtttaagatagctttgcaaatgagtgtacaaaactagttattctaaaatgtatttgcttaatgcaaataaatcagcctttatatgagcttagggaatatgtaaaactaacagctcgaagaattgtcattccttattactcacctaacacaacctttttttttttttttttttggagtgagtgcttttttttgggaattgtttgaagtttttttcttgtgccaagaatagtcacagtagaagtcttgtccagtgtatgaggcacatttttgggggaatgggatggaaaaatcaccctgatcatttatccttaatggtaatgagtattagtgtggataatatatttggatttgatgtgcattatgtgattatttcttcagcacaattaacttcctgattaaactttgctcagcatatattgtgagcatatactcggtggaaaactgataatactgctataatggtggtaaaactgctagtttagttgatagacaatctgggttctggtcttagttactaccactctaatagtcttagataaatccctcaaccagatgattttcaaaggctcttttcagctataagctttttgttggtttgttttgagactgggtcttgctctgtcacccaggctggagtacagtgtcacaatcatagttcactgcaccctcaaattcatgggctcaagcagtctccctccctctcagccttccaagtagtgagggttacaggtatgtgctaccgttcccagctaattttttatcttgttttaattttttagaga

SEQ ID NO: 62393 - DNA, 1043 bp, Homo sapiens
attggttccaagactttccttggataccacaatttgaggatgttcaagtctctgatataaaacggcagtatttgtatataacctatgtacatcctcctttttactttatatcatctctagattacttatacctaatacaatataaatgctaggtaaatatttgttagacttcattgttagggaataataacgaggaaaatctgtgcatgttcagtacagacacaatttttttaactgaatatttccatctctgggttggttgaatccatagacccatggatatggagggccagttgtactgtacttgtgattgacattgaaagtgggaagaccttgaaagtgtggaaaggattgggtatattttttattttattattttattattctaattttattctgtcaaagaatcttccaattttttactcatgttttctcttttaccttgctctacaaccagaattacaaattatttgaaacagaaaatattttctatgcctgttgtatacttttctgacattgaatatgctgtttagaatagtatttcaaaacttttattcaagtgaaatcaacttagtgaataaatagatcttaaattgtaagaattttaaaagccttaaattgtaaaaagtgaagaagaattctagattaaaagtaatagtagtgcatatattaagggtaagtattttatggacttttttattattatactttaagttctacagtacatgtgcacaacctgcacgtttgatacataggtatgcatgtgccatgttggtttgcttcacccatcaaattatcatttacattaggtatttcacctaatgctatccctcccccagtcccccaccccccgacaggccccagtgtgtgatgttcactgccatgtgtccaagtgatctcattgttcagttcctacctatgagtgagaacatgtggtgtttggttttctgtccttgtgatagtttgctgagaatgatggtttccaccttcatccatgtccctgcaaaggacatgaactcatcctttttttcggctgcatagta

SEQ ID NO: 62394 - DNA, 1021 bp, Homo sapiens
aacaatagcgtatctttaaattttagtgattttttttttaattacaagaatactgcctgttctttttgtaacaaatttaaacaatactgtggcatatgttgtataaaaagatgataattctttataattctttttcctgtttcagttcctgctctcccagttgtaatcagtgttagcagtttagataatagctttttttttcctcattaggaatatacacttaagagaaattcttgctaattgagaaaattagtatttggaaaatacctcttaaaagtaaacctattaaaaatggagacaagatttattagttattaatgaaaacgacttgttagggacagtattcagaaatgaaaacattttactatatgtatatcatttttctatatgtttaacaaaatttaaattgtaactgcagctgtgctaattctcagaatcaacaaagaatgatgtgatatcttcctggcataatttttccagtagaattgtataatagtctgatagcatccttcattttgtgtttcatttatctagcatttgttatataaaatagacttgtgtatcagtcttatcaaaactcttgagggtttcaccagtttctcaagatattttcttaaccctttctcaattcttattctatcatcgtccttctttagttgttgagtgaattgttctatctttagttgttgagtggtttgattctgccagaatcaaaggatgttgctgtgagatgagcattttctttaatattattttcatagacttcatgaaatcctgcattcttttgagggtttgtattttcacattactactgagttgcattgtatttacttcgtgtgattgagtatttacagcaataggctattagtgagaaattgataaacaaaaccaggatacatggttgcaataggtgttagtgtctagtagaaacagatatcaggggacattatgaatactagtgtatcataagggccttgactccgtctgcaaacttgtaacttaagggattcaatgtccattt

SEQ ID NO: 62395 - DNA, 1050 bp, Homo sapiens
actttgagagaccacattcacgtaacttttatatattatatataacaatattacgtatcgttatacttgttctgttttattagttattaatcttttcctgtgcctaatttataaattaaaatttatcataggtatgtatgtgtagtaaaagacaatatatttggggtttggtactatccatggtccaggcatccattggggatcttggtacatatctgccgcagataagagtggggactactgtatcctgacagtccacaagaatggggatgcttctccttttttgtgtctgtgagttatgaaaaaatgggcatactggtggattggagtgtctcctactggcctgagacctgattgttaaaattttaggaattctgcaaactgattgttaaacacagctattattaaaaactaaagaacataggcttactattaaaattacattttaaaagctaataaatacttcaaactcatcacttcctaattattttactacattttattataatctatgcttttcaagctatttatgtaagtatatcatacctctggttgaaataatagaatggtgtgcttttgtacatttttttccccaactctatatttggtgatctcacaatgataactagaaattagctatgggaagaatgtttacgctacagagattgtcaaatgccataaatagggcttgatttcttatttcttgattgtctagacttaaagtgatggagaaaatgctgctaataaaaatgtgtcatgcctttagttattatattgtaactaaaaaaaagtatatattcttccattcttaaaaaatgattacttcagctaagaagtcgctcacatcattgacatcagtgacataaagaaaaacatcaagtaatactacaaaggacacttggaaagctgattgctgaatatttgccagcacactgctggtcatggcacagtcgaaatcattgctttggtaggaaatagataataatataaatttattatactgattttcagctataggaaatagtattacatgtgagcattatttaagaa

SEQ ID NO: 62396 - DNA, 1032 bp, Homo sapiens
gttcctggaagtccagatggtgtctttgatcaaacttgcgtagattttgaagttgagagtgtaggtggtatagccaatagtacaggtttcatcttagatcaaaaagatacagattccattcctgcaactatgggtcacatctctctgtcagagagcacaaatgacactgttagtccagtaatgattagagaatgtgagaagaatgacagcactgctgatgagttacatgtaaagcacgaacctcctgatacagctgtccttgctcatgaaacacatagagatagtggatttaagaatgtaggtgacattaccaataaagcatgtatgatggacactacaggtatgtcctgtagtgatcatgtaactgttgatagcccttatgtagttgcagttagaatagctgatgagacctctattaatacacgaagtttctcaaagtttgtaggaatgagtgcagatgcaacccctcttcatgtagctagaagtgggaatgacactgaagatttcagcaacccttctgcttgctcagatatttatggtgagagtatttcatctcattttacagagtcaacaggaaagttgatagagagcttgtcagattgtgcttcctccttacctataaaaaagattgctggtagtaattataacacttttttggactctgaactcagtatgttaaatgggacaaaagttctttcagacagtgccgtgggcattgacctgggtagtactggtgatacaacagaagcattgcacgaactaagaactgccgaagagttcaaaacagaagagcaagatgactcagggagtatagaatttggtgtatcttttcctgatagggaatcatcatctatggaaacatccatcgaaccaaaagcaactgaaacttctcacacagagggaattactgccattgaggagagctgggagtctatgtttaacgatgatggtgactgcctggatccacgtcttctacaagaggtatgtttaattgaaattgcttgatgcttagttagtttataaattaggatt

SEQ ID NO: 62397 - DNA, 1495 bp, Homo sapiens
ggtgaatatagagatgttattaagaactaaagcattgagagaaggctttagtctgagaaaagaaacagtgttcgcaagagttggtgaaaggactgcatgaggaatagagagagcacatgaacatggaggagagatgaacagcttcctccaaaagaagagcgtggctctcatggccttttacacatggtgtagtactcagtaaatatttatccaatggatggcgttgatagggcagagttgggggctctgtctttttagggtggcttccaggggctttcaaaacatcaggggctggaacttggattcagtggggtagcttatggatatggcttgtgtattggaagagggggagttcaggtgtacaactcagtttttcaggtctttccagtgtttaggtgtaagataatttaggcaacaactcagtatttcgaggagcatagtaacataaagaggacattgggatgacctaaagctgggattgggaggaaaacagagaatatagtattttaagctgaagatggacagtgtctgggtgttgtgtttggcttatgtttggaggtacttggaaaagagtagggtctgtgttgaggaatgagcataactgagagcaggaaggagggaaatggattgagaatgcaagtagcagatccaactcctctgctttgggttttagaaaatgtaataatgatactgttattaaaagatgtcacaaatccagcaacattaatagccctttgatgacttctggtttattatttttattgctccaaacatactttattaagtgctaaagcagagtgagtgcctgcctcccttgaaaactttccaactaaaggtttttggctatcatcccagctggcctgtttcttgattgatagcagctagacatatggaggtatgtctaatacttctaatagtcaggtatgctgtagagcaaggtgtgacagccattggcttgtgaagcaatttcctgtgacatttgaacctccaaaactgccttagggggttagagtataagtaggtcattattgagctcccagaactgcaactcttgatgagtctccaagaatcacacttagtctcctaaagccacggtatggaatgcccagaaacttaaggtggtaattgatgaaggagatgatattggcatgactttttttagccctctgaattcttggtagaagaacacaggagttatttttcattagaaaatactttcatagccctactgccatctgtactgatcatcagatctgttggtaggaggattaatgggataccaagaacataacattgatgttgatagataccagcatttgttaccttcattgtcatttctggcactgatttgaatttttagataggggtaaatatttaagtagtatctcctaaactttttaagaatttgaggccttcccttggttacagaaggccactaatattataccaccatattctataatagtatgtagaccataatgggtaagagaagagt

SEQ ID NO: 62398 - DNA, 1089 bp, Homo sapiens
aactataaaacattgttggaggaaattaaggacttagagaaatggaaagacatcccatgtttatctactggagaacttaatattgttcagatatttcctaagttgatttacatattcagtgcaatcccagctgcctggttggcagaaaattttttgcagaaattgacaagcagatcctcaaattctctggaaatgcaaagtgccctaaataatcaaaagtgattttgaaaagaacaaagttggaggactcaggctttctagtaagcttcttgatttcaaagagtactataaagctacagtaaccaaaacagtgtggcactggcataaggattgacttgcaagttattgcagactccttttgtccctggcctctgagttattccaaactgttaacactaatctactctagacgtttaagaatttattaaagtttaactgatatcttcttgcccacttatgtggtgatcacttcttccagtggtctgccaaaggcaaaacagtttatgtattctgtttctctttgggagagacttgtcattgtatggattttaagataagcagtttcccttgttatcttacaaactcagctctctggtaaactcaagaaaagttatgattttatagatcagctggtcttttctcttgttacagtgggaagaacattctcttctgctttctacatcctaagcagagtggaactaatatggtgtttggcatgtaacagacttagcacttggttaaaattcttttaaagtgggtttactttactgaatacttatgtgccaagcagtatgctaagcacttaccatatcatctcctttagtccatgcacttatctatgaagtataggtactgttattattcccatgttttacatgtaaaactgaggcttagtagagaaaaggaactggaggcacaggaataaataataatttttattgatattatccaaatcaccttcctccttctcccaataaaactcttgaatccatttttcaacttttccaaggaaaggagatatatattcctggcattgcaagttcttattttcctcatttgatgggaaaagagacacagtattaaaaccag

SEQ ID NO: 62399 - DNA, 1048 bp, Homo sapiens
tcttaaaactaaggatcattttgttgatgtctagaatttcttgaagatcaattaactcttacaaactatttacttccctttgctttgtttcttgataatctcacctgcaggaccatgtttctatcaaattcaaaaacattccccaaagagaaaaattttaaaggattatgaaattttgaagtataaaaggccctctagaacccatctgtgatttataaaaatgaaaatattaatattgatgaacattgctattaataataaaagtaatgaacaccattaatttattagatgcccatgaagtgctcaacaccatcttctttgccttgtcatggatgatctcatttccattttcacaacaactctgtggggaacatactttcttcatttttacagaggagccgacctagcttcaagagaggttaaacttgcccagggtctcaaggtggcagaaccctgagtccatgagcatttttaagctcttagctgaaaaatataactgttatgtcatcatcctgacattccttgtgctcactaggtagttgttctccaaaataaaagtgtttttctagtacttaaatgttcattcttttgatgctttctaatctggtctgatatttctcttatcatgattcctttcatccttaatttttctgactttgccacataattctttctaattttttcttatttttttaacctcccttctgcaacaagtgaagaatagatcagcctctctgattatagttgcccccttttttccccgttacttgacttttttaaaaaaattgaataacatcttcagtataatctcccctaccccattctcttctctttctgtctctgtcctcaaggacagagtttacatttgcattaaatccaggtgaccttccctgcctacctactcctcttatattctacccctcctctgcttcctctttccatttcttctcattccctgcccataagaacatctcttgtaaatagtgcattaaatactttacatccccaagggacttgtgaggattaattagttgatgtctataaaatg

SEQ ID NO: 62400 - DNA, 1627 bp, Homo sapiens
taaatacaatattttaggctttgtggagcatcaggtctctgtcactacttaactctgctgttggagcaagaaagcagccatagacaatatacaaaccaaatgggcatggctctgcttcagtaaaataataaaattactttgtaaataaatataaaaacaggtggttggctggatttggtcatggagccatagtttgctgatacctgatctaaaataattactgccacgttgatctttagatctgtctcttttgcttgctttgaaaaaaaagcataacatctaggaaatactaagagctatccctagtttttcctttgcatcactctacttcatgtcttctgcttccttttattcctctttgcagctcgtgatgcgttgggtattaaacacaccatggtgaagattcgtcccttgtcacaggccacaagagcagccaaggccaaagctagagcttatgctggtgagtctataatctctgggtttttttcttgctgatggtggtattattgttctttccagaagttttatagcatccagacatctaaagacatatcacttttatttttagtgttaaaagaaatatgtttttaagaaaaaataaataaaagggaaatgaccatgttggaaatatggcatctgagcagccacttggagtgtgtgagaactaactgcaggcaatgcagcaatcagtttctgatgacatccctacctagtttacctctgtgtttagctgcctgatagagtcactgtaagatactttgttaatgcagataatgaagccagggttgtttgtgctttgccatgttaatttcctctgatcatcatctatcagacttgtattaattactgctgatgcagcccttgttagtctattttgtatgttaattactgagttaaatcacttgaagctagagtgctctctcttcttgactccttcctactcccttcctttcttcgattcagagttcctccagccagcaaaggagcgtcctgagacttcagcagccctagccagaaggttagtcatcagtgcccttggggttcgaagtaagcagagcaaaaccgaacgagaagcagagctcaagaaactgcaagaagccagaggtgagctgaaagggtggtgttcttctctaggcccttcagaactcactgtaaggcatgtgtttaaaaaaaaatgaatgaagcccattccatttttgtcgtttctgtttcctagaagcctcctaagtgtatagaaattttcatgccttacgtccaggagaagatgtttcaggattgtctgcctgtttcacgcaccaagacattctaatccacgctcctactgttgttttccaagagataggtttggtcttctcagctcatccatggcttttcctacagtttttctatgagaaaaattttcctgtgaaaacagatagtgtcctagggagaaaacatttgctatggttttactgggccacgattgccatgatattgccctaatgttatcaaatggtttagatctgaggtagaagacaaatttaggaaaagccagcaactgacgttgatgataacaactgtaggaggtatttttgtctttttaagacagtcctgagtggctccattagagtacatctagatttacctg

SEQ ID NO: 62401 - DNA, 1055 bp, Homo sapiens
gcagattgtttagaaatgaggaaatctgggctctaatagagcttttgccattaactagctgcgtggccatgggcaagtcagttatacttctctgtgccccctggtttccagcaaagcgaaagtactcctcagcctacctaatcatggagaattttttgagcacagaataagttaacatatgtaaaaatgtttggaaaagtgctttacaaattcaggatatgattattgatatgactgttaagaatttaatgttcattataatatgagcttgtaatgacaaatacgtattatatactgctactctccatccattacaagtggcagatattgttaaatcagtcatgacattctttcttggtgagttttgacatgaccattgccaatttatcagaattagcatgggaattgaaatctatatatcatcctgttataatatggtataataatctcccagcctttctttctcccgcttgaagacttctgctgtctagcaacagtgcctggtacataaaaagatactcagtacatgttcattgaccaaatacatggatgacattggttactctaatttttctttgtaaatcttgactctactctgaatgctaagtcctccatgtttttctttataaaacccagaatgtgaaaccttcctaattaagaattttgaatttgtgattttgagttttaagtacttttctgctatatttttcactctactttgattatttatttatttattgagacagggtctcactttgtcacccaggctggagtgcagtggcacgatcacagctctctgcagcctcaacgtcccaggcataaggaatccttccacctcagcctcctgagtagctgggactacaggcatgtgccaccatgctggctaattttttccttttagtagtgatggggtctctctgtgttgcctaggctagtctcaaactcttggactcaagtgatctcctgccttggcctcctaaagtgctggagttacagacctgagccactgtgcccagcctaaaaccacattttaaagaccaaactcagggccaggc

SEQ ID NO: 62402 - DNA, 1050 bp, Homo sapiens
gtttgaacatcactcaatgaaagggataattccatgaatcagaaaatgtttccatagccttcagataagatgatccttccagagctctatgtacatgcagatgtgcatgttaaagagataaagtgatcgagacaaggactgactgggtatagaaggaagacagactcctgtcttcactcctaaatgcagttctttggaatcaccctactgtggtgggcgtagtagggagccatcagctaggaagaaacgtgggagatgtgaattccaagagttgcctggacagggcaagtcatgttagcgtgggtcacacttccaagatatttaaagcaaatacaaaacagaacagaggattcaaaccgcaagtatgggagatttaggccctgcagaggcagaccattccttagtatctcacaaagcagagtaatactggaggcagagtagggggtggttggagagcagttagtacaaagaggcagaacagtgtctggtttacttggcatacacagaatctgcactgccggttccagaactgcaaagttggtgaactacaggagatgtgggtatttagactccaaagtttatactgagctcagtgcctgggaccgctccagctgcactgcagccaggggggataccagcttcattcctcagagtaaaccaaccttgggagctgtgtgccagttccagtgtaagcagtaataccatgttgtaagagggaacattaaagcccattttatgacatatatcactgtggtgtttgttggtttttgtcattccaacaaagaaataggagagcagctttcttcttatcctcatgcctataaggctgtgcataagttaaatggatctgttgtttttattgaatcccagtgagtagagaattgatcatatctctgcctcagtatactacaaaagtgattatcctgggactgctatgtggtagctcctctccccttcatatcttccttgtacaccctcattccaacctttttcttgctttctgctatctctgcaaatctgataccctgaagaagacatgtggcacaccag

SEQ ID NO: 62403 - DNA, 1045 bp, Homo sapiens
cctctcccctggccagcccccaataggagaatacttcttctccagcaaagattacagaactgaggtctggggctctgcaaagaaacagacctgggaggaaatccagttccatcacatgtaaccttaggcaagttactcgacctctctgaggctcagttttctcgtctgtcagatggggagaatcatagtatccgacctcatagggttgttatgagtcttccatgagataatgcgtgtaactcattgagaacagactccagcgaaaagagagtactcagtaaagtttagctgcaatcttctccatttgtacagagctttacagtttataaagcattttcacattgacttgacaatctaatcctaaaggtagaccccagggggcctctaaattcatcaagaactggacattcgaaggtaggaattatccttgttttacagaaaagcccaaggctcagaaagattacacaacaggcccaaggcagggccaagcctgtgtgacactggagaacgtgccctagtcatggtgccaggctatttctcaaccaaggaaaaatgtcaccacacccatgaaggcatttaattttgccacagccttggggatctaagttacttccttgcactggctgtgctgggtaaacagctttatcaatgtgtcacctccaagaagaggccacagatacacgaggccaaggcttggatgttgtgatactgtcaacagctgcccacccattttcatcctgcaaataagtgcctggagtctggccagtggggcaaggtgacctcagtagagatgaaagtggagccctgttgaccaaagcccccaagctagaggccaaatggcccctccccgtgttgttttccagtgtgttttctctgttaaaatttaggctgcatcagtcccctgttggaaattgtgctattgcatatgttatgaaagctgtggccatgtttgtgtgccccaaacactcgtatgctgacccaagggatctctttagcgaaaaggctgaaagccctgagtaatccccaattttgaaagacgcccttt

SEQ ID NO: 62404 - DNA, 1044 bp, Homo sapiens
gctgctgggagagggctggatggtggcagggaagggctgaagatcaagatggaaaggaatagttgcacctggaactctggggagatgagatcccacctccaggatctgagtcggatggtctgtccacaggtatgtgctgctgcaccatgtgatggggggcctggagggaatgcagggggcctggggctacgtccaggggggcatgggtgccctctctgatgcgatcgcaagctcagccaccacacatggagcaagcatcttcactgaaaaggtgaacggcccctctaccccaccccaattattagtaaggatcccaggacagaacaaagtctcagatttggaaggtcccttgttttaccaatgaacagaggggccatgaggggatgggttgcagaatcaagagattaaggtcatgcagtctgttagtggctaaccacccccttggaattccctggtcactgaactgagactgagtgtttcatggagaagctgaggcttcatggagaagctgcagaacttggtgggatgggtttgggatgaagaagttgtgaatgcctaggagcagcacagaccatggaaatcccggaagatctaacatggatttcccttcctgcggtttctggggccttgttctggtgggctctagacagtggcgaaggtgcaggtgaacagtgaaggctgtgttcaaggagttgtgctggaagatggcacagaggtgagaagcaaaatggtgctgtccaacacatcaccgcagatcaccttcctgaagctgacgccacaggtgaggctgtgggcaggagggtggagcttagatgtctgccaaaacaggggttagaaatcgtggggattgagggagccaggattgcatcagggtgtgagatgcaaaagccaagtctctgcatttgggaaacaggggggtaagggcaggtagcaaacggggaagaagcctcacaggtggggagaaggggccagagaggtgaagtgaccaagattccggccattggcagagccagagctagaacccaggtctgactttcaatctag

SEQ ID NO: 62405 - DNA, 1012 bp, Homo sapiens
tcttgatctcaggcactgcgaagagaagcgggtggaggatgctgattaagaccagtggactgggaggcctgctcacctgcgtgtgttcagtatggggccactgtcagaggggctgtgcctgctgagttcaagaggaaatgcactggcacgttcttacactggcgtgtgcttcatgcccctccagctttcaggcagagttccaggtgtttgtccacattaaagcacatgaaagccaaaaaggaggatgagggaagatcagagaaaattaaggataaataaactgaatcaggaacttaggacaggagagttctaaatatttattcagtgtggcatcccaaggctccctcctggctgcccaaggcaacaaagtgtccatgatggtgtgcaggtctggtgacaggatgaacacatgtcggatggagaatgcacttttttcccttggaactgcattctaggaacctgctgggtggccttgtctagatgagccactgagttccgtaagggccctgccacagttggttctgtggatatagaaagattatttgaatggccattttgtaccaagcctggatattagctgagatgtagcattaaatcatatctcagtggagacatttttataagaagaacctaggttaatagaacccatgtacattgcttttgttgtgttaatctattgctgggtaaaacttagagaaccacagacacacagcctacatgtctcttccaccagcagttttcaaacctggctgatgatcagaatcacctgaggagcttagccttttattttgttattttattttatttgtttttgagacagggtctcactctgttgcccaggctagagtgcagtggtgcgatcttggctcactgtaacctctgcctcccgggttcaagcaatcctcctgcctcagccacctgagtagctgggattacaggcattcaccaccatgcccggctatgttatttttaatttttttgtagagacaaaagtctcactatgttgcccagg

SEQ ID NO: 62406 - DNA, 1012 bp, Homo sapiens
ccatgtgctgacaagtgctttggagaaaaatattgcagggtgagggggcagggagtgcgggggaggcctggctgataaggtggcattccagccaagacctcgagtcgtgaggttgcaggccacggatctggagaaggaagcctctcgacagcagaaactggaggcggcacaggccccttttgttttatctgtgcctgctttgaagaagtggatgtgctcttggaaaattctgtgtgctaatcaaatatttgtaaatcaaatcatattttaaatgcatcaaagaaacttccatttaaagtgaccctggagtaaatgagtctgcaaagtaaataaaatgttctgatgtgaataatttatctaccttgtaagtatagattttcacataaccattgcttgattgtgtctttctaaatttaattatttatttctgaagtggggcagttacagaccggtgctgagagctggggctttgcagttacagagctgtggttttgaaacccagacctacctcctaaagtgacctgggacaaattatttaactcctatgagcctctcgtgttgcttttgtacaatgaggataataagacagccatgtgccaccatgttggtcaacgatagactatatacagtggtggtcccataagcttacaatggagctgaaaaaattcccgtcccctagcgatgccatagttgcactgcaacatattattcatgtgtttgtggtgataagcctactgtgtggccagttgtcaaaaagtctagtacatataattatatacagtacataatacttgatagtaaatgactttgtcactggctaatgtatttattatactatacttttattattattttagagagtattccttttccttatttaaaaaattcactgtcaaacagcctcaggcaggtctgtcaggaggtatccagcaaaaggcattgctctctaggagatgacagtgccacgtgttactgtccctgaagaccctgcagtggggcaggatgtagaggt

SEQ ID NO: 62407 - DNA, 1043 bp, Homo sapiens
caaccaagttttattttgaaatttgacgagttaattaattgtatttgtgccttgcccatctccagaagtacattgctccttgagggcaggggccaggctccacactcctttaacctgcctgccccgtctcctgctgggcatgtgctgatgggtggccatgctcctgtgtctgcagccacagtgccagctccctgcgcccggccgacctgcttgccctcatcctcctggttcaggacctctaccccagcgagagcacagcagaggacgacattcaggtctcagggcagctttctgggcagagggaggccattagggaggtagttcagaaaacctgcctgaagatggtgggcaggctccccctggggactccatgttttctaagtcacaattctgggtgtgtggttgggcgtgacttctttcccactgctttcagatgtaaggggaattctggagtgcacatggtccagtgggttaaaagtgcagatttttcaagtcagccatggttcgaaacccagcttcaacacctggctgtgtgagctgagcccgtacttgcacccccagagcctcagtgcccttatctgtgcaatgggaataacaaagcatctacttctcaggggtatttggagggacaaaaggggtggttcccacagaacctggcactgcctggggcatagtgaatgcttagtgagtgtcagccaccaccatcgctgttgacctcatcaccaggggtagtggtgggttggataccattgtgttggaatttctcgaatttccacagaacagaccgcctagaatcgaatccctgggaagtctgaggaccacacacccaggactgcacccggaacgggtggaggggtggaggggtggaggcttctctgtgaagcgctgggaggcagaaggggtggagggagccaggtcagataggagctaaccagcctctcccctgccctgcacagccttccccgcggagggcccggagcagccagaacatccccgtgcagcaggcctggagccctcactccacgggcccaactggggggagc

SEQ ID NO: 62408 - DNA, 1066 bp, Homo sapiens
aggcagcgtgtgcccagcccctgtgaagctgccatttttcacatactgcccccagctgggtccctaggtcagagaaacagctcaagtgaaccttggagaccatctggtctgaccctctgactttatatctggtgaaacagagcagagaatggaactcacttgcctggggtcatctagctggttggtggccacatccaaactggatatttgagctcaggactctcagtccagtgctctttccatcctcccaacatcatcacccgtcattacaaatctggtctgagctagtcctctctggcttctcaagcttcagactctctctccagaaaaacacaaacccatgcacattcatacagtctcgtgaaggttttctcaggagacagaccttaaaacctgtctctgggcccacagtaaagaacttggggaaagagaatcatggttcagagtatacactgaggtgggagggaccccagaaaaggcttgtagttgaaatgtagacctagaaaagagaagttcgtagtatcaccaccccctgattctctaagatggattgggaagctgcggagtgtgaagctctgggactttagttttgtggcgatatgagcaactacccatattgaggcatttctcaaatgcacaaacattgtttcatgagtcattttagcccagataggtcatggtgtcagtggcaaatgctgcaggtggcagatgcctgttacatgaatcacagtggccagtgcagacgttgccagcatccgagatggctgcgaccctgagtagggccctgatgatggaccagatctttctgtgttcagtggcctctgtgtgagaagcttaagcatcaccctggctctctctagctggctttgtatgacatgtgtttgtgtgacagaggctgaggagtgaggtgatttgctcagctgcctgccttccggctccgtgcctatcccaccccactccacagttagagctcggccggaaacctggccccctttcccagctgtgtgggcaggtcatatgggctcaccaagctctgatgctgagctgagactgtggtcctttggtt

SEQ ID NO: 62409 - DNA, 1042 bp, Homo sapiens
tccttgcatatctgatgcggtcaacactgaccttcagatctcaattctcccaccccatgccttccagaggcaggcctcgctctccatatagaagcctcctactcacttattcactcagtcattctagcaaagggagggggcctgctccctctggcctatcagatctggacctagcccaaacttacccatgtggggccaggcctggatctcttctctgcctagctctccattgggagcaatttacaacacacttatctctgggaattcactgctctattgggcatgggtctgattatctctctctaaagcagtctatcattcatagcacagaaggaacactaaacaaagacctctatatcaatttataacattctattctctttacagctcagatgatgtcacggcaatgttatcacactggaggttgggcaaggcccagaaacagtcatcactatgcaatgttgattttctgagggtgactcacaaccttatttccagctggtggcctgtttctggccttttctgctgacccataaaactaagcttccacctgggtgcatggctgtcaggaacagctggaacattatctggattctggtaccataggtcaaggataggtggcatttccctctatccagcataagatgagctgtttctcttttctaagtttgctatgtatgtagtcccccttctcagggtgaaagtggctggctatacagaaaggataaaagcaagatagatgaattgtgatcacaaatgcctactttatcacttactttgctgttttgctaaatggaaacatctgttaatattaaatatgaaaactcattttttgttttttttagggacagagtttctctgtcacccaggatggagtatagtggtgtaatcttggctcactgcagcctcaacctcccaggctcaagtgatcttcccacttcaaactcctgagtagccaccatgccaggctaattttgcttttatattgtttgtagaaatggggtctcgctatgttgctcaggctagtctcaaactcctggac

SEQ ID NO: 62410 - DNA, 1006 bp, Homo sapiens
gttatagaatatgcacaaaaggtaatgagaaaggaatttaaacatttcactaaaaaatatcaactaaacacaaaagaagatagtgatataggaaaggaggtacaaaaaagctgtaacatagaaaacagcaaaatgacagatgtccctccttatcagtagttactttaaatgtaaattgattaaactctccagtcaaaagacagaggttggcagaaaagattttaaaagaaaaacaggatccaactctatgctgtctgcacagagattcactttagacccaaaaacacaaacagattgaaaggatggaaaaatatattccataaaaatagtaaccaaaagagagtaggggcagctttattaatatcagacaaaatagattttaaattttaaaagattataagagacaaagaaggaaattatatattaataaaagtttcagtgcagcaataatatataacattatgtttacacacctgattacagatcacaaaaaaatatgaagtgaaagttgccagaattgaaagagaaacagacacttctgcaataacagttgaagacttcaatatcccattctcaataatgataagaaaacaatacagaaataaagaagtagaggagttaaacaacataataaaccaactagatctaacagacacaccaaacactttacccagcaacaatagcatatacattttttctcattgcatatgggacattttgcaggataagccatgtgttaggctgcaaattaagttcaaatgtggtatacaaatgcaatggaatattattcagccttacaaaagaagaaaattctgacatatgctacaacatggatgaaccttgaggacactatgctaagtgaaataagccagtcacaaaaagacaaatactatgagttcatttatatgagatacttagaatagtcacagaggcagaaagtggaacgatggttgccagagattgggggagggggaatgaagagttaatgtttaatgggtacagagtt

SEQ ID NO: 62411 - DNA, 1036 bp, Homo sapiens
cataggagcatctaatatacaggatcggtgctgttactggagtgttacatcaaaaaattgaagttcaaatattattcatggttggtgttaaaagctgccaaataatactttactttgctgccaaatttctgagttcttttatggaggtaaaatattgaagagtctttctgccagtctcagccctctgagttacatgccccccaacccatcccactcccatatttcacttcctgcacttgcgagatccaaaggccacccaggtaaatagcggtcaccacaacagcccagaggcctgctttgctttctctagaatttgtgggtctcacccatcaaactcaattttcaccaaaggaagatcctcccatttcccttaaccagcagctgccatggttttctcttctgtagcttttcctttcattgtcaaaaagccactgtggggctcccttaggcccgtcttcccagcaggtagtccgtaagtgtctcttctgtttttcagactcctattccattttatggcatatgcctatgaattgtatgacaagacgaaggagatgttgtgatggcgaagagttgtttgggtggggactaaatgggccatgaaatgcgggacctctacattttaaaagtgccgttaggcccagcgcagtggctcatgcctgtaatcccagcactttgggaggccaaggcgggcagatttcctgaggtcaggagttccagaccagactgggcaacatagtgaaaccccgtctctactaaaaatacaaaaattagctggggatggtggtgggcacctgtaatcccagctacacaggaggctgaggcaggagaatcacttgaactcaggaggtggaggttgcagtgagccaagatcgtgccattgcactccagcctgggcgacaagagtgaaattctatctgtaaataaataaatgtgccattaaaggtcccaaaatgtaaagctttgtcttttcttccagtctctctcctgatctgtcatggtatttttaatgtgctatttaacattgttctacgtaaag

SEQ ID NO: 62412 - DNA, 1051 bp, Homo sapiens
catatgccatggggtcatggctttatgagtgtttccatgacatggtattattacaccccaaatctctcacctcatatgtcactcaagcattctctgtcaggaaaccaaggaataaacatccaaaaagaagattaatattagagagactaaaagagtaaagttcacccaaccatctggttcagctcagaagggatgtatgtgagcccttctctctcttccttcatccctgccttacacctcatcctgtctcacactacagtaggaatccctttaccactgtgttgcttgggctacctgtgtcagagtcggtggggaagcttataaaaaatgcagcttcctgggaatcataatttctgggatatgacttaggaatctgcatttcacaagctccccaagagatatctgtgcactgcagactaccttatccccttcctgagaagcaagtcatctacgagtgtatgagtacagttagccatgtagaactcactacttccttgggcagctaagtctagtaaaagattatggtaatgaggggaaaaatatcttttattgagaagaatttgaccttctataattctcacccatttttcttttcattattactcttccatctggagtgacaggaactaagtcacctccccttccataggagagcctctaactcaaacccttctgtgtcccaccttaggaagtggagaaatgaacccagttctcaaacataagcacattgtgttcaggggcaagttttccccagctctccagctcatgctgtctcacaccttccctgggcacatgggcaggttactgatggcctgatgttgtgctgccttcgcacaaagtcttggagaaaatgggcagaaaatctacgtgctatgaaaataaatttgacttttaaaaagccatggttgcttctgtgtccctaggtctttagcgtggccttctagagaacaggtaaggaacttacataaaaggtgtagcttgaaggccactagaaaggttctccatccccaaatgcctcccgtgcatgtgcaatggtggccaaaatccccct

SEQ ID NO: 62413 - DNA, 1041 bp, Homo sapiens
actatgagataggtatcatctccttttacaattgaggaaaataaagttaagtaactggcccaagatcactcagatctgttgccccaaatctagtgccctttctgctacaccatgctgtaatctgtgtattttagtcttgaatattgtgccaaggaccttagagctctttgaggtcaggaaccatagtcgattaatccctgtctcatccaccactcctagcagggtgctgggcacacagtcagttcctagtacacgtcagtagaaatactctcttagaaccctccacttcacttagtctgggcaggccttgcctgttcgtggccacgtaccacctgaggcatctgagtcttgttggggggatttcacacaggaggcatgtggagcctgtgactaactccaagaagggattttctttttaaaaagaggatgttaggaaaagtctaaagggaaatgttaggaaattaaaatctgtagaatcagcatgaaggctgcttatggattgcattagtcatggaaggtgagttcactctcgagaaagcagaaaagtggagagatgggaggatgcagtttgcaggatgcaaatgacaggtataagagttcacgaaataccttgagaaggaagaaatccaaccccaggcatccgtaatgcacatgagcgtgtgtggatcaggtcaggaaggagagaaaattagagcaagcagccaaagcagaaagatccacattgagatatggttatatgttcacagaaacaaataaaactgacctctggaacatgcagatgctatccccagggaataaataaatcatcaattatagtatctctccttaatggaaaatatatactatatttagaaagaagttttgttttgaaattagaaataaaaccaggtaagaaaagaaaaggccaggcacagtggctcacgcctgtaatcccagcactttgggagctgaggtgggcagatcacctgaggtcaggagttcgagaccagcctggccaacatagtgaaacctcatctctactaaaaatacaaaaagtagctg

SEQ ID NO: 62414 - DNA, 1034 bp, Homo sapiens
ctgaatgctgtccagtagtgttgaagagctgatccttcaagtctcaaatagacatatccttctttacttatgggactgcatcagagctgctgatgcaattctgggtcttttaagtcattctccgggtcttgccattcttcgttctccatccaattttttgcagctgagattcccactgacatataagctaattggtatagatctgggagccccacattatatacaattaaaactattttaaattcctgtgtaaatttcacaatatcttatctaggctttggaaagtcttttttcaatggctctcagctcagattgagacaaggaattaaaagccaggggttttcctgttctgaaaggggtttaattttaaggggtaactgagctttgagagtttctggctagccaggagaggaggggaatgcatctgaagaagaaagagaagcagagggaaatggaggagcataggatgagggaagaggaataggaagatgaaggcggtttgtgtctcaagttgtgagttgtagggggtatctaaaggaaaaaaattttaagtgtttcacaatttttcctttgctttggccaaggaatctgttaaagaagtaattttataattttaatttcttttgtatgcttgtttatactaatcaaaaatgcagactatttgatatttactttgttttttattctgaagtgtttctcaagtgaacatttttgttcctattaaaaattctgtcattctaaattatacttgatgaaattgtgccatttagaaaggaagttcacaaatttggattttatttaagaacatgtaaaaagcaggagtgtggcccagaagattgaagcattcgatttagactgagacaaacccatgagagtgtggaaatagttggttgaaagtgtcgctgtgcacctcatgacttgggtccccatccaaaagactgggccatctccaatggaaaatttgatgaattttcagttcccatgggacagaaggtttagagaggagatctcatcaagaatcagagtctcagaga

SEQ ID NO: 62415 - DNA, 1008 bp, Homo sapiens
aaggaagaccccaacaatgtaggtaatttacccagagatcactcacagcctaccctgtcttcatatcttactcacctctaaactctatgaagcccatctcagcaatgtgtctcaaatccaagccatccactgtcattactttagtctctgtcatcagtcagagcctctatatttcttgtctggatcatcacagcagtcttctgaatcttcccctgcctatagtttctttcacttccaatctgtcttccacattatcatagttaaacatatgattatatcattctttgtatttaaaaaaaaaaaccttcgttggatcccctttgcctacataatgccccagactcctaagcatgccatccaacgctttccataatctggattttcgctgcctttggaatcttattccaatgagccagtcccagattgcatgtcttccactgtagccacctactcttaattacccacaacatactcagtaattcctaagtgcagccatatttccatattccctgatgtctccaataggaatttctggttctttcatagcactttgattatatgttacatttagttccttctatcatagtttaaatagatggatcaatttttccttttaaacaatgagcaaattgaaggcaggaaatattatgacttattgtacctagcacataagaggtacatagtgaagtattattaaattggctgggattaaattgaaatgagttttaattttgaatgaatcagccattagaagccatagcccactctgaggagcagttatagctgctgcataaaagaatcctgatgataaattatttaatcactctctatactgtaagataccctccattcaggcagttatatatcaactataaaatggacagaatggcatctcagatattcaggatgactttttgaagtatcttgccagcactgaaaagcacctgggtagagttccataccaactcaaataaaacgcaagaaggaatttgaagggcaagagaggta

SEQ ID NO: 62416 - DNA, 1037 bp, Homo sapiens
ctcactgaaaacactaaacaattatctaaaaatgacctgagaagaaagagagggagggagagagggagggagggagggagagagggagggagggagggagggagaaagaaaaagaaaggaaagcaggaagaggaaaaaaagaaatgtcctttgctaggttggaaggcacttttgtgaatgccacgatatgacaaatttaagaatatttcatcttaaagactatattggcaaacattaagggcacaacgatgtctggttgtgacctgtaggaaccaaaaaataagccgctgatagaaccaagataatacgttatgtttttttctaactcaattatggttttgtgcttgtttaaataaaagcaaaagtctttattaaaaaatagaacaaataaaaataaattctgctttttaattcttatttaaatgtactacactataacatttttttaaaaaaatctgtcagtcattagatacctcacttactaactttcaattattatcaatctctgcttatttcatccttgatttggttttaagcattgaaaggattcaatagaacacaccatttttatttaccctaaatttgacggcagaagacctgccttctattctaaaattcaccctcgtcttgttgtcacaatccttatagcctttctttgttagagcagtggttctcaagcctggctgaacattatagtcacctcgggagcttcttaaaaatacctgtgcttaggcaccaaccccagagattcctgttcaagttgatccgtagaggatcccaggtgttgatatttttttaaagtccaagtgattcaacgtgaagccagaattgagaactgtattagaggtttacattgccctaattaaattaactacctttttatttttctctactcctctgtactcaactcttgcttcaatttttgagatattaacaaaatatttagtactgtctatcattcattcatttgacaactatttattgagtacctagtatgtgccagacacttgtagattctgatgaaatggaggtgaagg

SEQ ID NO: 62417 - DNA, 1071 bp, Homo sapiens
ttcatgaaaggtcttgtttttgttttaattttcacctctctcttatataatctttccttatgtgtttgatatatgttcttaagaggcatgtgtcattatagggtatttagtgttattaggtgtgaatgagcaattttataagtaatattgtgccataaatctcactcagtgtgtttttttttaatttaacactaaacctttaaagactattcatgatgttggatttacattgactttattgttttaactgctgcataatattgtatagtgtatatccacattttatttttccattcttctagcagtggacatctgctacagtgacatagaaagaattctcattcttacctctttagagacctgaagaagaatttctttggtgtgtatgtctaggagagtagctggggggccataggacctaaatacactattttctttatccagcctcattagtgcatagctggcatcctcccagtcccacctcctactctagccatcattgtagagatcagggctgggccagcatgcaggctgcagccagctaggtgtcagtgtactacgtagtacctcacttcttatttccttctctgaggcagagatgaggaacactcagagaatctgctcagcactcaggcctgcacatgaaatagggatagaggggcaaggggttaatggtcacaaggctactcatgctttcccttgtatccccttgggggtcagttctgagacacagtctgtaaggctcttaccaagatccctgtgagactgagtttttgccagcaatggttgtcaatttgaaaatgcatccttgtcttagttttcccttcttccctatttcagtcccccagtccctcattcctgctccttggtattatttcttgagtgaactacctataaacaagcctttgactcaggttctgcttttaggggctacccagtatacaatcttactcctaagtgccgattgcagccccaagcatctgcacactgatctgaatagtttggtcagtcttcatcttgtgggtcagagactaggccatttcaaatcttcagtgtgccacctttcgacag

SEQ ID NO: 62418 - DNA, 1090 bp, Homo sapiens
ggacatgtaatttctttgaagtaattaatagattttaaaagaaattcttgcttttaaccagctttccagtttacctgcttatttgatcctcttagtaaataagaagaaaagagcaaaacaaacaaacaaaaacccacttcttcttgagcaccatagaataactcgaggcacaattaaaggaaacatgaggacaatgataatattagtcttctctaatggagaaaactggaaaatgaaaacacattactagggtaagaacagtagtatcaccacaaaaatcagtatttgtttgattaattcattaattccctcattcatttggcaatattgactgcttatttcaatgtcccagtgcctatcacatagcaggtgctcaatacatgttggagggaaggatgcacaaagcgaggggcaggtgaatgagcagaataaagcacctgaagtataaaagaagtaatgtcttatctcattcacatttatatgtgctgtctttgctgttcacactgcagaagaaacttatctgctgctaactttgtggtagtgttgaatagatggaaatcagtttagacagccctatgagctatgcctatgtatagacatagtaggaaagtatcttcagtgtatctatttaggagtgatggaaaagtctttttgtggccccgaataatatttcagtctgtttgtttcagacatttcatttgagtgaacaatctttcattctacattaggatgatgatgaagaatgtaagcaatctgggaagaggtagactacactggcttaaattcacactaaggctttaaaggtaaatagaagatcctttcccaagagcaggttttgatggaggggaagagaaacacgcgccaaggaaatacagttggcccttgaataacatgagggttagaggcgctgactcccttgcatagtcgaaaattcatttacagcttttgactcccccaaaacttaactgctaatagcctgctgttgaccagaagccttactgataacataacagaagactcactgataacataacataagcctaactgataaacatattttgtctgttacctgtatcatctgctatatttt

SEQ ID NO: 62419 - DNA, 1031 bp, Homo sapiens
gacttttagggaagaggaaatattctatattagattataatagtagatgcatgtcattatacagttttccaaacttacagaatgtactacacgaagagtgaaccctaaggtaaaccatggactttgggtgacaatgataatcaatgtaggttcatcagaagaaatgtaccactctggtgggagatgctggtaacagaggagactatgcatgtgcagggacagggcatatataggaaatctgtggaacttgctctctattttgctgtgggtccaaaactgctttttttttttttttaaagacacttaaaaacaaaaaagaagaactagtaaaaaaaaaaatcaaaagaagtgatattaaagctcaatgaattcaactttacatcattgacatgacagattggcaaactctaccaaaaccagttcaaccaactggatgctgcccccttgtaatagtaacttgtggcagagaccatgtagccatgacaagcttggagcctgcattatgttgtcactactaggtaaagcacacatataaaaagatagtatcttctgaagacctactctgtctttagaccactgatgttctacatatacttcaacatatactgctgtatctccttatctggctcataacagatactcaagaaattacaatagtggatgcatgtcattatacaattgtccaaacttatagaatgtactgtatttactcaataaatttattgagtgtctgggccgggtgcggtggcacgcctgtaatccctgcactttgggaggctgaggcaggcggatcacgaggtcaggagatcgagaccatcctggctaacatggtgaaaccccgtctctactaaaaaatacaaaacttagctgggcgtggtggcacacgcctgtagtcccagctactctggaggctgaggcaggagaattgcttgaacccgggaggcagaagttgcagcgagttgagatcgtgccactgcactccagcctgggtgacagagcaagacttcgtctcaaaaaaaaaaaaaaaatta

SEQ ID NO: 62420 - DNA, 2016 bp, Homo sapiens
tcttctttctcctcttctctatctgttgtgttccctggaatacctaatgtggtggctgagctctagtagccatcttagaccatgggagaaagggtattcactaggtatggtagagatttggaaagcctgagtctctgatgaatttgtgaggctctacaatagccccgagctatctacctctatgcttcttttaaatgagagagaaataagttttatcttacttaatccactgttattttaggttagtttgtatatgcagccaaacttattccaaaccaatttaacatatcatgtttcctgcctgaacacaccatgctctatcataccattattctctggtttgtcttcttcatggcttgtttaatgactggaaattctcattattttcttttttttattgtttgtccttcctgctttaaatataagctttgtgggaagagtcctcatcttccttgtttactgtgttgtcttcagagagaaaacaatgtctaataggtactcaataacaaattactttttgtttttgtttttttaaaatttaatttaagttctgggatacatgtgcaggatgttcaagtttgttacatgggtaaacgtgtgccatggtggtttgctgtacctatcaacccattgcctaggtaataagcccacattcatcaactgtttatcctgatgctctccctccccttcactcctgagaggccctggtgtgtgttgttcccctccctgtgtccatgtgttcttgttgttcagctcccacttataagtgagaacatgcagtgtttggttttctgttcctgcatcagtgtgctgaggataatggcttccagctccatccatgtccctgcaaaggacataatctcatttctttttatggctgcatagtattccatggtatatatgtaccacattttctttatgcagtctatgattgatgggcatttgggttgattcgatgtctttgctattgtgaatagtgctgcagtgaacatacatgtgcatgtatctttataatagaatgatttatattcttttgggtatatacctagtaatgggattgctgggtcaaatggtatttctgattctaggtctttgaagaatcgccactgtcttccacaatggttgaactaatttatattcctacaaacagtgtaaaaccattcctgtttctccacagcctcaccagcatctgttgtttcttaactttctaataatcaccattctgactggcatgcaatggtatctcattgtggttttgatttgcatttctctaatgatcactgattttgagctttttaaaaaaatatgtttgtccacataaatggctacttttgggaaatatctgttcacgtcctttgctcactttttaatgtggttgtttgtttttctcttgtaaatttgttcaagtttcttgtagattctagatattagacctttctcagatggatagattgcaaaaaatttctcctattctgtaggttgtctaataacaaattgctgagtgaatgaaatccataggttaaaattccttccacttatatcagcatttgtctctatgattctgttccatggctgaccagtgaatcaccattcttttggatagagtaatatatataaataggtctttctagccttagagttatatataaataaatatgtatatatatatataaatatgtatatatatatataaaattgatgcttagatccactgagtattgaatactcaactttcacttctaagtgtttttttgggagacatccactgtcatctctaagcatgtacaccaatcaaattgggttattggtagtttcactatcacataacctaagctatatatataatgaaacgaaacaaggtggaaaatgcggagtttatattgtactgaccttatgtttatgactgttgcctcaaatcaaatggaattttttcattcaatttatttcttcctaaagtgatcaatggggtaaggttagtgctttcaggatcccagtggctacgtgatgccgaaaggt

SEQ ID NO: 62421 - DNA, 1039 bp, Homo sapiens
agagtagggggtataggaaccttcatattctgctggtgggattgtacactggtatagctattctggaaaacaaatgaagggtatgctcactctttgaatttgaaatttcacttatgtgtttatgcccccacgggaattctcatgtgggtctataaagggccagatatgagggtatttgttgtagctttatttgtggtggggagttgtgacaatctggatgttcatttcaaggagaatgcatagataaaatgtaatgattgcacaacaaggaatgttatgcaacacttaaaagcaaacagtttgatgttatatctaacaacatgagtgaataacattgtgaaataaacgggcagcaatatatagtacaataacatttacatgaattaaaaatacatgctcagataataatacacatttataaaagcatatgtaaggaaaaatatattaaacacatttaagtggttgtctggcttatgaatggggatatgaatgtgttatgggtacaaagagaattaaaaaatgaaagagagaggctttgcaaggatcaatgatgatgaagtgtcattaactgagtagaattaattatatcctctgcatttgagatcacaagtaaaaatgatgttaacaatgtcataacaacaacagaattttttaaaaaatccacaattcctctacaaattctaagttgtttggaagaatggattatgttgttattcttgttagtccctgtaactctggtgcctcacatgtagtagtcagtattaaacgtttgttaatttaatgaataaatgaatggatggatgaatagaactaattattttcagtaattctgtattccttacagttgttatcaaattttaaactgctttgaatcagggaaataaatatagcctctgtaatgtacaccatatcacaaactgtgaagatgataccagaggcttctttctgaaatgcagatttaattgcttacatgattaaatattttattggttttatttaaggtttttagggggaaataactttttaaaatttaacaggc

SEQ ID NO: 62422 - DNA, 1074 bp, Homo sapiens
gattatagttgagccactgtgtctggcctcagttctcttttaatagccttcagaacatttctaaaagcttttgcactgaaaaactacataattgaaccaaaaatgcagattttcataattcccctcaactgttgcaaagtttttggttcaaacttgacacagcagcaggaactttcaggttgaagttatgaaagtggtttcagttaatagtaaattgcaattctacaataatggatgtttttagaaataggactgaactctgttgtgacaataaagggatcatttaagaaaagcttatcaaaactatcttcaggggtgcttcattttatttccattttagtccctatatacatttcagtcccttaagcactgagtctggctgctttagaattgaaacagatggacttgagggtttctgtatctaattttacagtagcatatctctcgattattgacacattaaacgcaatatatttctagtttagaaatctgatgctaattggctttggaatattttgtttaaaaacattttccaaatggggctgtgaattgttcagtttctttattcaggattaaagaaagcattaattctgccaggaaaagattgtccagtggggcagaaacattagagccttggagtttacctgtcaatcttgtattttcatgtcctttgtctagaaacaagcctacaagctaattgacttctgtttctttccttttggcctctcatttttctgaacataaagactcaagttaaaacaaagataaaattccaggggaagctggcgttgatcaaggtttggattaaattaaattaagtgctttttattgaactcagcagtattagttattaaaaccagaaggctttatccttgctagtgtaaaaaaagaaaacaatgactcatgctggggcacagattttattgggaagttaaagcactcgttttctcttattccattaaaacttttgcagataaacacatgtaaacaagatcaggagatggaaagcagtgaggagtcagtccttctgggctctggtgctctatgggttctagccttcagctgcaagaactt

SEQ ID NO: 62423 - DNA, 1029 bp, Homo sapiens
tatgtacttatcttaaaaaccaaggtagaatcatataaaggtaagaccattaccttggactatttagtgtcaatcagaaataagagaaagtccaattcttcatgtgttgaaataaatttgggggcttccataaagggttgtagggaaactaaagaattctgcaggagaaattaactcccatatagtgagatgcctctgatgcagaggacatcttgaagtaatatgcaacacttgatgacacctcttcaacacttagtaaatctgacctttcctttcatctgtcgttatgctgaatcacatggcccagcaagcagctaacacattgcaaccaaacttcacaattgcaggctgggaacatgtgcttccttacattgattagtgatattaccagtgtttaagcccatttcctgtcaccttggaggatggaggttacttgacaggaagtcattctgctgtcatccagcagggctgccaatgaattctttaaacttgtcaatgagtagaaacgcagccggctttactctggcttaaagcttttgcatatgttgagtatgcatttagtacatcatggaagcacctagttttgatactaatggaatgtgcatttctttgaaatttctaaattcccaaagctttaggcaaatgctgacatgaaaactgttttagttaaaaatgagcttactttatgcttaaagggtcattttgcattagctgtgtcttcgagtcgattttgaaaaatcacctctttgaggagtgggcaaaaaaggagtcccaagaggtagtccatttcctttaataaattcaagcaactttttctttgtattgaagatattatttgtcatacattttccttgtcatattgagcattcccagaccatcatttaaaacagattggtaatttggcccttaattttggcacctgtacatcttttaaagctctgggctgtgtttggaaactttactactctgtaagttaatacccttttagggcctaaacactaccattaacagcaaattggcctctcagga

SEQ ID NO: 62424 - DNA, 1025 bp, Homo sapiens
ggttcatgccattctcctgcctcggcctccggagtagctgggactataggcacccgccaccacacctggctaatttttttgtatttttcgtagagacagggtttcactgtgttagccaggatggtctcgatctcctgatcttgtgatccgctcgcctcggcctcccaaagtgctgggattacaggcgtgagccactgcacctggcttggctgtgcaattttaagaatgtaaatttagattttattttctatttcatatcacatataaattccagatgaattaagaatctaaatagagttccttttgtaactatagagatgttactatactatagagatgtggaagttttttttatttttgggtataaatattcaagtcataaaacattgaaataatgacataaatgagcggcagatttgattgcataaaagtacacttcagttttacaaaatgatatgtaaagttaaaatgatatgtaaagttaaaagatgaaaaacagattagaagaaaatggatacgaatatagaagacaaagtgttggtgaacatgtgtcaaaatggactctactggtgagaatataaattggtatacaaattaagagatacactcttaataatcctaaatctaggactctatttcatagaaaagtaccatgagtatattaatatacattttctttatagcatactttaaaatgacaaaatattagaaataattaaatgtgcattaatagagtaacgattaggtaaattttggtatatccattcaattgaaatacatacaactattaaaaagaatgcagtagaactatatgtgctgatatggaaagatgcctgtgatatattttaaaatgagaaatgcaatttgaagaattatctgtgtagcattacccgacctctacaaaaagaaaactgtacctatgaaggtctatgtatacaaatatgtgtgtatgtaatcaataatctatctggataatcatagaaaaattatggaagagtgaatattatacaggcaacagcagttac

SEQ ID NO: 62425 - DNA, 1122 bp, Homo sapiens
ttgaaaatgacatgcatttgtcgttcccagaaaataaatctattaagatagatatgctgatttatttggggggacatgttaatatttttatttaaaaaaggagagagaaaagaaaggtactggtacctgtattagcctttattaataccaaaataaacactagtaaatacttgaaaatgcccatgatcaccaagagactactttttctttatgccaatgagaatgaaagaaaatgtataaaaagaatgggcaagtagagaatttttgaaagtttgaaagtagtgaagaaatttatttcagatatatatttatttagacttccagacatctgctgatcctgagagcgaaaaattcacagttcttcttagtagaattgaacacttaaaaaaatctattctgggtaagataccatgtaagactcttactgcaaccattgtggaattctaaagctgaaacttgtataatggtctttactggtatgttacaaggattggtaaactatggcccatgggccaaatctggcctgcttcctgttttagtatggtctgcaaactgagaatggttttaacatttttaaatgattgaaaaaaatcaaaggaaggataatatttcatgacatgtgaaaagtatatgaaatccaaatttcagtattcataaattggaacacagccatgctcattcatttacatattgtctatggttgcttttatgctacaacagcaaagttgaatagttgtaacagagcccatatggctcacaaagcctaaaataattactatctcccctccaaaaaggtgggtagcagactgaggcagaatttctttcctgttaccttttatttcttcccttgcccccatttccaagtaagctctattcttctttctctttcacacatccccacccaactccaccttcaaattcacaaacacatatatgtttgtgaaaaaaagaaaaatcaaagtctttcattattatgacagttactggttgctcttagtttttaaaatcatattttcttttactgcttaaaatatagagtttggatcatcttggaaagagctgaggatctcagtatgtaggctctccatttggcaatacctaaacgaagtgctaagactagtc

SEQ ID NO: 62426 - DNA, 1047 bp, Homo sapiens
gggtctttttctccttaattgtctactctgacatgtggaaaaggagagaaagttaggtgtttctgtcttttggggaaatgtggtatcttccatttaaacttactctcatattgttttgctttcttggcctgtttatataaatacaagaagccagaagccggtaaaaataaaaatcatgaagttatccatgagacatgcagaagcagcctccttgtatgataaacaagctcagctgcaggaagatctgtggtctgatattcattactgaaaaacttgcattggatggacagtttgtctggatgagttaattaattttaagagttctctgtcttcttagaaatataccattccagattggctgaaagcatgtttattttcaacattcatcagtaattctgggtcagccactccacagtttggtttgccttggtgccagctgcatgtggcagaaaagttaattagatgtctcttgtgttaaaagaggaaaaagtcatgtggaggaacaggactcttgcagagaagggagtgtagaatttccaattttcctcaggactgagaagtcatgagcacacagactagtccatgaggagctcagggagtttttccaaggatagcttctcatctctgcaaatgaatttacatttcgatgttataaaaatatttaaacaaattatttcacttgtccaaaagctctttttctgtctcacatttatcctgccttccaagtcctatttgagtcctacttttactcccaaacattctcttattacagtggctttaagattaagcctcctctttgaagttctaaagaactaggagatgatagccatgcttttttccaatatgttgtatgatttgctgttgtttccagtatatttagtagatatctcaattagatttaggcgaggaattaccctgtgaatgggtaaaacaagagataacctttgcaaatgattttaaaagaattcctgttccttctcctcctcttccctatcacctttaaattggtcaacattattaggtaaaatttgccaatttttaagtata

SEQ ID NO: 62427 - DNA, 1050 bp, Homo sapiens
taaggagaattatctttaaggaacagagttgagaaccaaaggtggcttttgttatgtactaatgttaaaatgaatggatagttgtagcattgagcaaaaagcttccacttttctggttaatccgtttatattgctaccctgataagtttttttttttttttcgatatggagtctcctcttttgcccaggctagagggcagtggcattatcttgatttactgcaatctctacctcccaggtagagtgattttcgtgcctcagcctcttcagtagctgggattacaggtgtgcgtcaccatgcctcgctaatttttgtatttttagtagagatgggatttcaccatgttggccaggctggtcttgaactcctgacctcaactgatctgcccagttcagcctccccaaagtgctgggattacagacatgagccactgtgcctggccccgatgtgattttgttgttccccttgttttcccatgaattaataatgcaattaacaactcatgtgtcttctgttttccagatactttctgagcacattaatgcaactgtattttctctaactttgtaaaaccactgtttatgtatcactttgggagcttcactggttactcctttaatgcagttaactattctactctatgcttaggcaccttgaattatatacacaaatagtgatgatggaagaagtaaaaatagagttgttctttatacccaaggaatcttactgttgcctaacttcctttttgttctatgtaatgttatgctttacctgctctcaacaaggaaatcttgggttattcttctgttcttaagtttatttttttccagtcttcccctctttgtattgtattcaatgtgatttatttgtatgcatgtttttttaagaccataactgcatctttaatgaagatgtacaccattttttaaatgtacatcaaaagccagcttaatatttctaaaatgtcatattcatcatgttgctcttttgctaaaaaactatggttatttttggattgcttacataatatgttcaaactcctcaacctg

SEQ ID NO: 62428 - DNA, 1037 bp, Homo sapiens
atgaaaggcaatctgatttttttcccagggatattacacataaaaattctcaggtattttcaataacaaacatccccaaagtgtagtcagtagagctgccaattattttctccttcagcattccatatggagaaagtgttgtcatcccttgcttctcctggcaggacagagacagtccttgatggcaaaataacatactttgtaaccagggttctcttgtactgtcctttgcctattcctgttttccctttcctagtagaaaatcaaagacatataaaacctactctaatttcttccttaaaagatgctaatcacaggcagaagagcctacatgattaaaatatgtggtatagacttgtttgaccacgtttattaacaccatattatattagatagagttcaccttttgtttcaggtttaccactaagtcattcatgtataacttaattcttaccatagtcattagttaaggggatgtatttgtggcacgtgtgggagacaggaaataagaatgaataagaaagcgatagcacaattgtataattttttttatttttttgagataaggtctcgttctgttacccaggctagagtgcagtggcatgatctcatagctcactgtagccttgaactcccgggctttagtgattcttcccacctcaatctcctgagtaggttggactacaggcatgtgccaccatacccggataatgttttaaacattttgtagagacagagtctcactgtgttgctcaggttggtctcaaactcctgggctcgagcaatcctcccgtcttagccttccaaagtgctgggattagcatgagccactgtgcctgattgattgtatattttagaatttataaagtactttccccgtacataaacttactaattattgctttactcttggatattatatcagtttgacagataaggcagctgaggcttagaaccattaaaaattttatccaagtttacaagactagatctggtaaagtcaggacttaaacctagagcctccaactcctgctcta

SEQ ID NO: 62429 - DNA, 1111 bp, Homo sapiens
gcgaggctatagttacttcagacttcagagagtagaactactgagtgaaaatgtgtgtgtgttttgagactgagtctcactctgttgcccaggctggagtgcagtggcgccatctcgactcactgcaacctccacttaccaggttcaaacaatgcccctgcctcagcctcctgagtagctgggattacaggcgtggtggtacacgcctgattttttgtatttttattagctgattttttttgtatttttagtagagacagggttgcactatgttggccaggctggtctcaaactcctgacctcagatgatctaccggcctcggcctcccaaagtgctgagattacaggtgtgagtcatcacgcccggccaaagtgtacttttttaaagctcttgaaatatctctcccagtagattgctaatttacaacttgccagtcccacttacaatgtcttagaatgagtattgctctgtcctgtgaatgctgttggtaaagtataataaatatagcgcagcaacatatatataatatgtatttatatataaatatattatatattattatatatgttaatatattatatgtatatattatatattatatgtatatattatatatttatatattatatattatatatgtatgtattatatactatataatatataaaaatttacatataatatataaatacataaacatatagcacagctcatctctctctctgtctctatatatatatgtgtacatataaattagaatatgtatcttcataagagtggggattatcgaaaccctggtggtctaatgctcaagtctgcactctttaccaccatcctattttgagtgttaagatgtgttaatttaggtgcaatcttattagatataaatttttagaacataatccactggtcagacactactgccgcattcacctgagataaatatcttgaggaagggtcattcatgccctaagtaggtttagtagcaggtgaagactgaggaggaaacctgaatctggtttggagtttaagatgttagccttgtccatcagtgctggacctggacaagaatttgtccaggcatttggacaaggattttgtctgatagac

SEQ ID NO: 62430 - DNA, 1308 bp, Homo sapiens
gctctaggtacccaaagcaatttctctcctatggtactaaaaacccaaggaagactctacctcttggctccctggctattttcatctcacttctgcctcacttcttgctcctgattgagccccaggcctctttcctctctacttgattcacaagatgcaccatattccttatttgttccattctaccaggtttttccaaggcctaccaaatgtcagatactgtgtaggtgggagatagcccttgaaggtcattgcatagctccccacctattacaggagacacctctgcaggttcccatacaagcagcctttgctttaaactcctcccagggccgaaagctcactatttacagagcaaactaattccattgctggacagctccagtggctgacaatgtttcctcatatagagcagaatttgtgtctccaaatccttctacctcttctgccttttgaatcatgtagactaaacccagacaccttagacgttcttccccatacttaatttcccatcaggtattgattgcacacatatcaagtactcaggtccagggccgggcgcggcggctcatgcttctaatcccagcactttgggaagctgaggcgggaggattactcgagcccaggagttcaaagctgcaatgagctgtaatcccaccactgtacaaaagagcaagaccctgtctttgcccgggggggagggaagtactcaggttgggggttaaaagttgactaaggcagtaggatccttgtaagtctgggaactgtggtcctgtgaaataggatagatctggacctgaagaaatattctgggtagaggagatcctagaaaacttgcatacccaaatgagtggggtttccttcagcgcagtcaccatcttccaactctcctccccaaactcaagcttgatgtcatgcttataacatgtttacttcatgtctgagtttgtcttcagaaagtgccttctggtgactacaaattcactcaagaaaaatcagcctggatacattagagtcacccctcttggcattacacagtttgaccgcccccctagttcaccagatttggcccagaacccttgattgttttttaaaatcaaatctactttcaagagtcaacactgagagcattcaaaagactatctcacaaaccctgaaagcaacaccagacatcataatttgaaaacagggacataattagaataagtgtagaacttcccagaatgactcctttgaaggaggcattcatctgatatgagttggaatgtttattaaaaacaaaaaccaaaaaaatcaatcccttgactt

SEQ ID NO: 62431 - DNA, 1118 bp, Homo sapiens
ctcactaagatgtattccccaagctttcagtagccccctatgcctgcacccaagccagcagttcccccacccgacctgtcagacctacttcagtccatagtataagacctctcaagtccagagcaacaacctgaaaaagtgctccaagatttttaaagttggccgggcacggtggctcatgcctgtaatcccagcactttgggaggcccaggcaggcggatcacctaaggctaggggttcgagaccagtctgaccaacatggtgaaaccctgtctctactaaaaaaaacaaaaattagccgggtgtggtggtgggtgcctgtaatcccagctactcggaaggctgaggcaggagaatcgcttgaacctgggaagctgaggttgcagtgaggcgagatggcgccattgcactctagcctgggtgacagagtgagattccatctcaaaaaaaaaaaaaaaaaaaaaaatttaaagtcaacaagacaatatgtttgaacttgtggctgacccagaaaatctgggacatacatagtcactgttccaggacctgaatttagaactgatgttccttttctgcccccaacaccaaatctagtagctaaagcacatagcaagaaaatgtaacaaaggaataagaatgaaggcgatggagtggtcttggagatcatctagtccaccctcgtcctgtgacatttgaggaccctggaggcctagagaagggaaataacttgctcaagtccaaaaactgcatcagaagcaggctcagcctcatggcttcagtgcagtgccatttccaacacaccgctctgccttaggtttttatttgcattggtggtaaggcttggccccttctgggctctcagattctgtaactctttgaattcccattgagtcctgcgggagaagacaggggcattgttgttgaaccctgtggctttccagggtttgtgcaaatataccaaggagacctccacctatcctcacgtgtgcttttagtctggcaaatagactgggtggagaacacattgttctctaaaccctctctcttgccaaacagtgtttgagaagagggaatgatttctgactttgcatggatcgttggattccggctcctgttct

SEQ ID NO: 62432 - DNA, 1186 bp, Homo sapiens
ctccactgctttaaggatcccctctgctctgattatgtcttcttttggttttcaacagccaagcaggttgagtatctggtcaatgaaaagcacatctacctgctgccaagtggtcgaatcaacgtgagtggcttaaccaccaaaaatctagattacgtggccacctccatccatgaagcagtcaccaaaatccagtgaagaaacaccacccgtccagtaccaccaaagtagttctctgtcatgtgtgttccctgcctgcacaaacctacatgtacataccatggattagagacacttgcaggactgaaaggctgctctggtgaggcagcctctgtttaaaccggccccacatgaagagaacatcccttgagacgaatttggagactgggattagagcctttggaggtcaaagcaaattaagatttttatttaagaataaaagagtactttgatcatgagacataggtatcttgtccctctcactaaaaaggagtgttgtgtgtggcggccacgtgcttctatgtggtgtttgactctgtacaaattctagtcccaaagatcaagttgtctgaaggagccaaagtgtgaatgtgggtgtcggctgcggcattaaattcatcatctcaacccagagtgtctggtctccctgctctttctgcatggttgtgtccctagtcctaagctttggttctttagggtgactgtggtaagaaggatatttaatcatgacatgcacggacacgtacatatttaactgaaacaagttttaccaaacagtatttactcgtgatgtgcgtagtgcattctgatatttttgagccattctattgtgttctacttcacctaaaaaaataaaataaaaatgttgatcaagacatggagttgattttatgaccactaatgggttgtgacccacagtttaaaatgaatgctttagagggttttactagtggctaaaggaaaaactacaatgtgttcttacagtatagcttccttcagtgaactcaccatataactccctggtgattttgcgggcttgtcatttggaggccagctgtcttatgttacttaagaaactggacttcttggactgtgagaggagatgacatcactcaggttgattatagaacatcagcccgttccctgctgtcagagtccctcctggtttattgaaacagaaccacaa

SEQ ID NO: 62433 - DNA, 1393 bp, Homo sapiens
aactttctaggtgggaattcctagctgaaagtgtgtatattcttccttaacgagtttgtagaatacttattaaggaactgctgtgtattggacactgtgggaatacactattgaatggagcagatgcagtccctaccctcaaagacagacagcctgtttggggagatggacgagtactaaggcagctgtgatgctgtgagatagctgtgttgacagtgttataggggggtacatagcccagactttgggcagtgtatatgtgggagttggcgggttggtggcaggaaccttcctggaagcagtggtttctatgttgagtcctgtaggatggggaggagctaagaaggcatcagcagacaggggttgacagggaagggatgtgctctgcagaggacggagcatggtcagaagccccaggcagacatcatggggagtgtgagtgatgaggctagagtgaataggggcagggtctgtgctgaggcttggactttattctcagggcagtgcggagccactgaaatcttggatgtcggggagtgacatgattggatgtgcatggtcttaaggccaccctgatgtcatagcagggaatgggtcagagagaggcaagactagacaggccgtgggagcagttaggagaccattgccatagcccaggtaggagttgatggtgacctggatgaagtaggtagcagtggggacagtgagatgcaaaaggatttgggagctctgaagagacaggactgatgagacttggggagtgccaggatgtgggggatgagctgcagagttaggagtccagattccccccagtcccacctagtcaagataaacctaagagatgggaatcaaagtacaaccaaagatttggacagttccggggagggaagtggtgtccactcagagagcacagctgtagaagcaggttccctgtggagagctctttgaggagatgagtgacaggaatggaggctactctgttcccttcctcttgagtacctagcagaatagcccatgaggagccctggggataccaagcctacacttgactaaggctctcacgccagaaattcacagaggaaaatccacaatgtaggacattgtctccttgcatcaaaagtaagccctgtttctctaagctgaattgggacactctaggacaatttacttttaaaaagtaaagtttacggaaaaggttacacttgttggttgtagagagaaatggatgtaaagtggagcttgggtgcatatagtcaagaaataggagaaatggacagcatttgaaattccctccaggcatcagctggggaaggaaggccggtgtctgaggttggtgccagaaggatttcctgccctgactcactttgcttccccgcagcaccggtttctgttc

SEQ ID NO: 62434 - DNA, 1996 bp, Homo sapiens
tgactccatctagaatggaaaacctggatttgtgctgagctgtgccactcacaactgtgtatcctttgggaaaaacatgtctctgaatcagttcctcatgtttcaggggatatagacttgactttagagggcatgtgggcattgagtatacatgaaagcattttgtaaatgataaaatataggaatagaaaaccaaacacctcatgttctcacttaaaagtgggagctgaacaatgagaacacgtggacacagggaggggaacatcacacacgggggcctatcggtgggtgggaggcaaggggagggagagcattaggacaaatacctaatgcatgcggggcttaaaacctagatgacgggttgatgggtgccacaaaccaccatggcacatgtatagctatgtaacaaacctgcacattctgcacacatatcccagaacttaaagtaaaataaataaataaataaataaataaaatatggcttttattattgcctatgttaggtcactttaggatgagaggaagccagccaggcgcagtggctcacacctgtaatcccagcagtttgagaggccaaggcaggcagatcacaaggtcaggagttcgagaccaacctggccaaaatggtgaaaccccgtctctactaaatatacaaaaaattagccgggcatggtggcaggcgcctgtagtcccagctactcgggaggctgaggcaggagaatcacttgaacctgggaggcggaagttgcagttagctgagaccatgccactgcactccaacctaggtgacagaatgagactgtctcaaaaagaaaaaaaaaaaaaatgagaggaagccaaggagaagaaagtagtactcatgcatcacctctgttttgttagaacatacttctaaggattaataagcctgaattctagagatgaggagtagcacagattgatgtcaatgacaagttaggaacactgttttagaggcttatgctagagggtaagtttgatcttaggatgggtgctgaagagatgggtttgccttccaaggcatgtgcgtgcatgcacacacacacacacacacacactaatgtggcctcggtgtgtcctctacctctgtgttcagaagggaagcttcttctagtgtcagacctcctgggttgaagactggcactcctgctcagtagctggtaactttgagcaaggttcttcacctctctcagcctcagtttcctcagttgtaaacatgggcaaatcatagtacctttttcatgtagtagttgtaaggttttgatgagataatacaattaaaagccttagcacagagcaggcatagagtaagtgctcattattaccttatttttgtaaatattatctgacctcaccattatcagcctgtgaccctgtttcttctctttcaggtaggaggtgtgcaatctttggggggaacaggtgcacttcgaattggagctgatttcttagcgcgttggtacaatggaacaaacaacaagaacacacctgtctatgtgtcctcaccaacctggggtgagtctttcagctgaagtgagaggaaaaacagaaaccagagagaattatcctcatgactctccctggttacacagaaaatgtaatccagccctagaacaactgactgttgggaatggcttgaacagtgggttatggcagtgcatgagaaacctgctgctcaaaatcaagttaagaatactctttctcaagactcttagtagacttgtatctaccaaggctatgttgaaactccccagaggaggcatagaatgtagatgcaggaagtatcattgtagtagaatataagtctggcattaatgtgactggttgaacttgttcttggttacaatcattcctctacatcttaacccccagcctggatgatgcccagtggacattgagcctgggagggccctggaagctgacttgcatcctttccactcatgcctcctagtgtttgtaaagtgcttaactttttact

SEQ ID NO: 62435 - DNA, 1114 bp, Homo sapiens
cttcaagagctgatcaagggtcacttccacactgaatccttaggtattttaggcagagcttgttgtttaagctctctgagttatcacaggactttgttcacagcttgggaataacagtacttaactgttcttactataatggataattttataagtcttcatctcccacaaggccctaactttccccaggagagtgatcattgcttatttaccttgcagattttcagcatttggctcctatccgggtacctcaggttccaaaggtttggattcattcattcctttagtcatcagatgcccactactagagccaggcactgttctagatgctggagcacagcagtgactcaaacacacagaatcccctgcccttgcattcagtttcggggagaggaacagactctaaatgtaatctttttgactatatcagtaagaaaatgatgtagtatactaaagatgataaatgctataaaaatggagcaggaggtggcatgttaggaattctaggagtggatacagttttaactagggtggttatgatagaaatagaaatgacatttgagccaaaacttaaagacgagacataaatgaaagaatgagtgaacaagtaaaccaacagtaattgtttcttcccttagatttttcttctccagattcaacatttccagatcctttacccattttgaggagacctattttctagactcctcactgccttgtattacttttccactttcagatcttaggatccagacagaaatgtcgatttttcatctctggcatagtgctgtttcagctttgagattactgagcattgtaggaaggagggctcatgggtcataactcattgtcacatcatgacatcccactctcgctttgattgcctctaggcgacttggggcttctgctgtggctcagatcttttcaccactgtcttctttcttcatctagttcagcacatgcttatgtagtaccatgtgccagatgccgtgagagatgctgggggcacccagatgaatgcagcatggctctggccacaggcagctcctggttgctctcctattcctcatggtgaagtcatagtatcggcaaattgttatctcagacaagggtt

SEQ ID NO: 62436 - DNA, 1656 bp, Homo sapiens
gtttctgtagcgcgagttcaggaacctgatagcgcaaataatgtggccatgtacaaagcacggctttttcacttgttcagttttgcccagtagatcatcagattttagctactgcatttgaagcagtcagtggagatgccaagtagaaagaatttaatggagtgataaagacaccagggttctagatccaactctgccactacttttgatcataggcaagtcatttagccctctgggctcacatacacatgttagaaaaagaccacatagtgcgagtctgtgatcccatgaggagcacttgcgtagggaattgtttaaggggcctctgagtcccctgaaattatatgcagaattttgtgtgtacttatttcttgggagaaggtgcatagcttttagcagattttcaaaaggtgtctgtggcccttcaagggttcaggagctactagtagatgctgtctaaagtccctgccagttctaatattctttaatacttctactgttgatctcagcacctatcatttaagtgcttcctggtatatagtctgtgtgtaactggagatacatggaggaagaacacatttggaagtagacacagtgagataggctgtgtgttccaggaagtggaacagattctcagtgttgtaggaattcagaggggagggagacctatgagtgctggagatggcacttgagctgaatcttagagaatgtgtgagcgaggccgggacactggttctcagctccagctggatgttagtattacctggggagtttttaaaaacatactgtggctgggccctgtggaccccatgccaggccaggtaaatcagaatcttggaggcaccacccttctcccctctctttcactcccttttcttctcccccatgggcatattttttaaatactccccaggtgttttcaaagtatagccagttttgagaaccataaaatatggaagaggggcaagaggaaggatattcatcttgcatggtaggagtccagggacagaggcaagagctaagcaggtctagcttgtaaagagacctacctgatgagagctgggaacatgttggataggttaggcaggctgattctggcagccagggcaggagaagccaactgaaggttggagcagaggagttacccaataaaagtgttgtttgaagaagataagtctgattgggtgggtgggaaaaagaagagctcagatttttgcactagtccagttgggaattgcacagtttaaaccagtggccattatcattcccctgggtcagtgttgtgatgtagcctgtaattcatgcattgaggaaaccacatcttggagtcatctgatttattccccacatgctgtgtacagtaggttttccttttatatatcatgttacccagatgccctgataagcagaatggcagaggacaataaaggttgcacacccatacatttgtacatgtaccaggaagcagggaaggccctggtgaaggtcttgggactcaggtccatgattaggcaagtaatgaacttcattaaggttttgtatggattggaatgagagactatgatttgcctcaatgaactgaagtcatatggttagaatagttaagagtatagagattattaatcatattgggaagtttttctgaaaatccagtgt

SEQ ID NO: 62437 - DNA, 1661 bp, Homo sapiens
ctgaggcaagagaattgcttgagcccagggggttgaagctgcagtgagctgtgttcgtgccactgcactctcacctgggcaacagagtgagaccctgtctcaaaaaaagaaaaaaatattgtgagttagattcaccagagccggagggtagactatgagtggtatgagagtattgtttgattcacctacccagaggcatttggtcagtggctctgtcagtctgtagccctgtccacatttctattactaacttgaaatgtttctcagatttgcagatgacatattcctggagggtagagttagctgatcattcaaaatgatcttataaagtctttttactgtatatcctgtgacctaataaattaacatttagatatttttcctaagaaaacactcatgaatatgtgtaaatatatgaacatttatcacaatgtttataatagcaaataatttaaagcaacacagttaataaattatatataaaacaaatattatttatccactaaactgatgttgtaaatggctcatatttatgaaaaatacccaattgcattcataataagataaatgcaaattaaaactacttgacatattatattggcaaaaatacactcagtgcgtaaggctgtgtggaagcaaacgctcttaaacagtgctggtgggaatgtaaattgatataattcctgtatcaattgggacaatttggaaatatttgtcaaaattacaaaaacacatacttcttagcccactcttttgttttccacccagcatcttacagatatatttgcatacatgtgagatgacgtatgtacagggtcgttcactgaagtattgttttaatagccaaagattgtaaacaactcaaatgtccaacaagagactggcaaagtaaaatatggtacattcatcagctaagcagctgtaaaaaagaacaaggacgctctctatgcgcaaatgtaaaatgattttcaagtggaaaaagcaaggaacacaaaacagtgtatagtatgccgtatgctaccttttgtttaaaagggcatatgtaagaagctgtgtttgcttgtgtaggcatagggaaatgcaggaaggatatgtaagaaactaacagttgttatttatggagggagggatttgagaactaggtagatagaggataagaatgggatggagacatgcaaacatgtcacctattagaagaatagttaatgaggaggaaaaatgcatagtatatatttaaatggaaaaaagcatgttgaaattctatgtacagtttgatccatattttataaaagaatatgcccatcaaaaataaagcttagaaggttgtacaccaaaattttcatactccttgtctctgagtactgggattatatgttatgttagttctcacactgctataaagaactacctgagactgggtaatttataaagaaaagaggtttaatggactcatagttccaccggccatataagaaacatggttgggaggcctcaggaaacttacaatcatggaggaagagtgaagcgcaagcaagcaccttcacatggcccagcaggagagagagcaaagcgggaggtgctatacacttttaaaaaaccagatgtagtgagaactcactcactgtcacaagaacagcaaggcagaaatctgcccccatggt

SEQ ID NO: 62438 - DNA, 2034 bp, Homo sapiens
gacatcacaatatctattttgtgggttgctatccaaattaaatgagagtaaagaaatgtatttagtgcagtaccttgtatgtacaaagtatttagtaaatccgtgttgttatttctctgccctcaggttccgtcaatgtctttctccatgccccagacctcatctctgaatgtcaggcctacagtggacacatcctacaactccctcaaattcagcatgttcaaagcacagctcatcatttccaccttccccttgatcttttcttctatcttccccttgtgttctaggtcttggtcgaccccactaccaccatccactcattatccagacttgagggagaccttggagtcaacagcagccctttccccaatcccctgtctttttatttggtcaataggttctgtcttttctacctcgaatctatttccaatggcaccccttttcttcatccctgctgccattgtgtgaattcaaggcctcattatttcgcttctggaatattgcagtagctttctactccttctacttctagtaactcacccttcttaactactgtctctgtccttctctctggtttattttctgtggtgtcactcaaatgatcccattaaaatgtgcagctgctcatgttactctcttgcttaaatgctttcagtggttacccattgaaactgaagttccctaaaagagactccaggattcttttagccactcccagctaatccttagtggattccacatcagagtcatgaaaatgcagatcctcaaagacctcatgctccccaggcctctggggccttgcacaggtgtgccctctcgcatgcccttcttcccttgtttaccttttaaactcttattcatctttcattcttcattctctgtaaaatcttctctgattcctcaaattagaattaaaggctctatctatgctctgtgtttcttggagggcagatgggatcttattttatcaatctctatagcttctactagccagtgcctggctcatggtgagacttagtaagtacttgttatgtgagcgagtgaatgaaagagtgaatgagaaactcaagggtccaacaaataggaataaaaattcttggggacagcaggaatagtggttgttgttaatgcctgaccccactgctccagtcacccaagaggaatctggttctgcttcactagggcagttaggagaggcatcaggaacaaatctagaactcaacctgggaaaaactgggcaatggagaaggaaggggagttgtaaattggccagtttttttttagtcacagtatagacacaatgcctctccaaccatccccaacccaagtagtagtattggaattttagagtttcacagagtattcagtagtggtaagaacagcagtattccagtcttttctttctctttcatattttatttattcatagcacattatttgtgaatgacatattatcataaatataaacacatagcctaataatgttatagaatagatataacacccagacacagaactgaaacataacagaactggtttttctataaacatcccaaatttttttgcatctacctagtatcctttgtaggtagttcaaatatgcttttcttgttccaagatttctagaaaccccttttagactagctatcaaggcatgtaggacccacacaagggatcattttttaaaataattgttctccgtaagttttacccagcttattcactcactcttttcaatggagatgatgcaaatgctattcccgaaaaataattgactttcaaaggacaaagatttggcactattgaggctattcaaaataatgagatgttgcctctagaaacaattccaaaagaagtttcaagaatattttgaacaatggtaacgttgtgatcatagatatgttgatgtgctttagggacaactcttacttggaagtagctattttggtacatctttagagaagccagaccaaatcccagctggcgaaggaggctttttgaacttgttgagaagtttggtggactaaggggtat

SEQ ID NO: 62439 - DNA, 1056 bp, Homo sapiens
ggtgcacactggtagtcacagctacttgggaggctgaagcaggagaatcgcttgaacctgggaggtggcggttgcagtgagccaagatcacgccattgtactccagcctgggtaacagagtgagactccgtctcaagaaagaaagaaaaaaaaaaacaaaaaaccacgtcagatttattttattaattcaatttacctttgaactatcttacagggtttctgtgaggattaagtacatttaaagtgtttatagctgtatttggcacataagtaggatttatataagtgttaggtattactgttattgttgttttggcatttctttgagtgattctcataaaagatattgaataaaaattttcagttcaagaactgcaaaatgaactaatttatgaccttggttcagaaataaactgctcctgcagagaaaaagcaccccgacagcacaggccagaagcaatggactcagaattggagtcattgactcagacggccacctcagctgtgaaggtgcctttgtcatgttttccaggaactccaactccttaccatgagcaaattatttatgcatgtaatctcactgaatgctcacaactctggagggtggtttattactattactgtttagaggcaaggaagccgaagactggagaggtgaagcaatttgccccaggtcatttgaccactgggtggtagagctgggaatccaggccaggtctctcaggcctcagagtctctgcccacacctgtatttcaggtacctccaggtggtagccagtacactgtagtgggaagagccaggagacctaggtacaggcccagcaccgtggtccagccatgtgacttggaagggttgtttaacatccctggggctcatctgttaaatgaggagccaagattgaatgacctctctcccaaattctactcttaagattctactgggccaggcatggtggctcacgcctgtaatcccaacgctttgggaggccgaggcgggcggatcacgaggtcaggagattgagaccatcctggctaacacggtgaaaccccgtctct

SEQ ID NO: 62440 - DNA, 1056 bp, Homo sapiens
aaccaggtgtagcagccaagacacaaactcagtctttccgattccccattctgccttctttatactgcatcctcctaagaaatgaggctgccggagcttgtagagagaggtagaaaaataggaagcctgataggcttagggttctggttgctaggaaatgggtaaaggagaacttttaacgctagaaagctctgttctgagtcggtaaatatttgagtgaccaccgagtatcaatcagccaccttattaagctttgtagggggagactgaggcttgattttgcccttaaggatttaaaaatctgctggtgttacacaatgctttgagacaggttaatgctgcccccggggggtctggggagatggttctggccgtcacagatgtggtaggaatgggtagagatggtggaaaggagtggagagaagtatggatggtagaagcttactttccacacatcctatcttcatttcttgattcaagtgattctcttctgtaccttggacagctcagagcatgggcctcagtttccccatctgccaagaagatttatattggagtgcctctcaaattttttacccctaaccctctctgatgaatttgttattcttctcactatcatttggatgtttgaagccccacagacacttattttctccatttggattttgccacgtgcaaagaccagccagagagatgaaaatgggtaggataaagtcttatgctaggtaatagacttagaataaaaggactagaaattgtggaaagagaaggtggaatcattttgtagcagagtgtgacatgaaggacgctcagaatcaggtttctcatagataacgttttgtctgtgcatagcatttgttaaaaaaaaaaaaaaaaagtcggccgggcgcggtggctcaggcctgtaatcccagcactttgggaggctgagacgggcggatcacgaggtcaggagatgagaccatcgtggctaacacggtgaaaccccatctctactaaaaatacaaaaaagtatccgggcgtggtgttggccgcctatagtcccaggtactcggg

SEQ ID NO: 62441 - DNA, 3079 bp, Homo sapiens
gacaacgggccgcttcaaccctgccttttcctttggggcacctcaacaaagggttacagtatcctcccttacctaccagcttgacttgttcctctcatctccctggcatcaacttctaatgccctggtaatgtggagacacactgaactacccccagtctatgtttgacagttgggtggtgtcctgctccttagggcaggattggaggcgacccagccagccacccaaggaagatactaatgaagcccctgctttttgcctcaccttttcaggatcccaactcaccagaggcagtttgtgttgagaacatgacaaagcctcatgacaaaatgaatgggggtggggccaaggaactgcatgaagaaaccagaaggttgtgtggaagtaagagaaaggatagcagcctagggctttaggaccggctggaaaccaagttgagtgtggagaggatgaggggtagagtagttcaggacctgaacgaaagatctttgtagacaaatgttaggctctgcaaatgggttctgcggcaggactgaggtgggattctgtggtgaggttctgtgagatctgaccacctggcccccgtatctccctccactggtggcaggtgatgtgctggcatccctaggcagcagtgtatctgcttcctgtctggggtgtgagctgcatttattctcagaatgatctttattgataagacttgagctggccttcctatcatggatgtggaatacattagtgaccttacaaagttggtgggaacagatactttaccttcttaaacaggagtttaggagcagtgggtccccatcttttggactagctcttaacgttacttttccccgctgtagtgtagcacagccactccccttcactgggggacctcaatgagttggtcagctctcttggccttacatgtggcagttgttttcttgtttgcaggtgcggccgggtgtgtggcaacattacttcatgatgcagccatgaaccctgcggaaggtaatgattcctcaacctatcactctgtgggcagctgcacctgtatttctttacagtttgcagaagaaagcacatcagttttggtgggaaattctgttaccttgttttaccactagagggtgctccctccatgtttttggtacctaacgaggcaccctcttggacaggaagcagattcactgggattttactaatccctggggcttccctagaaaaagatgtctccatgtggcctgtttttgggctttcctgggagcctcctttgtcgtagatttgatctgtcctgaaagtttagcagattcatttttcttcaaagaggtgaagatggattctgactttttttttcccccttatgatttgcaggaattgacacttaaatatattgcctttcttattggaatgaagctagttgggataggaatgaaaggttaaatcatagaactcagtccctgcatttctgctgggatcttggcttttcagtcggaggaaaattctccaaaaacattctccatgtgaggatgagcaaatatgaagggatagcattgttgccacgttcattttctgtctgggcaaggccatggggtggaaagagccaaagctaagctgaagctccacagagctcacaccatgttatctacttgagggagtgggaggtgtttgaagactaaagccaactctttttggctaagaatcttttctttggtagaacttctgtctcctcccctctaggaggatcaccatctcacattttaaaagttaggtgctctttgtatgcgaggattgggattgttaggggcctgtgttcgtgatgatcactatcatggagtcatttcttgttgggaattgttagagggtaagatcagagataggtacttagttcaagaagactctctgaagctcccaaactgtagatatgtcctgtgtgcgaactggctggctttacagaagtcctgatggaagtgggtttattgttttttgactcgttaccaaccctctgcttactccttcccctcaaaaaagggaagctgacttctcaggttagccagcagctcactcatacttttttctctctctattccattggctgatctgctgacttggggctctgaatctggatactctccatcaccggttggctgctgtcaccatttccttcctcgttgatggcactactagtggtcaagcagaggatgcagatgtacaactcaccataccaccgggtgacagactgtgtacgggcagtgtggcaaaatgaaggggccggggccttttaccgcagctacaccacccagctgaccatgaacgttcctttccaagccattcacttcatgacctatgaattcctgcaggagcactttaacccccagagacggtacaacccaagctcccacgtcctctctggagcttgcgcaggagctgtagctgccgcagccacaaccccactggacgtttgcaaaacactgctcaacacccaggagtccttggctttgaactcacacattacaggacatatcacaggcatggctagtgccttcaggacggtatatcaagtaggtggggtgaccgcctatttccgaggggtgcaggccagagtaatttaccagatcccctccacagccatcgcatggtctgtgtatgagttcttcaaatacctaatcactaaaaggcaagaagagtggagggctggcaagtgaagtagcactgaacgaagccaggggttcagatgacactgctgcatcctggtcacattctctgtctcctggaatgctcccacctcaagtggagttagaaggaaggtagaggggctctcccccaggattttggtgttttgactaacaccagttcctgccaacctctgttgccaccacctttccttccaggccctaagcacgtgcagcaaagcacaccacagcacctttgataacctctctccatcctgggcctgatgacctgctctagactgttatagagggataagcagctcattcccctggttcctaataaaaagcctttaaattaaatggtttcattgggtttgtcttgctaaaggggaagtgaaatgctgttaactgttcttgac

SEQ ID NO: 62442 - DNA, 1049 bp, Homo sapiens
ggttttttgttggtagcaggcaggagaaaataaccagaggaatgtggattgcttgcagctaaccgggacctgttcatctggttagtttcttttctcccatgctcttgaggaaaggtattactcttggattccagttggccaagaggaaggttcaagctttttttttttttttttttgagatggagttttgctcttgttgcccaggctgccgtgcagtggctcaaaccagcgaaggctcactacaacctccgcctcacaggttcaagcgattctcctgcctcctgagtagctgggattacaggtgcacaccaccatgcccggctaatttttttgtatttttaatagagacggggtttcaccatgttggctaggctggtctcgaactcctgacctcaggtgatctgctcgccttggcctctcaaagtgctgggattacagacgtgagccaccgtgcctggccgaaggttcaagcttttaaatccaaatagaatctagtgattagattgatgcagaaatttaaactgtacttgggcatcacttgcttccattggctcaccagtgattgtagctgatacagttatgtgacaaaagattcattcatttagcaaacaaatcagaggtgcttattgtgtgtcaggcaccagacattgatttttctttttagacattgattttatattaactattagtttccatgttactttaccttgaattgggtcagtagatgagaaattttcctggggagacacactcttcagaaaaggtctaatttagggaggtgttttgaataagattaatttcccaaatttcaacaaaactttgtccaagaacatcatacaaagtgtctaccctacgcttttattccaatcatcaaatcctttagagagattccaaggattatgtttcactgagactgattttatttgctaatgccaattttgggattcaatcagtttaaattagaaatctggaagggcccttcaggattggagactagattggtttctagctagacactcccacctttgcagtttcagggtaaactttct

SEQ ID NO: 62443 - DNA, 1803 bp, Homo sapiens
ccgcgcacagggaccgcagctctgcaggcgctagtgaggggcccgaagtcggcccctagagtccctgggcgcgtcgctctttctgtagccaatcggggaccgacgtggtgcgggccaatggccgcggtcaaagtatcaagagtggttgagcctatcaaagttcagccttaagtttctcccgcccttctaaaagtcagaggcgggttgatcgcacatgtcggccaatcagtgaccaataaacaagaagcttctaagatcaaaggggaaaaggtgggatgtaggcgctagcaacgcctcagggcggaggaatgacaggcgacttcgctaatactaccggctgatttttcgtacgtaaggaaaggggtgggtctaacttggcgtctccaccaatggttgcttggggggcgtgtccgcggggccaagcgggagccggaggccccgggctctctgggccgcgcctgaggcggacactacggggccggggggcggcggcggcagtggtggcagcggcggcgggggtgggcgccgcagctggcccgggtggatggagttggaggggcggggtgctggcggtgtggcgggggggccggcggcagggcccgggcggagccccggggagtcggcgctgctggacgggtggctgcagcggggcgtgggccggggggccggcggcggggaggccggggcctgcaggcccccggtacgacaagatccggactccggcccggactacgaggcgctgccggctggagccactgtcaccacgcacatggtggcaggcgccgtggcagggatcctggagcactgcgtgatgtaccccatcgactgcgtcaaggtgagacctgcacccggcttcgaacccgacctggggctgacccgacccctgggtcttgtccggagccaggatcccggctgagagccggagccgacatgggttccttcctggctcctgccactaccacatgattcgaaccgacactccattcaagcaaggtcccagctgggagttgatcccagtcaggaaccaggacctatttctaaccgtcagtgaaatctgaatcgggactcaggatcgaaaatctgtcagccaaagccctggaccccacctgggactaaacaggaatagggtgggatggggtatcccgaagctcaggtaagtgctactaactcgattaaggtgaagccaactggcgtgaaccagaccctgaaatggatctaacggcttgagatgttttctgggctagtgcttttacaaactccttgctgtatcttcccttactgacggggcaggaacccgaatctgggatctctcagctagataaaggacttacatgttaaatcttaacacatgagtgattggaaatcattgtgcagtgagaatgcagaattccagactggaagtaatgtgggaaagatcgtattcaggaataggtttcagtttctctgtgaagcaagcatgataccccacctatttcctgaacatgaaaattgagctgggattaggactgtatgttcagggagcacatcagcctccaaacaagagagatgaaactgatagcatatttctttggccacctgaagttggcaaaaagggagaagttgcctagaaaggaagtgtgacggtattagaaagtagatgtaagtatgaagaaaatggaaagagatcaacaagaggacacgattcttgtgaaagtaaaactaattgcattcacaaccaagcaggatgatttatgtgtactgaagtcaggtccttctgaagaaagctgggtgaagaaagaaacagattattgttctttacagttc

SEQ ID NO: 62444 - DNA, 1062 bp, Homo sapiens
gtgtccttaacaccatgaggcatcctatcacctcagaccacttgtgctcagacatgagaaagcttgttaagcaattgctgttaatgggaatctttgttacagcaggtgaatttatatcctagagaagctgctcttccttagaatgcatttccccctttgttcttatcaaatttctcattattgaaggttcaaaacaggtcctactgctgcgtccggcttacactacccccttctctgaactgccatcatacctgggcatgtgatatgagtgtagtataaaatgagattgattccagcagccacacatgaaaataagactgctaaccttacagccacttaaaaagaaactgattcctaaatggtgaagaaacagaacataagagctacaggaattcagagatggggtaagcagtgaggactgaaaggatcaggagatatcattatttatctcattagttttcaaactggagactgtgtacaggaagactttccaagggttatttaggaaacattgtttcaagggaattaatttgctactcctcatctggattaattctttcctaaaattcctcttcctgaaaaagccgttgaaacaattcttctttcctttctcccctttctcaatctgtccttttatcttacaaaagaaaagtgtgacctgactcacttctcatcttattatcatttattcgctgggtgcataaaaacacccaggttgtcaaacaatccttgtgctggcaaagccttcaatcaagatataacagtagacttcatgtctttccctgacttacatatattcctgttaagggcaaaacatggctttaagaatggaaatttcagcccatgtgggatattctgtgtacataaatatggtacagtggagcagtgtttttttttttttaatttgtaattctcatttattgaggaaaatataagtagagggcagttttcagtcccaccgttagtccttcttccccagattccttattccacttttgtctgtctgatgagtcactttcattctttaaccctgccctttgtatttttttaaaaaaataatta

SEQ ID NO: 62445 - DNA, 1031 bp, Homo sapiens
ttttaaaacgatatttaagcactcagttgtagaaatgtttcagacttactaatgtttgtctaatttcaggatcagtttttcctacctctgcccagcctcctggtacttcactgtgcccacagtgagtccatttctccgtcagcgggtggcattcctgggactcttcttcatatcctgtctccttttacttatgttaatcatagactttcgacattggagtgcttcattaccacgagataggcaatacgaaaggtgagtcagctttagattttggcactcaagtcataaatattttcataagctgtttaacacactactgactttgacccttttgggtgatactgtacttttattagtaaaattgcatgccatttattacataaagaagattttaagccctattttggcaatatgcagtttggtacaggaatactgatactgcatgaaaggcatctttgtgttttcttgttttggtgggctgaaacttattgtgtgtataaatgtttaggactgtattatacctttatgaatggacccctttatcattattaaatgattttctttatccttgattatatactttgctctgaaatctactagtctggtattaatatagctactccaactttcttttgattaacattagcatgacagatatttcttctatagttttagttttagcctattggtgtctttatataagtgggcttcttgtagtcagtgtttggttgggtcttgtttttttatccaatctgactatctctgcagttaattggggtgttcgggccatttatatttaatctgattatttagtatgtttagttttaatcttgctatgtgtttttcatttgtcacatttgttcttgttctttttcctctttttccctcttcttttcagttgagcacagtttttatgtttccattttatctctcatgttggcttattagatataacttcttctttttttagtggttactttaaagtttatagtgtcatctttaattatcacaatcttccttcaagtaatatt

SEQ ID NO: 62446 - DNA, 1042 bp, Homo sapiens
gagagaagctataatttaatctgtgaggaactaaatgacaggagattggtgctaatacgggggaccaagctttgtccaagtgaagcaggcttcgactccttctgagaggtctggtgtgttcctagaatctcaccttttcttcccttgctaaagcatgaagtttggcatttggcacactggaagcctggttgaaatgaaatttgtagcatctgatacaaagccagagacattctagcaagtgcagcagccccttctttctctgtaacagagatatcatttatgtggagatccacaacctttaacagggatccaagatctttgcagttcaatcgaccacataggaatttccaggcaccaaaatgatataacttccttgcttccttgacaaagaagccatcatgggtgtgatccaagatccctgtcgtagtgttgatgatgttagtacatgattttaaaggttagaaccccttctaaatgaatggtctgtggaagattttagtatcttatctgatgcctggtatgatgaggatagaaaatttttccatttttatgtgcctcacaggctgtttgggcattaattttgctttttgagccttaagtgtgttagtaggatggagaaactgtgatggggactgggaacctggatttgtctgattttaggtcactgttccctgggcctgtttttgtgagcccttacacaggaagatataaagagagttctttcatttcactgctaaaatcagtatgtagtatggggaatgtatttgggttgtttttaaagaaaaggggaacagaatcaggagagtgggcaaaggcaataaaatcaaagttcttattaattatttctgagaaatagaagtttctcaatttatgactcttggaatgtctgaaagggagcaaatttggaatagatcaatctgttaataagccatctggcaactttcagaacctctattaagagactgctgagtcacaaacagcacttccattaatgaagcgagaggaaaagccataataattacatcttcacccactacccttc

SEQ ID NO: 62447 - DNA, 1189 bp, Homo sapiens
tcacttccgtattcagtcaacaaacatttattgagcatttggggaagacagataacgcacaatagaaacataatgtgctagatgatatttagtgccatgaagaaaaataaattagggtcaggagacagaaagtgggctaggatcatcaagcgaaatctctttggtaaggtgacatctgagtggaagctgaggaaataagggagtcagtcatgcagacatctgtgggagagcatttctaaaataaatcagtagcactcagtggcggggtgaggagggcatcaaaatcactaagggaatttttctaagctaataagcctctccccctccccccacaccacagcctctactccacttctctagaggaagcagaatcttggggtgggagcaggtaaggatgcagagatttgaagtttccttggtgattgtgatgtatcttctctgttggagaactcctgttgcagatatgtctattattctctgactgttcccttagtttaactctgggataacagactttttctatatcagaactagtatttggtctcttcttcctctcattttaataaataccatttaccttggaatacaggggcttttgtggcagggctagatgctgggcttgtttataactcctttcccaaaatgggagaatcctggatcccggaggacctctttaccttctcccccatcctgaggaatgtttttgagaatcccaccatggtgcagtttgatcaccggattctggtaagtgtagttggtggttacctgccagagagcacaggagcctatcataggctttggggtgtcagtgaagcactgatggcaacactgagagggtagagcaggaactatatttcctgctctctttggaagaaattttaggaccatttctctaatctaatgtctttgtcctcattattcacccctgtccccctaccccaaccccagccaaattctagctttcaggacgttgccagcttcttaaaagttcaaatgtgccttttaccacttggcaagtgataacctccctcaattctgcacgtacctagaaagtcatttcagcagaaatgtggttgagtagagaagcgaatgcggagaccatagctgctaagcacgtagctctcggagctaaaccagaagctcaaggagccaggagcttcaccagtacttttcattctatttaagcgaa

SEQ ID NO: 62448 - DNA, 1030 bp, Homo sapiens
gaggctgaggcagaagaattgattgaaccggggaggcggaggttgcagcgagctgagaggttgcaccactgcactccagcctgggcaacagagcaagactctggctcaaaaaaaataaataaagaaagaagggattaaggagggagatgagagagaagaaatagaggcagcagaaacaataatcaaagtctaatagtaaccagagaaaggcatgtagaacaaaatgaaagttaacattttagaattagaaaaacaagccaacactgaaaacactattagggaggcagaaattaaagatgtcagataaggtatgggagaagaaagtgggctagtgaatcaactgtgtacgtcttcatctttcaatgtctcttgcagatgaaatcaaggtaattagaatatccagggtaatcttgaaaggggagagaaatgcccaaaaagatttcctgaagagtatatatttagaagtggcagagtccacctctttgacctgattctactggcaagtgggagtgaaagggctgtcttatttcatatgattggaactaacaattgtttggttaattgaaaaagccagttaaagcagagaatcatagaatatgatacataacataaacttttaaacttaaatctgtacgttcattaccaacttttacaaaatcaaggccttttctttgactatgcgtccccagattggcattcaactgcaggtttcttatatccccataaactgtggttttgcttaaagcggagtgggaacttagatatttgcaaagcgatctgcatgcaaaaccttattgatttttatgattttcccctgaaacttttataattgtcttattccaacctaacttgacagtagatgtttttaagcatttacctttattaagtttctccaaaacattcaatctagttttatgagatatatccatggacctttttttttttttaaagctcatcagctactgttagtgttagtgtattttatgcatggcccaagacaattcttccagtgtggcccagggaagccaaa

SEQ ID NO: 62449 - DNA, 1035 bp, Homo sapiens
gctagggcacaatggtgcaattggctcactgcagtctcgaccccttaggctcaggtgatcctcccatctcagcctctcgagtagctgggactataggtgcacaccaccatgcccagataatttttgtattgtagatatggggtcttgccacattgcccaggctggtctcaaactcctgcgctcaagtgatctccccacctcggcctcccaaaatgccaagattataggcacgagccactgcacctggccctaccttcactaatttcaggctgccagtggattaacaatctgacttgcagaattcttgagtgtttaataattggcctttgtaagccagtacaagctaggtccagcatgccactgcatgtatactacattttgggaaactctgcgttagagatacctgttcaaaattcacatcagttttatttatttcagcctttgacatggttcatgatccaatggcagctctggagaccctcttaaccttgggatttgaacgcgtgttgaccagtggatgtgacagttcagcattagaagggctacccctaataaagcgactcattgagcaggtacgtggactttatctttttttcccctaagactctgttgtggttactcctgacattctgctgtttagccagtttgtgagactatatattactgactttgtggttactctgtaggaaaagcaagcaggcaataatgtatataattcttatttctttcacacaagcctttttaataaccaaggctttcaagatcaaattacatatagatagtgcctaaagatctgatctaacttggataagcacagcaaattttaccttttctctgccatgggcattgcagttttttttactttttatttttattttttagtttagatataaggtcttgctgtgttgcccaggctggtctcgaactcttgggctcaagccatctgccttccttgccctcccagagtgctgggattacaggcatgaggcactgcgcccagccagcattgcagttttaagccacatcttttcattg

SEQ ID NO: 62450 - DNA, 1025 bp, Homo sapiens
cttccggggctgagttcggtggagattaggagatgccagctgtggcaaatagaaaatcatggactaacgacaaagtcaaaatctctctgcttgtgctcgttactgactttaattcttgagatcctttgtgtccttctctaggccagtgtttccacagagcggctagagaagtacttgggaggggatgacttggacacatctgccattcgacatgactgcaattttggtaaataaatttggaagttgcttcccaaacttattcgcagtactggtgccagaattttgataatacaagagcttagtagcagcaaactgagagagagtgtggagatttgtcttgagcctatgcttgcataagatacaaactgttcttacttgaattatgtttacacttagagcagattgctcaactagattgctaagtaaagctgggccagctcttctgaggataagcagggaatcctgcaaaagatccagaaagcagaagtcaggatagagccaagtgtgtgggattgggaaggtagcctggagtgaaagaatactcagattctgaaggtttaaagattgggggccagccatggccagagtgggcataggactggaatccatagtggggaggatttatatatggaggtggaattcatacaaggggactgggcaacagagggcctgagagtatacccagagtatccataggtcaggaatctgggctaccagtaggcttgggagttctgaataaaaaaggactttagccgggtgcggtggctcatgcctgtaatcccagcattttggaaggccgaggtgggtggatcacctgaggtcaggagttcgagacaagcctgaccaacatggagaaaccctgtctctactaaaaacacaaaattagctgagtgtggtggtgcatgcctgtaatcccagctactcaggaggctgaggcaggagaatcacttgaacctgggaggcagaggttgtggtgagctgagattgcgccattgcactccagcctaggcaacaagagtgaaact

SEQ ID NO: 62451 - DNA, 1011 bp, Homo sapiens
cctaatttctaaagtccctaaagcactacattctgtaaccttgtttcttttactccattcccagattagttatgcaaaattcaactgcgttctacttttagaagtgtttagggtctttattttctgttgacccttcatctgaaagattctcttcccttgttaggtacaatcactgcccccccgcttttttttttgagatggggtcttgctatgttgcccaggctggtcttaaacgcctgggctcaagcaaccctcccgcctccctgctgagattacaggtgtaagccaccataccgcaacctcaatgacacctttctgatggtctttacacagtctgtgatgtctggtggcccccctgccctggactcaataattgatagattttcctagagtaacagtatgagagctccagccattccattaaaagtattagttctgctttgagctgaaaccagttgagcctaatggaagactggatgtctttcttcttcatccaagcaccctaatgactgtttagttacatccatagatgcagacaacataacacctgtgacttacttgaattgggataagccattccagaagtagcttatcctagacttggaaataagatttttttcaccactaacttccatgcttcagagatgacattcaaagccagattcccaagtgcctgatcatacctcccagtctcaggaagatatttgcttaccccttagaccaagaatcttaagatcttccccagctatgaagcctatcttggaatgggaaaccatgaaatttgtcttttaaaagaaagggaagaaatagccttacagcccctgttcctccaagtgcacatttagccttaaaatcctgggagtcgggagacaccgtggagtcctaacatccacagtgtctgctggtcgtggtcagaaggcagtaatgcaagagtccttttgtgaagagtgtttctatgtagagatgtttatatttaagtagttcttttataaataaaagcatttctaatgg

SEQ ID NO: 62452 - DNA, 1001 bp, Homo sapiens
tttgtagtatgcccatgctgaggaaagtgcttttctgacttactccctagtcctcaagtaccgtaagggtgatgaagatagccttatggagaaaatttccaaactgaacatccactccatcatcaagaaatccaaccgagttagcagtcacctgaagcatctcactggctttgctcctcaggtgagatccccatcctggaaggcttagcgcatctttgacagcttttcagggctccatgagacagcctgcctggcgtcaattggcgtggttcccttcctcagacgtcctccggttttacgagctggtggagacagggccctccagctgctggttacaaaggcaaattagagggtcagatcagttgacatgtaataattatggtagttttcaccacctctaaggagcttataattgatttggtgggacaaaactatagttgtagacttactaagctagcaggaatttaagagatcacctagttggatacatgatgttacaaagaaggaaacgttaagtgtaagagattgaatggattgaaaaacagtttatcggcgatgctgaaagttgacctgaagtctgcagacatcattctgctatactatatatattaaggtacaattcatggaaaatataagccagaaaatagtccattgttaggttttgtattttgttctccaaatgctgtagtattttagaaaaacagttcagtgagagcaagagtcatgttgacctgagccttataggaagggggcaggcatgccacagggagggagaagacctgccaggcaggggaacctcatgaggaacagtcctaggttcagcagacatggcagtgctggggtgaagagggcagcctggccagagcagagggcttgcaaagaaggtttaaaggagggcctgtgtgtattttggaggtcttttgaaaccacatgcaggtgtttaaatcaattcactatgattcaggaaaacattaaaggtttaaaatttgaacaaaagatgt

SEQ ID NO: 62453 - DNA, 1018 bp, Homo sapiens
aggtgatgggaagttttattcgagcacgggcagtttcctcctcacctcatttatggagctcctctggagtccatgcatagacttttttctaagtgtctaattggatgtcttactacctctactaaagctaggacttcttgtcttttagaaaaccccaatctgctcacctttcttgtcctgtcttcactgcccatgcccagtgacctctctgggttgagtccctcacctcccctcctaaaacagtcagttgcccacccacccactccttcttcataacactgaatgcactcatcaggtctcttgaggccctaacttgagcattcagtgagtatatatagcacagtgactgtgctgagctcatttattattcatatcaagatataatacagtgtaacctttttgtctttccattcttctccacactttaaagttatctaaaatcatttctctgccttctacttcaactgtgtcacccgcattaggatgggatgttgactgtggcttctaaagctctctggtcatccagccctttcccttggttcaaatctcctaatgcgatgtagtctccaacttctacaaccaggtatacctttttgctgcctcccagtcttccccttgccacccttctacttttatctctacacttttctgtaggttgtgcctaatgtttaacatggtaattaaattactgctgtatagcattttactatgggagacgattggatatcaatatctcatttgtgtatggcaccatttaagatggccttacaagtattgctttctgcattttattgaagaggaaaatgagactcaaggtaaaatgactgatttaatgccataccttaagtggcagacccaggcattgacttcagatttccttaagttctttcccttaacaccctctgctgttttcctccttgtctctggcccctctcctggctgcccattgtctctctgctgtgcttcagatatcatgtctgtccataaatcattatttggattaatattttgttataag

SEQ ID NO: 62454 - DNA, 1050 bp, Homo sapiens
tcttcctttatagacaaacctagaagtagactcaccttgctgggttttctttcgtagcacttatccccaagggaacactttacttatctgtttattgcctatcttctcctaccaggacagggacttttggggttactattaaatccccagcacctagaacagtacctggtgtttattagatgaatacatgttgaatgactgaaattggaaagtagggtaaaagaatagagagcaatatttaggaacaaatcctgcccataggtgtacattattattatgttaaaaaaaagttttttttaaggtggggtctcacgatgttcccaggctgggcgctatattattgatagcttactaaagtcttttttccttctcttacaggggatgcacaaattatattaacctgggctccttcctcatcaaaccagtacagagagtaatgcgttacccgctgttgctaatggagttgctgaattccaccccagaatcccacccagataaagtgcctttaaccaatgcagtccttgcggtcaaggaaatcaacgttaacattaatgaatataaacggcgaaaggacctgggtaagaacagcataattgctgaaaaggaggtatgccctttgagaatgcttttcttctcaaaacaattcattacttcgctagagttggacaaggcaggtggtaggtataatagggctgtgatgaagaaatggtagaatttgggggaaatatgatattttattattattttttttgagacagagtcttgctctgtcccccaggctggagtgcagtggtgctatctcagctcactgcaacctccacctcccatgttcaagcaattctcccacttcagcctcccaagtagttggaattacaggcatgtggcaccatgcccagctaatttttgtatttttagtagagacagggtttcaccatgttggccaagctggtctggaactctcagcctcccaaagtgctgtgattataggcgtgagccactgcacccggcccaaaatgtggtatttattaaaggcagaagtaacgataaaaa

SEQ ID NO: 62455 - DNA, 1092 bp, Homo sapiens
gctggcaactccaatcacatgcatactagttactcattatcttctggcctctggagaaagatagagtagctcgctgattggatcctgaggttgaaataactccacatctcactgcgctccgactagagcaacgagaagagtgtctggaatggttgggagacattttaagcaggacaaatccagccttaggctagactgcacctgtccacagcccagcccaggcccatggaaaagaatagtaaaacctttgtctttaagcacatagaatatgtgtgaaacccagaaggctagaaaagaaagggaagtggaggagaaaaggcactgggactccagctgggagtatgaagactacgggagtgtacggaaaaggaaccttacagtgctggatggactctacagagaaaatgacttggatcccaggtactgggccaagggacagcatcagccctacagaaaaagggattgtggatactgggattttgaacagagtgaaccaagctatatggactgtggggaagcacatgaaagtggaaagggctgtgtgtaccacggaggtcatgatggttataggagtccagaaaatgtagattatgagagtctcagccctgggacgaaggataattcacctacgagaagcccagatgtgacctcgaaagctggtggatacggggaggcaaatggctactcagactgtaagaatctgaattataatcctgaggactctaaaaaagctgaacagttgactgactgtaggggtttggatgattcttcagcgaatttaggtcaacctcagttgtggtatatagaccatgagaatgttaaccataatcttgaggattgttgggcaactaatttttattgtagagaacacagcaatttatatcatgttcctgggagttatcctgatggtcagcctgtgagcttttcagattcgaatggtgtcaatgaagataaggaatttatcaaataccatgaaggggacaggaatgttcatcaaaatgacaacatgtatcccaaagcaaagactcatattatggatcagggtgattttgatacagaaaataaaggctatgatgctttatttgcaaactg

SEQ ID NO: 62456 - DNA, 1036 bp, Homo sapiens
aagctctgatcaggactacctagtgctaccctatctcttggtgaggttcacacacctgaatttgaaaagagggtgtgcattcatttctttattcagtgtatatttcttgagcacacatgatgagccaggcactagctacacgttgattaatttaaaaaaacatagtcatattatcattcatatttatgtgtgtttgaaaccccagtgatcatattgatattgacctctacagctaattatgctctttcctgctgccttggaatcatgaccaatggctactttcggtgtgggtcagttccggaaccccattgttctaaatcagtgcaatggatgccaaactacagagtgagtcaggaaccttgctcctcaactttcctctttttggcctttaagataatgtcaaaggaaggttgaccagagactctacaagtaattttcagtgatgtctgttgcaaattaaatcagaacatgtttttcaggaaaataatatttccccagtctactgggtagcatctaagatgcactaaagacagccagtagattaacaagctggagaatgactgatatggaacaataacgtctttatactaaagtgatacgtaatattctagacagatttttaaaattttaaagtgtaactgttttatatgcagaagcaatttgtcattctgcagcctccttggaatcccttaggtataagaattatttctcagccgggcatggtggctcatacctgtgtgtggtagttcatgcctcccagccctttgggagaccaaggtaggaggattgctttaagaccagcccaggcaacatggtgagaccccgttcctaaaagaaatacaaaaatagctggatatggtggtgtacacctgtagttccagctactagggagactgaggtgggaggattgggtgagcccaggaggccgaggctgcagtgagctgtcatcatatcattgcactccacactccaacctgggtgacagagtgaaactgtctcaaaaaaacaaacaaacaaacaaacaaacaaacaaaaa

SEQ ID NO: 62457 - DNA, 1026 bp, Homo sapiens
acactctgaaaactacaggtttatagaactgctccaattcaataaattgtcaaaattgttcatgctcctaaagctctaggtgtatttccttgaatttggtagctgtttaaaatgagaggttgcactattagtcgtgataatgttctgctgggtgatgactgaggtcaccatctctgctcctcttttctttaggtgacctggtgattctcgatggcattcccactgcaggctggctgcagggccgaagctgctggggcgcacggggcttcttcccatcttcatgtgtccgcgagctctgcctctcctcacagagccggcagtggcactcccagagcgccctgtttcagattccggaatattccatgggacaagcccgggccctaatggggctttctgctcagctggatgaagagctggacttcagggaaggggatgtgatcaccattattggagttcctgaaccaggctggtttgaaggggagttagagggccgaagaggcatttttccagaaggttttgtagagctgttggggcccctgaggactgtggatgagtcagtaagttctggaaatcaagatgactgcattgttaatggtgaagtagatacccctgtaggagaagaagagatagggccggatgaggatgaggaggagccagggacctatggggtcgccctgtacagattccaagccctggagccaaatgagctggatttcgaggtcggggataaaatccgaattctggcgaccttggaagatggctggctggaaggatccctgaagggcaggacaggcatctttccttaccggtttgtgaaattatgtcctgacacacgggtggaggaaaccatggctctgccccaggaaggcagccttgccaggatcccggaaacttctttggattgtttggagaacaccttaggagtagaggaacaaagacatgaaaccagtgaccatgaggccgaggagcctgactgcattatttctgaagcacccacttctcccctcggtcatctgacttcagagt

SEQ ID NO: 62458 - DNA, 1052 bp, Homo sapiens
tacatatataatttgtggaaagcatctcaagattccaatacaagtttatttcaccattaggtcagctttttcctcctggcattacgagtcagaatttaaatagctgatgtgaaaaatgagagaaagagccatactcaggatgataagttttgttgtcagcatgattgtaaatataagatatgtaaaattatagtttccttactctgtggatcggtctttacttcaggcataaatcttactaaattatatctcaagaaatattgaggtggctcgtcagtagagccatagatagctgtttagcagcactaactgctagggtgttgggcagtgaattctcatggccagctcttctctctctttctttttctttctttttagactagccattttttttcctaattgtgaaattatacctctttattacagagcatctgtaaaatatagaaaagcgaatctataatcctgccttttagcaccaacccctgctaaaacgttggttatttctctgtctctgttttttattggggtgggggagcatgttgaggaggagagggcacttaacattgcactatatcattttctatcacccctcctttttcagggctagatcattaactcatgttcattttgctttgattggctctctggggaaaaatcgatagaaaacttacaattaacttgtagcagtggggtgatagcttgctcctctcttggaacagtttatgcctgagggagcctccgtgcacaaacagcccagagtcattgtcagaacttggagcaatcctagccctaagcccaacagaccaaaaactagcttaagggtgtggaggggagaagtacttttgaggtctctttgcttcagttcagtcctcccaggttgtcaccttccttatctagaccacacttgctttaatctttcagaaaataaatagaatggagaaaatagtcatttattttcttttgactctgaaaacctagcacaggccacgtacggtggctcacacctgtaatcccggcactttggtaggccaaggcgggcggatcacttgagc

SEQ ID NO: 62459 - DNA, 1058 bp, Homo sapiens
ttttacagatgttcggagccttacggcataggaggccgtgattctgtgtcagggagacagggacagatggcttccgaagcaagggttagacctgttcagctggagatgcagctttggtcatggtggagttttgcagaaacccgcggacacccgcgttcctgctgcaggcacagatgtccaccgggcatctgtgtctcaaagggtggtgatgctgtcactttagtaaaggaatattgaggttaccaaacaggccggggcctgatgcagatgaggagtatagacttaaattttaagtgcaaaaacaactttaaatgcagtctcattattactgcctgtctcatttgtactgtaatgaagggtgaatatttttggcactcacttattctggaatatgggtaacttgcctttaggtctgttttatagtaattcttttacacaaacatgaagatcttgtattaaaacactttcataactaatgatgctgtagtatgtggcaggcgagtggtaacgctaatatttagggtttgagcatagtctagctctgcttgtttacatagctgagttaaacggatgagcaggactgattaatctgtagtagtttttgcaagactgaagtacctgacagcattcggggatcatttctcagttggtgttccgtttattactttcacagcatgaataccgacacggtgatcagcaagttagtttatcctctacccatttttctctaaaatattgaattaaaggatctctaaggtcctcttctgtctcgagttctccgattttacatgttaacttgaaacacgtcactcattgtgataataaaaatgttttaagaagaaaagatttttagaattctgcataatggggcatagcgaatcttcaaattcattattctcagctctctcagtcactttatcagggttgggctaaaataagtgaaaagtgacttttcaaattgcagatacttacgtgttaaattcacttaaattcagaggctgcaatggagtgatttctggagggtggagagtagctcaagtctggcttgggaacggggt

SEQ ID NO: 62460 - DNA, 1050 bp, Homo sapiens
agccagtgaatttaattttccatgagaaacaacagagttaacctgtggcattaggagacctacttcatgtggaccctttttttccttcagtttaacttttctggagcagtgtgctgcgtagttcggcctgagtttgtgcagcttgttaagacaactcttgtgtacgctatgttgaagctcaacaaaaaagtcatgggaccacttctagaaatctttcagctgtcaggcctgtcagtctcatgacagtttgttggttgtgccaaacactttatttgggaaaggaaagcccagatttgaatgggtctttcccctgggccttatcctatagaggcatttgtaatatggagaaaataatttttcatttttgctcatttaattctataaattctctttataaatgaattttgtgttctttagttctccttaaaagaacttttgaattataaaaataaaatctttacctgtcgaattgttgctgcagatgattgttgtggaaaatctggatcattgacctctgtgctttcattcctagagatgttttatagttacatgagcaaaagctgttgccccaaagtgatggccctggaggcggggctgaggaacagggaaatgccgctgtgaagtcttaaagcacttctgcttaaactcccatgtgtgaggagtgtgcctccctgtgccctctcagctctgaggctggccgtctttcggggtgttccttttggcaaatatacactgtaatcttgagtctaaatttatatgttgaaatgctaccttttttaaaataagaaactaaataaaattattttactatcagtgatttgtgtttttttttcccacgtcttcatttttctgtcatcttaacatgctcctaaggctgtcttgcacatttcaactagggagccagtttatttgcgggtttaacttaactgtagaggcttttgttatactcttgccagaatactgcctacctggtataagaatgtttaaaacaaggtgtccactctttgctgactcctggaatttaacaaggggtgttcttctaatcctttg

SEQ ID NO: 62461 - DNA, 1014 bp, Homo sapiens
atcaacagaaactccagaccaattccaggttgaattcaactagatgaaatgaaagtcactttagaaatattagttattatcattagttatcacaaattgttttccaactcccccatccttttattaaaaagtgaacagcttctcttgcattaagtcaggagcttaatgaaggaattttaagtcaggaacgcagctgttaatgtgatagccactctccaaagtgagagagggtcattggcagttattcagacttgactcatgatactcaggagagcaataggtgaaatgtatatagggagagagaagactgttgcaccagagtattctgatgcctttgctcttgtttgctcccacacagcacaagttgaccccggaatatctggagctcaaaaagtaccaggccattgcttctaacagtaagatctattttggcagcaacatccctaacatgttcgtggactcctcatgtgctttgaaatattcagatattaggactggaagagaaagctcactcccctctaaggaggctcttgaaccctctggagagaacgtcatccaaaacaaagagagcacaggttgatgcaagaggtggaaatgttctccatatcaagatgtggcccaaggggttaagtgggaacaatcattatacggactcttcagatttacagagaacttacacttcatctgttccacctctcctgcgatagtcctgggtgctccactgattggaggatagagccagctgtctgacacacaaatggtcttttcagccacagtcttatcaagtatcctatatgtattcctttctaaactgctactcatgaatgaggaaagtctgatgctaagatactgcctgcactggaatgttaaacactaaatatataacaagctgtgttttcctaagctgagatctgttgaataatgtttacattcgtcccccggggaaatgtatgctcagccaccattcaagagatgactgagaaggagatggtaagttcaagaagactgattgca

SEQ ID NO: 62462 - DNA, 1880 bp, Homo sapiens
cagatgctgaatattatgctgcacacaaatatgccacctcaaacaaggtgactggctccctggccactttcctaatgatgcatttcggggttttgctttctcttttcaggagctctgatatgatagaagtgattttatccattgtcaagaaagtgtagtgaccaagacatcctccagaattagtcagttagcaagaaatatttcacattgattgggtagggacacaggccaaatgccgtaattccattcatttgtactgctatataaggctgaataattaattaagttgaaggtcttctgaaataagagtgacagaagagtaaagtctatttagaattgctttccaaataaggtagtttttttggtagatacttagcttgattagagcagtatttctcatcaaaggcattcctggcatttggggttgagatactttttcattgttgaagaccatctcatgcattgtaggatattttgtatccctggcccttgtctactgaatgtcagtagtggtcaccagttgttttaactgccacacacacatgcatgtatttccatatgccccttgttgagtactccttgtttattggatttaaaaaactattccagtcatgaggaatttcatgtgggataacttgagaaggcaggttgggtgatatataggtgataatttggtgtaaggactggggtaagctggctagacggtacagggctagtgagcaggggctatttaagaggcagctagaactccgatagtattctgagaagggaagggtatgtccaagatttataaggttatcgtggagcagattggaacagataaagggttgagaaagagattactaaagtggatgatgcagtttgaaggattagagtcaagttttaagatatagacagggcttttaatttagaaaggaacaacataatccgtatttagaagaaatgataagatgatagaatgagagttgtcagtactttgaaaaccaatataaattttaaaatgaacataacattgaaagacacagttctatagacacagaatggaatttggccaaaagaaaggcatgacaggaaactccagttgaggaaactaggagtccaaatctaatgggagaagctcgtcaggcacaagtttcaagaccttgccattgaggtctaccttattcagaaaggggcagtagttttatgccattttgaaaaatgtgactcagatactaacctatattaaaaaggcttgaggaagaaatgtggttgtgcactatgaccagatttgattggagtgtttcgacagaggatatgaatcacctggagaagatagagatccaaagagtgaaagatgtcaaagtgtagaaaataaatgctgtaggactgtgaaggacaagatggacttttgcctgggggacaggccaggactcaagataaggagaggatcacagagcagggtctgaggggctttgaaaggcatatgttacagggaacagtggaaatgggttttaatcaaatccagatagattctggttagatacatcttggcatcctgatttagacaaaacaaaacagtgtgacagagggagatctggtggtcgacgagttttaatcaaacccagataggttctggttagatacatcttggcatcctgatttaaacaaaacactgtcacatagatctggtggtcgacaaacatctgtctgtcacaagcagcttaaacatccagcttctggggaaaggcagaaggccagatcaggtgacaacttgagattttattctagttctagaatttgttcaagaaaagcagaatcacagctaatgataagataatgagcaccagcccttcctttgaagttctgctctcatccactgacctgtgtatctctctcaa

SEQ ID NO: 62463 - DNA, 1049 bp, Homo sapiens
aaaatctcttttgatgcaacttactcatggtatctgtacagtaagtgtttatgttttcacatatttgaaaatctgtgagatttcccaagattggcaagcacaatgtagtatgttcttcagcctcattcagcaaaataggagtcttcaaaagacagtcctggccgagtgtggtggctcacgcctgtaatcccagcactttgggaggccgaggtggttggatcacctgagttcaggagttcgagaccagcttgaccaacacagtgaaaccctgtctctactaaaaaacaatacaaaaattagtcgggcttggtggcgcatgcctgtaatcccagcaactaaggaggctgaggcagaagaatcgcttgaacctgggaggcggaggttgcagtgaactgagattgcaccaccgcactccagcctgggtaacaagagcaaaactccatctcaaaaaaaaaaaaaaaagtcctactttacgcttcttttaataaggctaaaaagatatgtggccagtctcttaattaaatgcagtatgacagtgcttccttgaatcatattaatccatattggaagtaatcttatgtctgctagtcacatggtgaaatctgacatctcacaaaatctggtcctgaatttttatttgtcttctgcatgtctccactgagttgtgaggcctcacatgtgtcactgccagtgtgttgtgagttttttccacacagccttcagctgcttattccattccactgtaatccttatatttagttatgattgtcctcaaaattacctacaaatttgactcatctatttcatataggaaatgctatatcgcttaaaagttttaaaagcctttaaagaagactaagtgcttaaaggctttgttattcttaaaaggttagccagttttcagaaggaaaacttcttcagaccagcaaagtgttttttgtgtgtgtttgcagtataggtggggcggcggggtatcgtatgtttagtaaaatcaaaagcttttgagagatcaagtccttgatgtagaaaagtcagccttcaaaaaacag

SEQ ID NO: 62464 - DNA, 1001 bp, Homo sapiens
cctagtctctctttacctcttagctaaacttttgcagtaattgccttatgctttccctgcctctgatctttatgcttctcagttcatcttcacactgctggccaaagcgtaaatctgactgtcatgcccttgcttgaaacctttgatagttccttattacctccaaaataatggatactttagtgtggactttaaagttagcccctgtttgatgggctaaccagcaggtgtttggcattagtattacaaatgcaagggtatttggaaaattgagcacaagcaacacatcaagatttgttagttgtggtttttggtttcactattttgttggcacttttcctcatgtgtaatatatcaccctgacttttaccctggctgaatttgaaggtacctgtgtcattgttgggtaaaacaaacatgggttgtacctctccttcagtgtttgatatcgtgaggaactatactgcagattatgacaagaccttaatcttcaataaaatccaccatgagctgaaccagttctgcagtgcccacacacttcaggaagtttacattgaattgtttggtaagtgtcttaattcttatgtatgtaaatagccaattggaaatctttgttcagcttacttattgaggttatattggtaaaccttagtgctatttaagcatttcttctgaatttatcatagagcaattgtctttaaaatattttttatcttaagtttaaaattttttatataacttgttagagattggaaaaactactcagactgtattctgtttttactgtaataacttagtgaaaattagctttgttgatgttttaatagataatttgaaaaatttagaaacctgtgtcttgaggctcccatttttgatgatttggtaggagactgacaggactcagcacatagttgtgttcacagctaagatttattacagccaaagggtacaaagcaaaatcagcgagaggcaaaggcacaccagcaaaatgcagaggaaag

SEQ ID NO: 62465 - DNA, 1049 bp, Homo sapiens
aagcgacttgcctccaaaggagcctgcgcggcccgcggctaggagaattttgtcccatgcgctccccgtctcactagccgcgggccggggctacgccgtgtgcgtccccgcgcagccgcagtgctgggcgagtgggcggggccggctgttggcggcggttggctcggcgcgggagtcggctgcacgtgcgggcgggggcgatgcgtcactgatcggtgaggcgcggccgaggggtcggctttcctcgcgagcctgcggctgggcttcttctcagttagtgccttccacccgggagcgacccttgggagagggagtttcaggaagctcaccgagcaggggcggcccactggcctccgggggcggaggagttggcaaggggtcagcgggctcagccagaagggaagaatgaggggacaggggtactggactccccggctcagcctgcgagagagcgccaagtttccggagggagagggtagaaactggagggggtggacctgtcactcacgggactgagggtccttttctcccgctcccaggaggaacgagaatgaatatgactcaagcccgggttctggtggctgcagtggtggggttggtggctgtcctgctctacgcctccatccacaagattgaggagggccatctggctgtgtactacaggtgagcggcatgtgcagtcagttagggctctagagcagattaaaagggtactccagagtggagtctgggaagttgttccctctgcaacgttcgggggcgcatgtcccatctctagggagagcacgggggtcgaagcgggcttttgcggagcaccctccagatgttggacagttttagtgctatgttcgttttgttgcagagattaagtctccctacggttattcctatacacagcaaactcaattatttgtagaaaaatgaagaaggaagaaaggaagtagtcactctacctctaactgaagagatggataaattatagttcgttcaactgtacaggctttagtttgccgctgtagatgctgtatgtttatggttgtttcttagac

SEQ ID NO: 62466 - DNA, 1106 bp, Homo sapiens
caggttctcttcctggcatcataaggagttggtgtaatcattttaaattccactgaaaatttaacagtatccccttctcatcgaagggattgtgtatctgtgcttctaatattagttggctttcataaatcatgttgttgtgtgtatatgtatttaagatgtacatttaataatatcaaagagaagatgcctgttaatttataatgtatttgaaaattacatgttttttcatttgtaaaaatgagtcatttgtttaaacaatctttcatgtcttgtcatacaaatttataaaggtctgcactcctttatctgtaattgtaattccaaaatccaaaaagctctgaaaacaaggtttccataagcttggtgacaaaattcatttgcttgcaatctaatctgaactgaccttgaatctttttatcccatttagtgtgaatattcctttattttgctgcttgatgatgagagggagggctgctgccacagactgtggtgagggctggttaatgtagtatggtatatgcacaaaactacttttctaaaatctaaaatttcataattctgaaacaacttgccccaagggtttcagagaaaggactgtggacctctatcatctgctaagtaatttagaagatattatttgtcttaaaaaatgtgaaatgcttttatattctaatagtttttcactttgtgtattaaatggtttttaaattactttcttgatctctattcattataaaaatcagattataataaaacagttgaatatggcttaggaaaatatgaaggttccatgaagtggaattaagagcatagaataactgtactttccttaggaataataggacttatggtaaaggtagtattgggcaacttctttaagagtgttttcctctgagatgtcctatcaccactatctacatctaaaaaacatgctcgattcttgccctataaactgatgtcacagccccaccatccccatttttgctagtggtatcattttcctagtcaaccaaattttttagtcatcacatatcactgttcgtcatctattataataggcagtctctctcttgtttccctggttttagaagattttagtaata

SEQ ID NO: 62467 - DNA, 1576 bp, Homo sapiens
tttcaggtgcgtgccaccatacctggctaatttttgtattttagtaaagacggagtttcaccatgttggccaggctggtctcgaactcctgacctcaagtaatccacctgcctcggcctccaaaagtgctggaattacaggcatgagccaccatgtccagccagaatacattgtataagaaaattgatttcaattataatgtacctgtggtacttaactaccaaggattgggaactgtttgaccataatttttccatctgttggataagagctgaatcagaatgtcattctaagctaatagtggctatcatccatgacctaaaacggactcttgttaggggactgaagattggcaaagggagaagctagaggccatatagaagaggaaagcatgaaggtagaaaccacaatcaggactgccttcaaatatgaacttccagggatacttcttggttctgggtagctcccccaccacactgttttcttttgctgtcctcaggaatcagcttgcttgtttcgtttcattgctatcatctgtagtttctaatgagtttttcactttctgtgatctctacagaacagattttacttttctctcttctcccctacatttgtgtctgtgaagtatgcatgctggtgtttttactacttttaaggaaagagaagtatttagaaacaaaaacgtatttcatctgtctttgccacaaggattttttcctccctagttacattttcacgggaaaaacaagttgtacataagtgcatcttacatttcagaggaaagtcagactggagttatagtggacttcttatcattagttaggtagaggtagaggcagcagcctggtcttaacaggactctgcctctgtagggagggatgaggaaactaaagactacaggagtcaactgcactggggtactgggttacaggaaggctagtgatcttgctaacctagaagactagaaagtagaggaaattcatatgcccttttcctgagtttgaaaaggctttgttctttcatctcacagggagacttcagcacaaatgatagaagaaaatttgaactgccttggccatttaagcactattattcatgaggcaaatgaggaacagggcaatagtatgatggtaagttttgtgtggatatgggtgcctgctttggctatgttgggtgcaaaaggtttaactttccatgctagccttatctggcatttgggatgcatatgggaaatagaagaactcaagaggaaagagcatttggggaatatcctcaaccttaaatccttatctgccgttactcagggatatactaggattatgtcatcaattatcttcaataatagcatttttggtcaaattaaatgagtggtaagcttcttcacaatgtgaccattgaaattgaatggtttgttctgtacctttttgcttcagcaatcaattttctccattaagatgggacttgtactttaattcagatatggtacctcccgaatagaaaataaattatgttaatatagttgtaataataagtgtgtgttaagatttggttactataaactactgatttgttaaaa

SEQ ID NO: 62468 - DNA, 1022 bp, Homo sapiens
ggctgctgccagttggctttaagatgtcatactgccctcaaatggaactttcaggatgtctacaggtccctttactagttggtttcaatgagcttttttcaaagtttttctgggttgtaaacagacggataaacatgaaattccaagcaacctagttcaagggcctccttcctttaggtaatgaaagtttgatgaattgtcctactgtttctaaatatgtggttaatcatccaagaaaaattgttcccttggccagaggctgcatttgtgtctagggcttgggttagtatgggttaaagatagccaagactattgttctcaagcacaggcaactaaggtctcttactgataaatttatatatacattatacacctgcaaactttattttttatatataactagattttatttataggtaatctttatatcttttatcttaacccaatttttaatttaaatggagatgtttattaattaaaattagtttcagagtttcagggatttttgaggaattttttgtttggaggctgatatgttacagaagaaaggttatatccactgactgatgtcttttatagatcactcctacagtgacagcacagagatggtgaaaatcattgtgcacactgtgcagagtcaggaccgtgtgctcaaggagctgtttggtcatttgaggtaggaaaattgcttcatttcctactgaaaaaccaggatacgtttatcttgttcctctcaaagtacaaaagccctctttggtaaagtatacttacccaggaagaattctgaaggtaccttgggtagcttggccatagctatctgcatttatgtgtccttttgtatgcattactttggagataagtcattaaatctgatgctgattgtggttcatttcctcagctgggttttgggaatatggtgtacagtcttggggcatgtgaaagtgtctgacactgatttaatctctccagcaagttgttgggctgtaagcagaagattattgatctactccctaaggtggaag

SEQ ID NO: 62469 - DNA, 1068 bp, Homo sapiens
caggagttcaaaaccagcttggccaacatggtgaaaccccatctctactaaaaatagaaaagttagctgggcatgttggcatgtgcctgtaatcccagctacttgggaggatgaggcaggagaatcgcttgaacctgggaagaggaggttgcagtgagccaagatcacaccactgcactccagcctgggtgacagagcgagattctgtctcaaaacaaaacaaaaaaatattatagaggttggaaagaatttgaggcagtgggttcaggtatggaatggttagagggaaggcctgtgctgttctaggccaaagcagattgctttgaaaataatgccttcatctgcactggtcactgatgacttgttttgttggcaaaataattccagttgaacatctgctaaatactgagcaaggtctgctggaaagagtactggatggggaatcagaggcttgaattctagattgagtaatttactgaccgttacctcaggcaaatctgcgtttcccatttccttcttctgcaaaatggggttgaaacctagctttcctactcagtgagtatattgtgacagtgtatttaagaggatgtttgtgaaaatgctttgaaaactataaactattatgtacttgcaagatattatcatttagttaaaaatttgttttgaagggtaacagaagaaataaagtctgtgccctaatgtgcattatacttaaatgcatgttaaaaaaagatatacttttacactttaaaatttgtagacacatagcaacacatgcaaattaatatacatgtgaaattgtatttcatatactattttcacatttaaaaaataacattatctcctcttatactgcttttattttactgaaatgtattcagtttagtctgaccagcagttctcaaaatgtggcatatggacctgtgagaatccttgaaactttgtcagagagtctgtgaggttagaaccattttcataataagatgttatttgcatttttcaccatgttgacattttcattgatggtgcaacataaaatggctttcaccttagtatgaatcaaggcac

SEQ ID NO: 62470 - DNA, 1024 bp, Homo sapiens
gagcttcagtttcctttatttatttattttttgaaacagggtctcactctgttgcccaggttggagtgtagtggcatgatcaaagctcactgcagcctcgacttcccaggctcaagcagtcctcccatcttagcctcctgtgtagctgggacaagaggtgcaccaccatgcctggctaacttttacattttttgtagagacggggtctcactatgttgtccaggcttgtatcaaactcctgggcttaagcaatcctcccacctcagcctcccatagagctgggattataggcatgagccaccacatccagctagtttccatattatagggacaatttcttttctagtagggttatgaagattaaatgggagtcagtaatggtagttgtcactattatttttgtgactggtttagataggatggctgcacatcctggtttacctgggactgtcccagtttatacttaatgtcttgccataattatcagtagtagtccctttcactctcaaaattatgccggtttggacaataaattatatggtgtccctaggtatagctcattctctaggtggcagattttttccccttatcctgtacatttgtccacggtcctaagttattacactccttaatgtcagtacttaccctgaggatgtgggtggggatacccatggtgtcctggggtgggaaatccaagttctttatctttttgtgtccctattcaaggtagtggggaccagggggcagtcaaaatcatagagccaagatacaagtaataccaatggttttggtggtcctttttctttcttgttagttgatacctgttgtagctttttgcttctccggaggtaaaagcaaatactagtagtttactgttgtcaggagagaaaagagagaagactaagactaagtatgttcttatgtgaaagattaagtgtcagaatctgaagaatagaaaggctttaacaaaatcagtgtttcgtattatattatttagttctctaatgaagcagcaagtcattct

SEQ ID NO: 62471 - DNA, 1068 bp, Homo sapiens
ttccattaacagtccattaactgttaatctccattctgtccaccccaggaaaccaggaatctattttttatctccacaagtttgccttttctgaacattccatataaatggaattatgtaatatatagtcttgtgtctgactttttttacttgccttgtatttttgaagcccgtgcatgttgtagcatgtatcagtacttcattcgttttgattaccgattagttttttcactgtatatatctttttgcatttgttctttgggttttggtgattgttcactttagcccatacaaaagtttgggtcttttttcctcaacaaaagtttggactctgttatctgtaagagatatggtaatacacattgattttgttcatttgcatttcaaagtaggaaatctggtgcataagtatttagaaaacctaggattttcaaagatccttgaacaggattttaactgtttgtttctttttcagagaggctgtgatagctatatggtttatttgtttgataaaagtaaaactgtatatgaagggccatttgcttccagaagtttatctgattgtgtaaattatattggtaagtccagtccatttagtggctgagctttaaacatgaattaatataactttgactctcagtatgattagtagaaatggacttttggtgttgtgttctgtatctcatacttgaagtttctatatggagttatatgagaactctgaaaaatggatttatatagtttggaaggtgaaaaggtagatattaaatctccatgagatcattcaagagaagatttactttcttgaggatagggctctcacaggagaatgaaacttcactattagttgaacctgctttttaattgtctcttcatagtctaagcatgttcaagtatttatttcatttttcctgtgaatactgcttgatgttcaaatgttttaatttatcctgtgaaaattattcttttcttttgaacaagttaagtgtttgatcactgtatatctgtccaaataaagtaaagcacaaaattgtaaaatcaagaacaaaattgagcagaggggctaaa

SEQ ID NO: 62472 - DNA, 1022 bp, Homo sapiens
ctaacactgaaaagatacctggcttcttcttgatttggtttccttctaatgtgccaaagaataaattatccctcagtgtgttaggaaagcagggctttagttctgtgttgcctctgaaacatttcagctgtgaatgaaccacatctcgcatttgtttcatacttgtcataggaatcatagcatagtttctgctctgaagggcatctgtgagcctcttgttatagggcacggggaaagagtccacattatggagtttatagtttacagactttaattcagtttgcagcaccactatttacctatctgtgaacctgagcaaatgtctctctatctcaaggacagtaatatcttcctcaaagcatcaatattattatgaggttatgcagaataaggtatgtataaggtactagttatagtagttcaagaagcttcaaggatgcttgttagacatgataataggactgaattttgaagaatgagagtttttagggaaagggtgagggcgggagagatttataggcagcagagcatcatgagcaaaagtacagaagcatgaactgcaaaacagcttggtgttactgtaggacattttcccaaaatgtttatatatattgtacaagaaaggaatgatgtctgtttgattttcacttaaaaaaggaagcaacaaaacagttactgaaatatttcccttttgaaaaaatagcttagcaagtctgattgtatgcatattttccaactgtttattatgaacatctttagatatgtagaagagttgaaagaagtgtactgaacctaccactaaaaataatgatgaaacagtagcatttaattattatttttttttgcctcctctttcacgcccctaaatgtaactatattctgagtctcttcttggttctctctttttccattacatttcctttcttttattaggcagcctcttcaactgtatagctttacttataaactacatatggctaactcctaaagttatttatctctgtagctgtgactcttctgcc

SEQ ID NO: 62473 - DNA, 1663 bp, Homo sapiens
atcacatgcctagttaagtggtggcactcagacttgaaatatttttgtgttattacagagcccaaggtcctcaccactaccctgtctacagcctcgtaaggatattgttgtctttcctttttaaatttctctaccatttaatacttaatctgtcttattattttgcagataatacataaaataattgatctgggatatgccaaagatgttgatcaaggaagtctgtgtacatcttttgtgggaacactgcagtatctggtgagacctgttttgtttctttgaatttaagtgtgtataggattctcttatttctgaagatcatgaatatagtaggtcaaaaataaagtagcttttcccatacagtgttggtgtttaaagcattttctcttttgaaggccccagagctctttgagaataagccttacacagccactgttgattattggagctttgggaccatggtatttgaatgtattgctggatataggccttttttgcatcatctgcagccatttacctggtaagaaatggatgagaacttgggcatgcttaatgggaatggaaattttttcatttgtctttttttttctttctttaattgtttaattgcctttgaaatatacaattaaatataattaaatggcaagaaatcttaatttgtgagaatcactttgtcaactgaggtagcttttgattttataggcatgagaagattaagaagaaggatccaaagtgtatatttgcatgtgaagagatgtcaggagaagttcggtttagtagccatttacctcaaccaaatagcctttgtaggtaagtatattttagttaaggaagtttgcctcagtttctccagagttgtaaaggagcaggagagtagttgtctgtttcaagttgcattatccagtagaactttctgtgatgatgtagaaaccttctatatttctgttggccacatgaggttattgactacttgacatgtagctagtttggctagagaacgaattttgaataaatagtaaatataaatagccacttgggactagtggctaccattttggacagcacaggtctggtggaaacaagaactgccatttaactgtttgacatatgtcctaagaaggctcttaggataatgaagtaaatgggttatttgcagaatggatttggactcatccgtcagagttgtcagtaactaacatatgtggagttttgagtagtttttgatggaaaaaagtttgtcccctgtcatttcatgaatttgaaagtaatttatgaaatggtacagacaagtgatgtgggaaagaaaatggacaacctgcaaaattacctttctaacagtataaagggaaattggaacataatgatttgattttcaccctattttgtatgttttctagtttagtagtagaacccatggaaaactggctacagttgatgttgaattgggaccctcagcagagaggaggacctgttgaccttactttgaagcagccaagatgttttgtattaatggatcacattttgaatttgaaggttagtcttaatgggtctactgcataagaccagcattgaaagtaacaagtttatttggaaaattagcataaatacagtttaataatcttttcctgttgcttatttatttatttattttgagacagggtct

SEQ ID NO: 62474 - DNA, 1343 bp, Homo sapiens
ttcaagcgattctcctgcctcagcctcccgagtagctgggattacaggtgcccgccatcacacctggctaatttttgtatttttaacagagacggggtttcactgtgttggccaggctggtctcaaactcctgacctcgtgatctgcccgcctcggcctcccaaagtgctgggattacaagcgtgagccaccgcacccagccaagtcaactcttcagggtgaaaaatctctgcttaatcagaatgactccagaaaaattcctaaaataaccagtacctaaccttttggaggaacctcaaaaaccaaaaatttgtttccccatagattttggttttgcctcttttccaaggtcatgagggctaaagtccaattgaaatgagtgatttaggtgggagaaagaggcttataagagtttcagggattttcccaattgcttgttgcatttctatttggtgttaattctaatgagttaaatgaacatatagtataattttgtagtatttgtttaatgttacttttttttctgtgaagaaaacctggacactgtagtattagttgtgtagttacgatgatccatataaacttgagcatcagagtagatttgtacaaaatgtgaggtgaatttttcttttaactcaatgatttctgttactttaaagtatattttaaactttatttagggtctgggattcgatatttgcatgaaaacaaaattatacatcgagatctaaaacctgaaaacatagttcttcaggatgttggtggaaaggtaggtgaaacctgaagtaatgtttcatgcctattgaatatagtctctctgatatagttagtccttgagctttggtgtctttgctgtatgcccataacagtcttactttttccatttcagacctcaccacactgaactgtagttttgtgtttagtttttttgtcccttctgctaaacagtggttccatcagagaaggaacagcacctgctttttttttctttttcttttttttcatttttcatacttaacccagctcctagacttcacctgtcttgttcaagtctgtttttccatcatagtatctagcaaagatacaggctgtgaatacataatatgttaacacttattattttattcttatgaagcacatccaaaacacatacatgcacatcctgggtccactttaagaaaaaaaagaaagtatatatatttttaaaacttattttccttcccccaatttaaatgagtcatctggagaagaaccagaaattgtgaattgactcttaaaatgttcatttcattggtaacttaagcagttttcttgtttccagcatccaaatttcattccaataa

SEQ ID NO: 62475 - DNA, 1049 bp, Homo sapiens
ttggaaataattttttttattgtaatgtttttctttcttattaggttgaaccatgccaatgttgtaaaggcctgtgatgttcctgaagaattgaatattttgattcatgatgtgcctcttctagcaatggaatactgttctggaggagatctccgaaaggtagtgtggatgttttgagatgagagagagtaaatcacaaactttagcaatgtttgaatcatgttaaatataataaactagaataagaatcggaaaaactatggtctgcttcctgttttgtaaataaagttttattggaacacagccacattcatttctttacacattgtctatggctgctttcttatggctgcagaagtgagtagttttaacagagactatgtgacttgcaaaacctaaagtatttaccatatggttccttacagaaaatgttgactcctgatttagaaaatgcatttttgttgttgctgtttgatgggactatagcaatggtgttagatgaaaatttcagtggttaaggtgcttataaaaagttgttttctgtattgcaatcttttttttctacctaattttaaatgtgcccatatgaccatttttatatatatccatgagatttgtcagccttttccagtttcaaatgctttttgcctctttttacttttatgagccttatcatgaaatttacatgccctcagtatggatttggtaattttattcccttgtattttattatgacttattttctcatttgaatattcttttagagtatagtaattaatgtgtggtcactattgcagcccagcaatttgcagaacagatttttagatttctttctttttttagctgctcaacaaaccagaaaattgttgtggacttaaagaaagccagatactttctttactaagtgatataggtacgtatcagtattaaaataccattgtaatgtaatgtccctttggcccataaaagatctttttgggaattcaggagaattgttgatacactatacaaagtctatagaatttcaacatctataagaagttataaaa

SEQ ID NO: 62476 - DNA, 1043 bp, Homo sapiens
atattggtcggagctgcagtaatccaaaggcttgactggggctggagtatctgcttccatgctcacttatatgaatgttggccaaaagcatcagttcttcgccatgtgggcctcttcatggggaagcttgaatgttttcatgacatggaagctagctttccccagaaagatcttttcctcagaaagagtgagtgatctgagagagagagagagagagagagagtgaacgagcgagcaagatgaaaaccgacgtatcttttatgatctttacttggaagtgagactccatccttttccaccacattctgtttgttacagtgagtcactaagtacagcctacattcaaggggaggagagttaagctcttaaaaagagaagtagacatattttaaaacttccacaggtagtgtgctaagtactttacagatcattcttccagttatcacagcaatcttatatttaggtattattttgcaaatgaggaagttgaagcttatagaatcacatagctggtggttggtaaagtgtggatttgaaataaatactttctgactctaatatctgtgcttaattccattttgattctcaaacttggttatgtggcagaatcaccaggaaagcttaatagtataaattatcaggtcctacatgtacatggaaattctgtttgcttctttttctttttttctttttttttttaaaagagatgtggtcttgctatgttacccaggcttgacttgaactcctgggctcaagcagtcctcccacctcagcctctggagtagctgggactataggcatgcgccaccacacccggctaatttttaattttttgtagagatgaggtctcactgtgttacccatgctgatctcgaactcctggcctcaagcaatcctcccacctcagcctcccaaattgttgggattacagttacaactacacccagcctagaacgccagatttgacttactcactgtgtgatcttgttacttagccaatttgtgcttcaattttctcctgtgtggtgaaagtattaataaat

SEQ ID NO: 62477 - DNA, 1397 bp, Homo sapiens
ctgctcataacaaaaggaagattgaagggagtgagaactgtgggtaggctagcatgcagtctatcctagtttccttcttctctatgcaccaggtatcatcttatctctagcttcttttttcctctcaccctccaattcacactaccctatccaagctatgtcttgcttccccacctataatatattttttctgtcctggcccctgggctcttctctctgtattcatacacagcctttattacaactctggtttgtgtcagagattacatatgttggaaattcttttgaactctccttgtgatatcagaaacatagtgtagcctgtttagccctgactgctatttctgagctgcattattaatgttgccagaatatgatggggtctggctatttcctgtaatatgcatcagaatgggtttaatttcagtcagaattggctaaattactagtcacaggcaagagatgttaggttcattatgtagctatggaagcagaagtacactcattggtaggattttttttcttcatgtcatttgaaatgcatacattaggattggagttttttgctttaggcttggttatattaaaactttctcttgctgtttggagtccaggaagccctgaattaccttcttcattttagttatgctagaagctggggcacatattagttgtcttgattaagctctgaaaggggtttgctgaggagacaggatctttttttttctaacattatatatgagagagagttctgaaaagacctgttataaaatcagtttcaggcacttttcccttgtatgctgttgtgtgtttgaaggtcagttttaaagcattggtgtaatagtctcatggtttatctttttaaaaagcattgcctcaagagagctgtggataaatatatttaattagtaaagctaaaaagttttgttgtcttaagttatttctttggtagcaaataaatcttcacaagaacctaattttttttttctgttgattttctattttggcaggaacttgatctcaaaatagcaattaagtcttgtcgcctagagctaagtaccaaaaacagagaacgatggtgccatgaaatccagattatgaagaagtaagtgtattccttgacttacatttccctggttctacagcccaaccagatgtcatcatggggaaagaggccaggaatccactcttctcaggatctttttgggaacatatatttttttctctcattaaatatattctatttcaaataataatatcacattaagattaagaaggtttagttaaaatcagctaggacacttacacactgttggtgggaatgtaaaattgtgcaactgttacggaaaacagtacggtgattcctaaaaaattaaaaatagaattaccatatgatc

SEQ ID NO: 62478 - DNA, 1058 bp, Homo sapiens
aattttactttgatttaatagagaatgtttaaccattgtagtagcagttaaaaaatcatatttgggtcttgtttgtttgtttttgtttttgagacggagtctcactctgtcgcccaggctggaatgcagggcgcgatctcggctcactgcagcctcctcctcccgagttcaagcgattctcctgccacagcctcctgagtagctgggattacaggcgcccgccaccgtgcctggctaatttttttgtatttttagtagagacggggtttcaccatgttggccaggctggtctcgaactcctgacctcaggcgatccacctgtctcaggctcccaaagtgcagagattataggcgtgagccacggcaccaggcctgggacatgtattttttgatataccgataaaagctgtgaaccctttccccagaaaaatgcacagatgcacattcacacaaccatgcattgccatttgagaggttcgtgccttcctaaaggacattttaggtaaatagaccctggactaataattcctgtaatataggctttgttttgttgcctgtaaagtaagtatagtataataattacatgcatcatggatttgagagttaaataaaatagtaatgtgtgtaaagctaaatacggtacctgacccatgaaagccctcaactgttagcacctgctgctactttgttgttgttgctgctatgatcataatgctcctcattaattggccttaaggaaatgtcaagataaaaagtgttgttctaggaaaatggttttgtaaaggataaatttgagtggaacaacatatgggacaagatgaacaggtaagatcttactaaaatgcctgggcttggcttgtgaatagagaagttaattcaagaggaaaagtaataatttgttatctaaaggaacatgggtgtagtgagaaagctcgtaatttggggtgggagaaaggggagataggagtctaccttgggaaaataggcatatttagggtaattagaatgacaactgaaactgttagaactgaggaagttttgtgaaccaggtttctaga

SEQ ID NO: 62479 - DNA, 1209 bp, Homo sapiens
ggagaatagcttgaacctgggaggcagaggttgcagtgagccgagattgtgccactgcactccagcctgggcaacagagcgagactccatctttaaaaaaaaaattatataaagtttagctttaatatgtaaaatatttaatatttttatattaatatttaaataacattcatttaaaaagtttttaaagagtatctggtggtaaccccagagacttcacagggaagtgtgtggtcagtacatgtaaacagcatagatagtaagttccttgtttagaaaaggaatgggtagttgaggaagttccaaggaagatgtggggcttgctggataagaatttggaagaaagtgagtattttgtgtggaggcccagcatgagggaaagcttagtggtaggaaatagtctcaaagcctgcatggggctagcagctcagaaaatcagattgtaaatcatttgtagttgtggtggttttctttttggcacatttgttaagttttcaaatgggcctaactctgccacatatataatatcggagatggcaaaggcttgtgacggagatatctctcttaagcctttcctgcatcagagaatggctcccacatgtgtcaggctatctcataagtttaagtccttacagacaggctgacacaggcttgtctggcctgaggatattctgtgctgaggggtgtttctccacccctgtgatggatttgctacttctcagagactgtgcaggcacaacttctctgggacctgcacaaggaatttctcctgtctccccaacccccaggtcattcctgtcccaatcagctgctctactactgatgacattaaagatgccttcattacccaggcacaggagcagcagatagagctgttggaaatcccagagcactctgacatcaagcaggtgaaacaggggatggtgatattcagggaagagtaaatatctgttttttttgttgttgtttgttgtttgtttgtttgtttgagacagagtcttgctctgttgcctaggttggagtgcagtggcatgatcttggctcactgcaacctccgccttccgggttcaagtgattctcctgcctcagcctccccagtagctgggactacaggcatgcgccaccatacctggctactttttgtatttttagtcgagacggggtttcaccatattggccaggctggtctcgaactcctgaccttgtgat

SEQ ID NO: 62480 - DNA, 1049 bp, Homo sapiens
agtttatgctatttttctctcccacacaatttgtatagtaagttaggctttgaattgccttctgtttgggaagcttcaataggttcaagatcacacgcaggagataagagatttggaatgtgtgacatagctcagtgctgctctaggcctcagtgagaagtgacttttcttttccattcatctttctattgtccaggttactctaactcagggtgtgggcctgggcaacaatcaaggaaacctgttttcttctcatctaggcctgaaactagaggggaaaaaggtcttgtttgtggcccaacccaacatcccaagtaggccacatgagtatttcagcctagagtctacactgtccttaggtagaaacctcttacaaacctgtaatgacctttgggtgtctgtggaagagtttgggatctcctccctgcaattattctttttgattgcctttttttgttttttaaattttttccctggctttctctttgtcgtgccttcctcaaaggtagtacatagaattgtgctgatggtccatagccacagattagtaaaaagggggaagggctgctgagagtgtaaaataattattgcaaaatcaatgcattttacttacggggagaaccatttatccaggtcctatttacacatggttagagataattctagtatagaacagattagaaggtgagagtttgaaagagagaggagattaggcaagcgtgaaactattcacaaaaattgcaagtacaggattagagatggtgcagaggagctctttagtttagacatcattacctaaagaatgcacatcataatagagaagctgatgtttatggcagtgaccttctgacaaaaatagctagacgactcaggcttctagagtaaccttttaaacaaatacaatataaagtggttattatacaaataaaaaaaagtttttagtgcctgtgaggttttcatcaactttagtcatctggaaaattaactttgtcaatatgctcagtcctctctgccaaacaaatcaaggacaatcatgctttagtatcttt

SEQ ID NO: 62481 - DNA, 1054 bp, Homo sapiens
gagctgctggagagtttacacttcagacatgtaaaatggcagggacataggagagtcatgggagattcatccccctattgatggcttttcattctgcaattctgactaaaatttgttcatttttctttgaacccaggtcgtaaaggtatcttcactggaagctcggggctgcagattgtgtacctcagtgggacagaatccttaaatgagccagtaccaggttatagttttagtcccaaggatgtgtcttctctgagaatgatgctgtgtacaacctcccagtttaagggtgttgatatcttgctcacatccccatggcccaagtgtgtggggaactttgggaattcttctgtgagtagtgtttgtttagttggaatttctaaaagcaaattgcactggcttgagttgggacttttttcttttcctgtttatattgagtattttagctcttgggtaccttttattagaagtcttctgtgaaaattttcaggattctaaaagttctgtcaactgatcaaagcaaaagttaatttcatgaaagtgtgattcatagatgagactgctgaaatcttaattataaaggaatggttttttatattctctgcttcaagtgccctttcctaagcctcttaatgttttgaggcttcactgatttttttgttttttgttttttgtttttttttgagatggagtctcactctgtcgcccaggttggagtgcagtggtgcgatcttggctcactgcaacctcctcctcccgggttcaaatgattctcctgcctcagcctcctgagtagctaagattataggcatgcgccaccacgcctggctaattttttttttttttttttgagatggagttttgctgtgtcacccaggctggagggcagtggcgccatctctgctcaccacaacctctgcctcctgggttcaagcaattcacctgcctcagcctcccaagtagctgggactataggcgcacactgccatgcctggctaattttttgtattttattagagatggggtttcagcatgttgcccaggctagtcatga

SEQ ID NO: 62482 - DNA, 1024 bp, Homo sapiens
ttttccccccacctgctggcagtctgctgcctcttagatcattcaactcttttttttttttttttttaagacagtgtcttgctctgttgctcaggctggagtgcagtggcatgatctcggcttactgcaacatccgactccctggttcaagtgattctcctgcctcagccttccgagtagctgggattacaggcacgcactaccatacccagctaatttttgtatttttagtagagacgggatttcaccatgttggccaggatggtctcgatctcctgacctggtgacccgcctgcctcagcctcccaaagtgctgggattacaggtgtgagccactgtgctcggcttttttttttttttttagttgaatttactattcttcacatttcctccttgttggtcttatttctctagaaaacttcttcatttcctttgctgtaaatgtcctctctctccttccccatcatagttcatcttggcctttagtctttatttggctatggccctcccgttaccagtcttattttgcactaatcctgtgggacttctttaagcaaaaattgaaggaaggactttatttgttttgttgttttaatatggaactcttcatgaatttgcatgtcatccttgtgcaggtgccgtgctaatattctctttatctttccagttttagtatatgtgctgctgaagtgagcactgtttagttttaactacacatatcagatacgcattttgaaattctgttgtagattttaacatgagcctgacttatgcagttcttggtatagtttgtagatttggattaagggcattactgtagatatttggcagccattttactatatgaatttagtgccaggaaaggaaagagcagctaaggtacttgggttatttctgtgaaatagattttttggatccagtaggaggatcaagcagtgaacttggtagtgaacatgtgatagtgagcttgaaatactggtaggacatccaacatatagttggaagtgagagttattattattat

SEQ ID NO: 62483 - DNA, 2503 bp, Homo sapiens
ggtgttggtgagaccctcagtggatctgcccagtggtttacgtgcactgaaccttgcaaggtaactgcagagagactagatcatgtatctatctaatccaaaagaccagtatataccaaacccggcaggcccatttgtttcctgaattgctataatgtttatctctttgtttgcagcttggcttgtggagatgttgaaggaaagtttgatattttattcaatagagttcaagcaattcagaagaaaagtggaaactttgatgtaagatgtttgtttttactgaatttaattttacctttgtagtcacacataaaaataaagtttgcactcctttaagtcttgattgaacacataccatttttgttaaattgagttcccttcatgagcataggaacttagtagctgctgagtggctgggggagggagacctatttactgtttactattgatctttatattttttgaatttgaatattgttactttatcactgtacaaaaaactgaaaacagactagcaacacttccctaagtgattctgacctctgggtttgggaagcacagatctatttcatgaatgtgatgaggattaagtcaggtaacatacataccaacccatcacaagcttaaaagctctatatgaatgttgtgtatggttgccaactagactgtaaactcctaagagtacagaagagagtattccaggtatgaggataatttgttcattgggttaaaggttgggtaaagacaacaggcaggaaatgtgttttttataccttgtatttctcagattctaatattttaagtttttttgtttcacacggggattctttaaagatctatttctatgtgactgtatattccagggaaggatatgtggagagagccatgaatggcagagtgggactgggaatttgaggagcacttgaattctaacttactttaaaagtttagttccttgactctctcttacccatctctaacttgaatttgacagccaaagagccaaaacttaataattcatagaatcagtaactgttaacagttgctgctaaagaattgtatattgaaatctgcaaattgattaagaattaaaaactgatttgaaactattaaataactagttgaatattactatcaattatgtactgtttgatattttaaaatctcatatatctgtttaaaaaactcattttagctgctgttgtgtgtaggaaatttctttggctccacccaagatgctgaatgggaggagtataagactggcatcaagaaaggtatagaaattatttttatttaacatatgatttctaataaaatttcaagggccagagttcttgcagagttgtttttcattatttaagaatttaagagttattttcagtatttaagaatttaagttgcttttcattattaagactatccggcgcagtggctcacacctgtaatccccgcactttgggaggccgaggcatgtggatcacctgaggtcaggggttcaagaccagcctggccaacatggtgaaaccgtgtgtctactaaaaatataaaaattagcagggcatggtggcgcatgcctgtaatcccagctcctcgggagactgaggcaggagaattgcttgaacctgggaggcggagattgcagtgagccgagattgcaccactgcacttcaccctgggcgacagagcaaggctctgtctcaaaaaaaaaaaaataaaataaataaaatagccaagctacaaggttgggtgtagtatatccttagtggatagctgttccacatttaggattgctaaatatggggaatgtgaatgcatggactatttacttttaatataagtattttttctatagagaggcatatcttaagttctaaagcagatctggtaactatatggtgtcatgtctgtttccctcactagctcctattcagacatatgtgcttggtgctaataaccaggaaacagtaaaatatttccaggatgctgatggatgtgaattagctgaaaacattacttatctgggtaagctgatacttgttgtattttttttttgttttttgttttttgtttttgagacggagtcttgctctgtcacccaggctggagtgcagtggcgcaatcttggctcactgtaacctccacctcccgggttcaagtgattctcctgcctcagcctcctgagtagcttggattacaggcgtgtgtgaccatacccggctaattttttttatatttttagtagagacagggtttcaccgtgttagtcaggatcatctcgatctccttacctcgtgatccgcccacctcggcctcccagagtgctgggattacaggcgtgagccaccgcgcctggccgatatttgttgtatttgtaatgaacataatatagtgttctcaggaattagtctcccaggaaatttttggctagatttttcagtgattgcagcctgagataatggggtttggagggttttttcccagagtctgtatatgtgctgctgtg

SEQ ID NO: 62484 - DNA, 1070 bp, Homo sapiens
taaagacattacatcttctgtttaattttcaagccaccagtgaagactataagctcctggaaaatatgaataaactcaccagcttgaagtatcttgaaatgaaagatattgctataaacattagtaggaacttaaaggacttaaaccagaaatgtaagtaataatatttgtaattaaacatgtttgtatttaatgttcttttgtgcttggggccatggagaagaggagggaacatgacatccttgtcttgtgggagcttgttttctaaaaatgaattccaaatttaagatgaatttcttccattctgaggattagcatgttttgtttgtatgggtatttttgcttctaaatcttgattttatcagtttattcctggaatgggagggggcaaaggaagggtggccagattctaatgaattgatttacaaatccataaaggattactctataagcagaaaaccaaaaactctataatggaaaacactaatttagagtagtcgaatatattttttccattgacttattatttttgtgtttcttttctctagggtgctctttcttggtatgggagtacccaagaaacagaatcagtaatggaaagattgctcaaggagcaagaaattaaaaagaatggaaaattagtagatgagagacactaagtctgggccacagtcgtgcctgatcaactagctactgtcttctaaagcatctgccctgctagtgctcagaatcatgtcacgccacctaatctgtcttagcatagctggagagacactagcattattacttttccactcttttcctatattctttgttaataaagccatataaacatgaagtttttctttgtttttaaagatgctggactgcagccttatctggatcagatcaatgtcattgaagagcaggtagcagctcttgagcaggcagcttacaagttggatgcatattcaaaaaaactgggtaaccgtttttacttctgttttgatgtaataaagactgcttcttgccagcatattcttagtaaacataatagttaacatttatggtgtgcctacagtgatctatta

SEQ ID NO: 62485 - DNA, 1162 bp, Homo sapiens
ggagaggagaggaagtgggaggagccgtcccagcgaaggctccactggaggtcatctccccctccccctataggctggtggtggagtttccagctacaggaggtgccatcccatcctggcaaatccgcacagtcaagctgatccgctatgtcagcaactgggacttctttatcgttggctgtgaggtcatcttctgcgtcttcatcttctactatgtggtggaagagatcctggagctccacattcaccggcttcgctacctcagcagcatctggaacatactggacctggtggtcatcttggtgagggacagatatctaggacttgggacattctggggtgaggagggagttccaccctaataggggctccaggttcttccttttggagccctaagccctccttctgacttttggtcaaatcatcatttaacagctccctaagtgagagggacatgttcccctctctcagcccttgggaaaccctgtctctcacatctcctctcctcctcacctgtcatctgagccctgtgttttttttttttagtgtactatattctgctcctctcttgtcttttgtctttatgacctgttctgtggaaacccatgccttttgtcttctattcaaatattctgccccttcatcttcatctccctcctattaacaagacacattcaattcctgaccaaagcttggaagtggtgggagcggaaggaaatgactggttccagttccctacagccctttacaatctatacattaatatttaccattgtccccaatgccttctcttgggctttggaacacttaagatgctccccagtcatcctaccaagttccatttgaaactgagatagtgaacaagtcagcaaggatggcttttttcccacctgtcttacctaccctgactctcccttggggcctcatcttggaacttcccttgagatccccttgccttctctgacacccccatgacccctgtgtgacagctctccattgtggctgtgggcttccacatattccgaaccctcgaggtgaatcggctcatggggaagctcctgcagcagccaaacacgtatgcagactttgagttcctcgccttctggcagacacagtacaacaacatgaatgctgtcaacctcttcttcgcctggatcaaggt

SEQ ID NO: 62486 - DNA, 1934 bp, Homo sapiens
cccgcgtcccccaagctccagatcctggggtggctgccacgtctccctgccacgcgcctggggggacggaagacgggacggagatgttagtggtgggcgccccccgagggttcaccactgtttcctgagaaacttccccagtgcccacccacccgttctccgtgtgcccgagggccggtcctgggctaggctccgcgccccagccccaaaccgggtccccagccccttccagagagaaagctcccgacgcgggatgccgggcagaggcccagcggcgggtggaagagaagctgagaaggagaaacagaggggagggggagcgaggagctggcggcagagggaacagcagattgcgccgagccaatggcaacggcaggacgaggtggcaccaaattcccttcggccaatgacgagccggagtttacagaagcctcattagcatttccccagaggcaggggcaggggcagaggccgggtggtgtggtgtcggtgtcggcagcatccccggcgccctgctgcggtcgccgcgagcctcggcctctgtctcctccccctcccgcccttacctccacgcgggaccgcccgcgccagtcaactcctcgcactttgcccctgcttggcagcggataaaagggggctgaggaaataccggacacggtcacccgttgccagctctagcctttaaattcccggctcggggacctccacgcaccgcggctagcgccgacaaccagctagcgtgcaaggcgccgcggctcagcgcgtaccggcgggcttcgaaaccgcagtcctccggcgaccccgaactccgctccggagcctcagccccctggaaagtgatcccggcatccgagagccaagatgccggcccacttgctgcaggacgatgtgagtttcccagcctggccccgtaccgccgggtcgcaggcgcgggctgggcttccaggggacgggttggtggcagaagagaggggagagctccgcggaggacttggtcatctttttcgagttgtgctgccttccgtgagttgggaatgtggattgtaatttggggacttgagtctccaactttagtttcttaagctttaaagaaaaatccggtcgtgctggtgcttttatgaattatgcgggttttcctttgtcttcgtggggatgtgagtgctttacttctccttcctactgccgcctcccgataggtttcgcgcccctcgtccccctcgccctccgcccctaatgtatctgtacagtttcagggaacttttctccgttgcgtctcggatacaccctaccctcagtgaactacggcgctgcggaagggtccgtactgtccacccttcccccagcgtgattagagagcggagtggccccagctgcctccacgtgtctcttctcctgactctcctcttcctcccccttccagatctctagctcctataccaccaccaccaccattacagcgcctccctccagggtcctgcagaatggaggagataagttggagacgatgcccctctacttggaagacgacattcgccctgatataaaagatgatatatatgaccccacctacaaggataaggaaggcccaagccccaaggttgaatatgtctggagaaacatcatccttatgtctctgctacacttgggagccctgtatgggatcactttgattcctacctgcaagttctacacctggctttggggtaagcagcctccctgtcctcctgacctagtcctccaggtactcactgctcttttaataaggtaggatcttacagaggacaccagcccctcccagcctcccggttggggtttttctcaggcatttctctttggttgcttcaggcctagtgggctgggaagaacctgggggtactgagatgcaggactgtcaatgctgggggttgagagctttggaaccttgtgcttgtggg

SEQ ID NO: 62487 - DNA, 1049 bp, Homo sapiens
cttttccaacattccttgcttaaagaattgcaatgttctcacttcttgaaactctctgagctctgtatgatttacctccgttccacccaccatataactttcaagaaacagcagttctattgctatggtcctgggactttaagttgcttttttctacttaagcttcagtggcaagttgggagaagaagggaggcaactccatgactcctttggagcccagattcctgggtattttgtgaggttgggctgagcgccttgggctcttgatacctgtccattgggattctcctaatagggtgtctatcctcaagccttacattcctcttctctctctccccagaatgatgtctatgaatgggctcgtgaccaccgtgcccaccacaagttttcagaaacacatgctgatcctcataattcccgacgtggctttttcttctctcacgtgggttggctgcttgtgcgcaaacacccagctgtcaaagagaaggggagtacgctagacttgtctgacctagaagctgagaaactggtgatgttccagaggaggtgagtgaagccctgatggaggtggggatatggccctggcacctggtcattagggaccccattttttctcctgagactttcaaaatataagctgagaaatttgctgggtttgcatgttcacaatcttaatttaaaatcccaatttttaacatcccacgggcccgtagccatagactattgctccatttctttctctctgactatcttaattaaacccattacattcaagagatgtttattgtcctaggacagtcatagattcaaagatgattatagcctagttgcctaggtttgtttgtttgtttttgtgtttgtgtttcaacagtctttctctcttgcccaggctggagtgcagtggcacaatcatggctcactgcagccttgacttcccaggctcaagcaatccttctacctcaacctcctgagtatctgggactacaggcacacaccgccatgcctggctaattttttgtggggacaaggtctcactcactatattgccc

SEQ ID NO: 62488 - DNA, 5002 bp, Homo sapiens
acagagccttgagggcagggccaagagtgaatttggaattttccaacctgatacccattcccaaaagtaggagcttctctctagtcattttatcctctgagaaactgtcagttctcctcccacaaggctcccagacagccacgggtgaccagggtctccaatcactccttaagatgcctttgactggctgggcgcagtgactcatgactgtaatcctagcactttgggtggtcaacgtgggagggttgcttgcaacatggcaagaccccgtctctacaaaaaaagtaaaataataaaagtaaagatgcctctgaggggatctgtttggttcatattaaaagagactgaattcatccattcaacaatagcgagtttctcccaggtgtgaggtaccctgctagctaactggtgtgcacaaatcaagaaaacctcaatgcaccgtcactccataacttctcgcttttgtttcaggtgagggcttccacaactaccaccactcctttccctatgactactctgccagtgagtaccgctggcacatcaacttcaccacattcttcattgattgcatggccgccctcggtctggcctatgaccggaagaaagtctccaaggccgccatcttggccaggattaaaagaaccggagatggaaactacaagagtggctgagtttggggtccctcaggttcctttttcaaaaaccagccaggcagaggttttaatgtctgtttattaactactgaataatgctaccaggatgctaaagatgatgatgttaacccattccagtacagtattcttttaaaattcaaaagtattgaaagccaacaactctgcctttatgatgctaagctgatattatttcttctcttatcctctctctcttctaggcccattgtcctccttttcactttattgctatcgccctcctttcccttattgcctcccaggcaagcagctggtcagtctttgctcagtgtccagcttccaaagcctagacaacctttctgtagcctaaaacgaatggtctttgctccagataactctctttccttgagctgttgtgagctttgaagtaggtggcttgagctagagataaaacagaatcttctgggtagtcccctgttgattatcttcagcccaggcttttgctagatggaatggaaaagcaacttcatttgacacaaagcttctaaagcaggtaaattgtcgggggagagagttagcatgtatgaatgtaaggatgagggaagcgaagcaagaggaacctctcgccatgatcagacatacagctgcctacctaatgaggacttcaagccccaccacatagcatgcttcctttctctcctggctcggggtaaaaagtggctgcggtgtttggcaatgctaattcaatgccgcaacatatagttgaggccgaggataaagaaaagacattttaagtttgtagtaaaagtggtctctgctggggaagggttttcttttctttttttctttaataacaaggagatttcttagttcatatatcaagaagtcttgaagttgggtgtttccagaattggtaaaaacagcagctcatagaattttgagtattccatgagctgctcattacagttctttcctctttctgctctgccatcttcaggatattggttcttcccctcatagtaataagatggctgtggcatttccaaacatccaaaaaaagggaaggatttaaggaggtgaagtcgggtcaaaaataaaatatatatacatatatacattgcttagaacgttaaactattagagtatttcccttccaaagagggatgtttggaaaaaactctgaaggagaggaggaattagttgggatgccaatttcctctccactgctggacatgagatggagaggctgagggacaggatctataggcagcttctaagagcgaacttcacataggaagggatctgagaacacgttgccaggggcttgagaaggttactgagtgagttattgggagtcttaataaaataaactagatattaggtccattcattaattagttccagtttctccttgaaatgagtaaaaactagaaggcttctctccacagtgttgtgccccttcactcatttttttttgaggagaagggggtctctgttaacatctagcctaaagtatacaactgcctggggggcagggttaggaatctcttcactaccctgattcttgattcctggctctaccctgtctgtcccttttctttgaccagatctttctcttccctgaacgttttcttctttccctggacaggcagcctcctttgtgtgtattcagaggcagtgatgacttgctgtccaggcagctccctcctgcacacagaatgctcagggtcactgaaccactgcttctcttttgaaagtagagctagctgccactttcacgtggcctccgcagtgtctccacctacacccctgtgctcccctgccacactgatggctcaagacaaggctggcaaaccctcccagaaacatctctggcccagaaagcctctctctccctccctctctcatgaggcacagccaagccaagcgctcatgttgagccagtgggccagccacagagcaaaagagggtttattttcagtcccctctctctgggtcagaaccagagggcatgctgaatgccccctgcttacttggtgagggtgccccgcctgagtcagtgctctcagctggcagtgcaatgcttgtagaagtaggaggaaacagttctcactgggaagaagcaagggcaagaacccaagtgcctcacctcgaaaggaggccctgttccctggagtcagggtgaactgcaaagctttggctgagacctgggatttgagataccacaaaccctgctgaacacagtgtctgttcagcaaactaaccagcattccctacagcctagggcagacaatagtatagaagtctggaaaaaaacaaaaacagaatttgagaaccttggaccactcctgtccctgtagctcagtcatcaaagcagaagtctggctttgctctattaagattggaaatgtacactaccaaacactcagtccactgttgagccccagtgctggaagggaggaaggcctttcttctgtgttaattgcgtagaggctacaggggttagcctggactaaaggcatccttgtcttttgagctattcacctcagtagaaaaggatctaagggaagatcactgtagtttagttctgttgacctgtgcacctaccccttggaaatgtctgctggtatttctaattccacaggtcatcagatgcctgcttgataatatataaacaataaaaacaactttcacttcttcctattgtaatcgtgtgccatggatctgatctgtaccatgaccctacataaggctggatggcacctcaggctgagggccccaatgtatgtgtggctgtgggtgtgggtgggagtgtgtctgctgagtaaggaacacgattttcaagattctaaagctcaattcaagtgacacattaatgataaactcagatctgatcaagagtccggatttctaacagtccttgctttggggggtgtgctgacaacttagctcaggtgccttacatcttttctaatcacagtgttgcatatgagcctgccctcactccctctgcagaatccctttgcacctgagaccctactgaagtggctggtagaaaaaggggcctgagtggaggattatcagtatcacgatttgcaggattcccttctgggcttcattctggaaacttttgttagggctgcttttcttaagtgcccacatttgatggagggtggaaataatttgaatgtatttgatttataagttttttttttttttttgggttaaaagatggttgtagcatttaaaatggaaaattttctccttggtttgctagtatcttgggtgtattctctgtaagtgtagctcaaataggtcatcatgaaaggttaaaaaagcgaggtggccatgttatgctggtggttaaggccagggcctctccaaccactgtgccactgacttgctgtgtgaccctgggcaagtcacttaactataaggtgcctcagttttccttctgttaaaatggggataataatactgacctacctcaaagggcagttttgaggcatgactaatgctttttagaaagcattttgggatccttcagcacaggaattctcaagacctgagtattttttataataggaatgtccaccatgaacttgatacgtccgtgtgtcccagatgctgtcattagtctatatggttctccaagaaactgaatgaatccattggagaagcggtggataactagccagacaaaatttgagaatacataaacaacgcattgccacggaaacatacagaggatgccttttctgtgattgggtgggattttttccctttttatgtgggatatagtagttacttgtgacaagaataattttggaataatttctattaatatcaactctgaagctaattgtactaatctgagattgtgtttgttcataataaaagtgaagtgaatctgattgcactgggtctgggagtttcttttggctgtgattcaaagtcttgggatttgtctctggctcatatctatgtctgtacctttaagagtataaaagaagtagaagttacaatggttgactcataccccattaacctgccctgctgtcctaaaggtaactttaggttaaactctgggacgcaggaagccaggagtctgctgccattaaatcaaacacattaacaccagctggcaacttggccctggggaagtgccagggttctcgggtgtgtcacgtggtcggtcacatagacctaagataaagacactgggagaggaaaagaccagcaggagaagcgctccctgggaaagcagttttttgctcttgcccaggctggagtgcaatggtgtgatctgggctcactgcaaattctgcctcttggattcaagcattctcctg

SEQ ID NO: 62489 - DNA, 1053 bp, Homo sapiens
actcttttccttgctgccaggtatgtgatgctgtaggcttggctccaaaccagctgagtgcctgctttttactcctttatgtctggccttctaggatctgtccaagacactctcaggcctggaggcagggcatagaatcagttcttcactctccctaatactacactctgtaaggacctggggcaggatatcttctcccccagggatcttctatttaagtggcttctgagagggtgaacaggattgttacttttaagcctacctctgctgtgacccatcatgtgggtcttttgtttctcccttctgtggtttatgagcctgcccttaccttttccctgcctctgacttggtatttccaggtccgtatttctctgtagcccagggtctggggtagagctgactgctgttcaccctttgaacaactcatggacgtgagggatgggtgctgagcagaaccaagagaggaaactttggcgctgttaaaatggaatttctcatctgccggcattattaagggtgggctaggttggatggaaggtgaaagggatgaactgccttttgctggaagctgtcttaggctgtgagacaggagcaggggaaccacagcctatggggaactgcccttgactccacctatgttggagccttagcccaaggccattccttctgtgatgataaagcccagttctggaattggagccatattaaggaatgattctcttccagcgctgctcctcaagggttgggggtccttctccctcgcagccaccacatgtctcagggctaccttctccgattggatttgcatttgtggcactgtctttgatgcagtgatgtacttaatggtgcaataaagctgcttcgatttggtttcctctgtcatctcccagtcattgcctcctctgggttctattttgccattacctttctagtcctctttattcttgcttcctgcaccctagtaaggcaggggagaggcttagggagagataaatcaagaaagttaaaggaaggtgtccattcccactgaattaggttctctccttgcagcat

SEQ ID NO: 62490 - DNA, 2117 bp, Homo sapiens
ttaacccaagtcaaaattaacctctctctataatcccacagacttatactttggtaacgatacattctaactatactaaagttatttatatacatatatgcatattaccctactaagtaatagactccttaaggatagggactatgtcttgctgatttttatatccccaaagcggtgcttcacaaactattaatgtgcatccacatcacttggggatcttattaaaattcagaaactggttcattgagttggaagtaaggcccaagattctgatttttcagcaggctcccagttgatgtccttgcagctggtcggaggactagcactttgaatgacaaggccctgaagcacttggtacaatgctttaaatattaggtttgaattgaaaacagatgtataaaagcggaagttcttgttttcaaagccaacggttttactggggaggcaagactaacacattcaataggctgtgagcttaaaaagaaaaagaagtagggaggtaaagaattctgaggtcaagaggcctgaattcttatcatagctctgtcatttattagctgggtaaccttgaacaattcatttaacctctcaggacttaaccgttcttatcggtaaaacagggatagtgatgcctgcccagaaaattaacatgaaccacaaataagaatatatgtacacactttgtaaaactatcaagtactatataaatcaaaagttaaaatggttttgtttagcactaatctgtggtgtagattttgtgctgcagaagtcacggtaaataagaattctgactgggagagttcattaggaggtggatattgggaaaagaaatggtgaatagttagggagtaaagcaatagttatcaacgccaaataatctgtacaacaaacccccatgacacaagtttaccatataacaaacatggacatttactgcattggattgaatttttttaacctaaagtaaaaattaaaaaaaaaaaaaagttgtcggccaggcgctggtggcttactcctgtaatcccagcactttgggaggccgaggcaggtggatcacctgaggtcggggagttcgagaccagcctgaccaacatggagaaacccctgtctctactaaaaatacaaaattagccgggcgtggtggtgcatacctgtaatcccagctacttgggaggctgaggcaggagaatcgagtgaacctgggaggcggaggttacggtgagccgagattgcgccattatactccagcctgggcaacaagaacaaaactccatctcaaaaaaaaaaaaaaaagttgtcagccttggatacacattggaataacctgaataattcaaaaaatactgatgcctagtcccatccccagagtttctgattgtattgtctggggtgtggcctggcaagtctggattgttctccatgtggttttaatatgcagccaatgttgagaactgctggagtaaaaagggtttttctaaggtcctgttttgtgccagatgctttatataaggcatctaatttggtgagacggatactccaggtgggggtgttgtgggtaaaggcacagaagcaggaacacaccaggcattttagggatgtggagcaattataataaacaagcagggagagagatgctgggaaagataggtttggccctgattttgcagaggtttgtgcactgcaggaaggggagcttaagctctttcctgtggccttgtgaaaccacacaggctcctgaatagcagcaggttggtacaagcaatagagggatagtctaaggcttaattagaggagggaaaagaacagaaggctagcaaactattttagtaatctgggggtactggcactgggaatgggatggaggggacctgcatgaaagacagtgaacaagaataggtaggactttgtcgttgcttggctatagggggtatgaagactttgctaatgctgaggtatttagcccaggtgactgggagaatggtggtaccaggacaggttagcagaaggtgagtcttgtgtggtgaagtttgaagtgggtggtcctaagagtgcagaagtggttttggtagggagacgaattcaatactaaattcctgatcctattccaccccccagga

SEQ ID NO: 62491 - DNA, 1074 bp, Homo sapiens
ataatggcagaagctgacagagatgcccatcctgtgcttactgacatgaacctaagtttgtactgatgccagttcctcctctttataggtttcacaagctggtctgggggagctttggcagtgggcttctggaaagctccggggttattgttggcggcggggacaatggcatgcttattctatacaatgtgacccacatcctgtcttcggggaaggagcctgtgattgctcagaaacagaagcacacgggggctgtcagagccctcgacttgaatcctttccaggtactacatttcagttagtcaaacatggccaagccagggagcaacagatctgagtggaagcattcatttgtggcctccagtctgtaactctgacccctttccaggctgtttcaggggaggcttttgatagccccaaatttgggcttctttcctcctttcttgctctgtttcttcctagggtggtatgtctccaaacactttttattcatacagggcaacctcctggcttcaggggccagcgattctgaaatcttcatttgggatctgaataacttgaatgtgccaatgaccctgggatccaagtcacaggtgagcagcacccccactacccaaccctggagtgtgcagctgattctcctaagtaaaagtcttgagttctggagccaatcagagctcaagagatatcaaactttaccactggagggcaataaagctccacagactaacatgctaccagccagataagagttaggatggctggtgggtggagggtgtatatggggtagttggtttgtgctcattactcgttctaagagtttctgggaggcagatgaaagttggggagagcaaaagacaccacaagaagggatgggagtgctgtttatcacagtagagctttcgcagggttgggtagggcattgggcccagcaaagagggaggaagagtaggaccccagacataccattgtcctttttatggaggggggggtcagctttgttctccctgtatgtggctctgccatgcagttgggggtctggtcttctgtcttggagaggctgtctgtcaatct

SEQ ID NO: 62492 - DNA, 1024 bp, Homo sapiens
ttgctgggccactttagtggtggaaccattagaggctgagtgacttaaaggagattgagtctgtctcgaccccgagagagagtgggatggatggatgcatcgtctcatttagaaagtgttgcctctgactctaacacactcttctctctttctttacctccctccctgtcttcctcccttcccctcctttccctaacccccttccctccccctttctccttctctctcacagtgtaggcaccacttctcttacaatttaggctttctctctgccttgggctgagtgaggaagaggagtgctgttcctgccttcctagcccagctgggtctgaccagaggctactgtgtacccatttaccatgcgtgattgttaactcagagtggggtgtagccaggtattgactgaatgtatgttcttgctgacctgtgtttttttctgtagggaccaaagcagtatccttacaataatctgtacctggaacgaggcggtgatccctccaaagaaccagagcgggtggttcactatgagatctgaggaggcttcgtgggcttttgggtcctctaactaggactccctcattcctagaaatttaaccttaatgaaatccctaataaaactcagtgctgtgttatttgtgcctcatttccccaggaatagtcactgccttgaggaacctcatccttttccctttttttctgcttgatgtctgctgtcttccctgttttctttttctgaaatttaaaggataagagggtggggtggatggggacttaggcacaaaatgttaatttgttaatttcacttgggttgtaaaggtacttaagggttttagctgtgtggaggtgttaagggtccctccttttcccatttacagggtcaaggaagaaatgttcctaactttccaagttggaacaagatttatttcacataaaaaacctttctagtctgggtctggtagctcacgcctattatcccaacactttgggaggctgaggtggaaggattgcttgaagctcaggactt

SEQ ID NO: 62493 - DNA, 1050 bp, Homo sapiens
cctccacttcttgggttcaagtgattctcctgcctcagcctcctgagtagctgatattacaggcacctgccaccacacccagctaatttttgtatttttagtaaaggtggggtttcaccatgttgaccagtctggtcttgaattcctgaccttaggtgatctgcccacctcagcctctcaaagtgctgggattataggcatgagccaccacacctggcccagggaaggcttatgtacattaaaatatttcagagtttgccatgaacttttaaatacagtgtggacttctatggttaattctgtgcttagtgactagaacttgagctcttgccttgaggtttagttcctttgtccttaggtgaggcagttatctctgtcactttgtttctcatctataagatgaggagactctgaattgtctgaggctgctcacagccctttccagaagttcttgctgtctttcaggtatggcgactacccgaagctccctgaccgctcacagcatgagagagatccatggtatagctgggaccagccgggcctgaggttgaactggggtgaaccggtaagagaaccatatctcatttgaccttccttctctctttgtcttcttggcgattctttagctcagatggcacttctttgaccaagtaacactaagctttcctgctcaaggaagcaaggtccagtgatgtgagatctgagattgcatgtggcacactgaatgggacgtctgggaatcatgaaactctgtactgtgaaagttgtgcacttccatgatggagctgtccctattcagcagaacctagacagaggccagcatctaatcctgtagggcagtgtgcctcagacctggttctcagcatattgtcccagggcagtagaatgcttctgtctagccttgtatcaggctctaatcactggggacttgcctgcattttgcaggaagagtagtatgtgacagctatttgtctttctgcctcagatgcactggcacctagacatgtacaacaggaaccgtgtggatacatcccccacacctgtttcttg

SEQ ID NO: 62494 - DNA, 1050 bp, Homo sapiens
gcttcctccgtcacgtttggcccggctcagccgccgtgacaggcctttgcgcatgtgcagaagggaaacgtgaagaaggtgaagatggcggtggccagggccggggtcttgggagtccagtggctgcaaagggcatcccggaacgtgatgccgctgggcgcacggacaggtccgcgagaacgggcgagacctcagtgtgggaagggggtacctgaaatttggtgtatcgggaggggggatcgtagatgccgcggcggcagcctccgggtagggagtggaggtggcgttgatatatccagaaaatggggtggaggatcgcactgatcctgcgaagtcccgggctcggacctctgcagcccctgcgacttgaagccttcggagcggctggagagcgggctcgcttctgacctgttctcttctgcgttctagcctcccacatgaccaaggacatgttcccggggccctatcctaggaccccagaagaacgggccgccgccgccaagaagtataatatgcgtgtggaagactacgaaccttacccggatgatggcatggggtgagacagagagggtatgctcgcacccaagtagtgatgggagaaggccggctgggttgggtggcttgactgtgaccctttttcccgaaccttctcgtgacccctcagagtcaatggagtgggtgcttttctctgtggagggaggtgggaggggggtgggtgagcagctgcagctgagaggacttcaattttctccttggctcaggctgtttcctcaaatgaggaagccgaggttttaatggctccctcgaggacccccgaatagcaggagccttccttggctctatccagagcgtcgagtttcatttagattgagcatctgctgcgctcaggtgctgtcatccaggcatgtgaccaggctggagctggactcctgtcatgagaatcttatttgtaaacggagtactctatatttgtgtgtatgtctctttaaaaaaaatgtttttctgttagtgctgtggaaatcgtagcaactattaagcagattaaacagc

SEQ ID NO: 62495 - DNA, 2000 bp, Homo sapiens
ggcctttacctaataagctatcttccttactttagctgtagaaggctgcaacaggataggtggctgaatcagttaagataaactaggcttcaagccagagctcgggctagaaacaacagaggcttatttctcacttactacatgttgatcatgggtaatgtcatattgttctttacatcatcttacttgctctggcacccagattgccccagcagctactatctagaactttggagttgctgtggcagaaggaaagagatgtggtagtggtaacttgttcttaaattacagttggaaacaacacaagtcgcttctgtggacatttccttggccagagcagcgtaaataagcaagcctggcttcaaggggatgtgaaagaaaactcgcacactgagggaaccagctcttggtgaacagtaatacaatttaccacagtggtcatcaagggccaacggagatgtctcaggctctgcgagtctctggagtgagactgattcatcattctagggtctgtggataggcttctaggagtctgaaattgtgtgaaagttctgggtgtatgtgcatttttatggggaacctccgtggattcttttatttatttatttatgtatttatattttttgagatggtgtcttgctcttgtcacccaggctggagtgcaatggcacgatctcagctcactgcaacctctgcctcccaggttcaagtgattctcctgcctcagcctcctgagtagctgggacttcttctccaggttcttttttttttttttaattttatttttcatctcaccctcctactctttggattcttaaaggagtcattctgtgacccaaaaaaggttaagcatcacttctttaaagaaaaagtttgggggccagatgcagtgtctcacacctgtaatcccagcactttgggaggcagaagcaggaggattgcttgagcccaagagtttaagaccaacctggacaacatattgagaccttgtttctttaaacaaaacaaagaaaaaccagtaaattaaaaaatttggtgttgaacataactcaatgaaggataagtaagaattcagttgtatgagaatccatgttggctaaaatttgcctgactacatctgttctctgtgggagatgctggtatggatttgggcttggattttcagatgtggagaggccatgccaggggctgtgtgtgcatgcactaataggattttcttcttggggaacataggttgtatctgcagcaaacgctcaatgacactgtgggcaggaagattgtcatggacttcttaggttttaactggaactggattaataagcaacagggaaagcgtggctgggggcagcttacctctaacctgctgctcattggcatggaaggtaagaaatctttcaaaagcagcatggcttggagtcatatgaacctgatttctaatcctgtcttcaccgcttattagctccatgactttgaacaagccacttcactttcttaagcctcagcctactcagctctaaaagaaacataataggggctggatgccgtggctcacgcctgtaatcccagcagtttgggaggccaaggtgggtggatgatgaggtcaggagatggagaccatcccggccaacatcatgaaaccccgtctctactaaaatacaaagaaaacaaatcagctgggcatggtggtgcgtgcctgtagtcccagctactcgggaggctgagagaggggaattgcttgaacccaggcggtggaggttgcagtgagccaagatcacgccactgcactccagcctggcgacagagcaagactctgtctcaaaagaaagaaaaagaaacataatagggccaggcatggtagctcatatttgtaatcccagcactttgggaggccaaggcaggaggattgcttgaagccagaagtttgaggctacagtgaactatgattgcaccactgcactgcagcctgggcaacagagtgagatcctattgcttaaaaaagg

SEQ ID NO: 62496 - DNA, 1089 bp, Homo sapiens
gtggactctcatcacttaagaaagcatctgtcttggcatacccagacagagctggggaagattgtctaaattccatgccctgcaaaagtgtgtgttcaactcatggactgtgcaaaggccaaacaacacacgtggtcctagttagaaaggagtagatggaacatacactagggcacaactaattcaaggtggcatttaaaataatgtgccatatttaaattacacagcactctcttcagtcatctgatattctttcctccaatgaaaatcacttgcaccagtgagccccaatgttgctttaagaagtgttgtcttggctagatgtggtggctcacgcctgtaatgctaacactttgggaggctgaggtggacaggtcacttgagcccagaagttggagaccagcctgggcaacgtggtgaaaccccatctcttaaaaaaacaagtattgcattcgttaggtgtattgaagtgggaggaaaggttgagaatctttgagttccacagagctacccaaaataaatacagagctacataatcatacaacttagaatgactggttaactcctcatgtatatgttgttgataccagtcatttctgttttgctttccttgaattcctgccgtagtcaagaagagtacacggtgtacacagttgattaccctacctgatttttgaggatcattttgatgtgctcttgcttccagtaagggcagcagccttcatttagggaagttgacttagctgatagtggacccttaaccagtgatgtttgctagagttattaccatacaagcttaacacctaattttctgagagttgtaattggaatttccctgattctgcctaaattttgatttggaacttttagctgggagggcaggctgggtttctctttagcactgggtcctgtattccagcttatgcaatagaaccactgctctgcataagaaaatgcctttcttcttacaggaaatgtgacacctgctcactatgatgagcagcagaacttttttgctcagataaaaggttacaaacgatgcatcttattccctccggatcagttcgagtgcctctacccataccctgt

SEQ ID NO: 62497 - DNA, 1105 bp, Homo sapiens
tttgctggttagaatatgtttttgggaaaagtttctgaaggtttaggtggaggataattcctaattcctcatatcctcagctgtggagtaggtcgtctgacctcaggagcactgaagcctaggattctttatcacttaacattcaaatgtggactgtcttatattgttctctctcagggtttaatgtgcattatatcttctgctggatataaattccaaatactttttttaaggcatcgttttttttttgtttgtttgtttgtttttactgccaaactggcatatagtagttttactggtgaagatttggtgattgatattttttttctttctcttgaacctcttaggtggactttgacaatcccgactacgagaggttccctaatttccaaaatgtggttggttacgaaacagtggttggccctggtgatgttctttacatcccaatgtactggtgagaagggggctagggctgggggctttttgggagctttcttttccattccctggaaagccttgtctgtgtcgcttctgagttatggcatgattggttttatgtggtctataggaaggttggcatatccagacatgagcgtactgaacctgtgggggatagtggcgggaatgatagccctgtctctaggacaggatgacggttcttcaagtccaaagagattccggaggcttgagcctagaaaaactgttcttggctctttggtatttcgagactgaacaccagtacctctaacccccaagtgtgtgtttttttcacaggatgagtgtaaagatattgtcttcactattttccgtaactggactccacctagtttttcagcccaaccctgccacccccccgcacttcgcccctccgcccccgccaaaagtatcagtagtaaacaggagcctgtttgttttcttgcaggtggcatcacatagagtcattactaaatggggggattaccatcactgtgaacttctggtataaggtgaatatggtttgctttttttgttttttccagatggaactggctcttgggtgaggtaggtataataaatgattttggatgggatggttgactatccctggaagtgattgtcaggtgtc

SEQ ID NO: 62498 - DNA, 1098 bp, Homo sapiens
gtcaggtgtttggagcgaggcagggcagttggcactccactcctatttggagggacttcatacccttgcctcttgtgccccagcaccttctctctctgccccccgcctaaagtcctgcattcagtgtgtggagtcccagcttttggttgtcatcatgtctgtgtgtatgttagtctgtcaacttcggaatgtgtgcgtgtgtgtgcatgcacacgcatgtatgtatctgttccctgttccttctgggtcaggctgtcacttccggctctcagccctatctcctgcaacctcagtgcctcagcctgagagagagatgagatgctcttggactccccactgcatctgggctgcagggccagagctagtctgaccattaggtcagtctgcctcctgacagtttttgcgtagtcaagctctaggcggtatgggaatggctaccgggactctaatggggtgaaagagaggggaggcttgcctttgagagcctatatagccttcctgtgagagaggattagatagggttccaactgggcctacaagctcaagccatacataaaaggaccttgggacataagaaccaatgattgtgcataagttctaaattagagacacatatagtttctctctttcagcaccagctcttgcccctatgctgggtaccaagggagttctcctagctgtggcttctctaggttctaggggtgcaagcctctgtgtgtttgtttgtgtgtgtctgtgtgtgcgtatccacactaggggtgcaagcctctgggtgtgtgtgtgtgtgtgcgtgcgtgtgtgtgtgtgtgtccgtgtgtgtgtgtgtgtgtgtccacactggccagcctccctacttaccaaggttctccactgcttaccttttccagtgggacagtacagtgtgagcccccgggaagtactgcctgacctatcctaagcttttacacttggattttagccatcatatgttggccaggtctcactgcagcctgcccgaggctaactggctagagcctccaggccctatgatgctccctgcccaggccatatcctttattcctgctgagcttcctggctgaatagatgaaatggggtcaa

SEQ ID NO: 62499 - DNA, 1809 bp, Homo sapiens
ttttgggaaagaggagcacaggagcggaggaaaaacttggccacagtcacacttggaaagatagtagattattttcgttctcctcagcaggtctgctgtattcctcgctcagcgctcaaagatgtgggtgatgtgtcaaggaggcatgcactcagctggtccttgctgagttatttgctgacacaggtctcactaaggtggctgaggggtgggagggagaaggctaatcttggaaccttcacaggattggccttgatccttgggtaacacaagagtgattcctgatttttagacacctaatatgtgcctagtgcttttctctttgttcctcactatcctgcaaggtaggtattctcacttacagatgaataaatgggctcagagagattaggtgattagtgacaatcagttgtaacttagcactgttaggctgcaaaccccttgctccttcctttccaccaaactatgttgattttccttccttacctccctccttgtaccacaggttctgtcctcaagatatcaccccactgggcagtatctgaaggcagacccagcccaagatggtgcagaatatacagctcagggtgaaagttcttctgggctcctgctaacaaagtcttggaaaaactgcctgggaagccatattatgaattagtgctagaagaagctgtggggggaactgagttctgtgtctaattgcattacttatgtgtccttgaataggacccataactcctcccggcatgcttttgcatctatagaactgaagctgtagttctagatggcactaagggtcttggttcatattcagctgctgcttccccccaaggaaaagatgaggtttttccccttcgattaccttttgagggatgtttaggctcaaattctgcttgccacagaggaaacatttctgctgtagttgtttacctccatcctagctggcagtgtgggacacacacatacagcaagtgaaggtgggggtttgggcctgtatagaggtcagctacgctgcaggctcatctattcacaccagcaggtacagagaaaactagtgttttgtaaagtcaaatatttgttgggggttggagttctggggttggaggaggggctgttctgggcatcagttgagcagatgcccaggatgcctgggggagaccagcttcccctacaaatcagagctctaaattacaaggtttttaccaacgtgaacagttgggggaagtcgtctgctctcatttgcgtaatggtttctgtcactggtgattagacacaggatgaaggaaaagaaatttgacaattaggaatgagcgatcattaatctgaatctgttaggagacagagaggggaaggatccttatcagtgggccagcccagtatggggagacactccctccctctgcccccagagactcctgggctacatcctctttcagtattgccacaagtgggcagagcttgtatttcttaacaaagattagggacccagttgccagcctgagatggatataggaacagacatctttgggcatgagccaacaaagatagaaatagatgagtgtcaggtacaagctataaggcaaagaataacagtggaaaagttttgacatgtgtttgccatttgtggaaaatgtttttgtaatagtcaacacccctcatagcccacctgtgacaagtacttgttacattccagcactgtagggcgtgaggaaaatctggtccttatcaaatcccaggagcttctgcttagttggggaagaaattacatgaagcaaccagaggttataaggccacacttgtatatcgtgc

SEQ ID NO: 62500 - DNA, 2066 bp, Homo sapiens
tccctacctctgggtcttccacccttcaaaatctggtacagaatttagcaggggctgcagggaatgaccctcagggaccagtttcacccagatggggtagatgatgaggtatacctagaagtagctcagggctccagagtctggcctttcagctggtgtcttactcccctttgagaccttcagctgcttgtcttccactgcctgcatacttctctgatgtcttctcaaactgttggctctaaagggatgttccagcctccctctccagagctgcctgcagtttcccttattcagctgtctcctgcctagtctctccagcggcctccttaccaagaccctttttcctaaacagttgtccttccctcagaaactccatggctgcaagtgtgaatagacttgtctttaggatccctctctctggtcatccctgatcatcttagggccgtctcccttttctgatttttgacagctctgtttattttgcccatggctagtcctcttgttttgtgtctgctgtgtgttcttgcccttccattgtcagttctgtacatcctggttcagcttgtctcactgtggtagccccttctgcttgtcttcagccatcttggtttaatcctcataggtcatggatgaatggagccttgctgagcactttgagggcatttctgttgggcacaacctcagaaacgggaagtcttgaggcctgggggcgtgtggtcagtgaggcctccagaggtgggttaggggtgggcacctacaagggccagttgaggggagaggtgcagggattgctgaggagactttgtgagaatgatgtcaggcccgggaagctggtgtggaagaactgagctgtcagaaggagataccaatatcccctttgcagggtggtgatgggcatcaaacatgacgtggaacatgtccccttcatggagggtttccatctaaatgcatctgtgtgccttagggatcagtagttcaggggtggtggacttttttgagtgtctcctaatttctctgaggtgtctttggctctgtgtcaccaaatgtgcctgacctctgcatcccagtggttgctgaaagggaaacagtatattgcgtagtcagatgtcaggagtagagatcttaatgagaaaggccctggcagctggagagatgagaggacctagtggtcagcttatacccagactatctctccactcctccaagagtttgagtcccatagctgatgaaagaatttacatatgggctcccccctgctttcccactgaaaatctattctcatattttgggaaggagcatatgtcctttaactttcaatggtaaacaatctaggatagtgtttaaaggcatggattttggagtcacatatagttggtttgaatttctagcttcactacttaccagctgggtttgaccttggttgatttacttaacctctctgagcctcagtttcctcaactataataacatgggtggagggaggcatgttgaaaatatctacctcagggttgttggaataactgaaacaatgtttgtaaagctttagcacagtgcctggcaagcacttaataaatggctgtggtggtggtggttatatttattatgtgatttattcagaaacttggtttcagtgatctctaaacagatttccagtggttctttctctctcaagaaaagcatagggaaaaacgagaaacaccttagataaaccatattgagttgagggtagacagaagagtctagtacctaaactcaccctagaggaagagaaacaggaagtgtcttatgcctcttctgcctgggcagccagactttactgctgtactaccagcccagggccttgggtgagaaggtttcaggtctgagctccccttgcactgtgtgagaggccgtggagccgaatgagtccttattatacctggagaagctgttgtctcctcacaccatgaaatgtaatagcagtcaaatcaggcccctcttgattcaattttagtccatgcctttccatgtatttaaattatataagtgttggccaggtgtggtggctcacacctgtaatcccagca

SEQ ID NO: 62501 - DNA, 1104 bp, Homo sapiens
tgctcttgtctgtgaccaggcactttgcctaggctctgacctcatgtctcagtccttttgaacattctggtcacctgcctagtttgaccgcagcctgactttggtctgtgaggggtcctgggctctctgctttatgcagccaccatatctgatctttgtgatgtggttgtgaatcttctgcttctatctccaccatcactgtccactgcttgggcaatatggttgctcagctgagagattggcagcccagattgctaaaggcttaggagacatgaaaggtgagtttggaagtgtttggattttcaaaagaaggacagaggcagaagccaaccacagtttaagggggcagctagtagagagctttttaggcaagggaggccactgcacatttataggcagagaaggtggcaggacagagaatttaagagaatgaggtctcagaggaggcataggatgatgggatatgaaatagcaaaggcacacccaaggtgatcctgaagctcagaaatattaagtcatgcaggagggggcaccattggaaatataatcccctaaagttatgagtaaacaaatgatggtggggtgtggagggtagaaagaaggcctaagcttgatgtgggggccacagcctgggcaagagaaatttccagcaaagcctctgacaaatttctgacaaagcctctcatgttatctagttgtggcagaagcatctgaaccaaatggctaggaagcttggtgaacagtcagacccagtgagggttgattaatggatccatgtcagcctagactagagggaagtctccagcagtatgccttagggctcagtctgggcctgtgtcctctctgacatttttattgacaactgaccgaagcagcaggctcatcaagtttgcaggtgatagagctaggaggggcagttaatactttgcatgaaagagtcaggattcaaaacgatttcaacaggctggaacactgggctggaaccaacaagattaaacttaacagggataaatgtagagtcctgcacttaggttaaaacaaaatcaatgacataagtaccggttgtaggggttggcccagcttgacagcagttcatgaagaaaa

SEQ ID NO: 62502 - DNA, 1034 bp, Homo sapiens
ctgttctgagaactcaataaaacaatcacatcaaatatgaagaggcataaatcttgtgtctgcacaggtaacctactcaattgcttttattatcgctcaggctgcctccatttattaccgttcatggcctgggcaaaggaggctgcgtggagggtggtctccagtgcaatcctacaccctgagaggcaacaatcagcccatacagccagagatttcgatgggagcccaggaagggcccatctgtctgcatgaaaaccaatcaataactctgtaaccagagcccttgtcacagggaaatggacaacacaacagttcaatagaggggccacagggggaattagccaagtggagatggggccaaacaggagcagcccctagagaagggaaacaggggtgcctggagtaggggagattagggaaggggtggagatgtggcaggggagagcaatagcttcatatgcatgttggtattagatggggagtattgtgcaaaatagacccagggaatgacaggcaatgttggaagttgaggtggtagggaacatgtgttttggacagcatttgggaaatgggcttgttctggtgcacatgggagagtgtgactatgcatgatggcatgtgcttgcggactagaatgttacagcttctacagaaagaggaacaatagtagtaactggtgtggaagattaatcacactccataccccctaaaacccctctgaaaagggggttcctatgagcccacatgggataggggtcctgcttcccagtcttcttagcaggactgatgaaagagccccattgtccgctcccagcttcttaggtgtccaacaatagctactctgcaggttgcctcttaatactcaagtctatcttcaccccctccttgtgtctacctggaattggagtttttatattaagaagagaacaatggtgtaaaagtgacaagcatccagtagaaatcatacttcaagtacccaaacaaccattctgtttctcactttcaatacagtattcaataaattgcatgagata

SEQ ID NO: 62503 - DNA, 1021 bp, Homo sapiens
gtggcatgagcctgtcaggaagacaaaagctcagaacaagctgagacaacaaaaaagggccttggagaaagaaagaaaagaaaggcaggttttggctcagtcctagggaagaggatgtaatattgagagagaaggcagaacttctcaaccttagcttgcttttgtcttctccaaatgaaagaatcttcaaactgagcccagtaggagggcactagtgccctggtcagggaggggccaggcaggtaacctctggccatttcagtgaactttcccaggtccacacaggaccctaaaactgctgttgatgatccctgagatgtcacaaagaaagggtgaggcagtgacaagcccaaggccatcctgcctgtcagaaaagggggaagaggtacacatatgcaaatgacactcaaaatcataaattcaggatcaggctctggaaatcctttaaatgaaattattatacagttaatttatgggcaacagaaaagaaaatggtgatatcccagagcttgcacgcactcacaaaaataagttgtggcatatttactccatatcaacgcttagatcaaatacctccctcataaacacttccctagttgccctgagtggaagcaactgctcctttgtttttttcgttcatcatatgacttcatgccttgatcacggcattcatcacattctgattatataatgatgtgtatgtctacctccctgctagattgtaagtttcttgaggtcaaggactgtgtcctatttacctttgtaaatcagtcctgccatactttgtacatagcaggcactcaatttgctcatcgatgtaaaccagatttttaaaaataatttattaaggaaattatgtggaagtagtgagtgttaacatttaaccaagaatctccttcctagcataatggacaagatgaaaacaagtaaaatgattgatggctgttgggctcagtagttcccaaagcattcattcacttacagcagccaggaggaggtccccattggtgggccatgtggc

SEQ ID NO: 62504 - DNA, 2444 bp, Homo sapiens
ttttgtggtaacattagtatagtttaatttatattttaaacattaataatttagataaatattaaatattttactaacatgcaatttgtatgtgttttaattggctatttagacagacacatgttggattcaccacaaaaatcaaacatcaaatatggaggaagtagattgtctatcactgggacagagcagtttgaaaggaaactatcctcaccaaaagaatctaaacccaaaagggtgccaccagaaaagagccctattatagaagctttcatgaaaggtgttaaagagcaccatgaagatcatggtatacatgagtcacgtcggccttgtctgtcactagcctccaaatatttagccaaaggaacaaatatctatgttccttcttcatatcacttgccaaaggagatgaagtcactaaagaaaaaacatcgatccccagagagaaggaagtcactattcattcatgaaaataatgagaagaatgatagagatcgaggcaaaaccaatgcagactccaaaaagcagaccacagtggcagaagctgacatcttcaataacagctccagaagccttagcagcaggagcagcctgtccaggcaccacccggaagaaagcccactgggagctaaattccagttgtcactagcttcttactgcagagaacgagaactaaagaggttgagaaaggagcaaatggagcagagaatcaactccgagaattctttctcagaagcaagcagtctttccttaaaatctagtatagaaagaaaatataaaccaaggcaggaacaaaggaaacagaatgacatcatacctggaaaaaataatctgtcaaatgtggtatgtgtaagaattattgaattagcattgctactgctatgtcatatttagaatactaaatttaaaaatatttaagagttgttacatcacattgacgtctttcctgaaggaaatacttatgcacagtttgtgtagaagctggtttcattacatttcctccagttgcccttcatcgaactcagtaaagcagtgtttcttatccttagttttttcagactgggaacaaagatcttttttagtcagaaaagtaagcattctttttttttaaggcaagtatagtcttacttatttatgtgtagacagtcttgctctgttgctcatgctggagtgctatggcgtgatcatgtctcattgcagtctcaaactcctgggctcaaatgatgctctcacctcagcttcccaagtagtcgagactccaggtacctgccaccatatttgactaatttttgtatttttttgtagagacaggtctccctatactgcccaggctggccttgaacccctggcctcaagcgatcctcctgcttcctgtactttgggaggcctaggtggaaggattgcttgagctcaggagtttgagaccagccagagccacatatcgagaccttggctctactacaaataaataaataaataaataaccagtcatggtggcatgtgcctgttctcctagctacttaggaggctaaggtgggaggctcgcttgagcccaggagatcaaggttgcagtgagtttgatcacaccattgcactccagcctgggtgacagagcgagaccttgtctcaaaaatacagtgttctaatataatattcttgaattattgatataaacgtaaatcagcattttgaaaactgacttcatttttatgatatttttacatgtttatgatacaaatgcccttaatttttatgacaaaaaccttaagatctttaaatattttattatagacattaggatttacctccaaatatgggtgcttgccttattcaatctagaaatctgtgtttaaatgttaggaagaatgccttcacattctttactgtccccaacacttaattaattttatctcattgtgctcataggaaaatggacatctctcaagaaaaagatcctcttctgattcatgggaacctacttcaggtagaatcaaaattaaatttatggatttctaaataaatttccattttaatggcactgctttttaaaataaatttgtttaaatatgcagttcccttcttggggatgaattaagtgtctcatattaattaagagtttggtaagatcatattaaaaaagactagtccctgaatctagtacttataatttgggtttgtttttgagacagggtcttactctgtcacccaggctgggatgcagtggcatgatcacgactcaactgcaagccttgacctcctggcctcgaatgattctcccacctcagcttcctgagtagctgggactacagatgtgggcaactatgcctggttaatttcttgtatttttgtagagacgaggtttcgccacgttgcccaggctggtctcaaactcctgagctcatgagccaccacacctgacctagtgcatataatttgtaatctgt

SEQ ID NO: 62505 - DNA, 2539 bp, Homo sapiens
aattaaattttagcaggctctaagcagaataaattccctgaaaaaagaaaaaggaactctgtggactcagatctgaaaagcacaagagaatctatgataccaaaagcaagagagtccttccttgagaagcgtcctgatggaccacatcagaaagaaaaatttataaaacatattgcactgaagacacctggtgatgtgttgcgcttagaagatatatccaaggaaccgagtgatgaaactgatggctcttctgcaggcttggcaccttcaaattctggcaattctggccaccattctaccaggaatagtgaccaaatccaagtggcaggtaccaaggagactaagatgcagaaaccccacttacctttatctcaggaaaagtctgcaattaaaaaagctagcaaccttcagaaaaataaaaccgctagctccacgacaaaggagaaggagacaaaactacctttactttcccgtgttccaagtgctggttcctctctagtaccattaaatgctaaaaattgtgctcttccagtttctaaaaaagataaagagcgttcctcatctaaagaatgttctgggcattctacagaatccaccaaacacaaggaacacaaagcaaagactaataaggccgattctaatgtatcttcagggaaaatttctgggggacctttgcgctcagaatatggcactcctacaaagtctccccctgctgctttggaagttgtgccatgtatcccaagccctgcagcaccttcagataaagccccttcagaaggagagagttcaggaaattccaatgcaggtagcagtgcactgaaaagaaaactaaggggtgattttgatagtgatgaagaaagtttaggttacaacctagacagtgatgaggaagaggaaacattaaagtcactggaagaaataatggctttgaacttcaatcagactcctgcagctacaggaaagcctcctgctctttccaaggggcttagatctcagtcatcagactatacagtaagtagttctgtgacgtttatctttacttgaagagggaaagatgattaattagtgaaaggggtggattatcggaacttactttaaaatttagtatttattataactcatatttgtactgaaaatggaataattcttgtttggtaaatgagtttccatatctttagttttattactgtaagtcagtggtctccaaactcttttgatcacacacacttaacaatttttgagcatgtaccccaacatatatgtatacctttagattatatatatgtaccactgtaatactgtgtactttctaaagcatatgcaaaaacagaatttaaaaggaagaagaagagaaaaataagtattttcctgtagaagtgacgtagaagttactatagactaagttctactggagtctctatagaagttccatataaatagaagttctattattttcttcctgcaccccaatggatcaccttgcacaccccctgctttggagaccacatctgtaaatgaaggtagagtgtagaaatgttgttgattgtggtgtgcaattttatttataaagtgcttcattctatcttgggaataagctgaattaaattctaagatgtctgtaaaatttggtggggaaggtgttaatattccatggtaacacctaaaaattagtagtttgattctactaaaatagaatttaaaagtaaagacagggtagccacagagtccttgagtgtttgcagtcacatctcaaagttagcagggttttataagtactgcctttcctaataggtagtaaaatcaaattgtctgcagtgcaaaatactagatttaaagcatgatggtgaaaattatcctttaagaaaggtgttatcctggcccagattattgaaatagaaaatagtctttcgtacccttaattacttaaaacatcccagttcttctactaagacatgtggtaaagtatttctaaatgttcttgttttagggacatgttcatcctggaacttacacaaataccttagaacgtctagtgaaggaaatggaagacacacaaaggtttgttagcataaagattaatttgctaaatttaacattttgcttgtttgtgtggcttacttttaatttaccttttttaaaaaatcatgagaaattagcgtgcattttggactctgttgtcaactgtgttagaataagatatgttggccggacgcagtggctcatgcctgtaatcacaacactttgggagacccaggcaagattacttgagcccaggagttcaaggctgcggtgagtcgtgatggcgccacttcactgcagcctgggtggcagagtgagacccagtctcaaatgaaaaaaagaggccaggtgtgatggctcatgcctgtaatccagtactttaggaggccaaagcaggcaaatctcttgagcccaggagtttgagactagcctgggcaacatggtgaaaccccatctctacaaaaaatacaaaaattagccagtcatggtgccacatacctatggtcccagctactcaaca

SEQ ID NO: 62506 - DNA, 1040 bp, Homo sapiens
ttaattataggaagcagtgtaggatagttgtttgacacatctcatgcctttattaattatgattaagatcagtgtataataacagtgattgtcaaaataatagtggtttaaacaagaagtatatttgaaagaagtataaaagcaggaagtccagggctggagtgccagttttaccatataatctttcttctccaccattcttagcacctagcttcgggtgctgttctagctccagcctttagttcaaattcccagaaattccacacagcattcccacacactaagttagttgaatagaaaacttagtcaatatgaccacacttggccacaagggaagccagagagtgatgtttatttcaggcagccagtgtttgcagctacagatcagggttcagttaccaagaagaaaggcaaaaatagatgctgggatgtgcaactagtaatctccaccacagtgcccaaactgatctaatttctctcagtgcatgatatctcagctctagagagatcacatcagttctgctgccaattttttaaagtacttccccagtctgagacttgataggctctttctcaacactaccagcaaatgtagctttgtctgccagttaaatgtggagcctagccaacagattggatcagctttaggccatcaattaaatttattttatgagtaactcatccatattggtatagagtccacctctatggactgaagacagtttgcttgctcatttctctgattatgtcagatgtgttggtggtgatagtagaagtattttgccatgaagttaatagccatgttgattttactttattttttcagatcgggaaaaacagatcagatttttttgacaacacaaggtttccttacgtctgcttatcactatgtccagtgtcctgtccctgtgttaaagtggctgtttcgggtaagaggaatgtttagagggttatagttgcctcctactatatttctaagtcaaaagcttttaaacataattttatttgcacattactgcagaaaaaattaatgtagcaca

SEQ ID NO: 62507 - DNA, 1118 bp, Homo sapiens
agctctgactttagaattaaattccaccttctccacgtatcatatatattagttgggtagaatatttaatctctctgaacctatttgctcatatgtgtaatgagtactacttcataaggttatcattagtattaaatgcacataaaatgcctttatttttattttatcttattgtattttatttttatttttgtggtacaatcatggctcactgcaacctccacctcctggtctcaaccagtcctccactacaggtgtgcgccaccacacctggctaatttttgtattttttgtagagattgggttttgccgtcttgcacaggctggtctcaaactcctaagctcaaggtatccgcccgccttagcctcacaaagtgctaggattacaggcatgaactgctgcgcctggcctacataaaacaactttatatgtgcctagcaaataatgaatgtttgtgttttctttcttcttaatatcctgtcatttctctgcttttgacagatgatgtcagttcatacagactgtattgtgtcagtgcagattttaagtacattgatggaaataacaattagaaatggtaagtatatcaacttattaagatttaccgtgtgtattattggttgctatttacatggtatctttcacattgctaaatgttagtatatttggaaatatacaatacaaaattatttttctaatcaaaagtcgttttttttggttttttttttgagacagaatcttgctgtcgcccgggctgaagtgcagtgacacaatctcagctcactgcaacttccacctccctggttcaagcaattctcgtgcctcagcctcccaagtagctgggcctacaggcacacaccgctatacccagctaattgttttgtattttagtagagacagggtttcaccttgctgcccaggctggtctggaactcctgagctcgggcaatttacccatcttggcctcccacagtgctaggattacaggcatgagccacctcacccgacctcaaaagtctttaataatgaaatggaacttcagttaaacaacgagtatctgaattttcttacttgcattgagaaaaagaatataagatcttgcaagtggaaaccctca

SEQ ID NO: 62508 - DNA, 1672 bp, Homo sapiens
gcttggccaacatggtgaaaccccatctctactaaaaatacaaaaaaaaaattagtcaggcgtggtggcaggtgcctgttatcccagctactggggaggctgaggcgggagaatcacttgaacccgggaggtggaggttgcagtaagccgagatcacaccactgtactccagcctgggcgacagagtgagactccgtctcaaaaaaaagaagataaaaaaaaaaagagttaatgacagtgtgaaacatttttagttgctgaattgaatcagtgatacagaaccattaagaaaatctcaaaaatggaaaatggagaagaaaatgccacttaattcaactattaacattgagtagttcttgccttcttttctctagacatcggatgtttgttttctttatagttcttttttgcatcttttgtcaaaaagagtttataattaaaactctaaaagtaaaatatacctcctaaaatatttttgtctgtgcatttatgttaaacagtttctaggcttgtgtacatctatacatccagaaggttaccaggatcgtgaaataatgttgctgattttaatgttatttaaaatgagtttggaaaaacagctgaaacagattcctttagtagactttcaaagcctcctgataaacctgatgaaaaacatcagagattggaacacaaaggtaatgttacttaaaacttcattattcattttttatatagcattacaatttgactcatagtgcatatggaattaatactgtttctaaactcaagatctttggcggattaaaaatgaactgaggaagggaatgtttgctggagctgtattatttaaattcgtgataattgaattttttctaaaacttcaactctttatccaacaaaaatgtgtttattggggatttcctatggactaagcattaatgtaggtgctagagattgagctgtgaaagagacaaagcctttgccttcatggggcttttgtcctagtcaaagggttagataaacaagtaaatgttgattatattatcatgtcaggtagtagttaagtactacaaatgaaaataaagcaggacatgagtacagcaagaccagatgctatgctatttcatataaggctggcagggaaaggcctttccaaaataaccttggagcagagacctaaatgaaatgatggagtgagtcatacctacaaccagaatttgagttgaacttctgcaaccatatggaggatgaacatgtataatttttgttaggcctttttaaaaattatatttttcagtcttttttggtggaaaaattaaaatatgcaaaagtaaggcaaagagtataataaattcctaagtatcactttgcttcaataattgagacataatcttgcctaatgtaaaaccgaccctatatttcctttccctgctcatcagattattttgaagcaactgttacgcttttttaaaaattgatacacaatggtaatacatattttgggggtgttaggcttttttttttttttttttctgtaagacagcatctcctgtcacccaggcaggagtgcagtggcgcagtcttgtctcagtgcagcctctgccttccggattcaggcgattctcattcctcaacctcccgagtagatgagactatagatacatgccactccgcccagctaatttctgtg

SEQ ID NO: 62509 - DNA, 1653 bp, Homo sapiens
tttggccaggctggtctcaaactcctggcctcaagtgattcacctccctcggcctcccaaagtgctgggattacaggcttgagccaccacacctggccaggtgttaggcttttaaaaatactggaataggatccctaaagtgcaagaaatcccaaatcaggaacatatatggtcttgtacagctctcatacacatttgtatttagatcagtttatctttccaagaaggactgtttaaatatcaatgggagatatgatgtagtacaaaacgtgaaagccaagtgaaattctgctaaatgtatctgttcagtccatttaagatagtataagtaaaactgaatctgtgtattgtgtacattttagcagattctagactccatgctatttctaaaaatgtgctctgttttgtactagtgcttccattatgtcaagaagggttgtagatgatctgttgggtgttttattctactgttctgtttgaaaagaaatcttacatgttcttttttttcaggtgcctgaactctgtctgggcataaatgaactctccagtcatccccacaacctcctgtggttggtacagctggtccctaattggacatcacgtggaaggtattaaaaagtgaaaattaaacattaagaaattttataattttacattaatgaaatgccttgggttgtttatttccattcatcattctttgaatgttagatcagatatgtttatttcatattcagttgcgagaaaaggcattgatagcctgattctgccttattctaattcttaactcaggtcattatgtaatttttttttttttgagacaagagtctcactctgtcacccaagctgaatatttttttatttttaattttagtttatctgttaccttaatacagatgacatattccacaaaaataaatgaattagcttttttttgctttagtaaaaataaatttcatcagtaaaaaaataggttttctgtcagtaaatcatcagggtcaaagataaggccgttaaatgatttattgagcttcagataactcaagttttatgtacagatattttacatgaaaattttactgttctataacagcttatatgttcctgtacagacttctcttgaaacattgcctatatttccaattagaactagagctcctcttggctcattcatttgcttttcaagcagtattaattaaaatacattctaaatacttttaacttctaattctaggcaactgagacagtgcctcagtctagtgattatttcaaagcttttggatgagaaacacgaagatgttcctaatgccagtaatctgcaggtataaataaatacatttttatttttaataaatgggagaggtaatgagaggtgtaaggaaaattgatgaaccctaagtcaaaggtcctggggtcagagctcagctcttaagcttgatactgttcatgtaatctctagcacacttaactaacaagatccaattttttcatctgtgaaatggagataatattgcaccctccaccacttagggtggttgtggacaatcagatgtgaattaatgtataaagaaactactgggaaaatcataatgtgcaattatatgaatatgatttcatttattgaattagttcagcttttccaagttagcaatttta

SEQ ID NO: 62510 - DNA, 2849 bp, Homo sapiens
caccataggatgggcacagtggctcacgcctgtaatcccagcactttaggaggccggggcaggtggatcacgaagtcaggagatcaagaccatcctagccaacacggtgaaaccccgtctctactaaaaaaaatacaaaaaaattacccgggcatggtggcggacacgtgtagtcccagctactcgggaggctgaggcaggagaatgacatgaacccaggaggtggagcttgcagtgagccgagatcacgccaccgcactccagcctgggcaacagagcgagactctgtctcaaaaaaaagccccatagaacctgatctggatgtccctttgttcttgtttgaattgcaatttggtacaaggtatgccaccagatcctaggaattaaaacaaacaaagatttagattagagactctgcccttgaaaacataatctaatggttgaaacaaaattaaccaactcttatgggttagtgtggtaagaacagtaatcgaagcatgcacgagatgctgtgggatggagagactgatgggcacagctggtttctgctttagtagaattgaggtagatttgattccagatatatggggatcatgctggagctaccaggataattagcagatagttctcattcctttcattgatatttactgccttcaaaagagatccggggataggatttctaccatttctcctaacttttgttgttctgttactttttccttttttgcccatgtaaaatagaataattagctgaataattacatgaataattaaccctcaaactcactaactgatattcaagtaacaatctagttgtgatttttaccacaacttcttgtagttcttctcagaattcaatgacttctaaccacagagtcaactttgttgactttcaaataatttaacagagaaagcattccctgtggcctctatgataatatcgtttggtctcctaagcatttatcctaagttacaagtactaaatctttaacttaaaatccctttttttttttttgagagatgtagtattgctctgtcacccaggctggaatgcagtggcacaatctcggctcactgcaacctccaccccgcatattcaagtgattctcgtgcctcagcctcccgagtagctaggactacaggcatgtgccaccatgcccagctaatttttgtatttttagtagaggcggggtttctccacgttggccaggctggtcttgaacctctaacctcaggtgattcacctcccttggcctctgaaagtgttgggattacaggtgtgagccaccgtgcccgaccacttaaaatccctttttaagcaattcagggttttacataaagggaaaatggatattgttaagtgtaaagaaagctataataaaaggacaaaatgaaagagtacacactggaaaaaaatagcctaagaaagaacaactatattatttagctttgttcaatgtctcctctttcttttgataggtatcagtcctacatcgctatcttgtgcagatgaagccttctgatttgttaaagaaaatggtcttgaagaaaaaggctgaacaaccagatggcattattgatgacagtcttcatttagaacttgaaaagcaggtatccagtgctagaaggtctcaaagagtacatagaagcataactgttatcagcttactaaccatagactgatatgtaggcatttctggatttggacactagacacattctagcaaacataattttaaagcgaataatatttttaatttatcactgtcatgaaattcttccataaatttgagagttgaaaatttaggtaaaaggatgattgttggtaatttgctcccaagagtattttttgtagccctttattagggcagtcgtgaggtcatgaatcatggtaaaaagaatgcacttgagttagaaatgagaaagcctagtttagatgcttcgcttttacttactgaccagctgggttaacttgaccgtatcctttatccttcctgggcaattttcctaatgtgtaaattggaatgacatctatgctagctaattcataggtgttaattttattcatttctctaacaggcatattacctgacctacattcttcttcatttagtcggtgaagttagttgttctcattctttttcttctggacaacgggtaggtagtgtttagtgttgttgctgctgtttttaaataggtgttactgatgatggaatgagtgagcatgctttatataggagaaaactatgtaaacttttcttaatataaaagctaattgattttgctataagaattcccatgtataccagaaagaggggcatgataatggtcttgtaactatatcgtattgaaaagaattgttggccaggcgccatggctcacgcctgtaatcccaacactttgggaggccaaggtgcgtggatcacttgaggtcaggagttcaagaccagcctggccaacatggtgaaaccccatctctactaaaaatacaaaaaaattagccaggcgttgtggcaggtgcctgtaatcccagctgttcgggaggctgaggcaggagaatcgcttgaacccgggaggtggaggttgcagtgagccgagattgcgccactgcactccagcctgggcaacaagagtgaaactccatctcagaaaaaagaagaaaagaattgtcagcaaatgttaattctgtttgttggagtggaacttaaccattatactttggcagcagtataatatattcataagataccaacatcaccaaataccaaatgggctggtgttgtgctggacccatattgactccagtagaaatggcagtcaggtggcagcaggctacacaggagaac

SEQ ID NO: 62511 - DNA, 1662 bp, Homo sapiens
cctagctaatcaggaggctgagactggaggagcacttgagctggggagttcaagggtgcagtgagctataattgtgccactgcactccagcctggcaccagagccagaccccatttctttaaaaaatttttttctttttttttttttaaaaggctagccgttgtctgaatattttgttagcgagtatgttaaaggaaggactctttaaatttctgagtactatattacccagttagagctctggggttaattttcattaatgcgagttaatgcatagcaaaacaacttttgttacagtgtgtattttttaaactagtaatcttattgtcatggaagcagctttcactgatacaactactgttacgttgaatagttaatatcagtcattgctaacaggaataatagatttttaaatgatttagttgttctagctgcataatttctttgttaatttgtaatgcttcagaattgttttcatcccttgcatttgttttgcacagaaacactttgtgctactctgtggggctttggaaaagcatgttaaatgtgatattagggaagatgcaagacttttttacagaactaaggtaagtgtgttctttctttttttctttttttttttcttaatcttggttacgttaatatttaaggatagaagcatacaggcctatattcagaaaaagaacatataaggctaggcatggtggctcatgcctgtaatcccaatactttgggaggctgagacaggaggattgcttgaagccaggagttcaagaccagcctgggcaacatagcaagactccatctctacaaaaatttttgaaaaatagccaggcatggtgtcatgcacctgtagttctggctacttgggaggctgaggcaggaggatcactggagcctaggagtttgaggttgcagtgagctatgaacacacatggcactccagcctgggagatagagtaggactctgtctcgaaaacaaaaagaaacatgtaagattagaaataggactttctcttttaataacagaaatcagctcctgctaaattagtgtagctaaattaaaagtgaaaggaaaaaaaatctcaaagcaaatacacttttcactttactttctgttctgaaactcctgacacccaaggagaaaaatacttctagtactaatgatacatatttttccccattacacaaattaaaaccttcatgcttaagttaccatcaaggattgaagcattatttaaataaatacgtaagttatgaaacagtggctttgaaattttatgatggttgaaaacttgttttattcatagagtacaaatagattagctgttattctttgaatgtttcattgaagaatatgttaaaggaaggagtcttcaatttttttttttttttttttttttttttttttttttttgagatggagtttcactcttgttgcctaggctggagtgcagtggcacaaattcgactcactgcaacccccgccttccaggttcaagcgattctcctgcctcaccctcccaagtaactgggattacaggcgcccgctaccatgcccggcaaatttttttttttttttgtatttttagtagagacggggtttcactgtgttgtccaggctagtctcgaactcctgacctcgtgatctgcctgcctcgg

SEQ ID NO: 62512 - DNA, 1036 bp, Homo sapiens
tatttatgttttgttgtttttgtatttgtttctaaccttaatagattttcttttaatgctggtcatgtactgatgtggtattaaaacagaaaataatttaatagcaaaactatactaatcagcttaacattatttaatctgcttaactaagcccctccatgtgtgcagtggtgagaaaaacatcctgcacttattttttactgttttttgttgtttgactactgaatgtgaaatttgaatctgattaccataaattttcagagaagtcaatataaagattttattacttgtcttatcaaagcccattgtctgatgattagtagttttataaggattaattcataatatgattaaattttgctttaccctcttttttctccttcccttttttaggggcagcttcatgacttctgggtaccagattcttaataggagttgcagcagcaaaaatatgaaccaagagaaattcaataagagcctttcatagaggagtagaaaggattattacagaatccaatgaatgccaagaaaatgtacagcaaatgtgccacttgaatatctagtatgaagctggtaatgaagaaattgccatttctgaagcagatatgaaatatgatctgcttaattgttaaggcaactgacctttcaaaagtgcagagtcttattaaaagaggggaggggtagaagcagaataatagtcatatgtctaacctgccccagttaactcctcttgttaaattataagccagttatcttttttagatagtatttttgtcacttggataatcacaggaaatatataagaaaagagcttggactaacttgagaagttggacatggaaagcaagaccaagttccagttgggtttaattttccctcttggttattttcggacacaaagggaatgcttaaaactgagtttagtaataaaaagcataaatctcttctgtaacttttataaaccacagggaggtttcaatccatgcattttccttcattactcaagattataaatctgtttttaaaatacatctaa

SEQ ID NO: 62513 - DNA, 1918 bp, Homo sapiens
ggggtagtaacaaactcttactagccaactagaaaattattttgttgacgagatgtcccttttaggagggtttgtttcctgaaagaatgccaactttttttgttgttctttcagtattggcttgagtgacctgttctcctgagtgctctagtgtctccagttgtgggggggaaagatgatggaggggaacagaaactggacttgatgtttgcggtttgagaggcaagaaaataaaataactttctacctctaaattgaggcttaggagtaaaaagcattttgtcctaaatttatcatttaaaatagcatcagtaacttttgagctcatgtcaatcaagcattggcagtcagagattttatagggaagactaagtaaatccagtttccaagaacctaaactgattgaggctccaagagtcagaccaacaaaagttttattctgtgttgtttactggtaagaatattattatcttgatactacctctcaagggtattgttacaaaatgccacttatggttaaagagatagatacaaagagttctatttgacagaagcttgaaactctggcatctatctgcccaacgatgggggctttcgttctgtaatttaatcctttgtagatacattatttgtgtgtaattttatacgtgttcatatttttctcattttgcattgtgtaaagtgtacaaaatctcaaagtataaaatactgcttatattgcttgtaatttacagtgtgtaaatattttctaattgtgtacattgatgggggggacaagtgggttattcaggtttttttttaatgacccttttgtattgcagtttcaacagataactgtccatcaaatttaaaaccactttgatacatttttatttaacagttccaataagaaaaaaatctctatttttaattatatttctcctttagaaaaaaaatacttcatggtccctctaaaataaatggccagacctcagtttaggcccttgtatttatgactctggtagaggtcttcagactccaggtcatagtccagtcagtatttgcatttgggttctcatgaaaactttgtgactctcttttagcacaagtagcccatggtttttcttccaaatcaagtattttacttctcccttgagtccccatgctttgtctccctcctgctgctattgcccggtgaatgggatggtagagagggagaaatgttcattgcacagagaatgtcaggccactttggggacttggcaaacgaagcttgcactgagtggtggtgtgtttggcaatattactgtgccaaaaatcaccttgtctaattttatggatatgtatggcaaacttattacccttcttgcaagctgcacattaaggtacttgtaagtgtttatgcttttgtgtgtaactgtttgccttttctaactgcttttcttgttactgaaaatataattctactagttttatcacattaagaggctctccatgcacaaaatgcattgatgtagccgtaaagtaacagcatttgtacattttctatctcctgatggcagtggtgcctttgtcaccttttggaaggtttgcattttgtttctgctttcaagcgcaaatagtagcttgctttcagcttcacaaaaatctcctcaaatgtaaaagatacaaaatggcgtgttatcatccaggcttagttggagtatttgcatttttatttttatcaaaacaaatataattggtggggactggccagtaataatgtgtggcgtctttaagccaagagtaatttttaaattaaaaatgaaaattttaagaggtagcccattaaacaagctactgagttggagaattaggggatgactgtggtggtttgtcgctaaggaggcaacagtagggtccaggcggcggggcacgtagagcagttagcatgatccat

SEQ ID NO: 62514 - DNA, 1029 bp, Homo sapiens
ggagggaggaggccaggatgaggcagaggccaccaagcgcggcaatggctagcacatagagcagtctcacatcaggtgccagctgtgccccaggtgtggcaggggcttttggagctggggcaggagtggctggccggactgtgagactataggaggccagcagggtgcggaggccattttcctcggcatagcagccatagttgccactgtgctcaggctgtgcatctgtaaccagcagcccgtccacgcccacacggtagccaccctgcccatcgctcaggcccatgctcccattgagtagccacaaggcccgggccaggttggatggctggtcacagggcaggaggacatcatcaccccggagcacagagcgggtcttcagtggtggtggtggccctgtggggtttgggggagaggtcagtaccagcccgtcccaggaagggattagagatggcaagccagactgttcactgccaagtccctggcaccaagcacagaacccagaatcacagtgacagctgacccaggctctgtgctcatgcttccacagaaggttcacgttggcccttcccaggaagcaggcagtgccttgggcccttttccattctctctccatgctctcatcctctcctgtggtttcaatttctgccatctgccagtaactcctaatctctacctcagacttctctcctgagtgccagactcggatatctaccatgtgctgggcatctccacatgaggtctcttggacacctcaaaaccaaagcttttctccccaacgacaccaagtcctttccttgaatcgccaccactgtgaatggcaccaccagccacacagttgcttaagtcagaaacctgggagtctcccttctctttcttgctcgcctttttgttttgttttgtttttttgagacggagtctcattctgtcgcctaggctggagtgcagtgacgtgatctcagctcactgcaacctccacctccctggttcacgcgattatcttgcctctggctcctgagtagctgggat

SEQ ID NO: 62515 - DNA, 1028 bp, Homo sapiens
catccgcaagcccttccacaccgacaaccctagcatccagggccagtggcaccccttcaccaacaagccgaccacgttccgcgggctacgcccccgagaggttcaggatcctgccccagcccaggtgcaagcacagtgaagagttgccccaccaactgcagccccaggctttggactgttactccggtaaaggtggttcttcccctttgggattccaagcccaggcaaatggaacccatcaatgggcaagttgacagaggttctgcttgggataatgaagagctgcctgtttctttccagtgcctgcttctgggggcagtgaccttgtgaaccactcatttttatgcaagtggcatccctaaaacctgagatgaggaagacttcaagggttttacagggcccttgttttttaaatccaaattgataataatgatctcaaaacacagtgagaggtctgaaggctggcttctgaagaatccctgatgtcttattggaacaaccactgagctacggagagctctgctgtgatgggctaggcactttatatctgtgtgaatacagatttataaaacaggttaataaacttatccaaggtcacatttcaggtctgtcttcaaaatgtgtgcatatgttaagcacaagcctcagttttcattattttaaaactagacgcagaacatataacaactgtcaggtggttagtatcaaaggccaagtgattaatctaggcctgacccctgaaagggagaggggagtgattctcagaccaagtcctggctgacaagctttctctggtcttagctatacatctccttccccccacgtccctctttgtgcagaaataaaatccatgtcccttgagccagctggtggggggtgctgagaaccttggggaagggcaggaaggctgatattaatgagtattttctaatcttagtttaaaaaggggggatggtggggaaatgagaggcaggaaatgaaaatctagaaacccctgtaagaattcttgaactgttgtcattttcttg

SEQ ID NO: 62516 - DNA, 1051 bp, Homo sapiens
ccgttgtggagaacgctggccaagaagcggctcggagtcccgcgcgccgtcatagctacagcttggaggccgcggagcctaagcagcgaggagaggggggcgggactaaacctcgaggcttccggttccgggacgaccgctcccggagttttgcttccgaggtcaaggcgagtagcatgtgcgggagactcacgttgccggcgaagtgggagagagaaaagtggtaacctggggctgggggccggcgcggcggagctcggagtagtagagcggagtgaagacacgggggaggatagagactggcattcctttgggccgggggattggcgggagtcgtgctgggtgctctcgccgtgttgaggtcccagtgaggggaaggagaagcggaagagggtctctagtcggggcctagggcaaagggactacaaaaaggatgcagatgactatagaaatgaggacgacgaggagatgctgtggaggagcagtagaggtgagaagatgatgcaaagaaactgtgtcagtgaggaactgtatagagggtcatagaggtgaggtggcggagagaaactaactaacggaccatagaggtgggggagccattgtagaaggacgtggacgcgaaagggtcgtgtagatgggcatatgtgtgaagcagcaacgtagaggggctgaagaggagaaattcatggagagaaagaatgcacctagagtgagctctgcagagtgctgcgtgggatatccctagagtttggtctagtgaaggcacgctaaccaggcacctaaggcatttcaagtagtgacttcccacatttggctaggaatgtgggtcctcctccgaagtgggtaccccctccgtatcttgttacccctgcgtggggagtggatgggtcggaggggcctgccccgaaacttggccccaggccctcctcgcagacgttacaggaaggagactctccaagccttggatatgccagtgttgcctgtaactgcaactgaaatccgccagtatttgcgggggcatgggatccccttccaggatggtcacagttgc

SEQ ID NO: 62517 - DNA, 1718 bp, Homo sapiens
ggtgttaccacttccttcagcctcttcattgacaagaccacaggccactttctctgcatgaccagcctagcagaagggagctgggaagacttccaggccagcgtggaggggcgaggggatggggccagggaggggtttctgcttagcaaggcaccagaatttgaggacagcgaggaggtccggaggatctggaaccgagcaatacctctctgggagctgcctgatcaggaggaggttcagctggctgatacaatgtttggccttaccaaggttacagatgacacactcaagcgtttcagtgtgcgatatctgcgacctgctcgcagtcttgtcttcccttggttctcccctgggggctcaggattacgaggcctgaagctcctagaggctaaatgccagggggatggagtgagctacgaggaaaccactattccccgacccagcgcctaccacaatctgtttggattaccactgattagtcgtcgagatgctgaggtggtactgacgagtcgtgagcttgacagcctggccttgaaccagtccacggggctgcctacccttactctaccccgaggaacgacctgcttaccccctgccttactcccttacctggaacagttccggcggattgtattctggttgggggatgaccttcggtcctgggaagccgccaagttgtttgcacgaaaactgaaccccaaacgatgcttcttggtgcgaccaggagaccagcaaccccgtcccctggaggccctgaacggaggcttcaatctttctcgtattcttcgtaccgccctgcctgcctggcacaagtccatcgtatctttccggcagcttcgggaggaggtgctaggagaactgtcaaatgtggagcaagcagctggcctccgctggagccgctttccagacctcaatcgtatcttgaagggacatcgaaagggcgagctgacggtcttcacaggtaaccctttgagaaatcactacttagagtaaaggggcagaagatcaggtgacaaaagcaagtgggtttgggccatgacaatgttgaaaagaaggttggccctttccccccagttttaaagccctgacctatgtcttggtttcaagggtaggacttcctcctcacccaggtctgttccaccccactgcagggccaacaggcagtggaaagacgacattcatcagtgagtatgccctggatttgtgttcccagggggtgaacacactgtggggtagcttcgagatcagcaatgtgagactagcccgggtcatgctgacacagtttgccgaggggcggctggaagatcaactggacaaatatgatcactgggctgaccgctttgaggacctgcccctctatttcatgactttccatggacagcaaagcatcaggtgagactcccagattccagccaccttgctttcccagacatatcccagcactcaggaacctttggttccttttccagctccagtaggaactcccccatctccttaggtttggagtttttcaaagaatgagagggcagggctggacacactggctcacgcctgtaatcccagcactttgggaggctgaggtgggaggatcacttgagcccagggatttgagaccaacctgggcaatatagggagaccacccctctctataaaaaaatttttaaaaattaggctgggcatggtgatggcatatgcctgtggtcccagctactcaagaa

SEQ ID NO: 62518 - DNA, 1035 bp, Homo sapiens
acatgcagtctacgtctatgacatttgtcatgtgatcatcgacaacctgcagttcatgatgggtcacgagcagctgtccacagacaggtgacggtgacatcctctcttgtctagcttgagcccgcttggacatacaacacacacttctcaggcagctggcctctaggcacacatgctgtgctctcctattttctgagatgtgtgcaggcacgtaccacccccatgtgtatcatatggaggtgtggggtatggcagcaggatgtatggacagggatctgagtgtgagtccttgggtagagggaggtagagtgggttgtggtagtttgtggggagatgtgaatggatcaagagtatgtgtatgttcttgtccttctgtgtctgataagctctttgtgttgttgggatggcgtaggatcgcagctcaagactacatcatcggggtctttcggaagtttgcaacagacaataactgccatgtgacactggtcattcacccccggaaagaggatgatgacaaggaactgcagacagcgtccatttttggctcagccaaagtgagtggcctttagcggagctcaagctttggaaaatagagtgggtaggtgtgaccagggacagccctcattcagccttaatcgtcttgactgtccatccgaacaggcaggaggcaatgcctctggggccatgacatgaggaatatatgtgctggaaatacaaaggctgatagttggttcttatgctcttcttgtcccccaggagctcacatcctctcctggggaaacagtaagacagtgattgcaattcagtatgataagagtatgataggcagcacaagtatttggagagcaaagagaaaagatgtctgagtcagcccgggacatctgggagacttccagaggaggtgacaacaaaggttgggttgaggtttggtagacaatgggtattagacaatcagataaatgtgagggccttctgggcatcaggaccagcccaatcctggagcttctagtgttacactgaatgcctattacatac

SEQ ID NO: 62519 - DNA, 1929 bp, Homo sapiens
cgcacttgggacacgcgaacacacatgcactcggaaaggacgcgcccagttggccacccttgcactcccagggacagcgccagccggcccgcgcggacccacagcgggcagggcactctgcggtcgcgtattgggtgcgggaaaggggcagccctgtgactaccgacgggggcgggccgggtgggacgcacccggaggttcctgcttcctggcctcccgcaggtgaagaccaagacgtaaacagacgccgagcacgtgacagctccgcagaccagtggcctgtgcccccaacccaaccacggggcggaaatccaccctagtccggggcgcgtttgcttggtcccaggccggacggcgttccattctccgcctggagcggggataagccctctcccgggaaccggagcacagcgccccctggagccggggcggagcaggagggcccggctgctgggcagggctggggttaactcgggctcctggacgtccttctccccagcacattcttggtgtctgcatccctgaaggtttcggagacaggcccttgatggcagtggacagctgcccccgcctgttaccgccagcccagagagcagctgcctgagcgcctgcgggtccccttcctaccctcacctccactccttgcgggagtcggagtctcctccccccagaaaatgcatgagtgtaaacgctccctcaataccagagtgggcctgcccccctagaaaaaggaggacgagcccctccccccagggaatgagggagtgggcagtagcccgatgcctcctcctcgccccaccccctacccctacacacacgctgagcccagctgccgcctgagctgggcaggctgccagaaagaggaggaggctctcggtgccccaggaggcagggatcagggcaaggccagaggagggggctctgctggggagaggggctcagtctgttcttgtgaggctgagggtctggggtgagtcagggtggctgggctgtgtttccctttccagggaaaaagaaagaaaaacaaccctgtccatggagctaaaaatagagctgagagccggccagggctgtggcctggaagggggggatgctccttcctggggcccgggcgagctccggcaggccttggccctgcgggggagggggtggttaggggagaaaggctgcctttgcccagggatgcaggcatcagctgacctgaccgggtcaccgagacccctaggggaaaggctgtgcggtagaatatttgtgaagcacggcgtgtaagaagttgtctgtgtgagtgactgtgaatagaggctgtcaatgcgtgaaagatggttaggagactaagtgcacttgagactgtgactgggtgcgaaggactgcggattgttgtggaagcctgtgcccaacaggcctgtgacaccgtgtctgtgtgtgaggtggactggaagattatggaaagaaggaacgcggacccacgtgacggctgagactgcggctgcatgtgggaaaggtcttgtgggtgttagggagactgtattgtgtgcgagaaggtgagactacttgaccctgaggaagtggaatattgtctgccgtgaggctggtgtaggtttgggctgtaggcttgcaccggttcgccccagtgattgttggggagccaggggccgctcctctccgataaatgacctctctcttagcaagtgatcccgaggggaggctggggagcacgcggtcgcgccagaggccggcctgggttcgcggggaaaagggcaccgtgccggggagtggggcagggcccgcgtgttgggggcggctgggtgtgttctccgagccggccgccaggtggcgtcgcctccgcgaagcccaggttgccgcctccaacccgccgtggggcaggcgcggatcgagcctcggcctcctactcgggctagggcgcggggt

SEQ ID NO: 62520 - DNA, 2049 bp, Homo sapiens
actcgcaccgggcgggggctggccagggccgggggcgccgcggaggcggaggcggggctgggccgggcagctccgagtggcggcgcgcgggccagggccggggccggggccggggccggagccggagccggggccgggcggcgcgcctgtggagcgctgggggcggcctggggctgagcatggagcagcgcggcggaggtgaggggggccgggtctgggaggcggcctggggagcccccaacttatgcgcggtggaatccagccggggggacggcgttccccagtcgcccccactttctggaaggggggctggactctggagaatgggtcaggggctcctggcttcccgccgcagaatgggaactcgtgatcgcagacttgaccccgcttgactggtccttggagtttgggtgggagggagactttccccaactcttcagatccgtctccggccctgaaccagctccagccctctgctctcctcagcccactaaaaggggggtgctcctgggccagagtgattgctcagggagtgctggggagaatgaggggttcccatctcccacagccacaaacgcatttctcaaaatggagcctccacttgcccctccttctctttcgggctccaagagcgggagccggcctggctgggcctggctttccagactcctggctctggctccctggatgtgtggctctcagggcccggctctgtggcactttggacttatgggccctcggctccgtggggttggggggccctggctcactgggtcccgctggctgtccccttgtcggcctgaccctcgggcctctccgagtctttgtctcttttgggtccctgtctttctctgagcctgtctccttccttcaattttcactttctccgtgctcgctgaagtggggaaatgcaacagaggtgccagcccccttggccccctaagaagtcccttccccactgttcactccacaccctggagtgggcccagagaggggaggggagggggttctctatctgctctgctgggggctggggtgtgtggggtggtctgagccccagccctacagaggggcctgtggtcactccctgctcctggcctacccctcccccagctccccgcagctcctgccccagcgtggacacctcttcctggttcgcagtgtcttttgacttgggtgggaaggagggcggtggatttaatggagggcatgcgagaaagaaggggaacagatcaggcaaaggagttagataatgtcccacctctccccacacgccgaagagagaaggaaacaggctccccccaccaatgggccctcaagccacccaggctcccaccactctcatacctgcgtgcccacgttcacaggctccactgcaccactcaccttcctagtcacacacaaacacaggagctcacacataaactcatgaacttactgacaagtctgtccaggcaccgtctctcccacacaccacaaattcacttgttagatccacatttataactttcacaggctttctaatgacccctgatccacatactcttctaagatatacacatgtgaattcacacatgaactcatatgtatgtgaatgaactgatatatcaaacatgcatagactcacatgatgttttcacacacattttcatacacacgtgttcattttcatgctcctgtgcatgtagtcacacaacaaataactaaatgcacacactcctactcccagtgcaattctctgtccacttcttggccccgctctgcatgatgacttcagcagatgcctaagtcctggtcatcagcggcctcgggactgggactagggagggggttccgggtggaggcttgcagctgcttccaggaaggagcagagcctggggaggtggagccctcttgcctgggctctgtggaagtgaggttttggagcagcctccagaggtgaaggcagggcatctaccttcctcccctcagggttagtttggggaccttctgaagctgtagggtttcagagaggttggcagtggggcagagcctgtggaggctccttca

SEQ ID NO: 62521 - DNA, 1033 bp, Homo sapiens
agtgatgttgaggatgcccgagagcagcgggcacacaatgcccacctccgcggcccaccaccaaagctcatccctgtctctggaaagctggagaaggtgaggaccggctcttccttgtgggcctgggtagaacgggagtcctcgcttgggaaactggaatttagaagcttatatagaggaaagagtgtgggctccagattcaccagacctgggtcctaatcccagctctctctcattctggatgtgtgacctcagggaagtcacttaacctgagcctcagtttctagaactgacatgaaggtcaaataatgtatagcatagtgcctagcacgtagcatgtacgcagtaagtgctagttgcttacgttctggttattctgcaccagttatacgtttgactttgggcaaggcctttaaccttgctgagcctccatttcctcatctgtaatatggggatagtgatcatatttagataatggagataaacttttcaaattgcttgacacaaagctgacactggtggccacctccaccagtggccgcaattgttatgaatatatgggcactggggacccaagacgggagggcagggagtgtcataagggctctgcaagattgggcagctcatctccagtgtcacatggcacctcatttcagaacatggagaagatcctgatccgcccaacagccttcaagccagtgctgcccaaacctcgaggggctccgtccctgcctagcttcatgggtcctcgggccaccgggctgtctgggagccagggcagcctgacgcagctgtttgggggccctgcctcctcctcctcctcttcctcctcctcttcagctgctgacaaacccctggcatttagtggctgggccagtggctgcccatcagggacgctatccgactctggccgaaactcactgtccagcctgcccacctacagcaccggaggtgccgagccaaccaccagctccccaggcgggcacctgccttcccatggctctgggcgaggggcactgcctgggccagcccg

SEQ ID NO: 62522 - DNA, 1090 bp, Homo sapiens
agggtgacatgaggagggagggatgtgactctctcaccccaccctaggctggcttcgagcttgtggcagtggacggagagaatctagagcaggtgacccaccagcgtgcagtagacaccatccgtcgggcttatcgaaacaaggcccgggagcccatggagcttgtggtcagggtccccgggcccagcccacggccctcaccctctgactcatcagcccttactgatgggggccttcctgctgaccacttgcctgcccaccaaccccttgatgctgctccagttcctgcccactggctcccagaacctcccaccaatccccagactcctcccactgatgccaggctcctccagccaactcccagcccagccccctccccagccctccagactcctgattctaagcccgcaccctccccacgcatcccatgaccctccccctaacctcagattcacccactgactccagcatcccgttatccccaggacctctcctaccaacttcttcaggactctccagctcctgcccaccctgcctcctcccagtgccacactggtggctcacatctttccactttcttccctcctcagctgtcattaaggctctgccttagtgtccaaggacaaggtgctagtgggcagcctgtgtcacctgcactcactgctccccaacctcccaagccaggatagggggtgagaaagccaaggtctggagcttgggattggtgggcactttctcacatgctgtcccttatgagtcgcccaagcctccagggacacagactctcagacagggccctgaaggggtcaatgcatccattcctcaaccccaagcagcattctgtgcaaggaaacggatgaaaggcttttctagtccctgaaatcctgagagatcatttcacgttggggtccactaagacctcagacattctactggatttgtccttcctccatcaccttttctccccaagagagctctatgagggggaggagaatagccagcaaatggtgggggggggggggtcaaacaagttcctgtactctttatccagcacattcacattatttttaaacaaaaaaattttttttaa

SEQ ID NO: 62523 - DNA, 1001 bp, Homo sapiens
tgttctggggtctcaaggtgattgtaccatgggagagacaatcccttccaattacggctgcctggcccctctccgtcagtgcatctctcttcccacagttcccaagtccctgccctctgctggttctcctcccacctctctggccactcctctatctccttccaaggctcctctttttccctctgtcccctgaaggtaggtacttctccaagctctgtccctgaggttcttccctccatacatttgcttccaagtgaatttgcataagcagtgctcagactgcaccctgttttgatccaaaaccgtcctgactccccattgcctatgaaggaagtccatagcctgagcattgccttcaagcccctcagggccaggcctcttgcctccctatcccacctacttccagtctgaattctccattccagcttgtcctgagccctcctgaaccccattttcagactgggggccaaggcctgcagctgagcctctttcttcttcatagcagggggcgtgggcccggtacagaagtttgtcacctggagactgagacgtggtaattcatgcatccctttaccaaggcctagtttacagtagagcggcagatgagggtgcatactgggggccagctgagtggctctggactaaattcagtcagggtcaagcatgggggatcaggcagctagaatggtatgtattgggggcagctaaaagaattggactaagctgactaggaaagatagggtggcagacagatattgggatgcattttaggagcttgtgttgggactcccaaagatatatttgggggtgatgagggagcctgtgctgggcctccactgggcaacagactactatgacagtgcatgttcagggggccctgggggcactgggctaagaccccattaagaaacagactggtataggggtccatgttggggctgagggctggggtttgtgctgcattggtgggcaggttgctgtgggctaccatggtggggagc

SEQ ID NO: 62524 - DNA, 1018 bp, Homo sapiens
gcctggtagtggagaagtgcggttcaacaccctccgacaccagctcagaagatggtgtccggcgcatcgtccacctatacacaacctccgacgacttctgcctgggcttcaacatccgtgggggcaaggagtttggcctgggcatctatgtgtccaagtgagggctgaggcaggaagtgtcttcgggtagaactgagaatggggtctggagtggggcctaggctgggatgtggggatggtcagcaagtgaggcctggccaaccacctgtctcagtgagggcctgggagggggcgggaggccccagtaggagggtcaaggaccttgactggtgcagtcttgtgtccaagagaagggggtctggagtggggtaacggagggcaggccaggggcctatcagactgacgcctgtctggcctcagagtggaccatggtgggctggccgaggagaatggcatcaaggtgggggaccaggtcctggcagccaacggtgtcaggtttgacgacatcagccacagccaggccgtggaggtgctgaagggccaaacgcacatcatgctgaccatcaaggtgggcagaacagtgggggtagggagaggtgaggctagagtaggggcttcccagaccaccctagttcttaataatgctctgcaatttatgacgttcccacagccactagaaggtagacaggcattgttctcatccctgttttgaagaagaagaaacaggtttagagaggcacagcaactcacgaacaggtcacttactcagctggtcagtggctgggcttggttccagtcctgctccccacagtgctagagtggtgcccccttcttatgaagggtggaggcctagggttgaaaggaacaaatgtcttgcccagaagggaggggtggtggctgcggtttggacaggacctgggtgatgggcatccccagggcatacagctaggagggctgggctggggccagaggttggatttcacgggaggtggctggattcattattcatgtgggtctc

SEQ ID NO: 62525 - DNA, 1686 bp, Homo sapiens
cttcagacttgctttacttctaacttccaaatcttgagcaaatttccttaggccaactccaacccagaaccatgcagggaagggtattctgggaaaagtagtctcaacttaaccaaggcgacacaatacaaaaccaccacgaggacccagaccctgtagttcaccacttgacatcccctcctcctgctaattcctccactttgtgcctacataagggaggagtcagccttgggaagtggtatttcaggagcagcagaacctggagacccaacaggttcatccaaaggcacatcctcttctgcttaagtaaactgggagggaagggataggagaggaggttgagggtgtggcagaattagacccagatagtaactctctccccagatacctatcaccagccaagagaatgacacatccagagtaatatgagctcagaaagaaaaataatacatccaaataatgtaatccttttaaaagaggaccccgaaaatgaagaacctatatgagaggaagcggaattaatggaccagtgagaacaagaatttaaaataatccttataggctgagcacggtggctcacgcctgtaatcccagcactttgggctaccaaggcgggcagattgcctgagctaaggagtttgagacctgcctgggcaacatggtgaaaacctgtcactacaaaaaaattttaaaaaaattagccgggtgtggtggcacacccctgtagtcctagccacctggggctgaggtgggaggatcacttgagcctgggaagttgaggctgcagtaagctgagattgcaccactgcaatccagcctgagtgacagaccaagcccccatctctgaaaaataaataagtaaataaaataaaataatcaaaataaaattcttctaggaaataatggagaatgttacacattttaaaaaaattattatctaattttttttatacagaaagggtttctctctgtcatacaggcaggaatgcagtggcacagtcatagctcactgaagcctcaaactcctgggcttaaaggatcctcttgcatcagcctcaagtacctgggactacaggcaggtgccaccatgcctggctaaagtatattgtaaatttgaaataggatgagactgtataaaaaagttaacaagtgtaaaaaatataatagctgaaagaaggaaggcaatatacaagttgaatagtgaaatagattcagactaagaatgaattcataaactagaagataaggatggcgaactctcccagaaattatcaggaagagataagaagatgaaagatataaggctaaagttattaaatatggaagatatatagttaaaatgggagttccagaagagaagagggatgagaaacctggaaggaaatgctttaaaaaataatgaaaaaaagaattccgaagaatcctaaaatttcccagaattagagaaaagtgtaagatttcagacagaatatcaacaagatagatttggaaaaatacttaacacattaaagaaaaatttaagagagacaaaaattccaaaagcttctcaagaattaagacatacaagcaagaaaacaaacataaaaagaaatccccatatgccattcattaggaacaagtatcatactgatattagttttttcaatagcaatgcctgatacaagaaaaagaactttagaactagaa

SEQ ID NO: 62526 - DNA, 1093 bp, Homo sapiens
ctcagctcagctcaggtttccctaggagcacgttgacagagtccccacatcacaccaagttttggcaagtccagccccactctgacagactttctgtcacacttccttacagctacttaaactgcactttagcatgtaatggaataccttccatttaggaaggtggagggggtctcccccaggcaggattaaacatgatgacagttcctaaaaggaggggctgggatttaggctaaaaaggtaaggcagtcagaccggagggagacgatcaggagcttcagggccagcctctgccagccttgggggtggggctgctcaggcaagagaggaggaacacagggcttctctgctgggaggaccccggcctccatccctgctctgcagaagggaaaccccacctgaggtcaaggaaggcgaggtgggaggtagctggaccagaaaagaagggagcatccgggctaggaaggcactggcctgggatcctaagcccagaggcggtcaggctggggaaggagagggaaggggaaaggcaggaggtgcctggacagataaccattgggccataggctggataaaggcgtttgtatagtctgaggtgcatctatgtgggttgcaaaattccctgttataaggaggaatcatgggctgcaaggagcaaaaacttagacttgcttaacaaaaagcggggtgcttcctggaaggaaacagggtcttgtcacagtctcgaagttgcagagttagaagtggaccttctaagggcctagatctaggagcttgacagtgataaactggagttgctctcctcaactctctttcaagctttcccagttgcctgccattctcctgtctaccctacccccatactcctgactggcttcatttgcctctgtctgcattgtgcagtagatagttgtcattttgaagtgactcagcatctataccccttcctaacagcacccaatttccgatggaagactattgttaactgtacctgggattctgtttttattcaggtatagtgaggctaacagatcaggagatgattgctgttgaaaagataatttgtgcggggcacagtgactcatgcctgtaa

SEQ ID NO: 62527 - DNA, 1590 bp, Homo sapiens
taggcaggtcctaggacccgtgattcttgccacagtttttcttagtatttgggctacaagtgaggcattggccgccatcttgatatcaaatgccaggcaagccgctactggcgtcgctcggtaaccacggagacacccgtgcccctcccgtttctcatccttagaggctgtaaactacaattcccatcagccgatttcctctgcgtaatggcaacttatctaaatctggcttgtgggcaaccgcaacgctgccgcagtgaactgtgggagttgcggttcacggcgtagcctcagtttttttcctgggggaagttccagaactacaaatcccgtgagccagtgggctttcgcctgcgcacggagaagccgattctccttggcccctcagcctgcgcctgagaggtaagagagggcggggggaaggaagaggaggcgggatccgggcgctgcgttggctgcggcctggcaccaaaggggcggccccggcggagagcggacccagtggcctcggcgattatggacccggccgaggcggtgctgcaagagaaggcactcaagtttatggtgaggagacggtggaggccggggaacggtggaggcgctggcgttggcggcgtcgctggcctgggccgcccgcccactgcgggaccgggcagcgggaccctgggccgaggctggcggcggagcggctggagggatgggatgggagctccagaaaggaggctgggggttgcggagcggacccaggggtgggggcagcggctccgccatcttgtggatgagaggccaagtgacagcgggagcttaatcgaggagggggctccaggcggcgcgcggggccctggagggaaaggggcgtggggactgttactgaaaagcggaggaagctctctggagaaacgccgtgaggccgctggcggggccttcctggtgtcagggttaccggtaaggcccgggagaggaggtgcattcacgactggggaagggagcgcgggatagagtgaagacagatacggtgggtagaggggaacgggcagggctggatgcagatggatttaagggtggaggagggaacgctagggctggtgagaggcttatagttttgtagaatgaggagggaggatagcctttgccttgagggtggaatcccagcttggccaaactactgttgacaaactctggaagggaagaggcctcactaaagaagataaggactgggaatgaggacctagggctataatgacagtccctgggaggggaaaagggtgttgactgtaagctagaattacaaatgtcagggaggggtacataacgctactttgaaaggagaagctaaatactgtaataaggacaaggtgatgaaaagtaagagcagattgtcagggaaacatgggtacaggagattggggcaaaatgagtatctaatagggtaagcaaaacaaaatttaaaggtaaattgtgggacggtaaaatgtggaggccaggtgctttgtatcattttctgggaaaggaaaggccgtggagatgagagttgcaaagacccataagaagtgatgagatcagttgagaaatttaggagataaaaagggt

SEQ ID NO: 62528 - DNA, 1202 bp, Homo sapiens
ctcccattgttgggattacaggcgtgagccaccttgccaagccacgtttatttttaaaaacaggataaatatattcttgtccagccaatcccagaatcaagtacagtagcttgaaatagatgaaataattttagaatgtattgttttatttatagagctgatagataaatgaaacagtataaagggtaaatatttgctgtttaacagacaacctcaaaacttagcttaaaaaaaacaattatttttcccctcaaatctgatggtttttctgcttcacttggtattggctgaggtgtgggaaagaccttcacttctcctctatatgggcctttctctacctggctgcttggatttccttaaagtgtggtggcaaggttctaagaagggacattccaggagacaggaggtagagactgccagtcttctaaatcctagatttggaagtccaagaatgtcactgtgggtcaaagccagtcaaggccaactacagagggaggagaaataatgtctacctattgataggaagggtggcgtgcataaacaaggaagggggaattgctgggggccaccttttgagacttgctaccgtaggtgctatgctagttggatgttaaggctaaaaataaaaatggtatcggccaagtttgtgggtcataatgctaggaatgtttaggaggcatctctttttttgaggttaacttcggaaggcactaacatgatctcctgcgtgacttcccttaatgatgtcactgttgacataatactgggtgaattaatgtgattaagtaaacttgcttacttacttcaggaaacagaggtatctaaacagattacattttaaaataaattgtcagatgtttcactgtaatggaattttctttacatcagtgaaattgattaccaggtagtgggatgaacatctgaaactagttcttagtttaagttgtctgagtttttgtgtatactttacctattcccagtttaaattggctttcaaacagtttgttttctgggtactcttataggtgttggggtatgaaattagtggtaattctttttgcctattttctttttttttgtctgagataccctgagtctcgctctgttgcccagactggagtgcagtggcacaatttcggttcactgcaacctccgcctcctgggttcaaatgattctcctgcctcagcctcctaagtagctg

SEQ ID NO: 62529 - DNA, 1058 bp, Homo sapiens
gtttcaatttgtatttccctaatgcattcctcgattcttgatgcttttattgatggaggatccaacacaaaagataatgcatggtcatgagaacaaaatatttgatatgcctaactttaacattctatgaaagacttcattaatatttttaaaaaggagtttgtactattgaatattcatggtttttcagtgaagtttgaggtactctgaagcctatctacaaagttttaagtaagccatgtgacagtgtggataagagagtgacttcagagcattttttttttttctggtgacctttggtgtgtagaacacttgtggcctttaataaactgaggagataggatgaccaaaattttttttatatgcctgtaatttttttaaagcagaaataagtgagaaacgcttatggacactgtgatcaagatcgtgaacaagatcatgatctacatttactgatttcatgttcctagtagcatagatcaatggtatgattttaataattcttattcagggaagtaatttagatggaggcaaggaaggctttcccttgagtaatatattaatttggccccatctatctcttctcctttgtagatcatcccaagcagcagtctgtattataagaagcaaacttaaatgattgctaattaaatgtttagtgttttttttgagttggttattagcttgaggttaaatttgtttaatgagtaaatatggaagaattatgtttttcacatttggaatgcatacttgctgatcattggtatgttactcccattttatgaagctggaacataatttccttctttttaatgactgtgagttttacagttatttaatctttgttttggtggtgttagtcatgtcagtactttatttgctaccgagttctcagttaggaaataggctcccaattataattttttttttttttttttttttgagacgaagtctcactctgtcacccaggctggagtgcagtggcgcgatcttggtgcactgcaacccctacctcccatgttcaagcgattctcctgcctcagcctcccaagtagctg

SEQ ID NO: 62530 - DNA, 1036 bp, Homo sapiens
atttgcttcccaggctaaatcacagccttgaagcagctatttctttccgaataaaaagtttaatttcacgccctgattagtgccagtacgtgcaggtagatacttatgttatgtagctaaactgatgtgcctttgcaaattacttgccagtcagcagaactatagtttcttatgagtagtttatggtaaattatagttctagttagtaagttctgtgtgtttttttaaagtgtgtatttattagatacgagtaggaatcagtcactaaattttggccagactagcagttgactaacagcttttttcaaaggctcaggtttggactaacagtccagccaattagcagtaggaaagagtgagatcttattttcagttgatttgaaaatatacacaggacctagaaagagtggtttctgatggaaaagacctaaggagagattatttttcttattgagaagtaaaatacattgtagttaaaaattgagacctttgagaggcttaaaagataggaagatcaactgaggacaagacatagaaggttttgaaatcgtgggacactacttaactgaatttttaattgcttaattgaaactatggagttttaaaaacttttaagatgaactggggccaggtttggtggctgtcacctgtaatcccagcactttgggaggctgaggtgggaggattgcttgaggccaggagtttgagaccagcctggtcaacttagcaagacccatgtctctacaaacagaacaaaacagaacaaaattagcgtggcatggtggtgcacacctgtagtcccagctacttgctttgaggctgcagtgggctatgattcctccgctgcattccagcctgggacacagagtgagatcctgtctctaaaaaaaagaaaaaaaaaattagccgggcgtggtggcgggcacctgtagtcccagctactcaggaggctgaggcaggagaatggcgtgaacccgggaggtggagcttgcagtgagccgaaatcgcgccactgcactccagcctaggtgacaga

SEQ ID NO: 62531 - DNA, 1009 bp, Homo sapiens
taatgtaaatatctaataccatggcaattggtaaggcatcacatgcagcattatgattgcctatgaacagatggatttgatgataaatgataaacatcctgtaagtgtgaataaatttattttagctctatctttcaaactttctctgtaatcaaagcttcttaagtgtttttaaaaatgccattatttccttcccaaattccacttgctcatcacagcaagatatttcatcctagtggagtggagacatgttaggaataaacctgatgaaaaccgtggtctttgttcagcagctggctgcttgcacaggtttttgtggtaatggcattggcatctctgtattagagtattgatctgctgcttggtaggtactgtgtaaaataagtcttctagtaaagatgtattaagtggtttaagagcagtttatattacaaataaggtggaagaaggtggagttctgtaagaccggacacatgctataaatatccataaaattaagtattttatctaaaaatgtgtgttgaaaatttctttttttctttttttctttttttgtttttttgagacggactcttgctctgtcgctggagtacagtggcgcgatctcagctcgctgcaagctctgccttccgggttcacaccattctcctgcctcagcctcccgagtagctgggactacaggtgcccgacactgtgcccagataatgttttgtattttttagtagagactgggtttcatcgtgttagccaggatgttctcaatctcctgacctcgtgatctgcctgccttgacctcccaaagtgctgggattataggcatgagcaactgcgcccagctgaaattttcttattttaattcatatttaattgcacatagttgaacattatctgagtgtgagttgcgtacactaataccatcatcctttgccctttagtggaggattttatatttgatgttcctgtgttgtggttgaaaactgtgttgtaaactcgtcagttataagaaata

SEQ ID NO: 62532 - DNA, 1172 bp, Homo sapiens
tctgttaaaatgttttacattaaaatttgatgcactgatttttagattggtgtctaaagtaggcaatatcatcaggttgtgcatttgagatttaccagtttacatcttggcttatgataaattggattggaagatcaggtactttattttcctggaagaaaaaaaaattaggtatattcatcattcccatttcacaatttcttgtcatatctcacttgcttcagaaatactcattttggatccttcttgtgaatatgtaactcttaatactaatgtcctgagagaaaggagaatttcttgtctaacctcagtaataaccataccatcacaaaagaaggcctcacaatgtatcaggcaatcaaatagccaataacctattctcctgctaaattccataaactggatggggagggtagataatgttcatttttgttacttaccagggaacatgacacttggtctttgaaattgttatttatttcatatattgtagctgccaatcagtcagtgatttgcaaatagcaaagtaaatacactgctgaaaatgagtttcttctttgtgctgatctgtgatgtgcgggaaatcagatgtaatatggttgcatttatttatgtaggcatctattctctttcttaatgagcaagtaattttcttttctctacttctacacaaaagttaaattaaggagtacccaagagggctgggaaacttggtttgcagtcattgaaatactgctgagtatcgggatcctttcatgagtggagtttccctctccttaagaagaaagctccagatagctcccttttgaactcattgttagagcaaacacatctgtagaggaagatgatccataagtctaatgctaaggatttgcctcctctccctatcaatgagaagggtttgcctcctctccctgtcaaaggattttactctggcttatttggctgtttttgcctgggaagtgaggggcaagagctctgatctttcctatgacggccagcctggccttaatatgtagattattaacatgataccagcctctgttgagtcatagcaactgctatgaacaaacatgtaaatccatctaggggaagaaaagagtgttgcaaatgcctttcatcaaaatggaagactacttcaacttctatttgctcttcttgttataaccaag

SEQ ID NO: 62533 - DNA, 1041 bp, Homo sapiens
cccgtcattcagggattacattctggcattgtttgttgttcagtgtcttgaaatatatgtttcacatattttgttcagtttcttgatggtaggaagataagtttgataccaattattgccttatggtagaatctaaagtctagtgcttgtttttactttagagtttaattttatttaaacttaatgtactagaagtcctcatattacatatttctaatgtgcataaatttcagttagcacaatttagttaagtgacactagtcacccaataccatggttccaatttcagttaccatagtatattaactatgagtaactatgtaaagtacaaacttcattgctagtactccagtccacacatgactatgtgaaaaacagatacacactagtctatttacttcaaggtctgttggcgattaagtttatatacagacaataaagtgtctagttgtattgtctttcccaatgttaagcccacatgatattttatagaaatagataatcaaaagtggaaattggccaacagatatgaaacaaagtaacaaaaaatgataaccctttcattgaaatttgagagaaatgtaaatgaagttatagaagaaatagttgaccataggaaaattgacactgtcaccatttgatagactctagatatgcagccagaggaacttattgaaggtgaacttattaacataaatgagggaagtggtttttttgtttgtttgttttgggtttgtttttgagatggagtcttgctctgtcgcccaggctagagtgcagtggtgcaatctcggctcactgcaacctctgcctctcactgcaacctctgcctcctgtgttcaggcaattctcctgcctcagcctcctgagtagctgggattataggtgcccaccaccacgcctggctaatttttgttttgttttgtttttttgacagagtctcgctctgttgcccaggctggagtgcagtggtgcaatctcggctcactgcaggctccgcctccagggtttacaccattctcctggctcagcctcccgagt

SEQ ID NO: 62534 - DNA, 1063 bp, Homo sapiens
gaaggttttatttcgagaaaaagccacttccaagcttattgttgttggtggtggtggaattcttttcttcaagggctgttggactgagcctcaattcttagttgtttgttgactgggtcaccgccaggtctgtgccatggggacatctacagtatgactgcttgtttcatcaaagcgtgcaaaccaagaaggcaatagagtctgttagcaagatggaagttgcagtcttaacctaattaggaaaatggcatcacatcacctttaccaagggcatgcataccaagcggtgggaaacatcggggggcatgttagagtttgcctgctaccgttatccattattatcattatttagtttgatattctaattttctcaaatgtagcctgcctcagtctttcactctggcccctgtattattttgacatgtctctgtcattcattgagcacctcaagaagatattccaagctcctcttaaactttcctgtccaagccctcgcattgttctaaggagctctggttccttttagtggagagtgatattttgaatcattaaatgtgtttgttgctattaggttgctcctaggccctctcagttggtagtcagtctgtgtgtgtctgtgggtatatgtgtacatatatatatatatatcatgaatatattatttacctaggaatttctcggtgtaatacattgtaagatttcagcttacaacaacatcctcaattctagttcagcaatgtaatattcattctagttttctttctttctatacttgtaacttgtttttctgattatgagaaacctagctcttattatcctttgtatttgatctgccacctttatttgatcaatcttcctgtataatccatctcctgttgctgacatatctctcgctccatttctcaccccatacttcatatgcatgcctccctcacccttttgggatccgacagcttgcacttggctgccccttccaccctcctcactccactgggtctgaaactcactgctggaccactgcctctccctctcttaatgcatgccttcttctgccgacatgggc

SEQ ID NO: 62535 - DNA, 1040 bp, Homo sapiens
ttggggaagagcttgttccgcaattcattgccaaacaatgaattgttagactgacaaagctaactaacaaagcttgttagtttgttatacagagaatgttatacagatgcagcttgttagtttgttatacatatagtaacaagtgctacaataaaattaaagtctgtgactgagcttttctaaatatttgaaaatttacctaaacttatagtagctgttgtctaatgcaatttagtacattgttaaattttttcttgtagttactatttgttagtagtttatctccttgaaatagagtgtaaactacttgagtctgtggatttgtggagacaaacacatttgagtattatttctgccattgtcatttaggcactataacttcactgaacttgagtgtactctcttgttaaggcaaaagtactaataattctttgacaagaaggtaatgcttaaatgaaataatgtacttaagggatctagtacaatgcctggcagacagtttattcccggtaaactttacttatcctctttttgtactccacctgtgcccactttggtaatgaaaaaataaatggcttcccagaacagtttgaaatgcaagtggcattcacagaagcctattcctggtgatgatgccatttatatttttttcttttgcactttgcagcttttagaatccttattttagccgggtgaggtggctcgtgcctgtaatcccagcactttgggaggccaaggcaggtggatcacctgagttcaggagttcgagaccagcctggctaacatggagaaaccctgcctgtctctaccaaaaatacaaaaattagtcaggcgtggtggtgcatgccggcagtcccagctactcaggaggcttagtcaggaaaatcacttgaacctgggaggcggaggttgcagtgagccgagatcatggcattgcactccaacctgggcaacaaaagtaaaactctgtctcaaagaaaaaaaaagaatccttgttttagttttaccacaaccttgtgcaataaggctgggcagatatg

SEQ ID NO: 62536 - DNA, 1050 bp, Homo sapiens
gcaaagtacccataggtagttttttcaagctttaccccctttgtcctcccaccttttgtattcctcagtgtctgttcccttctttatgtccatgtgtactcaaggttttgttcctatgtataagtgagaaaatgtggcatttggttttctgtttctgcattagttcgcttaggataatggcttctagctgcatccatgttctgcagaggacatgatttcattattttttatggctacttagtattccatggtatatgtgtactgcattttctttatccagtcttccgttgatgggtacctgggttgattctgtgtctttactatcgcattgcagcatttcaattttttttctgattcaggtagtagaaaacatgttcagtcttatttttttctgtgctgtgtatgctttttaaaggctagtgaagtcattcagttggataacaacaattataatacattgttatactcttcaactttctttgattttgcaaaggagagtcaattggggtgacgttaggtgggaactgagctgaagaaactaatatgtgctgtgcagggctggatttgtgtaggatgcagtcattatctgttaactttgtcatagcttttgagactgcatgtaaggagtaggtgatttgcaagttatttaacagttaacagaaggtaaatatttaaacaggagaatgcgtagttgctgcttagtttaaaacctgcttttttttttttttttaattaaaaaaaatgttttttagccaggcgtggtggtgcacgcctgtagtcccagctactgggcaggctgaggcagaaggattgcttaagtccaggaggtcaagggtgcagtgagctgtgatcgtgccactgcactccagcctgggcaagagagtgagactctgtctcaataaaaggaaagaaagggaaaaaaaattaagtatagaaagaaaattttaggaatttaaatataatttgcaaggaaaaacaacaaaaacagtccaaactttaagtagaaaactatgtgcttttcaggtattttaaaggtaaattttaaagggc

SEQ ID NO: 62537 - DNA, 1046 bp, Homo sapiens
cccttcttttgaagcccagtgtccactttatgactgagggatggatggaggcaggaggaagaattctgcactagaaagcaacaggccaagattctagtccctacttccctactttgtaaattcataatcatggataaatacttaatttttcctgggcatcagtcaccttacctataaaatgaggataatgtattaagcgtagtcctatgggtggtaaataaaatgaggataataatctaaaatcaggggatatacatagatctcctttggatttatttgcagcccattatctatctatctttatttagataagagacgggatcttgctgtgctgcccaggctggatttgaactcctgggctcaagcgatccacccatctcagtcttctgagtagcttggaccacaggcacaaacctcttgcatggctctcattgtccatttatcaattttagatggtgtaaacagtgaataccatattttgtttcccaatattactttctacaactatattgttttaaggagaaaaaagtctatgacaatataaaatatttcaaagtctgtaattttaaggtttaatgttacctatattgactactatattttaaaatatgtatccctgtttttatatgtgccatgattaggtatttagttttttagttattattagactgtaatagcactcaagttgatggataaaatttcatcctgggatacttttagagaaacatgaagaatataaaaatagttttgaaaagtatggtttctttcttacaaagctgtagctgcaataatactaatgtcagttacttagagctactagaaatgtgtaatttctaccttttttgactactgaatataccatatgtattatatatatgtacattcttaggtatttttgtttgtttgtttagaaggttttaataccaacagctttctaggtgtcgtcttcttcctcttcctctcccctccccccctcccctccctcccttcctcctcctcctcctcctcctttttcttcttcttctctctctctcctttctctctct

SEQ ID NO: 62538 - DNA, 1459 bp, Homo sapiens
ttcccttctgtttgggttgtttcttcccctcgccttataccccccaccccccacagaccccaatccatctggaaagatgaagaggcagctgctatggtaactgtgcattttggttaatgaatagcagactaacaagatacataaaacatacgcaaactgtgcagagtttgttgctgtcaaagccgtagggatacaatactttttcttttccttctaaaaaaaaaaaaaactctcttaactgtggtgttttgttttctaatttaccattcctaatattgtaatgtttctgtgaactcctcctctttctgcttagtctgcacagtattacaccctgtggtgagtttatgggagctgagttgaggtgcatagaggaaaataattgatcaactggattaagaagtagatttcctttagactgatacatagaagaatagggacaaaatgtttttgactaaatgtttggttttttgaacgataacttctttttttacctcctttccttttggccactactgccccttttgggattctctctggggttaaagccagtaagtagtgtgtttcttaaagatgtttctatcataaaggtcagctgcaactggaatattgcgttcagccaagccttaaaaattcctgtaatctgtgccatcctgtctcatactgtcccatctcatagttgtcctctctctgcagtgctctatgcccaggtctctgtggctgggctgctccagcctggcggacagcatgccttcgctgcgatgcctgtataacccagggactggcgcactcacagctttccaggtactttctctgtctctgtgggttatttgcgggcattagtgtatgtgtctaattcattagtatgtgcctcctcctttcccatactttacttatattcatcttttctccttcatattgcctgtatctcacatcactcagtactcctttaatgattagtttataatgtagacccagactgatccactcttaagacaatgtcatcatgattggttacaaaaattgacatagtacagcttgactgttggctttcagatcaagtagaagtatgatagtagattttaaagtaatctcaataaatagcagttcaatacgtaatatttgctctggacctacataaagccaattagtataatcaatcaattaattacaatcagtttcctgaacattttcttattttttttaaatgattactcaaagtataaagtgccctcttcagagtatctcctggtaattatactactaagtatatattttttataactgttttatttatatcttgattaacatttctaatttctaggtggaaaaacctttgagacctttaggtacagtattcaccttgagacactctagctagtgtttcatgaattaacagattccagttcccctcagcctttcttttttttttttttttttttttttgagacggagtcttgct

SEQ ID NO: 62539 - DNA, 1167 bp, Homo sapiens
ggctctagttgccctcctacctcaaacttccgggtagctgagactacaggcacacgaccacacttggctcatttttctattttttttgtggagatagggtttcaccatgttgtccaggctggtatcgaactccccagctcaagtgatctgcctgcctcagcctcccaaagtgctgggattacagatgtgagccactgcacttggctatatcctatatttttaactacatatcatactgacaaggttctgccattgaagaatccatagtctagtttgttggtttttttgttttgttttgttttttaaccttttcggggttgcagttagtttaggcgatctgcaaagtctgagggaattgtagtgcctaaaaggctgctcctacttcagaaactagtttcatgtttagaggcccccacaaccactcttaggtttgataacttgctagaaaggacttagaattcactgaaaacaattatactcacagtttattacaggaaaaggacacaggttaaaattagccaaaagaagagacacatagggcagaatctcggaaggatccaattgtagaacttcctgtcatcctctccccatggagtcatggatggcattactgcctcccagccgcagtgtgtgacaatactcacagagtattaccaaccatgaaattgacctgagcctttggtgtccaggtattcactggggctctatcacatactgctcacatggctgacttctagtctcttatttcctcctggtgttgaaacttataggtatggtttagtgcccccaacatgaatcacatttgtccagtcgctaaatctctcaggcaagcagagatactctcaccagacaagaagttccaggggcccagagaccgctttccagtagccaagaggaaaggccattcctttctttggtgaagagtaattcttcactacacaggggtcatggatctctttgggaatctgatgagaactattgatcttgggtatttggcaacattgtgttgaatactttacatacatatatagatgtttattatatttctattttgtgaaatgattgagagctattaaatcacataattctgaaagtgtaatctcccaagctgataaattctaggaagggaatgttcaaggagctgtaagaatatataaaagggggacc

SEQ ID NO: 62540 - DNA, 1023 bp, Homo sapiens
ttatcctgtgacagaaatgcttctcattctgtagctgataccctctctattgtatatgaataatttctgtgtagcacaatttctgtataataaatgtagttattttttatgtatatgttaacatttgacttgtatttatcccagctacacccttcaccttaggggtttgcagggaatgacaaatcaaacatgtttttgtttgtttgtgcagaaatgttttgttctcctaataaaatgaattattgtttattatggaatatgtacattatttggtaaatatataaacaagagtatcacccatatgccttccactttaagataattattgctagattaacatgttagtgtcctttgatctgaaatgacttatccatccatgtgtgcctgtgcgtgcacacacacacacgcccaaataatggtttcatttttaagtattttattacatttaattaaattatgagatatacagttaaaacatttaatattcattgtagaaaatagaagtagaaagaaggaaggattttaaatgtcctcccagagattaccgtttcagtgatactagtaatttctgaatttcacctatatcatattgctcaaattctacattcatcatctggtaatactgattttggtcactgtttatctcatagatagctgctcacatgtttttgaattgaacaaagtttgaatttggcttatatctgaccaccacctccctctcatgtaattgttagtcatttcaaattttgcagttccccaaaggtgcagtgtgttcttttatatatctgtgtctttgcatataccgttctgcttacctgaaaaaacccctccacaaacacctattgtcccttacccactctctgcctttgtctacctaatcttcaagattcagctcaagctgagctagaattaaagtcttccctgatctttatctttgctctcttaaactagtcagaggatctgtacccagagcatgcatggaattctgtgccctgtaaaattgacatgaagaaaaggagtatt

SEQ ID NO: 62541 - DNA, 2020 bp, Homo sapiens
tattggctatgaaatattgaactgtcagaatgtgacacttggttttttaagcaacctttcttgtttgaggtgtttgcagttcattcctttctcccccatttgtctgctttcattgatagggttggaagtagttgccttaaatgcatgaaaagggacagtgttaaagagaagtggtgctgatggagccaaacaaacttaacactagaaaataaatgcaggctgtggggcaaaggagataaagttgggttagtgtattattaatagtggaatttatggaacaccctattgtaaggaagaatcaggttaggtcccatttctgtttttgtggaggcaggaagttgggaaggtggtattgggtaaagagatgcagtgacatagtttgttaaactgatagcctactatatggcagtattgccaggccaatcagaattcacccagctattttatttattgctcttattatccagtgtctttaacaagtggtgaaattatagaagactttaaaatttggggaagaaaaatatttttttaatgtggaaaatgtgtatttatagtaagaaagctcattaggtaatatggaagaaacattatgcttatattagtccagcttatgccaaatgaatagaaaatcttccttataaaaccaccatatatttcttggaaaatattttgtagtaataaaatgagttttctattatgttttaaattacatcttttttttcaagctatgagtaggagtttataaattacaatacatcttaaaacaacatatatattttttcttctaaggaagcactattgatgtatgctttcattttcatcccttttggggcattgaatttacaagtaaagttttaactgagaatgaatggccttttgcagttcttctggagtatggaaaagagtttgtattgaaagttcctcaatggctgggcactgtggctcatacctataatctcaatactttgggaagctgaggtgggtggatcacttgagctcagaaattcgagaccagcctgggaaacatggtgaaaccccatctttaccaaaaatacaaaaaattagccagtcatggtggtgccagtctgtggtcccagctactcgggaggctgaggtgggaggatcgcttaagccttggaggtggtggttgcagtgagccgaaatcatatcactacactccagcctgggttgacagagtgagactccatctaaaaaagaaaaaaaaaggcaactatttagcttagccctctcctctgaaaatgtgaaaggcaagagctgttctgcatcagtctagtgaaatgcactggaaaaatggtgttggtaattcctgctttgaggtcatgctagaaagagagaagataatacttgtaaaatataagtcctgctcctttgtagccagatttttgtccttacttaaaaatattgtgctcagaaagtaataccaaaaggagggatattaagaactagttattgttgtttttaagtattgctctgaatttttaaagcataaacattgatgtagatttgcatttaagctatgagaacccactgtcttgactcagtgggggagttttcaaaaatcattcttgtagaaattgatttctcattggctgatttctacaggatgaatgaaaacaaaccattttttgcagtcttagaagaataagaggaatgcaagtgtttaagaaatgagactgaaatatgctttatggagttttctaaatctggtacaaagaaactacaaaatttcttcttatgtattatgcatcaatacagtgaaaatgcctcacagcttatgggctttttacaaccacaccttcacaattaatgattagctttattatttaaactccaggcttgcctcatgagcaaacatcagtgtattcatagaaccatagaatttcagcattggaccagacatcagaggccatctagtcacatacgtctcataatgtagaaatcctttatgaaatgtgtttggaagggagtcatctaatctctccctgatcactaccattat

SEQ ID NO: 62542 - DNA, 1305 bp, Homo sapiens
ggctcatgcctataatcccagcactgtgggaggctgaggcgggcggattgcctgagctcacgaatttgagaccagcctgggtagcatggtgaaacccagtcactactaaaaatccaaaaaattagccaggcgtggtagtacatgcctgtgatcccagctgcttgggaggctaaggcacgcgaatcgcttgaacctgggaggcggagatagcagtcagccgagatcacacccactgcactgcagcctgggtgacagagtgagactgtctcaaaaaaaaaaaaaaaaaaaaagtgtaataagtcagaatacaatgtagacacgtcttgttttgaacacaatttaaataatgtaatttaattactgcctaagattgcatatacttctttgatttgaatgatggaaaaatttctaggaacttagcctgggtttgtttcctcatcttttctttgaagccagaaaagcatagaaaagcatatgtaagcactttgacaaatgacataatgtagcggcatatcagagtggcacaggtattttaaacctagctccagttcctgaagatggtgaacatctgcttagaggtactgtagagctccacaatgcactaattgaattactcttttctggagttgcgactgcactaattgaattagaatctctctctctctctctctctgtctctgtgtgtatgtgtgtgtgtgtgtgtgtgtgtaaatgagataattccaaccttaacgggagagactatgagagacatgactgatggtgtgtactgtgctgctatctaatggcagcctatggaactactacgtggtctccagggaagagaaaatacagcgtgacctcagtctaaccccatccagtttagttcagaaggtcccaggatgtaattttgtaattctaaattgaaaaggaaagaatgtgataaatttctgtattaaaaattaagatatattttattaggcataaagtttttaagtactaagttacaaatattcaactgaattaaaaatttcctttaactggtgaaaaaaaatcgagttggtgggtcatcttttttctcattttgtccttcagtgacataaacgtaaaaaggaattaacgtttttgaaatgtcttagcatcatagaaaggataaatgatacagggcttgttcatatttttaaatacaatttttttcctggttgttagaaataaggtgttaccagattttgcttgtatgtgattatgcttatattaattatagcagtatcaaagtaagttgtacagatctcacttgctcttttttttttttttttttttgagacg

SEQ ID NO: 62543 - DNA, 1351 bp, Homo sapiens
gcaaataaatacactgaggacaactcaacatgaaatatattttgattcagtttaactctaggcattctaacttgtaaaaatggcccttaacagaaaaatacatatgtataatcacttgatttatagaatgtgtatgtgtgcatacaaaaccacttcagtaaaagtgctgttggttaccattctgagcatttaaaacgatcactttccatttgatcatattaaagatatagaaacaagtatatagcatagaaaagttttaatttcttctatgtaatcttcattattaaaatatgtttgaatatgccattattttgtaggctaatttgttcttcattgtgagattgaggtacttagatttcttgtatgaatagctctcactaaaatgactataatttgtactttttatattgtccttagggacattttactgatttagaaaatccttttgacatcaagtagatgtaaggctttacaaataacatggccattcacaactagccacaactccgattcgattcacagagtaccttttatttgccaattactgtacaaagtcttaggcataaattaagattcagaacctatcctcaaggagcttatagttatttgttatacatgtattaagtacttatataccagtcactgtgcatataattactagtgttaaccattagtcatatgtatttttttctgatttattgagctagaggtctggcttagtagcagtcctaaggaaatggtatacttatgttcatatcagatatatctcatctcagcaaaaaagtgataatgtatatttcagactagtctgtgtcttaaatggttttctcttgcctttacataccttctaagggaacagtgatgtttgtgatagctgtacatgtagcttaaaaagagatgataatatttgttacaatgcctcctactggttgatcatagattttcaatccttgttgtcttcagaactggtagttcccactggtgatttgatagtttggggcttctactgaggctataactgagaaagagtctattgcatacaaggtataaagtgcttctttaaacagtctgtttctagaacctaaattgtcctgggaccagctcttgatataaaaattcatagaaacctgtttttcacagagtgtggtaactccttgccatagtgctgtagtgttaaaattcacattggccaggttgttctgtaaattaaacactgacagctaccctcaggggaacagccaatgtatttatgatgatgtgctgattacacaaaatacactgcaagcagaaaacagctgcagagaataaacctcttaaaaagaatacaattacaaatagcaccctcagtatt

SEQ ID NO: 62544 - DNA, 1114 bp, Homo sapiens
tccatcacgaaaaacacaacctacagtggtataagatgcctgctttgcaagcctgtttgggattttaaaatattaacccacattttaataagtagatgtagttttgtaattgcattcgtacattaagcaggataaaaatgtaaaaaaaaaaaactacttgaaagggtaaggtaggaagtgtttttttttgtttgtttttaaattaaggctttagagccaaaaaaaaaaacctgtaaagtttaaatggactattacttctgatgtggagcatattagcataattacaaactcttttatatactcatagtcattgctaagttgatgttcaaacctttgattaagaagtcacaaagctgactgtgttcagacagctgtgtaatatcgctcctattcacaaaacagataactgttttagccccctcccttttttggtccccatatttattgctacaaatttgtctttctcctatagctagacttttaattaatggtgaaacattaaaatgttgtattgtgatattttcggtgacttgaaagttaagagaaagcagcactgctcattcatgcccttgccttgtcactccctggtgcagttcatctcttctatccttcttatcagagtatctcagtgcttagttgagcttgtttatcttaaaagagcaggaggcaggcttttagggaataagctacatgttccagtataacaggcaccaatgctgtttgacttgaaaaacatttgatctcttacattaacagcccatgtcactgtaataggtagtacagccgagttgttcagttttctattattttagctttgaaataactgttagtgctgccccaaaatcttcgtgtataaaattgtatattggctgccccccaggactcgtaagtaaacaaggtgatatgtgtggccagaggggagggtatttgttggctttgttttagataataactgatcctatctaaagatgttttctgtctgatccctgatagtgggtgctgcatgacgttgtgtaaattcgcagacctagcaatattttaaggcagatttctgtttgttattaatatatgtgctcagtaactattaattatgaactttcatttttttctctga

SEQ ID NO: 62545 - DNA, 1024 bp, Homo sapiens
gtcatggggaatattgccccagctatgaacctgctgtgtgctgccatcaaaacatctttacttcttgaattggacagtcaaaaatacaaacagcctcaaagttaggaatgctttggttaagggttgccaaactttgtctgtaaaggggcagataataaacatttgaggctttgtgggagataggatctttcttgtggccacttacctcttccgttgtagtgtgaaagcagccacagacaaatcgtaaatggatgggcatggctatgggccagttaaactttatttgcaaaaatatgtgtcaggccagagcttgtaagtgctgttaactgatcatactggcattataagtagtgggacagtaggactgcagttgggctgccactgaagttcctctgctattaaaaacaaaacaaaacaaaacttttttttaagctagctggacagtctgggtttagggtttcaattattcattgagcatctgttatctgtatacttacgtaatgtgttagtgggtagagggagctacaaagacttttcccagtaatctttcaatcttactggttagtcgaaagtaacagtgcagacatttatctaattaagtgcctgttgtgtggatcaagattaaaatttagttagggaatttccagtagagtaaggtggagtagttttatggtttcttggagaagatgacagttaaacctcattttaagaatgtgtaagacttgaatagatgagataatcttgtgtttataattgttgagtgaactagactggagttaagaatccttccaggccagactctgtggctcatgcctgtaatcccagcactttgggaaacggaggtgggaggattgcttgaggctgtgagtttgagaccagctgggtaatatagtgagaacccctgtatctacaaaaaaacagaaaaattagcctggtgtagtggcgtatacctgtagtcttagctagtagggagcctgaggcaggaggattacttgagcccaggagttggaggttacaaggagct

SEQ ID NO: 62546 - DNA, 1030 bp, Homo sapiens
aggtacaaactagtaactttatggaatgaaatactcatttttgggttagcctgatgttttcttataagtagatttaagttttgtggttttgacaaggatacctcacaagtgatgtgctgttttcagtacatcatattaaaaggcacataatcttaaggtggcatctgctggatttctccactatgaggttactcttttttcattgtaactatcaagtatcttatagaaaaaatattttgagattatgtgaccatcctgttaacttgtcaaactttcactcacttattgtagttttaaattttacttaggtttttgagatggtgtcttgctgtgatgcccagactgctctcaaactcctggactcaggcagtccctctgcctccacctcctgagcagctgggattacacgcatatgccaaagtactaggctcacttgctaattttagcacccaatgatgattcttccttatattaatcacttatccttaaatagaatttattggatataatttagcctgatgatctaggaaaattatgcacatagcttattgggaatcctcatagataaagatgcaaggaataactgtgttgctgagctttcctgggtgatgttggacaggctttgagaactgttgaggtgactacttaggtatacatggctatttcatcattaccccttaccctcaagactgtagacctagtaatctcattcactggcattctgcttctactctttagtattaggagggttcctaatccttgttcctgatatcatgactgtttaatgtccctacctctatttttttgtaacaacattataagttggattttttgtttgatttgatttctcatgatggatggcccagagtaaaagtgttgggttaatctgtattaaaagaacataccaatgtttatgggtttcccccattttttgtttaagagttatttttaacaataccatttaaatattctttgccctagtgggatagaaaggggaaaggaactcctaagaagctctgtgttctatgtt

SEQ ID NO: 62547 - DNA, 1067 bp, Homo sapiens
agctggaattacaggtgcctgccaccatgcctggctaatttttgtattttggggtttttttttttttgagacacagtcttgctctatcgcccaggctggagtgcagtggtgtgatcttggctcaccacaacctccacctccagggttcaagcgactcttctgcctcagcctcctgcgtaactgggactacaggtgcccactaccacaccgggctaatttttgtatttttagtagaaacggggtttcaccatgttggccaggctggtcgcaaactcttgaccttgtgatctgcccacctaagcctcccaaagtgctgggattacaggcatgagccactgttcccgacctaatttttgtatttttagtagagacagggtttcaccatgttggccaggctgttctcagacccctgacctcaggtgatctgcccagcttggcctcccaaagtgctgggattacagacatgagccaccacacctggccctgtattcatttttaatataaaattggatacaatgagcctgagcagcagtaaaaataattctaatttacttggatttatagcattgttctaggaaataggagatctaatatttgttgagcacccaccgtgaacatgatgcttatttgatttaaccctcacaataaccctgtaaagtttttagatatgatgtgacttccaatttatagatgaagaaaatggagggttagagaggttagatgacttgtctagctaattagtgatttgatactcagatctcagtgtttccaaagcgtttctacttgtgccttctgacttcagtttatatatagtgtttagagggaaagtacttgaaactgtgacacattcattttttaatttactatatgttaaatgttttttggatgaacacttcttttttttataaaaataattgtttagtaaatagaattgaatcatccaggaagctttaaaaaaaaaaacaaacaaaaatccacaaatgatcagtaattgatgttgagacagttacaattttaactgtttggagaatcaacacctgatctgttcatctaaaccaataggacaa

SEQ ID NO: 62548 - DNA, 1015 bp, Homo sapiens
agggcagctgtccaggactgccctgaacttgattaccccattgctgattttttttaaggtaggacatagtatataagctgtttaaactccctcttttctctattgcatatgacaataatgaagtgccatttgctattttgtttttttgtttttgttttgttttgtttttcctgtagtcaacttctgtagacaaaaagatgtcaaggccgccttatacctagtattgatacaagtaggatttgcatctcattaacttgagattcttttgcagatatttctaatgggatttcagaaactcactattgattataaaaagttcagttatcttctagcaatttaacattgtttttaactaatattatagttgacatatattattcaaaaatagcgttttgccattgttgataggacataactactgcatgttaatttggagagctatttaaatattggaggagcaaacaactttataccaaaaatttggcaagttgaacaaattccttgaaaaatacaacttaccaaaactcttaacacagggtgaagcaaaatttgaatagcctgatgtctattaaataaatttaattaatcatcagaagggacatgtggttttactggtgaattcaacaaatatttaaggaagaaatgatacgaattttatgccagaccctttcacagaatagagaaggaaagaacactccttgacttaaaaatccaccataacagtaattccaaaacccgacaaagatattaccagaacaagaaataatgaaggtggaaattaagagacactgttccctgtgtctgtcaccaagtcattttgtatacctgctttttcgtttcatttccagcatctgaagatggaagagtttggggtagggagaggaagtagagcagtgtatccttgtaaagaaagttaattttcttagtttcagaataatctcatttcttggcattaaatatgaacttttatttaaaggatgtacaaaatagctacaatttttgttttactcctaaa

SEQ ID NO: 62549 - DNA, 1054 bp, Homo sapiens
aaatcacatcttttccttacagaagaattccagttaatgtggaaggaaagacaaaaataataaattcactattagaatacacagtaaaaattaccataggcatgattagcacccaatggatgctaaaattagcaagctgagatgcaagtagaaacagaatatttgcatagtctccaagtattttgccatatatatatatatatatatatatatatatattcagtaattcctaaggggaaaataatgtttatactggagaatcttggcagacatgtccttagctgtataatcaaggctaacatcaccagaaataccagcataccttctgatttgatgcagtgagaggggcacatcacctctaaagtatctttccccaaaataacctcaatctgatcatgagaaaatatcagacaaacccaacttgaggcacagtctgtagattaactgatcagtgctgtttagcagtgtcagtcatgaaagacaaggaaagactgagggattgttgaaaataagaggagccctaagagacatgacaaataaatgccatgtgggatcctagattagatgctgaacagaaaaaggacattagtggaaaaactggtgaaacctgagtaagttctgtactttatatagtaccaagttaatttcttagtttcgataaatgttctgtaattatgtaagatattaacatatggagaagctgggtgacaagtatataggaaatctttactttttctttctttctttttttaaagagatgatgtcttgatttgttgcccaggctggagtgcaatggcataatcatagctccctgcagtcttcaactccagggctcagtcagtcctcctgagtagccaggactacaggcctgtgctgccacgcccagttaatttttttttttttttaaatagaaatgtgggcttgtatggaactcccggtttcaagtagccctcctgcctctacctcccaaagtgctgggattataggcatgagccactgtgcttgaactttactatttttgtacttgttctataaatctaaaattatctcaaaa

SEQ ID NO: 62550 - DNA, 2014 bp, Homo sapiens
ggccaaggaacaaggctgtgccttttcagcagacagctggcagggagagaggcatgttgttaggaaagagagaggcaaggcaaataaaattactgctaacgctcagagatcggcaggagtcctacttgcctaatcttaccggtgggagcaagcggctgttgtaatccaattatagcagcataagcaatttgttagacactccgcataatgtaacaatttcccaataaactctgacttgtaataacgtcggcaagagtccgcataaatctgcccgaatggtgggggctggagcattcggctgggggcttgtaattggcgccatcagcacgttttgcggagtgcagtatggtgcagtcttttagtgcaggaattttaaggagaaaagcgtggcacatttctcagggaaaaaaaaaaaagtggccattaaaaggggaacagcaagaagggcatactcttgccgtcacattacctaggaatcttagtgtagaaagaaaacaggaggaagccatgtttcctcctaatactaaagaggggaggtggggaaaagagtgtgtgaattagttaaatttctttatttaaaaggcatcggtttctattatttataccttcatctccagccccctaaaatgctgttcaggcagggtttagctaacatttttataaaatggtcatactcaagacaagcctagaaatgccaagttaaaatctgttttcttctggagttagcattttctttacaacatgaaatatatattctttatgaccaggacaaatcttttgaagatattatctcactgaatatcagacctttctgtggtgttctgacttctgctttaagaaactgtcacttactgaagggtttaaatctcagcttgtttgcttagctgcactgcttcttttctcattctgaaacatattgtgaatatctatgatactaggattagtaatcaatcttattgaaacattacattttataagaacatatcatttaaatttatacttgtgtgatcattatagaaataattttgattcctaagtaataaaatttctgttttggaaaaaatatttgttgttatatgggacaaaataaaatcacccttattaattgattagcatttgtagtcacagaatagggtttcttgttatataaggtataggaggtgaagcgtgcttatggatttgagttaatagattttcatgctactcaatgtttattaaatgttacctactttcttatgccaacccatttcttcattgctatataatttgtgtcaaaaccaactatatgaagaacaggatttttcagaatatcctgttgctgtgggtattaccacaataaatacttacttgcagacttaaacatttccttttgctgaaacaaatgcagccttctttgactggagctacatcaataaactgcagtgcctctaataaagccactcagtgtctgggtttaactaatggctgattttcatggctttgacagtgagctgtgtgcgttattttctcctgatattgtaaaaataatgagagcaaattagaacaatcagtttacacagatagctcctgattggaggcgatgggcaatatggcagcaggtaatccatctttggactcctgtcacattaacttcaacagtgtgaaaagatcaggtggggtaagcagggatcctacccagtcggaacactgaaattaatgagaagaacagtgttctgtgatcaaccttttaattagcaagagtggaaacagagggaatgatgaagggagcaccacagctgcacaatgccaggctcagtttctgaaaaggaaagcaaaaaaatctgtgttttatgttactttttttcttgctgtgtacaggcattatctttccattctagagctggttgcaggcttaagaaatactgcctactttccaaagtaatgccacaaatatggttgatatattaataatctatagactgtaattctatcaggagtcatttgattttgattaccagcatactttctttggcat

SEQ ID NO: 62551 - DNA, 1056 bp, Homo sapiens
aaagattttttggtaggaagtgtttggtaacatgttgctttgttggtggaacataatgttgccacaaaccatgaataaatattctgaattatctaatattatagcagttataaccatttttaagcctcctttctaagtagatatttctctcctggcttcctgtgctgtgaactttgcaaaactggcataggcagcctattaattattcatatcatagcaacaattaaagcaaattaaaaataaaaatcaccgtattgcatttaaccgtgggcagcaccaaactgtgtcagctctgtaagggcctgtggtgtttccttagttaaaagtgctagagggagctctaaccttgttcagagtggtggcatatgggaacaattgtctgtatgtggccataggtttgcaagtgaagatatagtctcaggctcttctgtggcaaaaatttaaatcttttttattagaagtccctgtttcctttatatctgaaaataagggctaggacagtctatctatagccaaacagaactgtgttcatccttattgccctttctgtgaatacaatcatagtgaattttcacgaagtgaacatacctgtgtgattaccatcagattttatttttatttttaaaaaattccagattaagttcacatccacccagattttaataggaaaagagaaatgaaaagaccattaccggagcccactactaccctctttaagtcactaccctttcaagggtaaacattatcctcacttctaacaccatacattagttctgcctggttttgagcctcatataaatggaatcatatagtatttttttttttttactgtctgaattatttcactgtttttgagagtcatttatattgttatgtatgtatagttataatttgttattgatatgtaatatttcattatacatatatgccataatttatccattttactataagtgaacattgggtttctttcagattttcataactacaaaaaattattttacatatattttcctgaatatatacaatgagtgtatttgaatgggtatattaacc

SEQ ID NO: 62552 - DNA, 1044 bp, Homo sapiens
aaaataataatagcaggccagccgtggtggttcacgcctgtattcccagcactttgggaagccaaggcaggcagatgaccgaaggtcaggagttcgagaccagcctgaccaacatggtgaaaccccgtctctactaaaaatacaaaaaaagtagctgggtgtagtggtgcgcgcctgtaatcccagctactcaggaggctgaggcaggagaatcacttaaacccaggaggcggaggttgcagtgagctgagatcatgccattgcactccagcctgggcaacaagagcgagactctgtctcaaaaaaaaaacagaaaaaaataataataatagccacctttagtaaccatgtacatgctagatcctgttccaagtatttcatatacataatctgttatttcatatgacaattgtaggaagtaggtggtattagttttgtttacagggggaaaaagtgaagcttaaagaaggcaactaacttgttcaggtctatatagcttgtacatggcagacacttggcctgtacctgggcttgtctgacactatgcagtactaccttttttttgagacaggagtctcgttctgtcgggctggagtgcagtggtgcgatctgggctcactgcaacctccgccttctgggctcaagcaattctcgtgagtagccgggattataggcatgcaccaccatgcccagctaaatttttttgtatttttagtagaggtggggtttcaccatgttgcccaggctgctgtcaaactcctggcctcaaagtgatctgcccacctcggcctcccaaagtgctaggattacaggtatgagccaccatgcttggccactatgcagtactaccttttaaataattatgtatcttaccacctccataaataaagccctgggtccttcatattatatttaagaatataccctccaaaatgtcttgattctgtctttgtcacacccctaacccccattctcactgctgctctcctagttcatgtctattctgatatcagcccactcttccatccttactatgtaggccta

SEQ ID NO: 62553 - DNA, 1063 bp, Homo sapiens
ctaatttttctatttttagtagagacggggtttcaccatgttggtcaggctgatctcgaactcccaacctcaggtgatccgccgcctcagcctcccaaagtgctggggttacaggcgtgagccacctgtagttttcgcgcctggctagttttccaaatttttttacctttcaaaatgggtggccctttgaactgaagcatgaagccatcagctcattggcactattgtagcacatggtgaatgttaaatacagttgctcaagttaggcttcaactctaagtcctataagacctttcctgcctttctctgtcctcccaaaatttagctcatgtttttttgtaatatttcaatattagagtgttcagtctgatagacttggcaatttttatacagatttgttttcagccctgttatcagtcttgggggtggggaggacaggcattgatgagcagcagttctattatataccttgtttattgtccttggtagtgttggttataaaaagtgtaacagtcatgctgtaccaagccaagatgccaactctgccatagttaaatgttaaaattccaagctcagattcaaaattgactgaaaggaaatctttcagcagactatttcaatctcagttgactaaccctaggtatgcaaggtggatggcaaggctagatgaagtgctctaaacaactgaagtttacttatttcctagctatagtgtactcattgtttcacaaagggttaaattatgtagttagtgaatgcttttctagctgcaggggtttttgaaaagagatctaggaattctgcagttaattgaattcttcaggcatggactcagggtctctgaaaaaatttgagtgagcaaaattctcttgctttgctcctagatatagttcataccatgtcttaggaatccagaattattttttgaaggattttatgcctatatatgctgactgaacatttaataagataaccacgacattttaaaagattttatacaatgtacttgtttccttgcattgcccttctccctgttttttcttctcttacttccccaagtctg

SEQ ID NO: 62554 - DNA, 1039 bp, Homo sapiens
ctccggaggctgaggcaggagaatggcgtgaacccaggagttggagcttgcagtgagccgagatcgcgccactgcactccaacctgagcgacagattgagactccatcttaaaaaaaaacaaaaaaaaaagtcgttgttagatgtttatttaattaaaacctgacaacagcctctagagagtataatatagacttttaaaaaatctcttcctttccccctcaaaatccttgtaagttttgccttgtttctcctggccgcaggagcaagaacactgttgtatccccatccagattaatgtaccagactaaatatctaaaggatcagccttaatgaggtagtaaagtattatactaaaataaatgtatattatgacccagacttacaattctcaacaggggatttctcctcctttggtttctcctccttcatcctctgtcatgagagttaaaatacctttcttttaaacatttcctaatctgcctaatctaatcctagccatagtcacattttgcctggattattttatcagccttctaattgatctttcttcctctgcttttgcaacttgctcttattatcccctccccacctttccagcccctgctccattctctgtgtggcagctagtataaatatttgtaaggcacaaatcagacaatgccatatgtgactatttcaaaacctccaggggctctcctttacacttcagatgaaatctaaactctgtaggatggcctagaaggccttatgtgatcttagccccagccaccttaattcccaccatttttccttaattcccaccattttcttattcattctgcccagccacattggccttctgtctttcacttgaacataccattgcactagctcttccttctatctagaaggatcttccccaagatcttcacaagactgacatgtcattcaaatctcagctcaggtgtcacttcctttagaggcatttcttgaccactccagttaaagtaggctgcactctttacttcttttctttttcttttctttttaaacatgatc

SEQ ID NO: 62555 - DNA, 1036 bp, Homo sapiens
ttgattttttaataattgaactttttcattgtgtccttgtagattttcagaagttctcaaattggaattttgctgaatttactttagataattgtagaaaaatctgtattggagaatggtagaagaaaggggcatgacaacaaagacctttagatttctctacaaacataataccttagttacaaataaaattcatattacagtggatttatcagtaggaatactgtactcttagaagtttttttaaaataactttattaaaatataatttacatacaataaaatacacccattttaagtatatagttcaatgaatgttggcaactggcgtaacaatcaagttagagaacattttcattgtcccaaaaacatcccttgtacccttccccagtcagtcccatctctacatccagcctcaggcaaccactgatctgtttttctaacaattagaattactgttcctagagtttcatacgagtagaatcataatggactcatttgtacctggcttctttgattcagcatgtttttgaggttcatctttaccattttgtgtgtctgtggtttattctttttgttgctgagtactattccattctacagcagcatcacagtttgtttaccagttaatcttttgatggacatttggattattaccattttggatttttattaatatggaagcaaaaaacattaaagtaccagtctttgtgttgaactgtgtttcgttttaaggaggtaagtacctaaagtggaattgctgggttgtttggtaagtatatgtttaactttacaaaaaactgtcaacttgttttccaaagtagttgtaccattaaacgtgactgccaacaatgtgtgagagacccagttgttcctcattcttgtccacacttagtattgtcagtcttttaaattttagccattctaataagtgtgtcataatgtcttgatattttaatttgcatttccctaatgactaataatgttgaacatcttttcatatgcttattggcatctgtggatctttttttgtgaa

SEQ ID NO: 62556 - DNA, 1126 bp, Homo sapiens
gatcgcttgagcccaggagctggaggctgcagtgagctatgatctcaccactgcactccagcctgggtgacagagtgagaccttgtctcaaaaaaaagttgtgagcaagtaattgtataaatgtccaacaactgttgtatacaagaaaaagcaaattagatttttggcttgctagtaataacatgctttcagcttttggtttttatttgtgtatcttcaaatattaagaatgtcttctgcaaacttttggaaatggatgcttagtcttctagtattatagctgatttaccaactttctatggtatttctgtggttttccacgtaattgctaatagaataacagagtgggctcaatcatgtagacataatatagcatgccataccagaaaatcatatatatttccctcattttcaatactaatcattttatgtttcttttaacccccttctacagacaaaacttgccaatggcacttccagtatgattgtgcccaagcaacggaaactctcagcaagctatgaaaaggaaaaggaactgtgtgtcaaatactttgagcagtggtcagagtcagatcaagtggaatttgtggaacatcttatatcccaaatgtgtcattaccaacatgggcacataaactcgtatcttaaacctatgttgcagagagatttcataactgctctgccaggtatgtctacaagtgtttgtaaaccattaatttgctatgatgataagagaactagatctccagctatatatctctctttaaaagtctttattggcttgatttttacaaattaagttccttaactgtacctttttgatataaagcttttttttttttttttttttttttttttttttttttgagatggagtcttgccctgtcgcccaggctggaatgcagtggtgtgatctcagctcactgcaacactgcaagctccacctcccggcttaacgccattctcctgcctcagccttctgagtagctgggactacaggcgcccgccaccacactgggctaattttttgtatttttagtagagatggggtttcaccatgttagccaggatggtctggatctcctgacctcgtggtccacctgcctcggcctcccaaagtgctggg

SEQ ID NO: 62557 - DNA, 1012 bp, Homo sapiens
gagacctcagtacagatttgggtggtggagaactttaattgggaagcccttctggtttacactccccaagatctgttctccactgttttcctctgcacctcctacaaaatattctctgaaatgctaaccaagttatcttttggtctggaattttttttcatttttgcccaactgtcatttaggttttatagcagcagctactctcaaatatagtttttttaaatctgaaattaaacccattcttgaacttaaacatacatctctgtctttctcttgggatatttccatgccattctgtatttccttcttctctcctttctgcatgcccaaaattctataacccagcacattctgacttagtgcctctcccctagtacatttaaaggacatttcttttaccgaacagctttggaactacagcagtaatagaaacagaatgagaaatggacctaatatagagatttgggggggtctgaatcatagagtttgagatgccatccatagaacatcccctagtgctgaaatccatatagatagatgtgaattgttttctggaatcctttttatttttaatgtcttggggggtttgctggttgttagctttaacttccttatctaaaggaagatggaaaatactgttcatttctgtaaccttatggaaaaattattgacactcattttacccaagcctctgtttgaaaaagaaactggaccacactagggacaatgatgtgccttcatagcagaacaaatgctgttctgttttaaaggaccttttgtaaaaaatcattcgccaccttctgtgttctttttctttgcctcctccccctactgaaagctcggggattggatcatattgctgagaacattctgtcatacctggatgccaaatcactatgtgctgctgaacttgtgtgcaaggaatggtaccgagtgacctctgatggcatgctgtggaagaagcttatcgagagaatggtcaggacagattctctgtggagaggcctggcag

SEQ ID NO: 62558 - DNA, 1810 bp, Homo sapiens
tcatgccactgcactccagcctgggcaacagagcaagaccctgtctctttctctgtctctctctctctctctctctctctctctcacatacacacacacacacacacacacacaaaagaatattattactacttctcaaatatgttttttaattcttatttcgctacatagaaaaatagaaatctttcataacctacttcatactttggaaataaactctttaatagtacaacaaagcaaataaaaatggagttatatggtattcggggtccatcattttgctaagagtgctgggaccagccttggggatacagcaggcagttgcttacatgagaaaattttagggcagctgagaagatttctgtatccctcagaaaaaaagaatctcgtctccaaataactcctgaaatttcagttaaggagattcattcctttagctataaaggttctgttacctgttaaaatacattgtgttcccatttggactgtaaatgacagtaaaccttcatcataaattgggagtttactgagtccttttttgaaggcagaaagatcaagaagtaagtgggcagttcttggcagatggatgtgaaaatgccaaaggtaaaaggctccacagttttgcttgggattggcactaaatggcaagatcttttatgttagttacaaagaaaaaacaatcattgagaagatggcttttgagcctttctaaagggtaggtgaagtaatccaggatccagcactaattaccacttttttcccctatctctttatccacagaaacccattcccgctcttttgagtatccttcagagttctgactatatccccttgtctttgggcatgtttatcctcttaatcccatgataaacccatgaaattccaaatacttatacatcccgtgtcaacttcctccattattccctcgactttcttgttgctgcttctgtttttacatgttgactttattcctgtgtcagttttcttcccttttttaaaaaaaaatttactccatcagtttctcattttcttctttcaagttgtcttaccaagcctaatacgtcaataaagtctttctgtgttatacttttccccatatgctagctttgaaaggttcttccatttctactaaccaaaaatagtaagtaaatacagttttctaataaagcttttatctctaagttttaacttggtatttgatgttgtattttatatctagatggatttgacagtcttcccctgggacatgaactctgtagttttctctcttgaataatactgaatatgctgtctgctcagtaatggtaactcttaaaagtataataaaagaccacttgggaaaagtcaattttcttaatcagcagatcacattttatgataacattctgaatttaatatttaacgtttatcatgtactcacattcttgtaggtactaggcatttcacatagaagtagtccctgttttcaaagatcttccatcataaaaggttttgacttaaaacataaagacagaagccagttttcagtacctagccacctctttctgtaacactttgatttgaagaaattcagatactttaccaagacatggtaaatgcagtgaggtggaaaacaagatcagaagcttatgtgagttctctttccttagaatgtagatagtatcattgcataggaagaaagtcttggagtgctagagattaaaagaagacaggaatctcaggaatggtgggcattgagaaacaataaagtagttaagaatgtgggtgggctcaggagtcagacttaaaatcttcacattcaaaatctatt

SEQ ID NO: 62559 - DNA, 1012 bp, Homo sapiens
ccctccacaacttgcccatatttcaagcagtatgtcttaaggacacactggcagcatcccatccccttccttctcccactctcccagtctggccctctctctaaatataaggggtggaagggcgcatgatggtcaaatataggtaacagattgtagcttgagtaccatctaaatctcatctatcacttccagagtgtgggatgtaaatacaggtgaaatgctaaacacgttgattcaccattgtgaagcagttctgcacttgcgtttcaataatggcatgatggtgacctgctccaaagatcgttccattgctgtatgggatatggcctccccaactgacattaccctccggagggtgctggtcggacaccgagctgctgtcaatgttgtagactttgatgacaagtacattgtttctgcatctggggatagaactataaaggtaataaggcatttttcagtaagtttccaacttagaatgggggaattcatatgaaaatttgatcaagggcaatttcatatttaaacgttgctacagaaaaatgtaatatttaattcagagactagtctacaagtgaaaaggtgtaataagtgagacgttgtgtgacaatttatcctagatattttattcctataaatagtggtgagtgtgagaagagactaaccctagaagagtaaatcaatctgaggaattctcatgtggtaacagccaactgcaaattagcctctgttaccatgaatttaaattgtcctttgttttatttgtttgagaagacttccctctaatggttcagtcctgttttctgcttctctaagactccatttgccatagattttaccaataaaagcaccaaatcaactgctcaatgccattttctttttcaggtatggaacacaagtacttgtgaatttgtaaggaccttaaatggacacaaacgaggcattgcctgtttgcagtacagggacaggctggtagtgagtggctcatctgacaacactatcaggtgagcag

SEQ ID NO: 62560 - DNA, 1028 bp, Homo sapiens
aagaagtgtctgccgtggcagagggggaggtgctttgtgagaacaggacatcactgataatctgtatctctttcagtttggtgacttcaggaaactgctttcttagcttggtcatttccttctcaggcaactgcgtgcattgaattcgtttttatgcctggaagaacctgtttacagaattatgtaaagccctgtgctttgaaaatacattttacatttgaacttaaacctacatatttctgtgtgagttatatagcagaaaggaaataaattacattgaaagcagtacatatctgtgtgggtggtgattgattttattttatgaatttttagaaggcatatgaggtgtattgttataacattccaggcttagaaaagaatacgtgaaaattcacctgacttaattttctcttccagattatgggacatagaatgtggtgcatgtttacgagtgttagaaggccatgaggaattggtgcgttgtattcgatttgataacaagaggatagtcagtggggcctatgatgggtgagtgtgctaacagagtgtaaaaaagagaaaatctacgtcttaatccttccttatgtttatggtgttaaacataaccattccttgtttctaaaagcttatagattttacacaaaatatctgataccatatttctttaatccgtgtatttacctctccttggtttagtgtcctgaaatattcttcccattcattttattatacttgtttgcacatggttgtcattcatattttggttatttggttatgtatttgactgttttgccctgtaaagcaaagaacaagaaaaacccagtgttaacaggctacccatgtaaaagggtaacctgttaacaaaacagaaacactagagggcagtatttggggacttagtgtggtaagatcttgaattttgatttcttgggttttttatctctttgagtaatttttaagagtacagttctcttgtcatcacttgtcatcctagcatttcatttatgagtttagtcatctttattttc

SEQ ID NO: 62561 - DNA, 1823 bp, Homo sapiens
caatattttcttattgtcctggctttgatctgtacccacctgtcttggaatttgtctgctatgtaccttgaggaaacatggcctattaaaagatttttggaagagctacacttatcttatttaaatcaaaagatgagggcttgcttatataaactccattgctcttacatggaccccagtccctcagtacatgtgacctgggccactcttagaagtgcccaggaagaggatgcttcacagttgtagatttctaggtctgtgtaatatcattaaaaggtctaatgtacaagatctcctcttgatcccaaagtatggtataactttactgttaactgtcttcagtttggttaaagctagcctgtttctcatttgtaggttaatcacgtacatttgaactatactcaccatccatatttattgccatgaatttctgctattcttccctgccttctcttacatttgcttttaactaacatttttgtcccctttttgatctttagaaaaattaaagtgtgggatcttgtggctgctttggacccccgtgctcctgcagggacactctgtctacggacccttgtggtaagagccttgctgtttagagagcattggagagcaggtgggggaagaaattaaacgttgatgtgctgtggaatatggatttgaatttaatagttacaacctcacaaaacctacaactaagtggtaaggcaaccagtacatgacaataaaatatgtttatataattcctttcatccaaaaatgctttagagactatatatggagagaaatgtggcagctgtttaacagctgcacagcaactctacacaacagtttagtgcagggagtgaataagaattctgtatccaccagaaacagcagggggtactaagggagagagaatataattattcaaattggaacctgtccaaaatctgaggacctgtacacctgtgccttcaaaaagtgccctgggggccgggtgcggtggctcatgcctattatcccagcactttgggaggtcaaggcagatggatcacctgagatcaggagttcaagaccagcttgaccaacacggtgaaaccccatctctgctaaaaataaaaaaaaaattagccaagcatggtggcaggtgcctgtaatcctagctactcaggaggctgaggcaggagaatcacttgaacctgagaggcggaggttgcagtgaaccaagatcatgcttgcactccagcctgggcaacaagagcgaaactctgtcttaaaaaaaaaaaaaaactgccctgggaatctgcatgaatccccctggtcaaccccttagttctgcagcctattcatgaggtagtgcctccagcaacttgagcccatcttttttgttccccatatacccccttttgacatttggggaaaaaagtgattcaaaaggaggaatgcactaaattatttatcatgttgttagccaagggcccagattgataaatgctgcttccattagaaaattagttggagcaacagggtggacagacaccactcggagaaaagatgagagcaagcatttgaagcccagtgttctaaatcctgactgtcatcatttaggcattcttggctctggagaagagaaagaggttacatttcttgtcttccttgttggatttatgtgtgtatgtataagacagggtcttcctctgtcacccaggctatagtgaagtggcactacatgttgctgatgtatatcaatatttcatttcttttgaaaatttgctgagtagtattctattgtatggttatacccattcactgattgtttctcgtttttggctattaacaaa

SEQ ID NO: 62562 - DNA, 1016 bp, Homo sapiens
agtgcaacaacttttgggtggctgaggtgtgaggatcatatgagtccaggagattgaggctgcagtaagccacagatatgccactgcactccagcttgggtgagaatgagaccctgtctcaaaaaaaaaaaaagaaaaaaagctagattgacagtgtctttcagcactttaatgatgtcattccattttcttctggcttggtttctgactagaagttggaagtcactcatctccattctgtatctttttcctctgggtgcttttaagattttctctttatcattagttttcagcaatttgcttatgatgtgtcttggtgtggttttgtttgtatttttcctacttcacattaaaaaaatagaaattgtcagagcaatttgaagaagaaggctaaacttatgttgtctacaagaaagctactttaactataaagacacatacaccttaaaagtaaatggttagcgaaagatataacacatgttataggctgaattgtgttcccctaaaatttatatgatgtcttaaccaccagtacctcagaatgtgactgtatttggagttataggagctttcaagaggtaaataaggttaaatgaagtcattggagtaggccctaatccaatatgactggtgtccttaaaacaagaggagattgggacacacagagaccatgtgaagataaagggagaagatgaccatctacaagtcaaaggaagaagcatcagaatgaaaccaaccctgccaacactttgatcttagaattctagtctccagactgtagggaaattaatttctattttttgagccccctagtgtatgccatactttgttatggcacccctagccctgatggaccattctaacactagtcagaagaaagttggggtagctgtattaattagagagagagcaaacctcagagcaaagaatattatcagggataaagagaagtgttgtataaggataaaggggccagttctccaagaagacctaacaatccttaatgtgtacacacc

SEQ ID NO: 62563 - DNA, 1035 bp, Homo sapiens
gtttgaggttacagtgagctatgatcacactaccgcattctagcctaggtgacaaaacaagactctgtctctaaaaaaaatgatgatgatgacacctgtaatcccagcactttgggaggccgaggcgggtggatcacgaggtcaggagatcaagaccatcctggctaacacgatgaaaccccgtctctactaaaaatacaaaaaattagccaggtgtggtggcaggcgcctgtagtcccagctactcgggaggctgaggcaggagaacggcgtgaacccgggaggcagagcttgcggtgagctgagatggcaccactgcactccagcaggggcgaaagagcgagactctgtctcaaaaaaaaaaaaaaaaaaaaaaagatgatgatgataaaattggagtggaggtaacattgtttagtaaggggtgtgagattgttttccagtatgctgggaacattctacatcttcatcagggtggtaactgccagtggtgtgctagaacaggctcatactcacttatgagagccaactattagatattcatgaattttgccagctggttgactatgactagcttataattggccatgataggagtttttaatgccgtggaaatctaccgatggttttacaaagtagcaaagtttggttgataaacatttatcagcatactgcttcttattgctcaccaatccttgacctctgattgtagaaggaacttagaagataaaaaccagggaggtagtaaggaatgctctcatccaccctacgccaaaaagggttggccatgagaaactattaatagcatgctatttagcatgtcttggccaaagagtattgctttgtttacagctgcctagtatttgacttttccatgctgcctttagccaaagtaaattttctctatttttttaatttatttatttttattttattttttttttagacagagtctcactctgttgcccaggctggagtgcagtggagtgatctcggctcactgcaacctccacctcccaggttcaagcaattctt

SEQ ID NO: 62564 - DNA, 1069 bp, Homo sapiens
aatcagtttgaaaactaagtactgtaatgacccaaaggcctgtgatgtttaagttcccagatcaaacaatacctacaatagagacctttcaagccaagtaaacagtctgatgtctaatgtgtgaatggaaacatctcttggtgaaagttcacactgacatataaataaaagggcagattttaaaaggaatataaaaagtagcttttatatccctatccctattcctcaaccctccaaaaagaggacctgtcttttgacctctgacctccacatgtcctcccactcaagtctccaacctctctctcaggcaggggaagatcctaaaatacccaggtggtccatacatattgtggtatattcagatcatacctgctgttctaaccagttcgaatacactaggttgttaccagtttgagaaggctgccctagctgctgaggagcgttgctgtcaggatttgccacgtgtgcctcagttctcgtggcggaagtacatgttcgctacacgtttctgcatctctctttgcagtgttccgctgaggacagtgattcacgcccagctgggctgtcctcagcttctctttctctcacagaggacacggttcgtcgttcctcagccaggtcgcacaggctgtgtgcccttagacaagtaacttcccagaccctgaatctcttgatgagtaacgtgaggggcagcactcacctcacggaaccctgtgaaggctgtgtggagatactgcatggaaaattcctagtgcttagcacagtggcgaatacataatatgccctcaggaaaaactggtcatgagtattaatattgcaatctccatatacctaccccctcctttgcccaaaattttctcttccttagacttccgtgttactttgccatttttaatattcttcctgactctctgattatttgtgcttctttccccctcactcccaagagtctgtttctggcttttcttattatttttattttattttattttatttcattttattttattttattttatttcttgaaacagggcttcactcctgtcacccaagctggagtgcagtggca

SEQ ID NO: 62565 - DNA, 1062 bp, Homo sapiens
tcaaatttctgtctccagtccaagcctctgccttaatctccaggccacatttccagctgccatccacacagctgtccttgaagatagcaagagcacttctagtgctcacatcctcaactgcactgtcccctcctttacactgctggtaccctgcagccacacagccaggccagctttccttgattcccccacttctgttactggcaccgccatgctcatggccactcaaaaggcagggcccacagaccatcccccacccctgccctgccattctacagggcaagtgaaagctatgccaaccgtgggcactctcagcctcaagacatcagagtcactctgcttgaacaccacagccctgagcatgtcagcaagccctgcctttagtataacttcccccatcaggccaggtcacctttgacagaagctcctgcatggcataggcagagagcaggcattaggaaggacccctaagccttttccccattggcagctaagtgaatgttcttttgtcttcaagcaagtaagaaatatcaaaaaaggggctaatgactatttgctctgttttcacacaggacccattaaagttgcggtatttaacgtatctgccaataccaggatgagcaacaacagtaacaatcaaactactgcccagtttccctggactagccgaggagcagggctttgagactcctgttgggacacagttggtctgcagtcggcccaggacggtctactcagcacaactgactgcttcagtgctgctatcagaagatgtcttctatcttttgtgaatgattggaacttttaaacctcccctcctctcctcctttcacctctgcacctagttttttcccattggttccagacaaaggtgacttataaatatatttagtgttttgccagaatctctcttgctttgccattaagcagaagaactagtttccctgtatagcctgctgggagagacccacttctagggtatgggggatgcagcttcaagcccagtgcccagtgtctccctgttaactgcaggaatgccaagcacctggccagagcagccca

SEQ ID NO: 62566 - DNA, 1028 bp, Homo sapiens
caaggtggggcctggccgagtgctgcccactcccactgagaaggatgtcttcaggctcttaggcctcccctaccgagaacctgctgagcgggactggtgacccatggctgggggtgctgaggagagccgagttggactggctacccctcctggccacccagtactccctccagcctcagctggctgaacctcgccgctccaaccaccagcttcctcagcgagcagggcccagggctctgggcctgaagcaagagccagcccggctcccagtgtctgcccggctcccagtgtctgcccagccctctcccagacaggagcaggctgccaccccttctacctcaccactgcccctcgaagaattttgcaaatggccccttgccccattttaagcaggagcaggtggctggtttgaagccccaggtatcccccttccctgctatgggaaaggccaagctgctgggtggggacagaagctgcaggggagagggaagcagccgtgctgtcaacatcatccggcaccctctggggtaggagaacagccattccacatgtgttccctctatccgtcctgcttcctgggcagctggtggtgctgggaatggggtgccccagccttggtgaggacagtgttgggaggcccaggggcccagtaaagtgcatttgacattgaacctgcctggtgtctgagctgctgcagcctctggctaccttgttccacccaggcagggacgacagagatgggaactgaaaagaggagcccagaaaggctgtgttaactgccctccagacaggactggcctgagtcagctcctaaactcacagcaaggacagcagtggctgtgaccagggagaatgttggagccaggcacccagagctcctatctagtcatcagcatcttctgcaggccctaccttagaccaggctatcaggggacatgagcaaaagtgacaagactcaggaaaccattaggaacaactaaatggtgaccgtgtacacagggatgggcggccagggaaggcttcccgga

SEQ ID NO: 62567 - DNA, 1053 bp, Homo sapiens
tcttaagcaaatgctccaggggtagaggaattgggctaggagactcccttagtttcttcttcttctttttttttagacagagtctcactctgttgcccaggctggagtgcagtggcacaatctcagctcactgaaacctccgcctcccgggttcaagcaattctcctgcctcagactcctgagtagctgggactacaggcacctaccaccatgcccagctaacttttttgtatttttagtagagatggggtttcaccatgttggccaggctggtcttgaactcctggcctcccttagtttcttctgttctttcaacggatagtgcatcagtgtttattcatcctttcaatcagtatttagttgagctcctagtatatgccaggagccacacttggtctttaggaaaccatagcatggggataaaacccctcctatctagtagaagagataggcagtaatcaaagagtcacataaaaagatgtaaaatcataaccaaattaagtgccatgaagaaaatacatggggacttaacattgtgttactgtgtgataggaatggcctggagatatgcagaagaaggcagggcactggcatggctagagggagtgcttggtcaggaaacccaattcaatgtcctgaacacatagagagataaatacgatgtcattcatgggaagacaaatgcttttaaaagtatcatggtatgtagtaaatgctccactatggatacgagtaaaacattagggaggcacacatgaggatgtgattaatcctaccaaagtggctggaggtgatagtggaggaagacttcccagtggaagtgacatttgagctggattttgaagggcaaagaagagttccacagataggaaaaaatatggagctgttgctggtagaggaaacagcagggcaaagatgttcaaggaaagcttcagaaagggagagagtctcaggacacgttttaaagtaatggtgggtggtggttggcaaggagtttggggaggtcctggctgggttcctcagtactcccaaggctggcactgtttcccaggt

SEQ ID NO: 62568 - DNA, 1044 bp, Homo sapiens
tgaagtaggagacccagcgcccctaggagcagggaacctggggcctgaactcatcaaggaaagcaatgccaatgtacgtccatctgtccaggtgtcttgcacggactgaggtgggggtgggctgtgggctgctggctcttgagggcagggaccatgtcttgttcacctcctcgcctccagtgtgccacctggacacagcactctataaatgtttgtttgaatgaatacagacattttggcttgatcgtcccagggcgggggctcagggcctggagtgctgtagcaatagcagcgtcagaggggagcagtggagaagagctgagggtcttgttgtgccccggggtagcgctctgatgagggtggagccttcccttccccaggaacagtcctcgagttggatttgccttctgcagcctatcttcatgcgcaaggacaccaagatgagtttccagtggcggattcgaaacctcccctatcctaaggatgtctatagtgtctctgtggaccagaaggagcgctgcatcattgtcagaacaaccaacaagaagtgagtagcgtggaaggcaccctgtgtgcttgtgtatgagcggggtgtagggtggggtttgatctggcgttaggatcattattcaggccggtcctgcagagaggaagcccttctgcttacaggtattggaagggcttcctctctgcaggaccggcctgaataatgtaatcagctccatcggggaagagaaacttgaatgagtatctagtatagtacctggcatagataggggctcagtaaatatttgttgaatgaatgagatgatgagggaaatcacaggaccattaacttgtggtctcaggtggttctgctgaaaggttattatgaccttggtctcctgactggagccaggccttggtaagggtggcctggtgacatcactgtcagagctggcagggagccatagcttggaaggcacccctgtctgaagtgggagtgacagtcctttaaagcagtacttgacagcagtttaaagcagactgggcagcagtaaacct

SEQ ID NO: 62569 - DNA, 1030 bp, Homo sapiens
cacccagaccagggtggccattctggcaggtggggaagtgtggcctctggccagaagccaaaaactcaatggctactcccttccacagtgtttagctttttaaggatatagtacatttaaaatctgttttctgatcatcattctgtcaggaggtggacaggatccatacttttattcttgtgttatagatgattatataaatgtatatataaagtcagcatgatgaaccagcttgctgaaagttagtgactgtctctcctgatactcagacatctgcacttcagaaatgcacatcatggcatttctctctgatttgacctcttccttcacctggaggttccataacctgccccagttctaatattctggaatgtggttactaaccaaagccagagtttctttacccatacttgccttgtctctgaagagctgggttggtgactttacttgaaggaattgattgcagtgtatcatgtccttggcctcacatattagtgagggatgaatcagggaaggaaaaaagtgcttttccaggatcccagtgttggaccatctattcctgataacgtttgtgcagaaagagggctcctagcctcagcctggaagttggccgctgtaggtggaatgagccagggtgcaggagtgagaagttgttgggttaaatctggcctctgccactgttagctgtagaatttaggcaaggtttcctcatctatcagagaagactcacagctacttcacagattttggggaatttgatgaaatcatatatgtacaggccagcacaacggctggcctgaagcaggtcctcaacagttctttggaaattggaatctgaggagagcttggctgatttgacatcggtgatagtaacactgtgggaggtgttaataggcttcactagaaaaaaggattctgtggttaaataaatttaagaaactctggattaaacaggcttctctttggtggggccgagagcctttagtatgtgtgtgtgattgtgactgtctagcagggggcgactgtgggt

SEQ ID NO: 62570 - DNA, 1034 bp, Homo sapiens
ggagagctcctcaatcattccttaaggcctcactaatggagggggcagggcccccaaatctggaagagggaggagaactgtggagccaaacagcccctacccagcatgcacccagtatacctgtgaaagagagagaatgactcccctacagggctctggcctgcccagggtggctgaatcttggctggtggcccatctgggaaggcagggcttctctgggagccaaggttagcagtctctaagggatgctgatctggggagaaggccttctgcctgatccctctcaggagccccccaacagacagaggcttgccatcttctccccgcaggcccagctctgggctactgagaggaagaccagaacttccctgaggaggctggtagcaggggtgctgccttggggattaattcccccctggcagcagcagtgctcctggccagggcccactgcccagggctcaaaggggaaaggtggaaggggcagaaaggaacccccagtctcctcctttgattccttcggccttcgggaagatggcagctctgttggggagaagggaggttgtgggtcagggtctcagtgaggtggaaggacgagagctgacatctgcattcagacatgtggctggctgccttgtctgcctcaagccctttgctgacatgctacttgggccaaaagggctggtgagccatgaagtcccctcactccatgccagggcctcttacctggacatccctgtgaagtgtccacggccttgtttctcctgtcatggcatggggaaagcccagcgtctcacgggtaaaggaagctaaggcatcaggcctggagggcgccccttttccttcatttcccccagtcattctgtggaaactccatacttgcacccatcccctggctgcagggattagcgggtgcacttgatgttgaggggtagttgctagggacaggaggcccccctacatagttgctaggggtctggcatcagggcaaagggtctgcccactgccgcggtcacggagggaattacacagtcaca

SEQ ID NO: 62571 - DNA, 1038 bp, Homo sapiens
ggctggaggtgaccctgggtaactcttggggcaagtcctgaggatgttgaggggccagtgatggagtggctgcattgtctgtgaaggtggggagtgccaccaccctgaagcatatagatctaagatttactaggtgcgtgacccctgcgccttcattttctcatctgtaaaatggggttaagaaacttacctccaaagcctgttgtgaggattaaatgggctgatacgagtaaaacactcagcacgttgcctggtacacagtatggactcaggatatgtgagctgttgctgcggtggctactctgccaccaggtaacctaagcagccgtctcatctggctccagcagacacaaagagaacaacaggcccttcagcttacttccctctgttcccgtcatcctgaaagctgctaccagacgggatttccaggagctctgcctttatcatggattcaggctctgcctttccttgctatacgacattgtcactttttgtctgtgactcttggtttccttatctacaatcggggcctggactaggacaatcactgtttgttcaaaagcctcatggctgtctgccactcacggagtttgtgccaggtgagggatgtgcaccctaaggcccactgtggcctggaggccagaccctgccagcacactcccaagcctccaaccaaaccagattgccagctgccgccaaaacagcctggttgccctagtgctgcacctttgttgttgctgctcctgccacctgggccatctccctatcttgtcattgcctatgacagccctgtctgtcagtgaagaatcagtcaacacccccagccagaaatgcttgcttttcttagctgcccccttgtagaactttccgttgttctctgtggtacctaccaactcacattttgatttgttagttggatatatgttgcagacttctttctctccctggattgaatactccttgaaggcagggacaaagtcttcttgatcaagtcacagcttacatctccctgtagtttccattaagcacaatgctttg

SEQ ID NO: 62572 - DNA, 1049 bp, Homo sapiens
tcatcttgtgttctctatgtttgagcaggacccttccttggctaggccccagggaaggtgccttgtgttgactgtctggggcccagctcctggcagctggaaggcccaagtgggtctgactggcctgacatcacaaatacccccttcctccatgggcttcctcttgctgtgggttttttttttctgccaaggggcatttgagatggacctagcactggtgccctgagcacagggcacagctgggcccctgatagcctgtgggcaggtgggcttcaggatggagagccctttaatcccagacctgaaggtgtcatagtaggtccagccacagtcacagccctaagccccactgggattgtggggtggggaaaggggtggggaggtggttggtgacctggctgctcctagggtattgagtccttggccaggtcctgtgctgccctgtgtgtgtggcaagccctgcacacatcccattgattccccttcccctttgggccagggtcatccctggtcccatgttacacctccacttccacctcaaagctcccaagttccccttttctcaacaaaggcaggggcagaataggcttctcacccatcctaacagatgccctagatttttctcctctgagcctgtgctcaagccaaccccatgcccagaataccccctctgtgcctaatgaaaccctgctcgctcttcaatataaacagcacctccaccacgaagctctccttgatcctgacccctgtggctggagttggtggccctttccactgaacacagtgttggaacactgataagggccacctggtcagccatggctgtggcctggtagaactctccctctgagctgggaactgaccttggtatcctgaactgagcacaggatatgagtgagtatcagggcatctaatgacatttggaataaatggtaagggacatttggctggagccccttctgtctggagaaggaagccgtgtcctgcacacaggctgggccactctgagagcactgttagtgcccatcctgcccaggtgtggctttgtc

SEQ ID NO: 62573 - DNA, 1053 bp, Homo sapiens
ttaacccacaatcccctagggaatgagcacggcatttcccattgttagccatttccaccacaggttctgacaagccagatctgactttgttctccttttgtttggcagctcttttgtgacagggacggcttgttgcgggcacttctcacccctgagaatctgggacctcaacaggtaagagattcatgagcccatgctggcttccagtccaggaggtgagggaaagcttgctgagccagcctctgcctcagttggctgagtggtccaggagaaggctgggaagtggtctagtaggaggcctctgctgtggtgccttctcacatggaatcattcagggttagctggaggagactgctgaagtaatttataataggtaaatagtttcatgtagaatttatgataacaacaacaatttggatttatgatactctttctctgaggaatgcctatgtggctatataaaatcccatctatccccagagatgattttgctaaaataaagaaattttgaaggtggcctacggacctataaaaagaattatacagaacagtgaaaatacatgcaggttttattcacaattctctgccttggcaggcttgacatattcccatctgattatctgccattctggttttttttttttttttaactttctaattttgaaataattatagattcacaggaagttacaaaaataagatggaaaggtgtttgtgtaacatcttacataatatgtaataatcaaaccaggaaatagaccctggtaccatccatggacctttattcagattgcactctgtgtgtgtgtgtgtgtgtgtgtgtgtgtctgtctgtgtctatgtgtgtctagtcctttgcaattgtatcacgtgtagattcagataaccatcaccacaattgaggtacagaactgtttgttccatcagcacaaaaattcctcatttaccccttggtagtcacacccatccttctcccctcctcctcttcccattgtccctgattcctggcaacttcttatgtgttctccatctctataattttgtcattttgca

SEQ ID NO: 62574 - DNA, 1019 bp, Homo sapiens
actgtggccagggagggaaagtcatgtaagaacatggtggatctctcaggaatcacatatatggagggagaatgtgggcacacagaacaataggtgtctactagttggataaaggccaaatgactccatgatgtccagtcccaaagtgtctatgtgaatggtgactgagctcagagaccttggctaccaactcttaaacaaagtgaagagtctgataggaactgttgtacagcctttgacctcctccccctcacattattactagtcagcaaataaggattcctcctttgtaagctgttgatggtgtccttagcaaaacccgccatattctaatgtgacatgcacagagaaagaacctggttgcagacacctgaggttgtatgaatgagcagtggcctagcaccctccctgaggggcagagagagactggaaccaagtcctgggatggcacaggtctggcctgcccaggcttcctccaaaggaaaatgattagcaagctgcatgatttgggattaaactgcagggagttgacacgtgcaccagggcttgctgctggcactcctctacaaatggagcactcctttcttgtgagggataggctttacctattgtgtacatagatacagtagctcttattgtcatggatcctacttctgtagtcctactgtgtataattcatgacgcatagcatctctttacaaacagagtggttatgaagcagaagtttgggggaaagcactgtcagagctgccggaaaactggaattctcataggcagctgttcccaggctttcaccactcagaaagccatcgaggtaaagggtctctgtcaagtcccggatggagccaagatatcatgtggtttgtgcaataatcagaatcacatttaattcagtgtgctactaatatgcaacacatctttcaggtaacttcaaaatgagtattttgattaccattcttttaatttcttaatttctgttttgttgttttatacataagtgatacataaatatgttctaa

SEQ ID NO: 62575 - DNA, 1054 bp, Homo sapiens
atctccctccctgcagattccgagcaagttatcatcagggtctaagctctttggcttttccacagagggatagcagaatattgggggtgggatgggaagttggttttctctagtaactggacttgcaggtacctcaagtcagcagctagcagttgtctagcacctggcacaggtactgtggagaaatgaaagcctgaagtaagatgggtcacccagccattaaatcaggaatatataccactgtcaagtgtatttgcaaatttgtgacctttcttatcattcttctgaaaggtttgtatcccatcccaagtggcttagtgggaaagaaaggaagcttccaatgaaatgactttttggtcattttttggtgtcctactatttttccaaagagaaaaatcttcatggttttacagtttgggatttcagaaatgcaagacaaaaacatgccattgggggaaaaaaaatcgattccaaagcaagtgttggtgtggtgtgagtgggtggaactacacttgaggttggatgggatgggcaggcagctgcctagggaagggattcccaggctttagcaactccttaagtgcctatgtgtaaaactctcctacttcaaagaactacccagcaagtagttcctcccctcatctctctaaggtggtagtcacccaaggaaggtacagggtcagcactctgaggcctggtggaaaagagctgatgggggcagaacgacctgtgggtgagagatccattccctagaactaatgagaggaacagataaattaaggtcaccattggaatctcctcacattgtaggcatccctgcccaggcctgggacccagaaaacatgattcttgagaataagtgggttctggcagcctccattgggaaagccagacatacacatgactagcagtactgcatgggtgtgtgaagacttggggaacttgaggtcctagagttttgtggtatcgctgactgaagccatgcttgcaccccattcctaaccaccaccacccaccccgccaggcgatagaaaacctccctccagcctcttga

SEQ ID NO: 62576 - DNA, 1014 bp, Homo sapiens
gggaaggaccaggtggcatgtgcagtgtgttccaggcctgtacaatccctgggggacagagctgggggctcagagactggtgtgctcctgtttctcgaaggaatgtgcagaggcgcatgcattaatggtccccacacaatgcttgcattttttttccaggcagaggcatcttccccgtgaaaaggctgccgaactcagggcccaggcgggagatttgccggcatagtggcgttatttcccaccctgcgcttagtcacttggagctaacatgggagaccaacaggccgcgtctctcgagagcccgatctttgtatccgatgtgtgctccccctctgccctgtcagttttgtgtgttcacggagtgttgattttaatgcgggcctgtgttgggctgggaggccaggctggggggcctcaagtctttgtcttgcagggctttttcttcttggagggtcttcggccctagaggctggtggcagatttgagaggtaggatgagatgccaactctggctggcaaaggattcccccatccatgtgtctgtcacagaccactgtggggtgcctagaaaacaagagcaccttgggatgctcgagcacacacttgcttggcaccccaccaccccttgaggggggcggttagttctaccccatagggctgccagcttgaagtgagttaaaccccccttgtgactgggtctggcaggagcacagattgtgagcctcagggagccaaagcagggccttgcttgcagggctctgagggaggtgggggcaggcaggaggggtgctagagcacaggtcagctgcagagactactctgcaatcattaagggacaggagagaatagagaccagacagaaaagaggcagagtgtctggggaagcttcaggaaatcacaaatgctcatctcaggcagttgaaggggaatgtccctaggaactagggcctaagtggaggcattttccccagtgaggagaactggacatggtcacaggtagagccaccaaggacca

SEQ ID NO: 62577 - DNA, 1044 bp, Homo sapiens
ggtcagcaactgagctagagatggtaagtgacaaagtgagggaatatcgtggatcccagttgttcctccatgtgtactggtatccagggcgaagcaagagagactgatttagaatcaagaaaaaagctactgaccacggatgttgccatttggagtggtttagcatcagagccataggagctgctcaggttcagggcttgcttgggcagctatggctgtctgaaaacttttttttttttaaagagatataactaaaaactttcaagtcctcggattttgggggtagtaattccacagggcttgtcatttgtgtttgaagctggtggtgaggagggcggagtgaggagaagcgagggggtggagatgggaagcaaagaaggaatcagagagagaaattttattgagggagagtttgctgggtttatgggagggaatctctcccctcctccccattcggatttgaaagggccggtgaatctttgattaggtgcaggtcaaaagaatttacacattgtgaccttaataactagaggtgattggcaggcgggctgcagggagagggccgcggccccctttcatctcacttagcacagaggagagacaatgggccagccgattttccttgttgtcccttgtttgaaaaggtctggtgtctctactaggtacctgtgacatgggggtcttgattggggtctcataaaggcccctgtcagtatgtccaaaggccaagagtacaaaagcaagcagtgggtgggggtctcagctgaccactgaagaagggaggggagggcccgggaggcagtggagggagaagcaacccccgatgggagcccttatagagggagggaaggaggggggcagagaagggccatttttgtccctaactcatcaagcacatctgcagaattgtccaagctgctgcctcctggtttcaaaagaaaaaaatgattgtttgataaaccgtccctgattcaccactttctcacaacggtgggagacccagccctgacctctgtatgatttcacgtcaggaccaggctttct

SEQ ID NO: 62578 - DNA, 1012 bp, Homo sapiens
ttaacatttaaattaagggtttgtttttcagtctgttttataggcagggacctttcatggcctgtcacatgcagcacccaccccccctcccaacccaacttcccaagcaagtgtgtaattgtagccactgctgtatcctaatctgtgttgcagtcggaggttcaaagggaattcctggagctggagttttggaggtacaagatgtaatagtcaggatgtcggtgttactcctcaaatgaaggtgctgtgtaggagctctttctcctcttatctgacctgtgctttctcagctcttcaagggacacacacttcaatctgactccgacccctcccgcccttccttcctttgggccatggggcaggtaggaaagggtgcagtccattcaagtgatttctccttatattacaagttagggccggggacagactattctaagatacagatttccatgcttatcttcctccttttgattattattattatattttagcctcacaaatacttccacctaccccactgactcttggagaagtaataaaataaatgggattaccatctgagaatttgtaattacagtagggtcctttggtcctaaaaagtgtattctaacatggatatgtgtatgcataccatacatactagctctgcatgtaccttgttggaaatagcttactgattgaatttgataaagctattctcccagatctatgtattcagaagaaactctactacaacctcaggtttctgagcttcctttcacacagaaatatttggcagcatttggggaggttttgaaaagacatccctgctctggtctccttcccatcagcaccctgttgatctgtagatgacaagaatgtgtactagacacacatgaagcatctcattgcttcataacctctgagggcttagttttcccactgctggtctctaggtagctttcttctctggacagtgaagagaggagcattgggacctttctctctttctgttcagaggctgagagtttcc

SEQ ID NO: 62579 - DNA, 1090 bp, Homo sapiens
ttaggcccttcagcttctttctcctcaccccatggagcctgcacccctcctcctactcccttccacaactccctttcaattttttttctttctaagaattagagccgattagccacgtcattaattcttcaatttgacggctgatatagcaggacctgaaacacattgctgaccccggagaatggagaccccattccttagcatattgacgatgagagaagttaattaaaattccacagagcagaggtgtcggctaacctataaacctgtcgctgttcaaaacaaatcattctagcaatcgtaggaaagagggaaggaaagaccagcagggagtggagaggctaagtgtgtgggagcggagagtggaaaatggagccattgagctttgtctcctcctcagtttcttcctaatgctgcccttttaaaagccagttagccagacctgggtatccgtgggctgaatagaaggaaagtgctatggccagtgagaaatgacaagtgtgctggtgactttgccttaatggttgcttgtggacttctgctggttttgggagactggagtggaggtggtggtagagagaagctctcagggccggagatggtctgtgcgcttccttcatatggattgaagccaaagaacacaaacaggctctgccctgcatccctacccaacatttctctattccagcctcctcctctggaatgtgttaggctacctcttaacagaatagggcacaacaactattgaagatggtgtcaataaaagaggttgaggacagagtctgccctcatcattaagaagcatttaagattacagtaaactgattttgggttttttggccacaacttggagactgactttggggaagggcctagctttctggcattattactgctactacatgactgccactactactagcagctaacatttagtagtcatctgctctgtgccagaccctctgctaaggtctcgatgtgtctcatctttggtgaagacctaggccttatgttttcttcccattcatcttcagggtcttcctgtcctcttcttggccctgggatgattttttgagaggggtctcacagt

SEQ ID NO: 62580 - DNA, 1052 bp, Homo sapiens
aattggtggcatgcttcctcagccgctcctggagaccaagaaccttgttctgtggtttgcagaatctaggaatcaaccttccctttccgtggaggacattagtgaattcaggcctaggccttccccatagattttgtaatcagagtccttagtgtttcctcaccccctaagaaagaatctgcctcccagggagtttgtgtcagggaaaaggcaaagctgtctttttagctgggctgcctaaaagagtacattggaaatgtatctagttattgccaaagaggactgactatggagtccaaagagtaggccagaatcatggcactcaggaaaagttgtggtgtttacctttgttttctgcccctcctcatttaggatcctcttagtatgtttattttcttttcactgtgttgggaaaagtaactcacacaatcatcccatcccccacccccatcatacacacaaactctaaaaaacactttctccttttatagggaagagttatcatgtgactcttaagaaggcaggaccacccctactccatcacctaccctttaaactcaaggaatgtttcctttaaagttcttccatctaaggtcctgcctgagttttgtgtgttccccttatagcactgctgggaccttaagaggtcactgatccatctggctgcctctggatccctctgttgctgctgtcttgggatagtcctgtacgtctgagatttcctttctgtttggttaggggcttatgtccctgtgtgtgtcatctagggtagggtgaagtgaggggggagccctgtgcttaatgggagatgtctaaatgcactgactgctgagagggctctgtgagtgttgattagagttaagcccagagtggctgctaatgtacattcctgactgatagagaccagataatgtgctccaagcaatatttttaacctgtaggagatatggaagcttaaaagagttaagcttttctgctacttttggtgacactaggtgttaaattccctgctgacgtgaatagtattggatcctgggcattatcaacaaaca

SEQ ID NO: 62581 - DNA, 1049 bp, Homo sapiens
gtaatcccagcactttgggaggctgaggtgggtggatcacgaggtcaggagatcgagaccatcctggctaacacggtgaaaccccgtctctactaaaaacagtaaaaaaaattagctgggtgtggtggtgggcacctgtaatcccagcttcttaggagactgaggcaggagagtgatgtgaacccgagaggcggagcttgcagtgagccgagatcgtgccactgcactccagcctgggtgacagagcgagactccgtctcaaaaaacaaacaaacaaaaaagaaattagtgtatctctccctggccagcaaatttccaggcagacatggcagttatcactcttgtcccaagcagtgtaccttgtatgggcagtggagcaagctaaggagacacaggagatatatgggaacctaaagtggaattttcaaattcttgctcatgatttcaaaattctcttcaaaggcgtactctgtaaggggcttagagctcttctccctattgcctattaacccatccccaaacagtgccattcctgtagcttgtgtgctctcttctcttattgctgttaactcagctcacccagaaagtactattgacactcgccctccaatgttttgaagaatttaaaactcagaaaagttgaatgaattgtaccatgaacactcatatatgcaccacctaggttctacaattaatatttggctgtatttgctttatcatgcattttaaaataagttacagatatcagtacatttatccctaaaggcttcagtgtgcatacatatcattgactagagtatattagtttatgggtttttttttttaagaaaaaaatatatacagtgaatttatatttgagtaaactgcacaaatcttgtgtatcatttgatgtatttcttttctctttttttttttttagagagggagtcttattctgttgcctaggctggagtgcagtggtggaatcactgctcactgtaacctcgaattcctgggctcaagtgatcctcccatcttggcctcccaaagtgttgagattacagttgtga

SEQ ID NO: 62582 - DNA, 1040 bp, Homo sapiens
cttgtcgcccaggctggagtgcaatggtgtaatctcggctcactgcaacctccacctgtcaggttcaagcaattctcttgccttagcctcccgagtagctgggattgcagacgcccactacaacgcctggctaatttttgtatttttagtagagacagggtttcaccatgttggccaggctggtctcaaactcctgacctcaggtggtccaccctccttggcctcccaaagtgctgggatcacagttgtgagccaccaagcccagcctagacctgttatttatggagacataattttatgtagtgtctccccacctctacctttataaatttaacttagttttaaaaataccattacttgctatagttgttgccaaaatgttttgcaatcctcacatttgtcatttctagtggcagtatattccattgcattagtatactattctcctccacagacagaccttcgggctatttccagattttagctctaatatatagctgcagctataaatatctttgtaaaaattttttcttttgaattatttcttcatgatacagtgctcaaagtagaaatgctagatcataagctgtcatttaatgacttttgtcttaacagaattcctttctgaaagactgtacctgctgaatgtgctataagcaacatgtaaccaaatccacactcttatatcaaattaaagctagtgtcagttttttctacttaatagatgtgaggtgtactttaaaaattgttttaatgtacatgcctgtaaactattcttgggggatgtttcctccaatgttttatattgtgaacactgtgactgtccttatcctctgttggacatggatgatatggtattggagacagggtgttatcttgatagatttttatcagctccctaaaagttttagagagaaaacttatatctacagtgttagttaaaatttttcccctactctgttgcttttaatcttttttcccttcctgtagcatttcaaatttaatagcattaaactcaaatactttataattgatacatt

SEQ ID NO: 62583 - DNA, 1261 bp, Homo sapiens
gaccccctttgactggcagtgacacgttcccacagggatggagggatacctgttttcagagaaaggagatatattaaaaatttctttggatttttcaggtgctgaagccaataaaaatatagatatgatttggccaacagctagggaaactgtaaccatccaagatggttagacaaaagatatgaaaaagctgagttgttaaattgtttttaacaaagtagagctttttcaagtcaaagccaaattgaactttttttttttttcaaagtctaaatttgaaggactacagccaagtgttttgattatgatattcttcttgggagaggatgcctgcacctgctgtttggtagcagcttctaaagttcaactttgaaagtttcttggtgctatgatcaaaccctcaggggagtattttgacccctagtaaagtgtcacatggcagttaagtgaccagggaggtgagagaagtgctgtctttattccaattcaggaaatatatccattcttttactttcgttttcttcctgctatgatccagagtactccctttttagtttcatcaccactcattaattttagacctaattcaagagaagagatataactgtaaacagtttcttcctttatatctgggagggatttgcagatacgaggagcagacagggaagtctattttttttttcatttagatttcagttcctttggcccatcctgttaagtatcttttactgtcctcagcagtagtctggtagtgtaggtggctctatagtgatttaaaaccagggactacattcacccaacagaataattcagtaaaagattttagccttaacatgtgtatagccaagtcctaattgttcagcctgaaaaataacaaatgtttgatattggaggaacaatttctaatagttataactaaactaattagaagaaaaacgaatgattattagagtcacattagtgacaacaccattaatggatattatctactacctatacttatgtaaagataattaactttttttgtagtgatttataacatgtattgtacttcgttttaggtgtcattttaaaaaacaattgtgtgaaatattatccttattttataggtgaagaaatggataattggagaagttagttacctgggttgtataattagtaagcggtagaattgggatatagatcccagtttcctaagtctgccttctgtgctttttcagttttatttaatctgctctttagttaaaggtaaataggaaga

SEQ ID NO: 62584 - DNA, 1044 bp, Homo sapiens
gctaagggagaacttcatcccttatcttggatgcagtttgactttatcataatggcctagaagctggagatgtaaaaacttgctgggtgacgtctggttcatattctcctcatcccttcattcaggctggaaggtcaccagggattttgaagtctggtcacttgggttgagaacctgttttgatgattaatatagaacacagtttcatgattaaaaacaataaaaaacaaccctgggaagcagagcagtgtaattatttctcacatttcagatgaggagtctagggaaaagtcattttgaaggtatgagaacaaagtctacctcttagtctgctagtgcctaattcatgactcacttagaggaaggcctgttcaccgctccctgccccccaaaaatccgcatctttcttgccattgttcatttttagaaagtactagatcagcctttccaaaagttgtattgtgggattcttgaaaaactaattctgtaatcaaatgagtggggaaaatgctgtgcgccacattccctctcttggggatcacaatgtccattggggattaaaggcactgacaagtcctgtgatagagggacctgtttacttttgtttcagccagcatcatgcaaaatgttttgaccataaaattctttttttcactgctaaatatctctttaacatcttgcagaacacacatactggtcaagtgccgtgcaaatacagaacctaaccaatgccaggaggaaaaggatgtgaacacagccaagttctgaatcttaagctcatgcacataaaggacccagggttatgcttagtgcttctgaaactgtttagacatttttgacatgtgggtgccatgttaagatactttatctgctcagatttcttcccttgagcctctctagaataagaatttagaggctttggttgaattcttgaagatgtggtatgttacacattttaaggaagggcctttggagctacgggtgttgttcaaagtgtgacttgccaaagggaggaccatgtttttggaaactcttgcttgagca

SEQ ID NO: 62585 - DNA, 1101 bp, Homo sapiens
attgccaaatgatatggctttattatttattagacatgtgtgttttgatttctcgcccatgtcctagggtaaggtgtcctggccttctagggaagttattttgccatagcacttgataaagagcagggtcactgctcgggttttctggattgagggaagaagttatgcgtgttacagcaggtggagagaatgtttaccagtgtggtccgtttctggacagctgcagagacttaataagccactgagagaggtggttgtcatccctggagggagaaggcatgcaccccagtccacttagggagtcagcgaacccgggcccaaagtacagcaagagtatggctgcttggatagtggcagggctgtcgttcattgctttgggctaattaactgcagactagataagtgagatgagtttttatcagcattacacaaaacttgatttgaccagaagccacataacctcactggccctaggttttattacctataaagaatgggaataaccttgcctggtaaaatgaggcttaagtgtagaatgctggctagtacagcattaagcacatagtaagcacacaataaattgtaaaacggaactttttaattgtttgggttctcctctagttagtctgtatatagcaaaagtggggatggtttgacttagaggtgctgactaaagacaaagggaagaacacgcacacacacgcactgtgcttcgtttctctcacctgtcctgaatgtttttggaaacatgacagcagaacctgtggacttatggcctgcactccgggacgaagagcctcttgattctcagaaacacaaactgctaaggtttactgaccttccggcccagggcaagtcccattcagtttggctgttcctaactgatcatagctttgttgagtaagatgaactgctttggttccttgtgatttgctaatggtcttatacttgtgcttgaaggcattctggccactttaaaaccacaaacaaataatttgcttccctttaggcctcttgcccgaacagtgaacactaatagatatcctaagcttacttttcttttttttttaaagggacacaaagatagttggagtcagtcat

SEQ ID NO: 62586 - DNA, 1011 bp, Homo sapiens
tacaagctgagcagtgatgactgacttgctgacctcgatgccccaaacccctgccatgggtttcagggacagaggaggtgccatatgtcaatgcaggctaagtccaagaactgctttctcagggaggggagaggctgggctctgcggcagggacggcaggagagccagcgccttctgtcccttcctaaacagtgaagtcaccctcactactttcttgaggacagcctataagagatgattgcacagagaggtgaacaggacaggcttctgtggcaagttggctgtctaaggggaggggaatgggaaaggaggcatagaattcagccctgcctcctggcctccagtctaagaggccagcaggcaggattctccctcctcctcacccacagaagctatttggtcactgggctgagaagcccagctgtgatgaggctgaaagagaaaagacaattgagttgttgatttctagacactgggctggggaccctggtgactgggaagccacagggaagaggcaggatcctcctggcaggtgtctgaggttctgggaaagcagcctgctttgggctgtgtgtttagggagagctgtccccatccctagcaccttctcagcagagcagagcctggtgatgttgaggggctgggggtggccaaagctgtgagttagaacccaaagtggcagaaacaggagacaatgctttcatctttggccttgggactggaggtcaccccttcacccaagtgtttgtaatgacctgtgagacacgcacacataatatttggagttggaaggatcctcggagatcttttgattagctatggaactctgattcaattaaattttacttagatcctcaatctaagagacatcactgtctggtttaaaaagagggtggaaggaatggcacttcagccttttcaatttgatagtcccaagacctctcttgagaacccagtttgaaaaccataatcccgtccactgccctctgtaaacccaggggtggggcccga

SEQ ID NO: 62587 - DNA, 3817 bp, Homo sapiens
ttttttttagtagagacagggtttcactgtgtcagccaggatggtcttgatctctggcccaagcttttaaaagtgaaaacggtggccaggcacggcagcacacacttgtaattctagcacttcaggaggccgagatagaaggatcactcgagcccaggaattcgagaccagccctgacgatataaatagggaaagagagagagagagagagagagcgcgtgcacgcgagggagaatgcctgcccctctccagcctggccaacagaaggagatcctgtctcaaagaaagtgaaaatgcttcagctagaattataggataatcctgtgtgagataatttacatagtgactggaagagttattaaatattgctttcttgttgctaagttctgtagttgggttagatatctaatgcgtaactattgtgaaagtcaagagattctaatttttccagaaaataatgttgagtttccatgaagaacaggaagtactgccagaaactttccttgctaatttcccttctctgataaagatggacattcacaaaaaagtaactgacccaagtgtggccaaaagcatgatggcttgcctcctgtcttcactgaaggctaatggtgagtacatatttgtggagttggtggtatttgggcaagatagggaaagaactatatatttttggatataaaaggaaagaagtgaattgtaaatttatactgcttttcccaccttttatgatttggtttctgaattaattagtggtgaagaatcgcatgtgtattaataattgagaaatgctggttgggcttagtggctcatgcttgtaatcctagcacttcgggaggccgaagtgggaggatcacttgagtccaggagtttgagaccagcctgagcaatatggctgagaccccatctctacctaatttaaaaaaaaaaaaaaaaaaggccgggcacggtggctcacgcagcactttgggaggccgaagtgggcggatcatgaggtcaagagatcgagaccagcctggccaacatggtgaaaccctgtctctactaagagtggtggcaggcgcctgtaatcccagctactcgggaggctgaggcaggagacttgcttgaagccgggaggcggaggttgcagtgagccgtgatcttgccactggactccaacagagcaagattctgtctcgggtgcgggggaagctgggtgcagtggctcacgccactcattattgaattttttgaatatgaatttttttaattgtgtgaaatgtaggagctggtgtagacagacaagccctgtttatattaaccatctcgaagattatagttttatatctataattatactaattaagtgacttatttatgttttgaatatttgttttatttctaggctcccggggagctttctgtgaagtgagaccagatgataaaagaattctggaattttacagcaagttaggatgttttgaaattgcaaaaatggaaggatttccaaaggatgtggttatacttggtcggagcctgtgacatttgttgacactgtgaactgtccaaaagtctcttaactgcaccttgtgaatggtagttgaggtcttcatacagttcagcctctagaatggtaacaaatcagccaattggattcgaaacaaagaagactatgtaaaactcacccatcacactttgagactactcactggttggaagaatatagtattgcagcaaatcctgtatgaaagagagatgtgggcttcctttttgagtcttgtgttaggtgctgagaccttttacatgggcttatacagggagagagtcttcaataaatgtagtcagcactattttctgcatccagtgtggttgcgtttctcacctgagagtaatcaagataacatctgtcatcttccttggtttattgagtgaaatgcctctcagtcttaggggacatggcagagatgaaagaaagaaagagtgggtttcagaagtgtcagggtggagtgattccaagtgggatggttgtggcattagtttaagctgaataaataatttcaatttggggcagttattctgctttttgtaaagccgtggccaattgtctcctgtaatgactgttggttcaggcatgttgtactttgtagggacaaatgtgcatttgtttgtggcaaaagcctacaattgacaaacttgtaaatttctttgtatataaactagctgtaacctgactatcctttgtgtttactgtttttgtaaatttttttcctctataaatgaaagggtgttggttcagaatggcactttgaataatgtaaaccagtgaaaagtggattttctttacttttgtctttgggtttggggttgtttttgttctttttgaagttttattatttttaaagtgcctcccacctaggcgtaggccatgaccatttggggtacgagagcctaattttgtaggacttaatctgttgaaaagtgcagttacttctggaaattaacctcaatattaggtcagcatgtgaaatgttggatttgacatgtcaggtagggttcagggactgattggtcccatttgccctcaggtcagttgtttaatctcaagacctgttactactgattttattaaatcagagtctttaattcttgcatgtttgtatctaatttctgaatgaatgagcacactttaaccagttatttacagttacctttttcctttaaccggattgtgaaagcttcatgtattttaatttagattctgtgtttttaagggttctgagcatgaagctggcagatagtcggcaggactcattttttcatcatggctggctgatttctccatagattgataacagtattttgttatcttgcttctctgtagttttgcatcagctgtttaactttgagctgagtgaggggagaggggtaaagagaaagaaacttaagttttctttcacagaactccaccattgtgggctttgagagagccctaaagcattgtacctagtggtacctagtgacttccaaccaaagcctttgagtatgcactaaataggtgagaagaaaggagagaaggtttttaggttagaaacctttaaccgatagaaggatatggtatgttgtaaagctggaaccaagtttgcatttttgagggcttgagatgaagggaagactcttaccagatagtaagacagctgagttttcctcagttttctcgtcttaacactagtggacaattctagcattttgtttggaggatttcagagttaacctcatggaattcaggattttttagcaagtttgcttttggttttatcttggcttttagtaatcatgttggctggtctggtcacaggtgactgtgaaacagatgccctggtcttgctttcatcactctaggatcatgaagtgctatgctatttcctggttatgaatattaaggttggaattacatttttattgattgtttggatcagagctcagttcctgtagaaaacgaactgtaaaagaccatgcaagaggcaaaataaaacttgaagtgaatgcttgtcgtgttgtattgtgtgaatctatttcctgtctgccccctcccttttctcctctttcatgcctcacctacaagcaggtattctctcctctccacagctgttccaagttagagattggatcttgaaggcagccctcccctacctccatcaccagtaagacttccagattttcattaagacaagagctaagaaaagtagactagtttttagccaagccaccccaccctcttgccacagttataacctggatgtgaaatagggcctctagtttgagttttgccatctat

SEQ ID NO: 62588 - DNA, 3628 bp, Homo sapiens
gtgaaaccccatttctactaaaaatacaaaaattagctgggcgtggtggcatgtgcttgtagtcccagctgcttgggaggctgaggcagaagaatcacttgaacccaggaggtggaggttgcagtgagccgagattgtgtcactgcactccagcctgggtgacagagcgagacttcatcttgtggggctggggggaggctctgtatagctcctgtacatgggagacatctacccttaggctcaagagacctcaatattggttgctggatgacaacatttgccttccaggtttctgctcaggttcttataattcattcttatagggatttaaacttaagtttctaaggcccttaggaattttgaacctgaaatctggattattgagcttgaaatgtattacagaaaacatttgatattcagtttttaatttaagaattattaaaagttaaattcttaatgatacacagtattgtttctttctcttctcagggtttatctctgcactgagcatttatggtggtagctttccaaaattatatagatacctcttacacaatctcaagctcttacagcaagcttgtccagcctgtggctcaacacaagtttgtaaactttcttaaaacattgtgagtttttttattttttattttttttaagctcatcaactatcattagtgtattttatgtgtggcccaagacagttcttccagtgtggcccagggaagccaaaagattggacaccccttgtaacatcttagaagttttaaataattatcttcatatccacatagctttacaaaagctcacgacagggagagtattttcttggttctgtagtaatttcagggggtttactgattggaacccttccttttcctcctctctccagtccagctggcattcagtcctttaaacaatgtggctatgcagtacttttgattactaatgacttctattatcttcttccccattgtgtacagatgggagaatcctcagcacaagtgtctactactattggatggacagcggcagatgttcacagcgcgtcatgattaattagtttaaattgcaaggttctatctgtgaggtagctcaggtagatttaagggcggtagacatgaactgaagtcacgtttgcgcagcgactgaggcattaaccatgttttcatttacacagctcttcgtacatgcagctttttattgtaatagttggaagtgctagttatgttgtagtctcaaagtagggggtaggggaaattggctgatcttaaagtttgagaggtatagtttttttcctgcagtgtaaattacactgagttacggaatgggacaggttctcgtatagtctaaattttgaccctgtttcatatttattttacaaatactacattttatgttttttaaaagtacccctacccttgaaaaatgacaaaccagatacaaactcttaatgggcctgaattgttaacaaaaaattggtttgctttgggactgtctgactagcacactatatttgtactgatgagactgttaacttgaacaggaggtagaatgctgtcttccaatggaaaagaactatattgcgctgctttatcttgtcagaagactaggcaagtgattttgatttggcctccaaacatttgcctttatgtcttactgttagctagcgttattgcctattaagttagttaactggtgaccttaaatagagacttctgtattccatgtgtatgttcagtgtattgcaaagattattataatggctggtcagaggaaccagatactgtcatacttttaagaaaagtatatttagctctgggcaaaataacatcaattggctctccttagttctcagaatctgtcagactggtattattagccaagtctgattttgaattgtttttgtccaaaaaaatttttctcattatgtttcattttgtcaacttaatttcttgtattttattctactgaccttagttttctgacaagattaatccttctcccccgcccttttcccttacctgtacccttcctcaaaatgtaaaatgtgacttcagacaggttgaattccttcatgggctgtgataataaagtgtctaattatcagtcattttagttaatagttactataattttatgacagagcaagcagctagcttgatttgtataatatctagggaatatataaagttgactcagacaaacttgggacttactttccttccagtaattaaagagtagaactgataatactgattattcattaattggaggaaggaacattagtattgaaatgccgttaacattttaaaaaataataattattatcatagccttgccctgaaaccctgattattgttagagagttatttccacgaagtgtttgtcagtttgttggacatttgagaccccaggaaatcccctttctcgtaacgttctccgcttggatctgatctcaacagggtgtcgtagtcattcttcagcacaattcttaattggagaccaagaaccctgggcctttagaggtggtctagcaggagagttccaggtatcaatatgaattcacaactgaattgacattttctttgttttatgagaaaccttatgttgcgcatcagatggctggaaggattggtctgccgaaggctttctagtcccaaattcaatttagttacatagctggatttttaaatcaaattttcctcctctttcacagtaatttctgaaggagatgctgccaatcccccccgcgcctgcgaagcgcagcggctctaggtatacacttcacattgtttctttgcaggtcgcacagcattttaatctgcgcccgcaatgcacaatgcgcgcatgcttgtctgccagtggaagctccatgaacaaaagatagtaattatgccaataaatggtgaaagagcttttggatatttatccaattattttataaatataatgtgcttgaaagaattgtccattgctgaaaatatgaacaaaataggaagtttttttgctgctggaatttgttcatggactttctaggtgctctacttttctccccccaacaggtgctctgctgcgcacagcaaactgaagcgcattgctttggggataaagcgtctcctggacagataaccctcttcagaccaaacctctcctcctgacattctgttctgccatcttatcgtagggagatggtctatctaagataggttttaaaaaaaaatagatttgtcataattggaataggtttgtttttgtttttgtttttgtttttactgtaaatttaaatccccattaatatgccactaaagctgtaactcagagtgggtaatttctattcagaagcactcccctcccccagcaaagaggtatttctattagtaaagcatagtacacccctcttctttaggtctgcctgcagtagccagttaatataagttggtaatctgcagtgcacacccatttaaaaaaatggataccttccccaaactaatccatctccttttttttcttcccacagcgtttgctgccaattgatggggcaaatgatctcttttttcagccacctccactgactcctacctccaaagtttatactatcagaccttattttcctaaggatgaggtaatt

SEQ ID NO: 62589 - DNA, 1980 bp, Homo sapiens
ctccagcctgggtgacgagagggaaactgtctcaaaaaaaaaaaaaaaaaaaaagtatgttctttacagtggatgtggactctactaaatctggtaccttcagtttcatagtttgcccttctagttaagaatgaggaaaggtcattattttaggaatatttgtcagtttggggagacacaaaatgatactttaatggttaagataaattgccagtacctgacaacataagcagcttaatgtgtaactgtgtctcagattattttgttaagcttacagttttttgagtctttttattgatcttcaatagattgaagaatggcggtcacgagcagccaagtttgaagagatgtgtggactagtgatgggaatgttcactcggctctccaattgtgccaacaggacaattctttatgacatgtactcctatgtttgggatatcaagagtataatgtctatggtgaagtcttttgtacagtggttaggtaggtgcaccaggaataatctcttctcctcaaatatattgtccctttaaaaaaaattatcccacagggagaaaaacatttagggaattggcacatttccaagtctcttcaattcgttgcctaggtttctttcaaaaataggcattattgaagacttgagatgcaagtcttagtaaatacatcaagcacattaatttttctcccttgggctaattcagcataagtatcttaaaagtatgttagaaagtactgactttaacttgctctgactgaatgctttctggatggaaccctgtataccacttttatctgatttggagatgagacactatgaaatgtgactccacaagctttctgctgcttgctgtgtcttgataacattaatgctatgtttaacagaacaattgctgaaatgacctaaagggcctggcaagaggaagccatcctcccagccctgtgcgcatgcgagctttagtgtaaggctattctggtgctattcagtattatttcacgtggctttttctttatccttctaccaagtattggttttaccaggggatagaaattgtaatcccctaaacatctctgctacattaaatggacttttgtatgtctcctttgaacactgattttttttttttaaattgtcaaacttggtaaaaagcaccagcatggccaagtttctctagggacttcatttcattttcaggttttcaatccagctataaggaatatgtaatggacttatatacagcacacagcaggcagcaaggctgactgacatgtcatagttttcatagtagtcacaaatactatgatgggtttcatggtcttggttgtgaaatagatatctgaaacaccgtgagcttagaataaaaagtagtagtgagattttccactttctgcctgtatacctttgagctcttaaatatttaaaaaaaaaaaaaaaaagtttccctgtgatacaactaattagctactaaaagtagagtctcagattgttaatttgaaaatagataactttttttggattgctgtaataacaggtagaagagagtattttgacctcatgttaaaaggctctgtatagcttcgggcgcggttgctcacccctgtaatcccagcgctcttggtggctgaggtgggtggatcacttgagatcaggagttcgagaccagcctggtgaaaaccagcatgagaccagcatggtgaaaccctatctctactaaaaaaatacaaaaattagccaggcgtggtggcgcatgcctgtaatcccagctacttgagaggctgaggcaggagaattgcttgaactcaggaggcagaggttgcagtgagctgagatcacaccattgcactccagcctgggcgatagagggagactccatctcaaaataaataaataaataaaggaaatactgaccgtgcgcagcggctcaaacctgtagtcccagcacttagggaggcctaggcgggcagaccacaaggtcaggagtt

SEQ ID NO: 62590 - DNA, 1053 bp, Homo sapiens
ttacagtcggttgtagtggctcacgcttgtaatctcagcactttgggaggcccaggtgggcagatcacaaggtcgagttcgagaccagtctggccaacatggtgaaaccccatcttcacgaataatagaaaaattagctgggcatggtggcatgcgcctgtagtcccagctactggggaggctcaggtgggagaattgcttgaacctgtgaggcggaggttgtagtgagccaagatcctgccactgcactccagcctgggtgatggggtgagactccatctcaaaaaaaaaaaaaaaaaaaaagaagttacaaggccctgaaggctatgcaatgttttcttcatacgaaaagcatggtacttttgaccttgacttcccaacaattagtactcagtagacggttaagattgactcttccactgatactaaaatttatatttcttatttcaattgagattttacatttaacattacgtttaggttactatcctatatgaagtggtttggtgaagggtcttgcttttatttgaatttttatgtttaaggtttgttctcattctgttctttgtttctgtggttatactgtgaaaactagttgcatttattcttctcacttgtcagaaggcttttgtaatcaaaactatttttgtgcttttttattttattttttgcagctgacagtgaagatagtactgtgtccatccagataaaattagaaaatgaaggcagtgatgaagatattgaaactgatgtactctatagtccacagatggctctaaagctagcattaacagaatggttgcaagagtttggtgtgcctcatcaatacagcagtgagtttggccattctttgttaagggggttagatcacatagttgagtcacaaagtaaagaacactgtctcccgggtgtggtggctcacacctgtaatctcagcactttgggaggccgaggcaggcggatcacctgaggtcaggagttcgagaccagcctggccaacatagtgaaaccttgtccctactaaaaatacaaagattagccgggcgtggtggc

SEQ ID NO: 62591 - DNA, 1113 bp, Homo sapiens
agtatcgtaagaattgatctgtactactgttggaggaaaaataccagattttatgaatttcttaaatgaactgcccactttagttccttgtaggaggccttttatcatttagatgaaaataatttagaattggcagacattttttccacattcaaaaacccatgggccttttgggaggccaaggcgggcggattgcctgagctcaggagtttgcgaccaacctgggcagcatggtgaaaccccatctctactaaaatacaaaaaaaaattagccgggcgtggcggcgtgcgcctgtagtcccagctgcttgggaggctgaggcaggagaattgcttgagcccaggaggcagaggttgcagtgagccgagatcgtgccactgcactctagcctgggcatcaagagtgagactccgtctcaaagaaaacaaacaaacaaagagaaaacccatgagcattttaattctgacttttttacttttctccctacatttagaatactgtggcactttctgttatccaaatgtgtctcagtctccatatttaaggactgtgggtgaaaagcttctacctggaattgaagtgctttggacaggtaagtcttttaagatttatacagtcaaagttgaattaagtaggacttgcagaaattgcttgttcttgttaattgaatacttttttttttgagacggagtctcactctgtcgcccaggatggagtccagtggcatgatctcggctcactgcacgctccgcctcccaggttcacaccattctcctgcctcagcctcccgagtagctgggactacaggcacccgccaccacgcctggctaattttttgtatttttagtagagacagggtttcaccatgttagccaggatggtctcgatctcctgacctcgtgatccacccgccttggcctcccaaagtgctgggattacaggcgtgagccaccacgcctggccttttttttttttttttttgagacagagcattgctcttgttgcccaggctggagtgcagtggcacaatctcagctccctgcaaactctgcctcccgggttcaagcaattctcctgactcagcctcccaagtagctgggattacaggcaca

SEQ ID NO: 62592 - DNA, 1327 bp, Homo sapiens
tgttcagagatggcaaaacaaaaaaaaaaagcaagatccagtaccatggctcatgcctgcaatcccaacactgtaagaggctaaggcaggcggatcacttgaggccaggagttcgagaccagcctgggcaatatggcaaaaccctcatctctactaaacaaaaattagccgggtatgcctgtaatcccacctactcaggaggtggaggttgcagtgagtcaggatcgtgccactgcactccagccttgggcaacagagcaaggctctcaaaataaaaaagcagcggctgcattttatgcctttcaaatgctgcaggaaatagaaatggcttaagttcagtaagagaattgacaattcagtgtttttgagaagtggcaatgaaagggaggaaaatgtttattgattttagcctgtttccccaaaaggataagaaactatttggaagtgaaaaagaagggcctcttattttctgttggttcagatttcaaaggtgtgaaaactattctttttcccttactgtgacattaaatcacttcaggcttgtaccattttgtatggcctgttgttaagttggacatgacaatttgtaaaatgtgaggatcttttcctttcttgtaagttagaagaaataacctcttcagttaaaccttcagtgaaggttcttttagttttctgttctgctttctaaaaacatagactctgttctttagagcaacttatgactctcatctctgctgcacgagaatatgagatagagttcatctatgcgatctcacctggattggatatcactttttctaaccccaaggaagtatccacattgaaacgtaaattggaccaggtaactccttactttttattcatttttcctgactatgtacttgaaactagaagtttactcagttgcttttacgatgttaaaaggaaatcaaattcctatttctttgttttctttttttgtttgtttgttttgttttttgagacagagtcttgctctgtcgcccagactggagtgcagtggcacaatctcggctcactgcaacctcctccgcctcccgggttcaagtgattctcctgcctcagcttcccgagtagctgggactataggtgcgtgccatcatgcctggctaatttttgtatttttagtagagacagggccttcaccatgccagccaggctggtctcgaactgctcacctcatgatcttcccaaagtgctgggattacaggtgtgagtcaccatgcctggttttttatttctttgtttctataagaattttttttactttgaatgctttttttttctttttttttttttttgagacaga

SEQ ID NO: 62593 - DNA, 1056 bp, Homo sapiens
gcggatcacgaggtcaggagatcgatactagcctggccaacatggcgaaaccctgtctctactaaaaatagaaaaaattagccgggcgtggtggcgggctcctgtaatcccaactactcgggaggctgagacaggagaatcgcttgaacccgggagttggaggcgtagattgcattgagccgagatagtgccactgcactccagcctgggcgacagagtgagattccgcctgagaaaaaaaaaaaagaatattttgtatcacttgtgagaggctaacattagattgtccagatgaaagtgctacagttatacattggtatgtaatgaattttaatttggtctgtcattgtcctttttgtggtgcagaggagtcattctgcctagagattggagctaaaatacattgcagaaatttgttttagactagtctcttatgtagattgtgtgggtttatgtagaacattttgtgttcagaatgcttttattaaccttcttcatggtactcttgagaggctgtccttatctcttactgatgattagactgagacaagtggaaagtaaaggttagacaagatgtaaagtgtgtggtttgagctgtgatgagcacactagggagttccagataccagtttgatgcttattcaaccatttaggttatcggtctgcgagtttgttttctgcagtgtgtgcataactagtgttttgtcctcttagaggatactctggggacattcttgagttttctttgtttattcctttccgtttaaggaccagaagtaatattcttgaattttcatttgttcagatctttgctctgtaattaagattgcgtgagagtttgttgtttgggccagttaggctgttgaatttcttgggaatgtggtttcaggcattttttggtccctttgattatatcattgtatgtggaactttttttgagagagagagttttgctctgtcacctaggctggaatgcaatggcgcggatcttggctcaccgcagcctccgcctcctggattcaagcagttctcctgccctagcctcccaagtaactg

SEQ ID NO: 62594 - DNA, 2247 bp, Homo sapiens
taaacaggaagcgggcggtggaggcagcagcagagggagagctcggggcttggaggggaaacagcggaagacctaagattatcgggagggcagcagaggcagagaacgaggacaggacccttggccgtcttcttccagggaacgagaggtcacagcctcgctctccgcttaggcttctggcgccccagcttaaagccgaggctgcggctgacaaagggctcgcgccggtgccgccgcccttctcatccgggcattcgggtccctgcggagagggagggggaagggcagagggggaggggaaggagccggaggggcgcacacttggagctgaagccctctccagggctccgggccggtgccccaacggacagaggtcgaggaggacccgcagaggtggcagcggccgggggcaggaggatggtgcagaaggagagtcaagcgacgttggaggagcgggagagcgagctcagctccaaccctgccgcctctgcgggggcatcgctggagccgccggcagctccggcacccggagaagacaaccccgccggggctgggggagcggcggtggccggggctgcaggaggggctcggcggttcctctgcggtgtggtggaaggtgagcgccctccttccctccccgttttggcactaacacgttctgtcctcgggaggagggtggtggcggggattttggagactctaaaaggccggaaagcctctgggtctgaaatgtggccctcctaaagcgaggggagagacgagatgttgggcgaatctccttgcacgtcttaagacggcgtcgaattcccccctggccactcacaagtctgaccccacccgtcttgggcttggagccaggccacctcctaaggaggcggtggttaagagcctggtgttctgttagcctctgagttctacttctttgtaccttgggatcttattccctagggttgtctggttccagtgaaaaaatatgtgtagtgcttctgtcaccaccctttgtggaaaatcggcccacactgacgtgcttgtacttctggagtgaagagaagcacgtttggcctatagtatttcaagttccacttggcttagaatatttttgttgcttccccccacccccgcaaagattcatttgcaacttagaaaattgccctctttcccagctactgtactttgctctcgagggatgaaactttggctttaatcacagattctcgaagtatctgagatgcgtaattggaatttagtgaccgcagaagcggctttaaaaatgcccttctcgccttttttcccatttacagtcgaaaagaacgatggactttttggtagtgagggaaaattaccagatgcttgtttcagtttctggatgagaatggacagatagtccaccttgcagctctgtagaggcacgaatcggttacattattagtctttccgcagttacagcatgtatttgaattttctgaagtattttggccgattcagagtttcctagatgtctgttttatatctctctcgtatgtaatggcgtggataagggtaaaaaatatatatatttaaaaaaccaaaaaggtatggaaaaaggattgctctcgacgttgagaacatcagcttttctgttttttttcaccatataaattagagtattctttcgaaaaatgggtggtggttatggtacagaccataacaggctactttgctgctacagtaaggcatgaaagagttcagcgaagttaactgtcttgcagaatttgggggattacagaatggaaaactgctatatagtattcatcaaaaatgattgcattgtgtgacttatatcgttgtatttattggcttgagtgcagggagattttagaaaaagaatctggtttttgttatcaaagatcttggagtggggatgagagagtgctgggaaatttcggagctagactggaatgagtctaaggaaacttgccagtccattataccttcagttataaaaggagaaaactcatttggtttaaattcgtttgtttagaatagcattaaaaggcgattcttcctatttaaagaacagagttgtctgccattctctcgtttattcctcctccctcccgtgcccttgtatattttcttagtgactgagcacctgagccagcactgattttttgtgtgttttgttgtttttgttttgggagacggagtctcgctctgtcgcccaggctggagtgcagtggcgtgatcgcggctcactgcaacctccgc

SEQ ID NO: 62595 - DNA, 1179 bp, Homo sapiens
ggattcagtagtccagatctctggagctgaaggggccagagagtgggcagagtgcatctcggggggtgttcccaactcccaccagctctcacccccttcctgcctgacacccagtgttgagagtgcccctcctgtaggaattgagcggttccccacctcctacccctactctagaaacacactagacagatgtctcctgctatggtgcttcccccatccctgacctcataaacatttcccctaagactcccctctcagagagaatgctccattcttggcactggctggcttctcagaccagccattgagagccctgtgggagggggacaagaatgtatagggagaaatcttgggcctgagtcaatggataggtcctaggaggtggctggggttgagaatagaagggcctggacagattatgattgctcaggcataccaggttatagctccaagttccacaggtctgctaccacaggccatcaaaatataagtttccaggctttgcagaagaccttgtctccttagaaatgccccagaaattttccacaccctcctcggtatccatggagagcctggggccagatatctggctcatctctggcattgcttcctctccttccttcctgcatgtgttggtggtggttgtggtgggggaatgtggatgggggatgtcctggctgatgcctgccaaaatttcatcccaccctccttgcttatcgtccctgttttgagggctatgacttgagtttttgtttcccatgttctctatagacttgggaccttcctgaacttggggcctatcactccccacagtggatgccttagaagggagagggaaggagggaggcaggcatagcatctgaacccagtgtgggggcattcactagaatcttcaatcaacctgggctctccccaccccaccccagataacctcctcagttccctagggtctcttcttgcttgactcaatctacccagagatgccccttagcacacctagagggcagggaccataggacccaggttccaaccccattgtcagcaccccagccatgcggccaccccttagcacacctgctcgtcccatttagcttaccctcccagttggccagaatctgaggggagagcccccagagagcccccttccccatcagaagactgttgactgctttgcatttt

SEQ ID NO: 62596 - DNA, 1022 bp, Homo sapiens
cactgctccctccctctggcccatatcttggccaaaagttcccaaggaggtgccagtccaaaggctgaggtggccctgcgaagaggaagaggcggcggctgtggttgggaggcttgtggggcagaggcggggtgatgggggagaggaaggagatcctgggagggagagtgggagggaggctgcaggcagtcctactcaggctggggagtctgagggggaggtggtgtgaggcggtgaaccggcgtatctgaacctgggccctgtaggggccatgccccaggcccaccatgaacctggaagggctggagatggttgctgtgctcgtggtcctcgctctgtttgtcaaggtcctggagcagtttggcctctttgagcctgtctccttggaaggtaatccaggtgtcctggcatgtctgagctgctggctggtggggcagctgccccacagcactagggagggtgtttgtctgtcttcatgactggggcagggatgagcaggtgagtgatggcacagggatctgggaggtgagtaggggtgcttgggggatacaacatctgggaggggtgaagaggaggcctcaaggagtagatatggagggaggagggaatctgggggaccaaggtgtcaggaggtgatgaggggtgcagtgtgggaggactggggtgtggagatgaggaggtgaggggattctgggcgataccaggaggggtctggagatagggaaggagtgtctagagtagaggagggaggttctagggatcctgagataacaacggatttctggggggtcctttttggagtcaggggcccaccacggtgcctgtgcatcctctccacacctccatctgtgcagtgtagcttatggggtgtgtgggcatagtgtgtgagagacacagggtgtgactttgtgttcctgtatgtgagagagtacaaagtgtgtaactgtgagcctgtgtatgggacagggatatgactgtatgtgtgagagtgacagggcatgtggctttgtgagaaggtggat

SEQ ID NO: 62597 - DNA, 2510 bp, Homo sapiens
ttatgagagcaaggaatttggagccaggagacagaaggcagtggggcacaactctgctgcctcttctttgccaccccaatacactggcctctttctccttcctcctggctttcttccattggcccaggaagtgtggggagttgccatgacaactctgtcctcttaccccttcggctctttatgccaaaatggtgggggcggggtgcagggtgcggggaggagtgcgacaggcggagaaaggggggctgaaagggggcaataaaagatacggttcattccccatccagctcttttctcaaaacccacatgtgcctgcctggcctccccgccagaacccagaaaaatgctccctgagaaggctgagtccgcgccgcccctccccgccaccccccccccccgtccaggaactttgggggcggctgcttcacatgatggggccagggtgagctcctctcgtgcggccaggagaacatgggaaggctccagggtttcgatcctatgcctgccgggccggccctcccgcgccgcccacgcgggcctacccgggtgagggcggagaccggaccgccccggggcctgggggtggagcttagacgccgagctcgccgccaaaccatgaaccgatgcccccgcaggtgccggagcccgctggggcaggcagcgcgatccctctaccagctggtgactgggtcgctgtccccaggtatgatgaggaagggaagggaggggcaggatccttcaaaaagtgagcgaagtgggttaggagctccgcagaggtagggagggaagggcccctcaaatagatggagggagcaacatccctccaaggaaagggcttccaagacgagatcctggacagaagcggagcaggggatgggcctccttactgagcaggaggaagacagcgctcttcaaagaggaaaggagaggggcatcaaggtccctcacaatggtggagggggcggggcttctcaccgaaggcagaggagggggccttaactgaggggcagggcgcctcccagggatgaaaggaggaggcctgcagcagagcagggaaaaagttcagtcctttcctgcatttcttggctgaaggggtcttaagatgaagggttcagtgtccagaaggaaaaaaccctgagatgggcctagaccaacatgaactcagctagcaagttcatacatgacatgggactgatagacttgtgtggcttaaggattgtatgtctctgttttctctctctctgggagtgtgtattaatgggattgtgcattactaagttgtgcatcactgggctatgtatggctgagtctgtgtctccctggggttgtgatcactgggattctgtgacactgagactgtgtgtacctggagttctgtactttaggactgggttgagggttcctgagcctctaagttggttgtgtagccttcgtgaggttgtaccttggtgtgaaatttgtggagtgtatgaggtgtggattgttgagtatcccacggcactgctgaggtgtatgcacatctccacttgcatttccttatgactgcttgggcagggcccatagaacgcaacgtctcctctgtacctgacctcaaacagaccaaaacaacctggtcctgtggcattctgagatctgtcattttctggctctctccatgggtatccacttgagcccctggagtatagatagggcctgtggcctctccttgccatctgtcccccaaaaggagggtagatggatggtcctgagccagaaccatacctggaaatcttctggggagcatacaacctccaagccccctgcttgggcctgtctccagtgacagatggctggagccaggcagggccagctctcagtcattgcaggcatgacttccaggacccaaaatagccccaacgtctagggaggtcattaatcactcgatgcagctgggggctgcagtgtctttggcctagctgggaatggtgtgggtctgggggactgagagaagggctttgaggtcttcactggctgggttaacagtggcggtggggggtgggacaaagctaaactggggaaggtgggacagttgcatagagtgggttcccccacaaggcagtgttactcacatttgaactgggggagataaataaataaatgataggaatatctctgtggtaagatttgagggatctggggaaggcccacctcatgcctcgagatggttttcccttgagttcccactctgccaaattgcttccacagagattttactttgagtgaagagctaaattcgtggcacagggatgcttggggaggatggatctggcaagtttctcactgaacccgaggacttgagaagtctctgagtggggagaagggacagcctggaaaaataactcatcctttcactcctgacagactctgccacaggatgcctggctgatttaggaccatgagtcctggcaaggctgggtcaaggtctctgagagttgagagtgggagttaggaaaaggaggggccagggccag

SEQ ID NO: 62598 - DNA, 1123 bp, Homo sapiens
atcaactctcagatatagctggagctacatcctgcttcctttgggcctggggctgtgcttggcttgaaatctgtgtcccctgcctgcactggcactttgtccagtcatcgggacctttggctcagatttagggtaagataggaatagggtacctttttccttttttttctgagacggagtctcactctgtcgcccaggctggaatgcagtggcgtgatctcggctttactgcagcctccgcttcctgggttcaagcgattctcctgcctcagcctcccgagtagctgggactacaggagcgtgtgccacgcccggctaattttttgtatttttagtagagatggggtttcaccatgttacccaggatggtctcaatatcctgagttcatgatccacccaccttggcctcccaaagtgctgggattacaggcgtgagccaccacacccagccagttttcctattttctgaattcagaattgacttctctgggaaaactggagatgagaatctgcccagtgctctgctgtccagtcaccgccttttgaattttagttttggcaccaggagtaccgttagctttccccttcttctggcccatttgactcatcagcacaatagggtcaccaccttaacttttaatttctaatctgctttactgtctttagggtgtgtatgaaataaacattgacaggctttctggagccctcaaggtgcctactttgctggttccctttccagcagctcccccacctcccttagccccccctcctctggcagcctctcctgcctctgctgagctcccctccacgtgttccacccccttaccctgctgttgtttacatccaacctgcctgagaatttcctctggggaggaatctattcctgtcatggtctagtgcctgggagggagagaactttctgggggtagggtgccctccatctgaaacaggccaggtgagcatcatgcataaggcctccattctgtccgctcagattctgggtggggccacaggcaaatctcctgacttatggggagttggcttgtggttcctcccttggatagcctccatggaaccactataggctttcccaacagctgcctctgaaatagctgctgcttcg

SEQ ID NO: 62599 - DNA, 1045 bp, Homo sapiens
aaattagccaggagtggtggcaggcacctgtaatcccagctacttgggaggctgaggcaggagaatcacttgaacccaggaggtggaggttgcagtgagctgagatcacgccactgcactccaggctgggcaataagagcgaaactccatctcaaaaaaaaaaaaaaaaaaaaaaagaatagacagtgttgtttcctcttcaccagaatctgccataggctgaatgaagatgtatgaggccctagcccctggcttatcattagaactatcttgagatagccagaactccaaatactccttgtcaccagaaagactttcattataaaattagtaaccattattgactattgattatgtgccaggcattgtacaatcgttaatctcatgttatcctcacatcagccttataagatgtagatggtgttgtcttcattttatagatactgaaaactgaggctcaaagacattaagaaacttgtataaatttattttgctaattagtggttgactgggaactaaaacttaggtctctgacctcaatcctatgttcttgatggctttgctgtcctctcaggccccttacctccagaggcttcaggggcagatgtttaggccttcccaaacattgcccactttgttttcccctcgcctaagttgaggcaaagtgttttaaggcaaagaagagggcatgagatacttgaaactgaggccatttgtgtattccttgtcttccacttgaacccagaagttgttcctttgtggtgaagaatcacttacgcacatagaatctttgggacagtttgaaataggtaggtacttcctggactgtgaaagtagttacttttgagtcataggagctgtctaggtagctgtgtagccattgggatgacagtgtttccatcaattgtatgttacttaaaacttttattcaggaacttaaaaacttttattcccatgtcattttaggaaggtgagttcaagttccattttatagaaaaaagggctgagactcacagaggctaggtgaattgtctgaagtcccata

SEQ ID NO: 62600 - DNA, 1037 bp, Homo sapiens
ttgtatattttgagagtagagtgacatcctctcccattcgtttcatcttttgctcatcttttgtacaggatttatttatttcagtgtcagggctgagccttgaagaatctgcctttcaggtgattgccctgatggagtctaggctgtcagtgtcagtcacagatatgtccaagctaatggttggtccttcctgcagctgctgtctcaggggccctgctacacttgtgtagaattttgcactcacaattagctactacagtaatgtaaagaggaagaggtggtaaacaaaagagaaaaaaccttgggttccttattttcccagtcttagaaggtgtgacactatctcaatctagctgcccattcactggtcagttaagcagctgactccaaaccatacttagtgttactggctcaaccttctatgtccttacatctgtgggtgtgcctgttgatggtggtttatcttgattcctcagtttgcatgttagctccgtaaaggcaagacttggctctgagggcttttgaagcctgtcaaagaatgctgagaacagtgcagaaggtacatcagggtctaactctaatcttaccacgtgaccttgatgagagattactttcttttttggttgggcctgtgttactaaattagtcagcaaacatgttgactgtttgttgtttcttaggactctgttagacattatgaaaatccataatgtcacactgagcctccttcagagtgctaagcatctagctatgagagatttcagtgaggaaatcagtcgtaatggcatgttgtttctctaggagagggcctgccactctgcctgcgtccacctgctaatgcacgaaccctaaagcagtatattctttcctccacaggaaatccctcattgggaaacctgtagaatgcaaatgtcttccagaaagggtggggacagatgagaggaatttttttatttatggatggggttgaaagggaagctgtggaaataggtcacttctcccaatttcaggccctaaaaaatagttattcatagggt

SEQ ID NO: 62601 - DNA, 1059 bp, Homo sapiens
gtttagttttagctcttatgtttagatatttaatccattttgagttaatttttatatacagcattaggtaagggcattttgacctctttttgtatttaacatacctttatgaataaagattacggagaagatacaacttgcttttctaagagctatgaaactactcatagtttattccttactggatttggcttgtttctgggacacctttcaaaattgtccttcaggccccttgtcccctcttcaactgagatttagttcctttctctctccagtgtggctttttagtaagcatgcatccctacctggtagaatcatttgatatgtccaggaaaattgatcagccaaggaataaggattcccaaaaagatgaaactaaggggtcagactggaagatttagaatgcataccagcttaagtggtttctgacattaggaactttgagtctactttgattctctccatttctaaggctactttctctctgcttccagttgtgttcatctcctctagctctcttctcttttaaagaggaccgcaaataatgcaacctgagcacatcagtcacccttgtaagccttccgaaattctggtcttcagcttgtccctcgctagtggcctgcaccctaattttctttttgtttgcttggcgggtgtgtgtgtgtgtgtgtgtgtgtgtgagatctccctctgttgcccagaatggagtgcagtggcatgatcataatttactacagcctcgacctcctgggttcaagtgatccttccatcttatcctgctgaataactaggaccacaagtgcatgccaccatgcctggctaattttttaaattttttgtagagatggagtctcactatattttccaggctagtctcgaactcctgggctcaggcaatccacccacctttgcctcccaaagtgctggggttataggcatgagcaccaggctgcactctgattttcattcccctgggaggatagttgtcatacaacttgtgttgcatagataaaccccatgaccattttgtctgtactaaataaatgtagatggcaggta

SEQ ID NO: 62602 - DNA, 1298 bp, Homo sapiens
tgtatattattaatcttataagccaaaagagaaccaaggacactcttataacaggcagctgcaaagccaagccatttagtgtcgtcagtgtggtttggtggagatcagagactggaggcttcagtgtggctttaagtggaacagctgcatcaccagctggagactgacagccgcagagggcgggcacggcacagctgagatccatctactcccatgggagcctgaaagacctgcctccaacttagaaaactgctttgtgtttacagttagtttaggggagaagaggtagagaacctgccctggcctgtctccatgagcatctttgagtcagtactgagcaaacaggtgtaaacaggaccccaacaggcagaggtcttgtggctttcacaaaagttgtcctgcttccccttagatggaaaatatttaaaatgagacactgggaaaggaagctataacttttatctttagtttactggaaaaatttgactatttgttgaaggcatgaacctaatttttaactagtaaggtttcttttgtttgatttagtaaaagttcggtatcagtctccttccctgtaagaaaatgtgcccacacattctcacctttccttgcctaattataaactaattcatattttgagactctgctcaagcaccctgtccttcagaatgtcctttctaagcctgcaggttgggctaagcacccctcctctgtgcttccatgataccttttgtctactctttgtctgccttagcctttaccacatcataatgaaattatctgtctgtcgtgtgtgtcttttccatttatgaactccttgatctctgggatttattttattcacaaccttcattgcctagcgtagtgcctgcacatgataggtattcatatgtttgtcaaacaaactgaattatcaagagtcactggcagtgctggcaaacctttagcttcagatactgtagaacttccttctagggacagagattccttgactatatgagaaagcagtcaatttgcagagtaagagaggagaaaatatagaagttctgtttctaaaacagtgcttatagcataaacaaagttctttaattactttaaaactaaatttctccttttggtagcgtcacctttcaggaggaagaaaacttactgctctttctggtatattgaagagatggcagctaataacctctttgtgagcataaaacaattataccagcctcctgtggagacaatctgccagagccaaccgcctcaccctccgcatgggcttcattttcttactctggaatctcatc

SEQ ID NO: 62603 - DNA, 1353 bp, Homo sapiens
agccatctatgtcaaatggtttcttattttcttatccttatttatcatggttacgaatacttgcagagtgtagaaagtaacaaaaagctgtaattaaccttgtaaaaataagttttaatagggaaataaattataagaattataagatggcattataagtttgctttttttttttttttttttttgagatggattttcactgtcacctaggctggagtgtaatagctgtgatcttggctcactgcaacctccacctcgcaggttcaagcgattctcctgcctcagcctcccaagtagctgggattacaggagcctgccaccatgcccagctcatttttgtatttttagtagagacggggtttcaccatgttggccaggctggtctcgaactcctgatctaaggtgatccacctgcctcggcctcccaaagtgctgggattataggcataagccaccgcacccagcccattttaagtttttgactgagtaaacaggtgataataaaatgctgtgagataacggtttatgttagcagggtatcgtatcttttttttttttttttgagacagagtctcgctctgtggcccaggctggagcacagtggtgtgatcttggctcactgcaacctctgcctcctgagttcaaacaattctcctgcctcagcctcccgagtagctgggattacaggtacccgccaccatgcccggctaactttttgtatttttagtagagacggagtttcactatgttggccaggctggtcttgaactcctgacctcatgatcctcctgccttggcctcccaaagtgctgggattacaggtgtgagccaccacgcccagctcgggtatcatatcttaatcctgtgtttttatgccccttcagcccaatttactgactattcataatagatacacagcacttcatccagccgggaaatgaaggttcatcttggccaacacttaattagtcattaattatttattgttcatttcctgtgtacccaaccctgtgtccttagtttctgacctacattggtagtactaccacatggcaagatttcatagggtagaatgccattgcaattaagactttggaggaacagctgaaggccagggtacaatcctgctgtacccgagttagaatgtgaccagaatagctatacttccattatagctcttttgaaaagctccaggagatgacagaccactgcttaccacccattatttgcacctgggaagtttctgaagtgttccctcccttttgtgcagtcatggcagctccgggaaggaggggaccactttacgcaccaaaccaaacaggtctgctgaggacatttgctcactaaagtctg

SEQ ID NO: 62604 - DNA, 1080 bp, Homo sapiens
ccaagattgcaccactgcactccagcctgggccacagagcaagactctgtctaaaaaaacaaacaaacaaacaaacaaaaaaccccatgatatactggagattcttggctcaattgaaaattgattattaagaacacagagaagaagctgttgatgcaaaatgaactgcaaaacgactgtaaacctaaatgccagtgtgggggctggggtggttgggaaagattgttatttcctgggatgctgcagggtgctgatgaggaacaggcatatttagcatttgtattaatgaactagggctgaaagtaaacaaagtattaatgaagtttgtaagtcatactgatttggaggtgtttcctatacccgggagggcagagaaatgatattgatggaccagaaagagaagcatcacagaaaataacccagctattcccttgggaaattgcatatctgctaaatagaaatagcataaatagagtcaggcagatattttccaaagtagaccttccagcagtccactcctaaatgtttacccaagtgaaataaaaacttggattggacaaatgtttatagtggctttatttatacactgtcaaaactgtggacaacccaagtgtctctcaacggcggaacagataaactatggtacatctatataatgaaatactattctacagtaaaaaggaatgaactactgatacatgcaacaacctggattaattcagttgcattatgcagtatgaaactatccagatccaaaaggttacatgctgtatgattccatttatatgacattctggaaatggcaaaactatagggacagggtataggtcagttgttttcagaggctggggttggaaggagaggttgattacaaatgggcacaggggaacttttgaggtgatgaaactgttctgtatcttgactgtggtggtgattatctggatgtatgcatttttcaaaacttgcagaactgtatacttgtatcagggtttttcagaaaacagaccaataaaatatacatagttatacaagaggaaataggctatgggaattagttcacatgattatggaggccaagtt

SEQ ID NO: 62605 - DNA, 1445 bp, Homo sapiens
tgggcctgatctaggattagctgggagtaatggtacttcagttattgggctgatggagggagccaacaagggcaattcagagacagaagctcagagaaacactgaacaaaaatgccaggcggactctccagaagagaaattgactgaagggccaggcagaggataagaatctacgttaagccagtggtacagcccagaaatactagagtaaaaggtttgaaggaaaaaggtaagggttaaaatctagaagaaatgctctgggataaataggatatctgcaacagcatttcttaaatagtgagcagagacaaggtggagtgtgaaaagcacaactctcccggtacagtttagtaagtattgaatgtttcgtaggatccagcattggagatcaagcaggtcagtaaagaacaaaccactgtgccgcagccaccagaagcctggaactttgccatgtgcttcagcctacaggggtctgctaagaagagaagcaaagccctctaagaacagcacagagagaaataaagtcagcgagagatgggactattaagggaaaggcttataaagtgctgtgagcttcgttggcaaagaaagggctgttcatctagtctcgaatgtagccaagcagagagggagctgggaagaaggagatatgaagatagccttagctaatgtgtgtcactctgcctttgaatgaccattcaaaacatcagcctgttggtgttcttcaaactggtgaggctgttgggggctcaaggaaaatgggtcattgtttaagacaaaaagaaaggaagggacggagagaaggagagaagaaagggagggaaggagggaacaaaggaatttctttgagttaaatctcactgcgttgatatgccccctccccctttttgcttgttctgaagaccaaaagctctgttttcttctgctgagggtcctccctttggggttttggtaatatctgtgatctataattgttactcttaatactaaatattttcacaagtcatttaattatctatagatttgactaaactgacctagatttagatttaggttaagccttccatgcctaatgccacatacctgtgccccacaaacctgagctctttgagtgctgcaggactataacttgatttgaaaagctggatgttctttttcatcagaaatcagtgttctactaagcctgtcaattcattgtctcctagacaattttgaattgggataacaaattagagttagggatacattacaaatgataaatgtgacttccttaaagggaaatccatttgttttgcttagtgtttctgtgattaattacttgccagattaaattgctccataaaaatgcatagtattttattcgattgctcttcatggtgattaatcaggccatactgttgcttcgtatgttaattatgctgacattttattctgttctctagttt

SEQ ID NO: 62606 - DNA, 1499 bp, Homo sapiens
tacaccactacacccagcttcctttgatccattttgagtgaatttttatatatgatataaagtaagcatccaacttcatttttgggcacgtggatatccagtttccctaatgcccactgctttttttttttgtgacagttttgttcttgttgcccaggctggagtgcaatggtgcagtcttagctcactgcaacctccacctcttgggttcaagcgattctcctgcctcagcctcccgagtagccaggattatcggtgcccaccaccacactggcctaatttttttgtatttttagtagagacagggtttcaccatgttggccaggctggtcttgaactactgaccctcagatgtgagcctcggcctcccaaagtgttgggattacaggcgtgagccatcgcacccggcccccactgcttttctgagataactacagctcagatttcttaacttgagtcaggctgaatttggaacttaactgtgattagagatagaaatggagcctctcccgttttttcctacatatttccattcctttttgtttcttaggtttgctcattcctctgctgtttaagagatagcataatgtagtggttaagagtggggactctagagtcaggttgtctgagtttgagtccttgctgtaccattactttggacaagttatttaaccattctttccttgagttttctcagctataaagtgaggataacaatggacctatgtcattattgagattactaaatgacaatatatataaagcatgtagaatagtgcctggcacatattcagtgctatatacatgtttattattattatttttaaaaatttgttgtcctgattgtgcaagtctgggaatcttatcagccccttccatacccaactttgttcagtcctttttctgtactcatctgggcttagtagggaccagagacacaaaataatatttatttacaagctgacatcaggggcaatactggaacttaggctgtcagcctgagcctttgcatcattgatgggaaaatagtttgggtgggaagagtttgtgttttctatcactttcagtcctttgaggagatgtctgaccatgcaaccttggctatatcattgtggtaaaagaatgtctccaaaatgaatacacgtatacctgagaggctattaaccaacatgttcttatctctggttggcaggattataggtggttttataggttggtgcaaaagtaatggcaaaactgctattacttttgcaccaacctaataagttttctttcttgtattttaatttattaaaacatttagctgtgaactttttttgtagatactctttatcaggttgaagaaagtcctttctgttcttagtttgttggctgtttttatcatcaaagggtgttggattttgtcaaatgctttttttgcttctattgagatgattttgtggtttctatttcttattctattgataaaacgtactacattaattgattttcagatgtta

SEQ ID NO: 62607 - DNA, 1001 bp, Homo sapiens
gttccagtgccaaagtggtcccctcacccacccttcttacttgcttatgtagctgttttctttcaccctaaaaaacactcttcccctcatacatgggtgcgcacatgtgcacgcgcatagacacacacacacatggttaagtgtacactgctggggaggctgaggaacaagaatagctttcagcagcctctgagataatggggttattgagtataacatcctttggaataggctgtgtacagaattctgaatgtcacaggaaataagccttcaagcagtaatcactgtcgatagcaaagttagggttaggaagggatgtgaggtctccccaacttcctttgcccactcacctgtttgggctgaaatctttgctgcattgctataattcacttaacaaaatggttaccaatgagagagaagcagtttcatgtccaggcacttcagctgaaggatgcaacttagtctagtgaaaagtaaatgtggactaaattgattaatgatagaagcagagccattgggctgttgactcttgactagcagggagtacatgaacataaccttctattctgcagttgtctgctctgaggtggcaggtaggctcatattatcttcactgagttagaatttatcaatcatgacctttttttttctgttaatcagaccctgctgatctcccattagagaaaatgaaaagcattatgcagattaaaacaaagcaccaaaatgaagctggtataatattgtttacccaatgactgggagcattacatatcattgtaatggttgctgtaccctaatctcttaagactacagctagaattaaaaaaccaaatactgaatcccatgtggttaatcatctgttttaccttagtttggtttatgctgcaaaatgaagttttacaataggtcatagctggacttggtgaactgcagtgaggtaaagaagtcttagtttaggagattcagacattcataattaaatattaagatttttagctgga

SEQ ID NO: 62608 - DNA, 1043 bp, Homo sapiens
acaccattatatgatgtttgcaccacacagatataatagttataaatctccagagcataggttagtaaaaggtagaaaataattaggaagtgataagtttttaatatttattactttcattttaatataatttatttaattataagtttatatgagtgaaatttttaataatggctgtgtttaacaactggcttacaaaattcctgaaaattttacagtcaactcttgcaagacagtaagagctggctacagcataccactgataatttttagtcttcatagcctgatgcctatatatgggcctttccttcttttttagattgtgaacctatttaatatgtttatcacatatggcgacacatttctgccaacccccagcagctatgatgaactttactatgagattatccgcatgcaccagagctttgacaacctctactccatgggtaagctgccttttctttttactcctctctccaccatttgtctagcttttggcatataagaggaaaagactacgaaagattctcctctagttgtttggtgccctgtgtggcacagaaatatagtagtctcctcttctcaggcaataggaaggtacatgtgggcctttttgcctttaggaattcagatttcatctcagtgtaaagctggttagcagccctttgttgatgttgctgagagagagagagagaatagggaggcttgtggattcattgaatgccagagagaaggaggtgaaagagtgggtgggaattgacagcagcaaataaaagaacttggatcccagaacattgtgtaatttgcggatgtccaggattttaaggaatcttagtgtacctatgtatttttagcataacttacaagtggaagtgggcattagataaaaatcttttttttgcaaatcttttggtgattggctcactgaaaatgtactctcaagctacagcaagtataacttatttctgaaagaattcatgtgtccctataagtttggaataggggcctagttaattctacctgtagtataaaggttaaggaaa

SEQ ID NO: 62609 - DNA, 1031 bp, Homo sapiens
atgggcagagaagcaggactcatttcatggacaaaatgtgctaggtgaatgagtataaggtaactgataacttcttttatgcttaatatttatttgcaaaaatgtctgaagctgcactgctaaactagggacttggcagtcagtctctttattgaggttgcttgggttttaggaatctctcccctcgctaagaattgccaggcagaaagagatttcaataaatgttgtcactgtaacgagaggtcagcgcaagcttcactttgtttgaatagttagagcagttaagggctttttttctctttatgagctctcctcatctagaggagtacatacagtatagctgctatatctggtgaccagttagaatggatacattttcctcttagcaatgatgtctgaaacagatacatgtctaaagcttgatgacaatagaagctagcagctgagggtggaagggggaccctcattttcacctgtaaattgagcaaatttgatggggaaatcaccatgtgggagtaaatttgaaacaccaagatgtcagttttatagtcagatttctgagcttaattgctatttaagaagtggcaaaaagaagtagctatttcaaaaccttccatgaacagataagcagacacgtgcttgggaaggtgagtgctttcctcaaatatacctaccttacctgctttttaaaagaccttggtggctgagacttactcactctaaccttctggattttttttagagctagtctgtttttatttaactttattaatcatggtttgaatagcttgttgatgtctttttttttttttttaaagccttgataaatttgctgaagttccttatgtcaaatgagactgtacttttggccaaacacaacatttttacattagcccttatggtgagtatcaaaacaaatacttctttttctgaagccatatgctaaggcagaaatgcactggtttgaaacaggagctggtggtctggggactaagccatagagggaaccagacctatatatattttttgga

SEQ ID NO: 62610 - DNA, 1052 bp, Homo sapiens
gttgggacacaggttgcccgtgccagagttgctctcttcctcctctaatatttctcactttgtcatcctggattctgaatcccagagatcaagactagctgtagtccagcagaggagcaataaatcattgctcccacatcctttcctccaggtttcctgccctttaattaccacatagccactgctgaggctgcatctctgtgctgtgtgtcctggggacaaaagcccttgttgatgggatgtgtgcaaaagctgctttgtctctagccattacgttttgcagagtgccaagcgtgctgcccatccctttctctcgcctctatgattttatagagtccgattgtcaggtagtatatcattaacagggcttgtctaaactctggggattaggtggtggggtgggcagcccccacgtagctcactcagcaaggtgatcttctttaaggagggaagtttgggttagtcatttttatgtgaattttagctagccccattattcctgtgctcctggtaggagctaagcaggttgtgtgatcctgaatgggctcccttggagcctttttgtccccccagtccaacagatacttgatcacttaacagacaccattaaaagggccagctgcctatcatttgccttttcattatgaaaccccagagaactcaagttggggccggggtaaagagtttataaatgaagatgcctatctccttcatgcctggcaaggcttttttttactatttgaggggaagattcaggctttagaaacagaatgtgggtgaagccagcctcttgtactttccttgcctgctgtttctttactgtacctgtgcttttaaaggattgagagtgaggggtgttgtgtggtaggcagcaagagtctggagagtctcactcctactcatcattccctgctgttccaaatcaaagctcacatctctactttaagagtagtaaacttcacacaaaactctgacagcatgggagaatgaacttctttgctggcaaagaagcagatatggtcctagaaaaagagaggtcaagccttttcttg

SEQ ID NO: 62611 - DNA, 1080 bp, Homo sapiens
tcctatccagaaaaatgtcaactctcataggcccatgagcattttgtcaagtaaaagggaccagggaaggattagctgtgcttttggttactctgcctatattagtttcaaagggacatgtcatgtggtttcataaggtatcatccttctctggatctcgagggagcaagacaagtctgttattggtcctacctcattttggcaaaaagtaaagttattggttctgtgtcagatggctccactgagacatggtctcattgacttttagatttcttaaagggtgattttggctatcactcctttaggaaacggtggggggaaaggagcaggtggtatagggccctagaagaaggcagtggctcctgagcatgcttggttagaggcagctgcacagggaccctacatttcccaaagtctaggatctgggaactttcatgtggaaactcattttcatgaaaaagaagaggctgggtgctaattgtgaggtttgcattgtctgcaagaaaatggggaatggaagatggttgagaaccttatttattttttttttttagcagatacacattgactgcaaggaaaatggtaaggatggaagcagatttccgtttaaagaaaggatttgttctatttctgactcatttagaggaatgtggagcctttagtcagtgcaggctgttgacatactgacttgtgtgctgtgttcacctggagaggctgatagcatacagccagagccatttcattttcttgtttgattctttggcctctgtgtcagtgaagtgcttaggcttgcatccagacagatgcctgtattctgaaaagccacctagagttgttccccgccccctgctccccccacgactgagtcttgctctgtagcccaggctggagtgccgtggcgcgatcccagctcaccgtaacctctgcctccctggttcaagcaattctcctgcctcagcctcccgagtagctgggaatacaggcgcacaccaccatgcctggctaatttttgtatttttagtagagacgggcttttaccatgttggccgggctggtcttgaactcctgaccttgtgatcc

SEQ ID NO: 62612 - DNA, 1036 bp, Homo sapiens
gtatttttttttttagagatggggtttcatcatgttgcccaggctggtcttgaagtcctggactcaagtgatctgcctgctttggcctcccaaattgttgggattataggcatgtgccacagcacccggcctacttagctttttaataggaactcagataacatttggatgaacaaataaatggatgaatggatatgtaagattttcattaatgatggatcaacattctccaaaagcagcacaatgttgtgtttgagccgaataataataataatagaacccagtaggatgttgttaatgtttctgttgagctgacatcatcacctttgatagggccagccatccaccttagtttatttgatttgttgatgtgagagagagtagttagtaatttcttttgtttttctcattcttccttacccacaggtgcatggattgcttttaaccaagtaaaaatggaaactttgatggtttctaagccattaagcaaagattgagcaggatgtgcagagagaagtgtgtagttgttggagagagaaatacttgaacagagcttcatggagtcagcttattttacttccactgcaggaagaaggggcattggagaggcaggctgcatttaaatagtatgactttccatcgtctgaaaacatgggttgttttaaaggcagatttatactgacattttatattcaacatttatctatggatcacagttgttaccctctcactctgccacatcccggtgataagtcgttatttttatccccatttgttggggaagggagtagagatatagaagggttaagtgacttgctaaggatcatggaaccagacgctaaacagagtcatgattagaacttagagttcctgactcctatgctcagacacagatcactaagcaacatttgcttgcctgcaggaagaaaggccccctaagcccccagaacaatctgttcagcttcactgtgctaagtaacatccaaagcattcacagctttgtgaaaaagaaattgtacatggcctgaccttttag

SEQ ID NO: 62613 - DNA, 1033 bp, Homo sapiens
tatgctgtttgactgtattagctctttgttattattggggaggtagccagaggtctccagattcccataatgaatttacaggtgtgatcttatggacaaggaggagtcagctgtattagttgggggttcaatcttgcctgataagcttttcctagttggttttacagatacgagccctgatctactccctgctgccactgtctgtttctatgatgcatgtcaccatgatatctgagtatgtatgaaaatatatttaggctaattttaactagaatatggaaaggaaaaagttctattgctctgcattgctctgttttcagcaatcactgtttttcaccacatatagaaagtttgaaagctcttctctgatgtctaggcaacccagatctcccagtctgagtaaaagattagatcttaaaactctccactgatagaggtagaaaactgggttttgggataagatcatactgaaatagttctttacttttgagaatagaatgaaagctacagtcatctttgtattcagaaaaaatgtccatttgcacatatatattttgcatatagtttcacagagtttctggatcctctgaagccccttgtgtcaaaaacctctgtcttaattttaagttccacagcctcccaattaatcctgttctcacagaaatcttagtatctaggtaaattattttattttattttattttatttttttgagaaagagtctcactctgttgcctaagctggagagcagtggtgtgattgcgggttcaaacaatcctcccacctcagctcctgccccaagtagctgggacttaaaggcacacaccattatgcctggctaacttttgtaaagatggagttttaccatgttggccaagctggcctcaaatttctgaccttaggtgatctgccctcctctgtctcccaaagtgctgggattacaggtgtgagccactgcgcccggccagtattttttctttatttactagtcacactgcgctcctactgggaactttaggttagcaatctcctt

SEQ ID NO: 62614 - DNA, 1004 bp, Homo sapiens
ttaggagaggagagtatgattgtgtgagaggttgagattgaaagaatgtcaggagagttaaagagagatcaaaagagatggaaatgaccaacagtagaatttcttaggtagcaacacctccttttaatataaaggactattattgctgcctatggatagttgtatgattgttaggctctaaaagcataggattaaagagaaaacacaataatgatgcagatcttcagatgttggtatagttgttggatttataataagtacacatggtttatgtctataacttgaatgaaattacacattgtagtactaaacaaggtggtagtagtagttgtttccgcctgcatcttctgattcccttctggttttactttctctttcattctattttctttcctttttgtcctagctattctatctctggcctctgtgatctctgtggcttttctctcattctcgtgatctgttgtcctcttcctcattatcctgttccattgtcttgtccacattgccttctattcttcgttctggtctgtctcctgagactcagggcttcctgttattctcctcctatccccattttgtatcctctgctctcttgatgaatcgacacttttattggtatgaagtgttctttgtgttattatagtcatgcattttactttttacatgtgtcataaactctagaatacattgccctcatttttgcttaaacaagcgattatcttttttctttttttttttttttttttgagacggagtctcgctctgtcgcccagcctggagcagtggcatgatctcggttcactgcaagctccgcctcccgggttcacaccattctcctgcctcaccctcctgagtagctgggactacaggcacccaccaccaggcctggctaattttttttggatttttagtagagacggagtttcaccgtgttaggcaggatggtctcgaactcctgaccttgtgatccgcccacctcggcctcccaaagtgctaggatt

SEQ ID NO: 62615 - DNA, 1061 bp, Homo sapiens
gcgtgagccactgtgcccaaccttccggcttcttagattgcttataaactatatagtcttgctttcgtaggtctgaaataatgatacaaattttacttttaggtaagtaggttgcagtttgcatttttccataccttttgggtgtttagaagtaagtctgatcctttatttcaattcaaagaccatgaacagttgctttttataacacttaacagatgagtgttcagcttattttagctggggtccctgaacttcattatcttagggttcagatttgtttttgctatggactttatttctggcttattttatatcctagttttaggatgtgctatttactttgtaacacgtattactgtagtttcaattttttcattttaaaagaaaggaaactgaggctcaggagattaattactttgcccagggttattctgttagtaagcatcattgcctagatttgaacccaaattttcttactataaattctgaactgttacattcccaggtgtattagttatctactgctgtgtaacaaactaccctagacgtagtggtttaaaacaaacatttatcacctcacagtttctgtggttcaggaatccaggagaaacttaactggatagttttggcatagggcctctcaaaaggatgctttttaaggaataaaggtaatatgcatacttgaggatcacattaacgtggcacagcttttcttaaagagtgttaaagagaagaatgcagaagtggcaaagaattaaaaaaaaccttaaggcttaaactttattaaaataagatgatgaccaggttagttggggcagcaagtatctgagattctactggggctcaaaaatctgctttcaggctcacctaatggttgttggtaagcctcagttcttcaccacgtgggtctctccgtagggttggtaggcatggcagctgtctttccccaaagcagttaatctaagagagaaaaggggagcgagagcccaggatggaagccatagtatcatgtataacctaatctcaagtaacatatcatttctaatggtcacacagaccaa

SEQ ID NO: 62616 - DNA, 1036 bp, Homo sapiens
cacaggcatggcagaacttgagtgagtttagagctaaatttatagcttcaacctccccctttactattccccactctgctcttttctctcttaagaaaaatggtgaagatattccacatgaagtagagatctctctcagtctctctctcttcatgttctctgtggaaagatgacctccttttcacaagattaggggtggctggttatggaagagctgcttattagcagtgggcctggtataattgcttttcaaaaatctttctaagaaaatctttaaaggagttgtttttcacaaattgtaacagttccttgtaattggagtctgtaggcttgtcagatcttcagaaaaggtattgggaaagggccaagggatgtttattactaatccatggtaagaggtttttgattttctgtcagtcttcaggaaagcccggaatagacagggtcttgcctgcttccacgctgcctgtgtagcagtttgcttctgttgggctgaacccattcccagcagagcacagatttttcttcttgctcctaaaccctcatgtggagcctgcacatgaatcctgcagcctctgtgaaaaccttaaactatcacaaacagagccagctccttgggcagatgggacggaagagggaataggaaaacagattactctcattcctctcagcatctgccttaagtccctgcgtcttaatttttattgtttttgcttggaaatttttgaccagttagagatacactgggaaattacactaaagaaaaatctcatggcttaagtagggtttgacataaggctctaggctcatcctattagctgtccagctgatccttgaaagtagttctcaaagtccaaggatttgtacgaagtgtgatagattacagtttcttaaatatagctctcgcttcttactttttctctatatttttattaggatcaatatgccaatgcatttttgcatgatgacaacatgaattttcgagtaaacttacatagaatggtaggtgtttcttttgcttcttgttttttcttag

SEQ ID NO: 62617 - DNA, 1047 bp, Homo sapiens
ctatgagcagtcatgaaatctttctagattttgtggtaggtggtgcttagagctggcagatgagagggtgggtggaaaaggaaatggacctgactattcaagttctatcagcaaagggctgatgtgagagtactggccactatttgagccatgacagtaggaaccattgtgagttagatggctttcaggaaggtggttagccatttaacagactaccaggatattaaaaaaataaatcttctgggggaattcttttgcctaggagggaagcaagaattactatagtagtaccttgattttcatttatggattttgtgggaagagaaagtgtgaatgtttccttttatgatatacgtccttgttctgtattgaaacagatgatgtaaatctggatgatttacagagaagagtttcttttttctttacagatgaacacaggcttcacagtggcaaactctgtctgattatccttacatgtattgcagaggtaggtctcacgagccttctgctattaggcagtcttttacaaagtgctatctttccctgcctcccctcaccccattactgtctcatgacatttagggtcctaaagtttaggagagaaaatcttccccctttgtattatctgtcttctcccactagagtgtagtcttcgatgaagccatggatagacagggtcttgtctgcttccacgctgtttagcactgtgtttttaaactgtggagcagtttgtttgtttgtttgttttgagacggagtatcgctctgttgcccaggctggagtgcagtggcatgatcttggctcactgcaacctccacctcccaggttcaagcgatcctcgtgcctcggcccctctagtagctgggattacaggcagtgccaccttgcccggctaatttttgtaattttagtagagatggggttttgccatgttggccaggctggtgtcaaactcctgacctcaggtgatccacccacctcggcctcccaaagtgctgggattacaggcgtgagccaccatgctcggcagtggagcagtttaaaaaa

SEQ ID NO: 62618 - DNA, 1123 bp, Homo sapiens
taagaaaggttagggacagaagagtcatctgttttggtccctactgggtgtctcaccatgtctttgcctcccaatgaaggcacacacacttttgtttgttgtggaacaggaaggccgccatctgaatagctcttttgctttttttttttttttttttttttggagatggtgtctcgctctgtcacccaggctggagtgcagtggcacgatctctgctcactgcaagctctgcctcccgggttcacgccattctcctgcctcagcctcccgagtagctgggactacaggtgcctgccaccacacctggctaatttttttttttttttttttttttttttagtagagacagagtttcactgtgttagccaggatggtcttgatcccctgacctcgtggtccatctgcctcggcctcccaaaagtgctgggattactggtgtgagccaccgcacccggctgaatagctctttttatagtacctggtatccccttgactcatctacatctgctagtcaattatttggttatcagaacagcctattgatgtgttttaggttgatctgatgagatcccaggtctggatgggattgcaaatgttctctgctctcttgtagaataatcctgtatatttgttgaccccagtttttttttttttttttaaatgtctgtggtgccacagaaaaacttatgtaatgggaacctagttgcttaagataaattagcacacagagcttattagagattagcaagcatcagtcgtaatcaagtactcatgagaacgaaatacagaagtagtcccttctcagctttttttttctttttttttttttttttttgagatagagtcttgctgtgtcaccaggctggagtgcagtggcgtgatatcacctcactgcaacctccgcctcctgggttcaagtgattctcctgcctcagccttccaagtagttgggactacaggcatgcaccaccatgcctggctaattttttgtattttagtagagacggggtttcaccgtgttggccaggatggtctcgatctcctgaccttgtgatctgcccaggcctccctaagtgctgggattatgggtgtgatccactgtgcccagcctcagtgagctttc

SEQ ID NO: 62619 - DNA, 1042 bp, Homo sapiens
cttattcacttgctctgactaggacacaaactaaagattttgttatctgaaaaatggagagtggatctcatatagacagctttggtctgaaacctgaatattgttcccaaagatagctttatgttggttgaagtcagcctgcttcctgtgaagtttttcctaagttagtttctgacttcaaataagcaacttctaggaaagatacagagtgatgaagatgtgtaggttaactgtcagagggactaaacttacacactgaaaaggagagttggacaaaagtactaggctttttctttaaagcgaggtgatttagtaggcaagatgatttactaggcaagatgatttagtaggattctcattatttcatttattacttatgagtcttttaagattttcaaagtgggctggttttggtgtgtgtgacttatggcctagagttccaagttctccccaggtggaagcagcttgttttcttcactgataaaaggcttcctaggcataaagctcctctcatatcctcctgctataagtttgcaattccccttttcttccacaggtgggcagcatgttcatagcagatgcccatgagaaaatctcagtacagtaagtgcctgacattcttgtgcagtgacttggactttagtgtgggctgtcctgctggatatgagagtgtgcagtgttacctcttgctaatcttttacagaatcatacttttttggtgattttcaaatgtttcatgggttttgaacattaatggacccttagaaatttctgcttttcatatgtattgagcgacaataagctgaacaactgttgccagactatctctgcaatgaaacaaaagagggatgggtgtctgagccagttgaggacttaactgggttgaggtggaaaaacagagggaagataatgaagtagatgagaactggtcctaaggaattaaagtgaaggccctgactcctgcctatacacttttgcatacgcccaaatggcaagtaaaggggaactttagaaatgcaaaggaattgataatgaggcgctg

SEQ ID NO: 62620 - DNA, 1055 bp, Homo sapiens
gaaatttttcctcacatcccataggtgtaaggagaggtcattggttctcatcccccttgtaggagatgatccagttgctttatgagtttaaatatatgaccatttatgctgcccaactgagattgggtctggaaaaacccaagaactcttccagtgctctaagtgatgggacaatcattaaattccagtgtcctgaccagattgttgtttgggtaattacatcctttttttcagttctccctgcagtgttatttgggtatcagatctccataaatgacctctctggctgttaagcagctgccactttccaccccaaggtggctttgctttacgggtgggtgaatcagtccttgcatgtagtttgtgaaatggttagggagcctttgggatgaaaatataagttagcaacttataaatatgtgccttatggcaagaagcttttatgttccccaaaagacagctatctgtatggacttagtaaattattggtagggtaggacaaaatgagtgttgtggagcactcacttactttttagatgcaagtaagagggaaagatcgtagaagtgatggacataaggcctgcactgatttagcctaatggtagaacagaactgaggtgtgtatgtgtatttgtgtgtacacttgatgaatgcccagacacactgaaaaattaactggaaatgggaggagtcagcaggcaatatggattgggactgtgtatcaggagcatcactgtagagagagggccttatggaagcatttttgttaacactttaaagatagctaacgggctttcttaactaggtcagacttacctggagtctcttctcttatttaacagtctgtgaatccttatattgtgaagctgtctatcgtggatgatgaggccacactcaatgtgagtatctggatccttgtgtattgtcttacttatttgcattcaatggtattactttcagtgaaagtacatttagaacagagagcagagagctattctgtcaatttcatccggttatagagagggaattaatatttctttttagtgcgtcagtgc

SEQ ID NO: 62621 - DNA, 1092 bp, Homo sapiens
taatgaaaaattgaagacagtgccttattcatatgagttctggagttctttttgcccctgaattaatcaaggtgcagatttataggtttttgagatgaagagcagaacccagagatttatacttgggttggcacatatatttgattcccttcaaaaggcagaatacacagaaaaggaaggggaccactcaaggaagaccgggggcttcattggagattgcttttgaggagtaggaagcatttggcactgagtcctggtaactaggagtacattactgaacccaaaagtcaggagctgcactgaggcaacctgactttcttcacttaataaatagcagtactgtgagaactgggccagctggagagagaattttcttttttgagcttctggatcttcacctagtgatttttgatatgagtcctagttgggctttatttggccgggttgaaagtgatgggtaacacaaaatctggagcttattcttataagaagagatatggaagaaggggaggccgtgagaaaggaatacttaaagagggactagaatatgcagagcaatgtgaatgtgttataaattccaggatctgattgttttcattgtcttggaggaactgatgaatggtgggtagagctcctaataaatatgaaatttattcccaacacctattttactgatgatctggaggggctggcatggtagccattttgatctctgtcatgtgtaatagcctctggggcctcattacaacagcaagaaaaatagctgtggaaaaatgctgaggatagttaaagagaggtgagggttatatgtgataggaacacactatcatcagtaatgaatatttttggagcattctactggatgcagtccactctgaggcaatggcttggcttcatgattgtgatccgaatcctggctcagctcagtagggctctctgaaatgtcagtctgaaatattggacatggccaaggaactggagagaatcatatttctggaatgaagtatgcatctctagtctttcagaagcccccagaagaattaatgtagtgggcaagggcgagctggtgggcctaatttatctgggctttgc

SEQ ID NO: 62622 - DNA, 1050 bp, Homo sapiens
gtgaaaccctgtctctactgaaaatacaaaaaattagccgggcgaggtggtgggcgcctgtagtcccagctactcaggaggctgaggcgggggaatggcgtgaaccctggggggcggagcctgcagtgagccgagatcacgccactgtactccagcctgggcgacagcgagattccatctcaaaaaaaaaaaaagaaaactaaggttgactatgtatagtattcttaatgcttttggtgttagctgggaaggctgaatgtgcttatattctggtttcagacagaggaccccagtaagtgcagtcctcggttttgggaggagctctttctcatgaaggtaagagttggtggcatctgtggaatttcctggtaactaaaattgccttctcatatattctaggcgctaagctaaaaatgcactctgccccttatttgtttccttggcaggtgaatttagagtacctagaaggcaagctggaatctcttgatggtgaggagttaatgaagatcaaggacaatattaattgcttattccaacactgcatccaggctctgggagaggagcatccaattcgggttgtcaatgcattgcaggtacaaggctgggagactggggaagtcttgtttaacaggagaaaggaattgtaacacatctgtttgaactgaggaacctagagttgctctgaggtatgaggttttcttttttatttctgtaagttaccaaatatttatgccacgtttgtttagccatctttctatttatacaaattgacacttaggagtaatcgtatccatttgtataatttgatctaatgctaaagtagattcttagacagaattcttgtttttgcttgagaaagggaagaagtagagaggaaactgaggcaagaatgattagtctttatcaaaaatcagaagactgctgggcacggtggttcacgcctgtaatcctagcactttgggaggctgaggtgggcagatcacttgaggtcaggagttcgagaccagcctgaccaacatggtgaaacccacctctactaaaaatacaaaa

SEQ ID NO: 62623 - DNA, 1006 bp, Homo sapiens
ttcactattctaaaatgtgactttctgttcacagattctctaaccatggcacaggtagagaaacgtggaggtttgctccggaaatcttcagcctccaaaaaaccactgaaggaaaaagtggtgctgatgtatgatgagatcttcatggtaaggcctgcggccttgttgtgtacagcttgagtctttagtttcttagtccaagatgagaaatacccttacctctgcctgctaccttcaggttccttgggggatgtgggacaggggagagaaagagggtttgagggcaaaaatgaaagctgtcagagtagagattataatcatgtattaattaatataggttgttattgtgttgtccttataggttgttgccatgagccaggtaaaacaattgaaaggagggaggaaggctggggaagctccttttctgaatattttaaagaaagacttgctctccttatgctctaacttagggctatcttatcctagatgtctcatgaagtttcttttggacctagaattctataattcagatacttttaaaggatacattattatattccatctcaagttgttggtgaaggaaataattacttaggactatctcattctccaactataggggataactgaggaattattagtaattgggtgggggatttctttgggtcttcagaactgattggtccaagcctatattgtaaaatataccctatcaggggctgggcgcggtggctcccgcctgtaatcccagcactttgggagggtgaggtgggtggatcacaaggtcaagagttcgagaccagcctgaccaacatggtgaaaccccgtttctactaaaaatacaaaacttagccgggcatggtggtgcgctcctgtaatctcagctattcgggaggctgaggcacaagaatcacttgaacccgggaggcagaggttgcagtgagccgagattgtgccactacactccagcctgggcaacagagtaagaccctatctcaaaaaaaaa

SEQ ID NO: 62624 - DNA, 1021 bp, Homo sapiens
gggcgacacagtgagacactgtctcaaaatgaaacaaaacaaaaacgtgttgcctcctttgtatattgggtgaatggctcatggtcagataatggtaatattttctttgacttagccacaactcttggacagatagctacataagattttcatctccatcactaagtattgtggatactatagtcagtgtgtcttgtagtgatcttctttcacatatggggaaatgggctacagtcccaaaggaagtgtgatttaatgtggggagaatgatatgtgataaggtgagtgttgcttcaacgccctttttagagactgcagaggtttcatttattctctcagtatcatctgtctagatactccttccttttccaagtctggtttaaggctgggatgagtacttctcaaactttaatggtcatcagaattacttggggcagggctttttaacctctttgatattgacatgttgggctggataattctttgttgtgggaggctgcctcgagtattgtatgatgtttaacagcatccctggcctctacctagtaggtgccagtagtacctcctctcccagttgtgacaatcaaaaatgtctccagacattgacaaatgtcccctgggaggcaaaattgcaccagttgagaatcactgatctggagtgattgttaaaaatgtagacccaagctaggcactgtggcttatgcctgtaatcccagcactttgggaggccaagtgggcagatcacttgagctcaggagttttgagaccagcctgggcaacatggcgaaatctcgtttctacaaaaaaatgcaaaaattagccaggtgtggtggtgtgtgcctgtagtcccagctacttgggaggctgaggtggaaggatcacttgagcctgggatgcggaggttgccgtgagccgagatcatgccactgcaccccagcctgggtgacagagtgagaggttgtctctcaaaaaaaaaaaaaaaagtttggttcaatagaatggtaggaaggcttaagaattt

SEQ ID NO: 62625 - DNA, 1013 bp, Homo sapiens
tctctacaaaaaatacaaaaatgagccgggtgtggcagtgtgagcctgtagtgccagctactaaggaggctgaggtgggagggtcgtgtaagcccaggaggttgaggctgcagtgagctgtgattgtgccactgcattccagcttgggcaacagagggagactgtctttcggtggggcgggggagtgggggaagaagatgattatgggactttatcttataattttcattttatatttaggtggtgttcatgaggcttgtataattgagcaggggaagaaatgagaagatatgagtgacagtgtgccgtttgaataagttcagggctggagcaggagaaagtattaatttacaggaatctcctgctcattgagaagatcttaccatgaattttcattctgggatgtgtcagaaaatgtggtttctaatcagaatttcctgaaatactgtcaatttggagctggttcccccttcggaaggaggaatgccttccttcttgtgtaggataatttgaaagggaaccaaaggtggtcatgtttatttaaatgaacgagagctcatcttcattgatcatttgtaacattaggcaaactgagtagatgctgatgggaccagattaaattgtcttttgtgaagctagttgacctgtagtaggtacagactggctgatacctgggaatagtcctggttttgccatttgcttcttagtcttgggaaagtctctgagttacttccattttcaggtataggctgaacacccattctgaggggagcattgtctagagcacacaagctatggaccctgccttgtagtggtttgtgtgcttccttaatcagtctggttctgtcctagcttctagaaaatagagatgatgcttgtcaggtgatgtcctgagttgactgacttctttctttttctttttcttttttttttttttccgaaatggagtctccctctgttgcccaggctgtagtgcagtggcccagtcttggctcactgcaacttccgcctct

SEQ ID NO: 62626 - DNA, 4042 bp, Homo sapiens
ccaggctcaagtgatcctcctgcctcagcctcccaagtagctggaaccacaggcatgcaccaccacacccggccaacttttcaattatttttagagacgaggtctcgctatgttgcctaggctggtccctgcagcctcgacctcctgtgctcaatcaatcttcttgccttggactcccaaagtgctagattacagatgtgagccaccgcgcccagctatgactcctttctttctcgtctaggttgttcctcaaagtcattcaagctgtactcgccgaaggagcccccgaacggcaacgcctttccccccttccatcccggcaccatgctggatagggatgtggggtaagtgagtctcttggccacttcctaacccttctccaggtgggatcctgcctggaaaggggagggagtagccccctgcccccaataattcctatcttcaacccccattctcatagcctcttcctttacacagcccaactcccatgtatccgcctacatacctggagccagggattgggtaagtggagtccagtggggaagaaggtgctttccactgggtgaaggccgaggtagggggtggagggggcaggctccgctcctactgacctctctccttcacttcctccaggaggcacacaccatatggcaaccaaactgactacagaatatttgagcttaacaaacggcttcagaactggacagaggtatggccaagggaaaaggggctgggagcaggagggccatctgggcaccctatgggatatcttatgacacatgaacacccgttaccatgctccctaggagtgtgacaatctctggtgggatgcattcacgactgagttctttgaggatgatgccatgttgaccatcactttctgcctggaggatggaccaaagagatatagtaagtggcctctggggtcttgctatgagggtgtatacctcctatgtcgttctaaggtctagaagtgggtctgggagtgccaggggatatctagattggtaggggaggcatctgcctggccccttttgcggtccctttgtcctgaagagtttgtcccatctctacagccattggccggaccctgatcccacgctacttccgcagcatctttgaggggggtgctacggagctgtactatgttcttaagcaccccaaggaggcattccacagcaactttgtgtccctcgactgtgaccagggcagcatggtgacccagcatggcaagcccatgttcacccaggtcagcaacccagctggatgtggaacaccatggcacctgggtttgattcccatcctctctcccagtgtatactcacagctgttccccagggaggcataatgtgaactggcaaaataagaagggcgggtaggcatgttgcaaccgtcagcaaacatgtattgtgtttgtatgggatagttttctgggccccaaggctacacgagtgaacaagagtctgccctcatatagcttagagcaggtgggtgtatcactagccacatggggagaggacaaggatctgttaagcttttctactgtgtgtctgtgtgtgtaagggccaggtatatgggtggggggtactgtgacatttatgcacccagatttaatgtgcaggtgacaaaagtgtatgcaatgggagagttgtaagcaaatgggagactgtaatagacataccttcaggtatggtatgtggggagggggcagggttctgacaagcctgtccccaggtgtgtgtggagggccggttgtacctggagttcatgtttgacgacatgatgcggataaagacgtggcacttcagcatccggcagcaccgagagctcatcccccgcagcatccttgccatgcatgtgagtcgtgggcaggacccaggatgcaagagtgaaggcaggcgggggaagggtggaacaaggtctgccatttcccgactgactacttagacagagggttagggtttcttcatctgaacagcaggtttaataagagactatcctctctcaggagtgtcacaatgctcagatgatagggcaggtgagcagaggcaacccaggtgtcagtgttctttcttgtcttttctcccactctaggcccaagacccccagatgttggatcagctctccaaaaacatcactcggtgtgggctgtccaattccactctcaactacctccgagtgagtctccgaccacccagtttctgccccagtccatttagtctcggctccatgtctgtcccctgacaagccacctccttgtctacccctagctctgtgtgatactcgagcccatgcaagagctcatgtcacgccacaagacctacagcctcagcccccgcgactgcctcaagacctgccttttccagaagtggcagcgcatggtagcaccccctggtgagtgccttgcacctgctcttaccaggatctcacaccgctccccaaagctgtatctttatttccttttgaagttttccccaccccttccttgttcccgggtctacaaaattgggatcagggcaggctcatgctccttgggagccacaatggagaataggggacctggggccctctcccatctgagtctccgtttaccggcacagcggagcccacacgtcagcagcccagcaaacggcggaaacggaagatgtcagggggcagcaccatgagctctggtggtggcaacaccaacaacagcaacagcaagaagaagagcccagctagcaccttcgccctctccagccaggtacctgtaagcatctcggctttcttctctcttctgggctgccccaccactcacccctgacccctttccaagcctgagctcactagcaggcgtagaagcaaagacagtttttctcatgtactctgccagcatgggctaactgcttttactggtgagagagttcttgtcaggcacttgcatgggtgtgatcacacagactcagccataggaagctagggcataaagggacagagacacccatgaggacatacggatattcaggacagacagcttggggctcacagaccatccagcacacacactcacactgatagacatgcagactggagtgtttgcagatccagaatacatacccttgcacatgcacacactgccctccctcatgtttttgatatgctccctttcttacatgtggacagaagttgaggagtcccctaaaattttggggagatgggctagggagctaggggagtagagtgacttctagaatgtaatggatatgggctaaaggctttgatgctctggtgttcttcagtaggaaggattccaggagctgagggtgtcaggagttggggttttaaattcgggtatgaggagggggtggggactcttgagcttccagggtgggtactggggctctgggggtatctgccgccctgggccgggcgagcccttgccccgattatgtttggggacctccgccactctcaggatgtgatggtggtgggggagcccaccctgatgggcggggagttcggggacgaggacgagaggctcatcacccggctggagaacacccagtttgacgcagccaacggcattgacgacgaggacagctttaacaactcccctgcactgggcgccaacagcccctggaacagcaagcctccgtccagccaagaaagcaaatcggagaaccccacgtcacaggcctcccagtaaaaggccctgctgtggccacccagtgctctgcctacctgccccacccctcacagccccagggagcagaagacagaatgaagagactgagcatctaaaatgggcagcctccatccacccgcttcagggaggaactggactctctgggggcaggtgccaagatttgcccccccagtggccctgggctgggcctggcctctacagagccttttagggggagggggtactcatgtggatgcctacttggaacctgggcctctgagacatgtcctgaccaccccccagggcatttgcctccatcttcaccccagattgtgggtttcccatccccctgactttacccctttcaagcctggggtt

SEQ ID NO: 62627 - DNA, 1113 bp, Homo sapiens
ccccagcccagagccgccggggcgctcaggcctgctgacctgtggccagtccctaaagggaggaggcctgccctcgagtcagcctggttaccatggcaatacccagctggaggtgcccccctcagccccgggatgcagcttccaccctgagaaaactttactagttctgggctcttctctcccccttcctaaaggcttccaatttgctagaggtgggaggggggctatggctgactccagggctggatgacacatctcctccgtccccccaccttgctgcctctactcctgctgctggggacaggcagcaacagggacagatggtctgggtgatgtccctccccttctctactcactcccaagcccttgtgctggagccactgggagttgtggctctggagagatgctgagtttgtgtccattcactggaggtgtaaatagaggcccagagctttgggctctagctcctcagagctatttacccaggcctagacaatgcctgttcattctctagagagagaaatggaggctctgagagtttttttttttttttttttacaaaattggagagaaacccaggcgtcctgcctcctgtctcttcaggttcttgagctaacacatttcaagtggcccggaaactgaggaggcaggggtggttaagctatgggagaaaggatggcctagttgggggatgagggccaggtctgagaatctactcttgggtttattgcccaggcctggcctctggtgggctgtgtgagtttgggcttcctgtgtggccttagtctgcctgtctgtggattggggagacttggtggctgggtggggactgtctttctggagacacaggctcagtccagactggcatgtgaaggctgtgtgtgctgttcttggagcatatggatgtggcccgtgagagctcgtgcatggggtgagggcctgttgcgggcatctgaatctgcctggggctgctgggttccagcccttgataggcatgttagggcgagctgagggtgaaagcctgctaggcaggatgaggcacacgtgtgtgcaggcacacacaggctctgacttggcatcttcagagactgtgcagtctgggaccctcctttt

SEQ ID NO: 62628 - DNA, 2679 bp, Homo sapiens
ggacctgttctgcccctgtgcaactgggtaaatctggtcagagcagagaaaggagcagacttgctagagaataactagaaggcctgttttgaatggtttgccagtcgatacatcttggcatttaggggcccctccaccccacagcgagactggagggcccttgtagtccctcctgtctgaggagacagggtgggtgtggggttctgagctctgggctggaggcaaaagccagagcacatttccccctccccatgaggacagtgatttgaggcctggagggggaagggagtaggaatggctgcagggcttggcttgtatctggtgggtttagaagtgcagggttcaacccccccaccccccagcccaccctggtcatcctgtctcagtgggttctgttaggatctcactgttaggatatttggccctatgtgctatgaggatctcttgaggtactgcctgtgaatgcactttggaaagtttaaaggcagtgggggagaagtgggactaccccagagttaagctgtaaatttgggagtcagtgggagtgtcttaagtcctggtgataggctgtatgttgcagggtctggctgaatgttatagatttcagtatgtttgtgaaagctggggtttattctatggccaggctgtgatgaggaatggtacgcaggcttcagagagggtgatttataggttaagtccttgcataataaatgatcggggtgtgtatgtgataggctgtcacaggtttaggggttataacacagttttggtgtgtgtattgaggtcaggatgcgtgtcataggtcccagtgtgtatgacttagactgtgtgtgtgtgtatatatccaggatttgggtatatttaggatttgagatatatcacaggttgatggccagacgcggtggctcacatctgtaatactagcactttgggaggccaaggtgggtggatcacctgaggtcaggcgttcgagaccagcctggccaacatagtgaaacctgtctctactaaaaatacaaaaattagctgggtgtggtggcatgcacctgtaatctcagctactcaggaggctgaggcaggagaatcgcttgaacccaggagctggaggttgcagtgagccgagatcgcgccactgcactccagcctaagcaacagagcgagactccgtcttggaaaaaagatatatcacaggttgaaatgtgtatcaggtagtgatttatgtgaaagtgagatgtgttatttatgtggaagatgttcacagagccaggtgcaatattactgcacagttaactagtgagtatgtcataagaaatcctgtccttggagttatgtgtgaatatagttgggggtaggagacaggaagtagagaaacagacactcaaattgcaaagaaggaaatagaaggttcgtgctcccccttcccgtgtgtgtgtgtgtgtttgtgtgtgtgtgtgtgtactatgtattttccttttcctatttgtccacgagtaaggtctggcccactacccaagttttagaaatattccctcctgctacaacaaaattaccttaggaaaaaaaatagaaatatctgctcccttgggatgccctgctggatgggagaacaggtcctatccactaaccacacgtttttttttctggggtggtggggaggattcagcagcaaactaagctccttctggggacccttggatggccaagttggctttccctagctctgacaatgcctctttccctggcacccacttgtcttcagtggtggtggggaagggggcttcctgttaagggggatctaagtcaaggcttggaatttagctgggttgggggcagggaagcctggagtgtcccccttcctccaatcagtgtttacagtctgatgtcagaatgtgtgtctgtcaaaaataaccccctggagcctctccccccagctgctccaggatttcaccaggggagcccaggctggcagtccgggccagccttcaacctgagcgatcacaggggcgagaaagatttgggggaggtttgggaggtgctttgaagatcttggagtctgcagagaggagcccgccctcctccatctctgccagtggctttggcccacctgctcactcctgagcaccgtgcctggggctcgggggaggcgggctgcatttcgttcctggcccccacaggcctctcctccatccaggtctctcctggcccaatctgatccgtcccctgtctctcccagtctctgtctctcttttgtttttctcagcagtccctccgtcccagcctccctccctcccttgctcttcctctttcctctcagggagggggcggggccggtgggggcagctccaccctccgcccgccctggggcctcattctgagagaggctcggagagagcgagcggggagggagggaggcagggagagaaagggagaaaggcaggcagccggcgggcgctgcgtgtgtgtttgagtgtgcgagtgtgagtgagtgtgagtgccgggtcctgcctctcctggtgcccccagcagaggggcccggtggcctggggagggcgggcgggctgctcggaggcagaggcagcaagaggcggcggcggggagagccgagaaggaggaggaggagagaggaaagagcggagcagccattgttgagggaaaccttgcaaacaaagaaggctccgg

SEQ ID NO: 62629 - DNA, 1087 bp, Homo sapiens
ggggtcgaaggctgagacctccatgtaaggatgcccagtgaggctccccgagcccggcgccgcagttcccttttcggagccacgtggggttgggggagcaattttcccgggagaacttgtctgcctcccctccccctctaggcggcccgggcatccacgtgggtcgggctcctggtggaggggggcgcaggcagcgggtccacgtgggggcggggaaggaacgtccacgtggctcccgtcccaggctgtcgggcatctagtatcggccttggagcctggctgacgcgaactgggtgtgtctccacgggtcccgccatctcctgccggggctggaggcccgggccgggaaggaaggtaagggctgctagagtcaactttgttcagagccttggaggttttttttttccctgctgcttgggtccgcaacgtctctccactgcggatggtgaaggactctccagatgttgcgggagtttgttccctgcggatggctgagtgtgatggggagggtagagggctgaggctgaagggttgtggaggagtgagtttgtggcgcttccgtctgaccggcttggggtgggttgtgagtcacgggcattggcgttttggttgccttgcagtcttgccttattagtgattcaaggggtatggggagtgtcaacatacacctgggacaaggttaagaaagggaaagggaatcctctcctcactttttcctccagcatctcttttgggaaggcatgctcctgtaatctgacacgcagaaactggggtggtccgtacttaaggctcttcggattttttgctggggatgggaaaagttggaggcggtttgagaactgttcaacatgttcaacagttgaacatacactggatgaggaggattctgttagatatttttttcttggccttcaaaaagtgttattgttctactctacagtggagggcttcttaaaagtttccacccagggtagaaggggcaggaattagtttgaactgttacctctcttaaacaattaagctgagtccttgacagcattttttgtgtgttactaggtgggagttgggctgcaggctgcctggtaat

SEQ ID NO: 62630 - DNA, 1050 bp, Homo sapiens
gtttcaccatattggtcaggctggtcttgaactcctgacctcaagtgatccacccacctcagcctcccaaagtgctgggattacaggcgtgagccaccacacccggcctgtaagctatattaaagagtttaaacctaatgctaagagcagtaaaatgccattgaagggatttagggagggtctcaggcagtgatcagatacatatttaaaaagtttctgactgtttttgaaccctggagggagcaggtttggtgggtgaaagctacttgggaggtttttgaagttagaggtgctgatggctggcttactttcagcctgggcttagcactcggatgatcttggtactctgggagctgtgctgtttgggaattgagtgatgggtgaggtcaggtgtgagggtgtgtctctgactggacacctgatggaggtgaagatgagtggttcatagagagctgggcattgtcttgagattccagcttagtcgctggggctctggtaggtaggtggtggcagagcaaatggagttgcagcctcttggctcaccctggagtgtttgcagagccaggtgctattcagctgctggtttgtaattataggattgtgaaggcctgggaggagttagtgcctaaaacctaccactttttgcttattctctgggcctggcctcctaacgcgtccttaaccagcctttccttttcctgggcgttggtactcagctctgttaggagggtatatattgccggggtgtggggggtgggggtgtggaagacacctgttgcttttttcttttggaagtggtgcggaatttcactttgttgcagaagaggaaagggaaggtctggcctgtctgtatgtgatcctgttctcaggcctttttacttcatgtttcctatgcggtagtttccccttatccacagtttctgttaacctgctgtcaactggggtctaaaaatacatgagtacagtacagtgagatattctgagagccagagagcccacattcgcataacttttattatagtatattgttttaatctattttattattaa

SEQ ID NO: 62631 - DNA, 4522 bp, Homo sapiens
gtgcttctctctgctctgctagcccagaagtttggcgacagtgttgctgctgctgagtttggccccagcagtggagggtacctgatttatggagcatattatcagctgctgccagagagctcatacccttctcaccttcttctctgctccaggtgctgctgcatgaggaggcgggtgattctggctttgtcagtctctctcggctgggcccatctctgagggacaaggacctggaaatggaggagctaatgctgcaggatgagacactgctggggaccatgcagagctacatggatgcctcccttatctccctcattgaggattttgggagccttggagaggtgagctggggctggactctgaaatcttcaagcaggaggtttacatgggaggttctagctcaaattcttggcatggctctgctctcccaggaccttagcttcttcctgggtgcccaacctgaatccttgaagtgtattttttgtctctaagtgggaattaggctgcaggctgccagattatgtcccatgtaagaattcctttcctagcttagactatagtccaaggcctttcccactgtctgggcccctgaactacatgtccagaggattctgatctctgtttttcagctcatttctagcctagccgatggttgtctgctgagcatcccacatcttatctgagggtaggggaatgtgtgaaacccaagcttgagtcaagtctgacaggtctctgttgacaccaagagctggtggatggtagctgagattggaatccatgccttctggtattcagatccttctcgctgccccattagctgagttgaacctgggagactgattctctcgatatccagtccttagtggcatagtaggtcattagggatgttggtaggaccttctggttgtttttctggagcagagcaggttatctctggaggaccagaatgaagtgtcgctgctcacggctctgacggagatcttggacaatgcagattctgagaacctttctccatttgacagcattcctgattcggagctgcttgtgtcaccccgggagggctcctctgtgagtgtgggaccaggggaaggggattagtacaaagtttagacccatgcctgtggacctactcatatagctctgaagcatagactgatctcaggtctttctttccctcttagctgcacaagctgcttactctctctcggacacccccagaacgtgacctcatcaccccagttgacccactggggcccagtacaggcagcagtagagggagtggggtaagcctgacctagagggtttcagaaactcccaggtgggaggaggagtgtgtggggacaggtctggaaaatactttcccaaagaaaactcctcctgagacctctcttctctcctgcaggttgaaatgtctcttccagatccctcttgggacttctccccaccctctttcttagagacctcttcccccaagcttcctagctggagacccccaagatcaagaccacgctggggccaatccccacctccccagcagcgcagtgatggagaagaagaggaggaggtggccagcttcagtggccagattcttgccggggagcttgacaactgtgtgagcagtatcccggacttccccatgcatttggcctgccctgaggaggaagataaagcaacagcagcagagatggcagtgccagcagctggtgatgagagcatctcctccctgagtgagctggtgcgggccatgcacccatactgcctgcccaacctcacccacctggcatcacttgaggatgagcttcaggagcagccagatgatttgacactgcctgagggctgcgtagtgctggagattgtggggcaggcagccacagctggcgatgacctggagatcccagttgtggtgcgacaggtctctcctggaccccggcctgtgctcctggatgactcgctagagactagttctgccttgcagctgcttatgcctacactggagtcagagacagaggctgctgtgcccaaggtaaccctctgctctgagaaagaggggttgtcattgaactcagaggagaagctggactcagcctgcttattgaagcccagggaggtcgtggagccggtggtgcccaaggagcctcagaacccacctgccaatgcagcaccaggttcccagagagctcgaaagggcaggaagaagaagagcaaggagcagccagcagcctgtgtggaaggctatgccaggaggctgaggtcatcttctcgcgggcagtctactgtaggtacagaagtgacctctcaggtagacaacttgcagaaacagcctcaggaagaacttcaaaaagagtctgggcctctccagggtaaggggaagccccgggcttgggctcgggcctgggcagctgccttggagaattctagccctaagaacttggagagaagtgctggacaaagtagtcctgctaaagaaggccctctagacctctacccaaagctggctgacactatccaaaccaatcctataccaacccatctctcattggtcgactctgcccaagccagccccatgccagttgactctgttgaagctgatcccactgcagttggccctgttctagctggccctgtacctgttgaccctgggttggttgaccttgcttcaaccagctcagaactggttgagcctctcccggctgagccagtgctgatcaacccagtcctggctgactcagcagcagttgaccctgcagtggttcccatctcagataacttgccaccagttgatgctgtcccgtctggcccagcaccagttgatctagcactggttgaccctgttcctaatgacctgactccagttgacccagtgctagttaagtccagaccaactgatcccagacgtggtgcagtgtcatcagccctggggggttcagcaccccagctcctcgtggagtcagagtccttggacccaccaaagaccatcatccctgaagtcaaagaggttgtggattctctgaaaattgaaagtggtaccagtgctacaacccatgaagccagacctcggcctctcagcttatctgagtaccggcgacgaaggcagcaacgccaagcagaaacagaagagagaagtccacagcccccaactgggaagtggcctagccttccagagactcccacagggctggcagacatcccttgtcttgtcatcccaccagccccagccaagaagacagctctgcagagaagccctgaaacaccccttgagatttgccttgtgcctgtaggtcccagccctgcttctcctagtcctgagccacctgtaagcaaacctgtggcctcatctcccactgagcaggtgccatcccaggagatgccactgttggcgagaccttcccctcctgtgcagtctgtgtcccctgctgtgcccacacctccctcgatgtctgctgccctgcctttccctgcaggtgggcttggcatgccccccagtctgcccccacctcccttgcagcctcctagtcttccattgtctatggggccagtactacctgatccgtttactcactatgcccccttgccatcctggccttgttatcctcatgtgtccccttctggctatccttgcctgccccccccaccaacggtgcccctagtgtctggtactcctggtgcctatgccgtgcctcccacttgcagtgtgccttgggcaccccctcctgccccagtctcaccttacagttccacatgtacctatgggcccttgggatggggcccagggcctcaacatgctccattctggtctactgttcccccacctcctttgcctccagcctccattgggagagctgttccccaacctaaaatggagtctaggggcactccagctggccctcctgaaaatgtacttcccttgtcgatggctcctcccctcagtcttgggctacctggccatggagctcctcagacagagcctaccaaggtggaggtcaagccagtgcctgcatctccccatccgaaacacaaggtgtctgccctggtgcaaagtccccagatgaaggctctagcatgtgtgtctgctgaaggtgtgactgttgaggagcctgcatcagagaggctaaagcctgagacccaagagaccaggcccagggagaagccccccttgcctgctaccaaggctgttcccacaccaaggcagagcactgtccccaagctgcctgctgtccacccagcccgtctaaggaagctgtccttcctgcctaccccacgtactcagggttctgaagatgtggtacaggctttcatcagtgagattggtgagtgacacacagttcccccatgtagtccccaagttggctgggggactctagaataggataagccaccctgatgaggctggcctttgttggatttctttggaggagtttttttgtttttattttgagatggagtcttgctctgtctccaggctggagtgcagtggtgcaatctcggctcactgcctcccaggttcaagcaattctcctgcctc

SEQ ID NO: 62632 - DNA, 2118 bp, Homo sapiens
ctcagcctccccagtagctgggattacaggcactcacacccacgcccggctttttgtatttttagcagagatgaggtttcaccatgttggccaggttggtctcaatctcctgacctcgtgatccgcctgcctcagcctcccaaagtgctgggattacaggtgtaagccaccgcccttggcctgtttttgtttttaagagatgaggtctcactgtgttgcccaggctggacttgaactcctgggctcaagtggtcctcccacctcagccttccaagtagctgggatttataggcacaggtgtgtgccaccgtgcctggctgtggagggttcttcagaggcagagccctgggttggtttgaatccttcatgctttgtgctgctaccttggttcacttagtacagagggcagggggagtggaaagggagaagtgagatgatttgggggcttcctgggacctgtgtactaagttgataggggctcgttttcaatcctgtgttgtgtgcctccacaggaattgaggcatcggacctgtccagtctgctggagcagtttgagaaatcagaaggtgagggaacatgggtagttttgctccaactctttttttggtgatacttttttgggcccagccctgtagttgcttaaactagggtgagaggggacagccttagccactggagcagacccctaattggaagagagagacaagattgaactgtgacggtaatccaagccagggacggcagtgatacagtaaggaaggtattaaagagtagactgggaatccaggccaggcgtggtggctcatgcctgtaatcccagcactctgggaagctgaggcgggtggatcatgaggtcaggagtttgagaccagcctggccaacatggtgaaaccccgtatctactaaaaatacaaaaattagctgggcgaggtggcgggcacctgtaatcccagttactcgggaggctgaggcaggagaattgtttgaacccagcaggcagagattgcagtgagccgagatcgtgccattgcactctagcctgggccacagggtgagactctgtctcaaaaaaaaaaaaaaaaaaaaaggaatccaagcaggttggggttgtttagggacatttttctagagggaagtagctttcaggctgggcattgaaagacaggtaggaattcacagagagaatatgtgtggcaactaaaggcagagggtaggtataggaagaatggcatatggcacatttgaaaggcaatggatagctggctttcttagtataaggcgtggatgtaggtgctatggaggacactatcttcttctcaaggagcttatggtctaactggggagaagaatctacagaaatgattcctgagttggtaacaaggcaaaatagaaaatgtgatttgtagaacaagagtaggctgtgaggccaggaagctagttaggcagatcatagatcaccttgaacgctaggcttatacatttggactttatctcagattcagtggaggaatgtgggtgtttctgagcagaaaagagacatgattaaaaatagtacttgggcatccactggaggagactagatctctttggggagatcccaacagggaatatgtaggcaaagtggattttcctcctttgggtctcaaagcaagcccttctgtgccgcctcagtctagaacatctggttgggcttttaactagtatggtttctttgcagccaaaaaggagtgtcctcctccggctcctgctgacagcttggctgtaggaaactcagggtaagtatggagacatgagcgagttaccctacagctgttagtcagcagccggctgacactccaggactgtcaactggatgcctctgttgcagggacgctgtagtcagctctagagtctttccctgtttccccaccccttactctgcctatcactaccgggcagtgtcttgggtggtgaggtgagaacggggcatgttcactgccctccagctgattccagtcgggctccaaatgtcctagaggtgccttttatctcctggcaagtcatacctttggggatttctttctttcatttaataacacttcaagtttgctcagtgctggtaatggtgtaacttaaagt

SEQ ID NO: 62633 - DNA, 1112 bp, Homo sapiens
gagatcgtgccactgcactccagcctgggggacagagcaagactatctaaaaaaaaaaaaaaatgtcgggcgcggtggcccacgcctgtaatcccagcacttggggaggccgaggcaggtggatcacgaggtcaggagatcgagaccatcctggctaacatggtgaaaccccatctctactaaaaatacaaaaaaattagccgggcgtgatggcgggtgcctgtagtcccagctacttgggaggctgaggcaggagaatagcgtgaacccaggaggttgagcttgcagtgagctgagattgcgccactgccctccagcctaggcgacagggcaagactctgtctttaaaaaaaacaaacaacaaaaaaaaacaaccatggattacagtgagatgtgaagagggacagtcagggaagggttatatagaaactaatcccctaagctgaggcttgagaaactctatcaggtggtagatttagggaacagggcattctaggaagacagagcatcttgaatgaactgaagaaacaaaaccaactgggtatgttttggggaattgtgagaggcttggtttggctggagtgtagtagctgatcagggcagtgggcagaggtaaagcgagagataaaactggagtggtaaatagaaggtcagattattgggacctcgaatgccatattaagctctttggactttatcctgtgcattgaagaaactttgccagattggtttttgggtgctccatctagcaggaatgtagaagacaggtggactctgaagctgcaagtggggagacgatagatgatgactgcatgagtgcaggaaagatgcagcctagaagtcaggcagtactcgggggaaggggcggatctgagaatggagagcttagactctaggacctggctactaggtttgggtagtgagaggatgagggcttcaggaagaccctagctggctggatttctcttgctggtccccaagttggggaacatggggaaggggcagttgaagcagtgggaaaagttgggctgcttaccttgcttggtgtactttgtgagatgaggtgggggtctctggaggctatatacacggtatttggaagcgtagaatcg

SEQ ID NO: 62634 - DNA, 1978 bp, Homo sapiens
ctccatcctccctccccaccacagggctcacccctccagctacccctccccaccagttatggaagcccctggctgctgtctcactgctggccaaagccaaatctcctaagtccaccgcccaggagggaaccctgaagcctgaaggagttacggaggccaaacatccagctgcagttcgcctccaagaaggggtccatggccctagtcgagtccatgtgggctctggggaccatgactattgtgtccggagcaggacccccccaaaaaagatgcctgccctagtcattccagaggtgggctcccgatggaatgtcaagcgccatcaggacatcaccatcaaacctgtcttgtccttgggcccagctgcccctccgcccccatgcatagctgcctcccgggagccgcttgatcacaggactagcagtgagcaggcagatccctcagcaccctgccttgccccatccagcttgctgtcccctgaggcctcaccctgccggaatgacatgaacactaggactccccctgaaccctcagccaagcagcggtcaatgcgctgttaccgaaaagcctgcaggtcagccagcccctcaagccagggctggcagggccgccgaggccgcaacagccgttctgtcagctctgggtccaaccggactagcgaagcatcttcctcatcctcatcatcgtcttcctcatcccgatctcggtccaggtccctctcccccccacacaagaggtggcgaaggtgagctttgatggccctgtaggtcctctccatttaggaagttcacgtacttctgtggtttactttgaaagcttttacccgttgactttggtactttcaggcgctaaggcttctatttctgactttggcttttgtgttttcccttttcctggattgttgaaggaggcaagctgtgagacaattgcttctgtcccctgttggagcttggggtgtcaggtctcctgcttctttgagacctgccttggggagacttttagggtttgattttgaccatgttgatttttttcacatactgtatcagccttcatttttggtattctgggcgctatgtgaggtagtgggttacttgttaatagaaaatagttcttcccttaatcatctgctgaggaaggtgtctggggcagttcctttgggtgtcactatggcctcatctatttcctggcagtatctttttttctcagtaaccaagttttcccacttaatgaagaattcttgggttttggagatgatatatgtcttcagaactggcccatactacaagtctagcagttaacctctctcatggtcacagtatttcagtgagacctggtaggggagcaatagtaacccaaaagacccaggcttggccccagcaccacagatagctgggtgtgagacctagggctcacccctctccctgagtctccatttattgttcttcctctttctgatttgttaaatatttttcaatttttaagtgcacaattgaaaatgtgatctcttccaaaacacttcacaacattccaggtacacctaaagttccatgaagggcctcagtttgttcatctctgaatgaaaattgttcttctagacctcttctactctgctttgtctttggtcctgagcttcctaaaagaaaggcaggactggggcctgggtgagataagcagagtatacctgaaccactcccagcattcctgcatgccctcttatccttcaggtccagctgtagttcctctggacgttctcgaagatgctcttcctcttcttcgtcatcatcttcctcttcgtcttcctcatcctcatcatccagttctcgaagccgctcacgatccccatccccccgccggagaagtgacaggaggcggcggtgagcatgtgttcagggagcgccatgcacctgggatgcaggtgcctaagagttgagtcttgaattgtcttatgtttggggggctgatgacaccctcttttgtc

SEQ ID NO: 62635 - DNA, 1305 bp, Homo sapiens
catacaaagaacccaagggggctgggcatggtggctcacgcctgtaatcccagcactttgggaggctgaggcaggcaaatcacgaggtcaggagttcgagaccagcctggccaacatgatgaaaccccatctctaccaaaaatagaaaaaattagctagaggtggtggcacgcacctgtaatcccagctactcgggaagctgaggcaggagaattgcttgaacccaggaggcggaggttgcagtgagctgacatcacaacactgcactccagcctgggctacagaacgagactgtctcaaaaaaaaaaaaaaaaaagacccaaggggtgggacgagaggagaaatggggactggggactctcctatctctttgacttaaaattagagcagttttcactccatccgtttttgggatgggagatagctagccatttgcagaccctgtggttgggaagtgtggtcagagaccttgaagtttgtctttacctttatagactccaaccgggaagactttgacccagcacctgtaaagagcaaatttgattctcttgactttgacacattgttgaaacaggcccagaagaacctcaggaggtaaccttgggcccttccctgctatcctttttctcctttggaggtgcccaacctcctccacccccttcccctactctaggggagagagctgctagtgagatgactgttttataaagaaatggaaaaaagtgaaataaaaaatatgttgaatcagattttttaaaaggggtatttgtttttttataacaggtattgaaacaagttaacttgcattcctatgtaagataggaggggctgaggggatccccagtgtttggaacataagtcactatgcagactaataaacatcaactagagagaactcccaactgctgttgtgcgtctttatatggtgctaatgccaaatgtattcacttttcctatctgaacatggtccagggacatgcctctccctggtcaggtgcaaaaatcccactggatttgaaccttggttcctcagatgtattgtctaaaatgagtcatttaggacagtgcttctcaactttaaagggaatttgaatcatctagcgatctttttagaatgtagattctgacaatgggatgatgatactggtccaggaagggattttgataacaaggacctagagaagctcacacttgttccaaagaaaggttttctaaactgcgacaggtgtatacattcatcatgtcagttatgttcatcattttataatagcttgagcacactgcatggcacagcaggtgctcaaa

SEQ ID NO: 62636 - DNA, 1004 bp, Homo sapiens
gaagaaacctaaaatcttggcctctagcttgtaaccaaggggtgatggcggcaatacaataggtgattatgaggaagaaaatctggggattttcagggagctgataaaagtatgaggtctggaagggatgtgtgaggttgaggtcaggctccgaatctagaggaaattaaacccattctgcttgaggagtttgggttcttctgggacactattcagggctccaagaataagagagagtgttttcctgggagctttggcaggataaggcaggaacagggccagtgtatcaagtggctgaactttgttgttttttgccctttccgtatcctgtccttagctttcttttgctcttactgctccattaggcccctaaaaataaaaggaacctaggatgccctttgggtacccggaagcttttgctgatttctctccttgtgtcttttctaacagaagggagttaagccccaagccaaggcagccaaagctcctcctaagaaggccaagagctctgattctgattctgactcaagctccgaggatgagccaccaaagaaccagaagccaaagataacacctgtgacagttaaagctcagactaaagcccctcccaaaccaggtactgtttctgttcccaagaggctgggctggggaccagattgctctggggactggagttaaaattgccgatttggcacaggggtgaaatggtactgtttgttgaactggaggtgttgattactggtcttttaattttaaaggttttactaataaataacaagatttcataggagctagtaaatagagaaagttattgcagcaagaaaaaatgtgtattttttttaatggtatccatttggtattttgtgacatttcatagacattttatgttttcacacatcccattccactgtaatcacttaaatatctatttgttgtgcttttcactgccatttttactcttgtatgttcattctatgagacaaatgagaatttttctttttttc

SEQ ID NO: 62637 - DNA, 2570 bp, Homo sapiens
aaaggcggcagtggtagtttccaaatcaggtctgtacccaatgaacatgccctctgggttttgtccccccaaatcaggatgggatatactctttgagagtagggtagtgagaggaggcccaccactgggcttccagttgtggaaactgggaggaagaacaggaaactggttacctttttttttttttattagagtctcactgtgtcacccagaccagggtgcaatggcatgatcacggcttgtgcagccttaacctcatggactcaggtgatctttccaccccagcctcctgagtagccgggactacaagcatgcaccaccatgtctggctcatttttttaactttttatagagacagaatctcactatattgcccaggctgatctgaatttcctgggctcaagcgatcctcctaccttggactcccaaaatgctggggttacagttgtgagccactgtactcggcctgagtctggctttttgttttgtaggttcattaaagaagcggaagcagaatgaggctgccaaggaggcagagactcctcaggccaagaagataaagcttcagacccctaacacatttccaaaaaggaagaaagtaagttgtctcactttcttctcaggagccagctctttaaaagtagaaaaatctaggatcatcttgacagctctgcctggcgtgacctggtacatgtgcccatgtgtatcactcaggagaactgttacatgaccactctgtctttaatttcctacttcattcttctgtagggagaaaaaagggcatcatccccattccgaagggtcagggaggaggaaattgaggtggattcacgagttgcggacaactcctttgatgccaaggtgagagagagatctgtgccattcttgggagggaggatgggtagtgtcagagaggacaattcttggttcaggttggtgggaatcttctctgggttcaggtttccttgagcagggagtagaaagaataaagtgacagggctccagcatggtcctcctctgtgttaatctccctctctacttaccagcgaggtgcagccggagactggggagagcgagccaatcaggttttgaagttcaccaaaggcaagtcctttcggcatgagaaaaccaagaagaagcggggcagctaccggggaggctcaatctctgtccaggtcaattctattaagtttgacagcgagtgacctgaggccatcttcggtgaagcaagggtgatgatcggagactacttactttctccagtggacctgggaaccctcaggtctctaggtgagggtcttgatgaggacagaagtttagagtaggtcctaagactttacagtgtaacatcctctctggtccttttctgtgttcctagttttgtacagacttgtttttgagtgttgagtagcagggacaaaataagggaatgttattttttaagaaaattcattttcattgttgtctccttccttttctgtgaaagtcctcatactgagaaatttgtatattttatattaaatcacttactattgatttttgttgtgattttcaaaggtggattcccacagataaaatcttggctattgcccaaaacatagtaaagggtcacgtgtgactttttataataggaagaaaattctgcctttgtgagtgcacatgtccacatttcatccctccttccctcaaaaccctagagaggggcattaaagaattgttgatgtatatgcaatgtctgttaagcatgcactatgtatttcatcctcatttattgggtctgggactgaagtttttagccagcatggacctaacctactttttgggataaaattctctgttttgttacaggcaaaattctggtatggcgtgaatgccatgggtcattctgaatatatttttttctgtaattttatcattacacgatgtttgcaatacgtgctttgttttttaatttgaaagcaaacttttctactgttgaaagacattttttgacaacttgacccttcctagtattgagttctaagttgaggactgcatcttctcgttttttacagtatagagaacaaaatgacatgagtttgaaaaatacatatcacttggtattgctgtcttggttgcagtggtgatacagaattggtttcattaattcctacatggttgagaatcactgatcaagaaagtggggggaaaaaaaacaaacgttaaaacctcaatcctcagtaggaaggtagattacattaggtgaaattataggtaatctatgtatgtgctaatggggttggaaagaaccttacagagcatattacctgataaactggagtgggtttgggagaacaaactaataggattattgtgtctcctagttggtacctgggagcaattgacatgcccccttcagaaccttaactgttagtagcagtggctgtaacaacacaaaccagtgaccagagataacagcttttaggccaagctggcctgacggtatggctgcaggaagtgactgagcagtagcggtactcagccagaccaagacggagagggaagagtccacagctttctggaagctaagg

SEQ ID NO: 62638 - DNA, 1024 bp, Homo sapiens
ggtaaccttatataatatattcatatgtttagaattttcaaagccattttcacatttattaccttattgaacttttatacaaccctgtgagggaggcatggcagctattgtcccctttttgtgaaagaagttaaagcccagaggagtttaaagtgatttagctgaggtcacactaatcctaagaggtggagtcaaaactagaattcaggcctctgttgcctggtttagggctctttgctctatattgcttctgtacatgtgattagaagagaatgtacacattaagtaccttatatttgtgtgtgtgtgtgtgtgtgtgtttattttatgtatatatatacacacacacacacacatatacactggcaggaaaggaggaaagtgtcaaaaccaaggggatgtagatacagactgaaagggacagcctcagagctatgttcctttgttgaccacaaagggctcctgcagtgtataaccctggaatgcttttggctagtgacatatgtcagactgtaattggatagtgtttaggcttctgcaaattaaacaaacaataagaaaatttcttcttttcattagaaatatgggagaagatctggagaaaaaatctattttactttcctaaacatgggctaaagttatctaagagttccctacatattttctttctttctttcttttttttttttttttttgaaacagtgtgtctctctgttgcctaggctggagtgcagtggtgtgatctcggctcactgcaactgcaacttccgtctcccagattcaagcgattttcgtgcctcagcctcccaagtagctgggattacagacgtgcaccaccacacccgactaatttttgtatttttactagagacggagtttcaccatgttggccaggctagtctcagactcctgacctcagatgatccacttgccttggcctcctaaagtgctaggattacagacgtgagccaccgtgctcagcccatattttctttttgtgcagtggcgtgatctcagctcactg

SEQ ID NO: 62639 - DNA, 2276 bp, Homo sapiens
tttctaggctttctgctggcttgattggtaagactatcactgttggaaatgggtggttcattggacattgtcagtaaaccaaaatgatttttttttctctttttgtagaaagaatctttaaaatgtataagtactacctacactactcctccaggaatattatctcattattgtgaaggaaataagtccttttctccagtaaggttggctaagtccatactagtttttctcacagatgtatgtcattggaccacatttacagtcagtatttgcctaaactgtatgatgactacaaggtctatagcatttagagtaataagatattctaataataccaaatttgaaaagagggttgctcttggaagaaaaagggtgtccaagagcaaagtttgcatactgttactttggataaagctttagcttaccaccagtgagagagacttgactgctgtccctcatttggtcttgaagtcctctcaggactccttttagattattctgaaggagttaaaacagatgtgtggttaccaggggctgggagggggtatggagagtgactgctaatggctacagggttcctttttggggtaatgaaaatgttctagaattagatagtagcgatggttgcacaactttgtgagtatacaagaaaccactgaattgtatacttgaaaaggataattttatagtatgtgaatcatatctcagtttataaaggaggcaaatgtaggctgcagaagtgatggatttgccagttttttctcaggtctcagaactgtggagggaagtctctgtagtcactgctgtgctttggacccattacccagcaaaggcagcataaggctctgttcagcttctggcccagtttgtccttttatgtctctctcattaactcaaggaagcacatggcttttatatttaaatttattcaaactgtaatctttgacatttgagttagcttttagtacagttttgcatttatagtaatatatattatgtattttctctatccccaaagaatccgttttaatcttttccggatgcaaatttcaggctgtcttgtcccatcttccctctcttgctctctttcccctccccccacggagtgtgtttgatcaggtgtggcaggaatatccactgtcaagctgcgccctttatattagtcaatattatccttctcccccctccctgtctgtctgcccctttgggctttcccagttgatttataattttggaattctcattggagtctgtaatacagtttgttcattatttaaccaaaacctgtttaatgagcagagagaggcaatgtaaatgttaggcatgttgcagtgatgtacctttgtgcttctcagagcgggtgggtagttaactctgtgctgcctgcagggctggggtgtcctggccttaggggcagaagggccactgcctctctcttacatctgcccaagccctgccatgggtttagattccaaagacacatttccttttattcttctaagaatcttttggggctcttgcatatgggagttatcttcagtctcgcagctagaccttgtggtaggatctgtggcatgggatggggcatggaagggaaagtgaaatatcaggatacttgatattgctcttggttttagatctgacaagagtagacagtttatgggaatgcttctagccaatatggtctgtggtctttgatctctttgttcccagactagataaattcttgcaagccttagttcccttcatccagtatagctttatggaaagggctatagtcagttgtgagttgtggtgtttggttgtagtcatttgcctccagatatagtctgtctttgtccttggtctttaaacttagatcattacaaagagattcttttccagaaaatttttggtttaaaacaggagaggaacagtctaaaagtatcacaaccaggctaggtgcagtgacccacatctgtaatctagcactttgggtggccaagacagcaggattacttgaggctgggagttcgagaccagcatgggcaacataccaagattccccccatctctacaaaaataaaaataaaaaaaattagttgggtatggtggcgtacaactgtagttccagctacttaggctgaggcgagaggatcacttgagcccaggagttcgaggttacagtgacccatgattgcgccactgtactctagcctgagtgacaagagtgagaccctttcaatgaatgaatgaatgaatgaatgaatgaaagaaagtatcacaaccaaaatctt

SEQ ID NO: 62640 - DNA, 1391 bp, Homo sapiens
caccttagaatctctgtaacttgagtggccacagacttgtagacatttcagcacagttagagtgaataaaggtactgtgattctttttttccccagggactattcatattaaaagggtagctccaagaggcctatattttgatgacttgattttgccatttctttttactggggccttccccagatgatttatgaatgctcttcatttgacacttttaaaccaagaagttcttccaaacatttgtttgtactcaaggttaggaaatgaagactcttgagaagaaacagctctgcataatctgtcctctcatgggttcagctctctctttttctcttcctcatacccaggcacacttagccatcagaactagtttcctggctgttgagggggcacattttctactgcatgtatcagaaaaggaattgtgtaaaaagagggaaaagcattcttaatagtttagctctcaaaaacagagaaacctaatttctttgtagcaaaggttagggggcagtgtaacagtgtggtttgtggtgggtatcaaagttgctggtgtttttattgcatttgtcctctttagcacagctacctcttgaggcctgaaacttctgagtatatgcccaacttaccatgacagcagtcagatgagtaaaaagaaagccagctgctgtttttttttcaaacaaggaggcaggcagagtcccttcctgcttttccacccattcaaactcaggacaagtgccaaaagggtttcagaagaagccaaatgcttgaaattcaatgtgttgttttgattaggagagatagtgaagagtttgtctcagccttgcccccctctgactatctctctatgttcatagatacttagttgataacccagtttctgaagtgatagtggatatgtttatggaaagggtgagtacatttgtcttttctctcctggcatctgttagaagatggagttggctatagagcaaaatggagataagatcatttcagctcagatcacttcattaagaaagggtaatagatggagagcaatgactactttaggctctcagttttactctaggaaaccaggagataatttgcacctcaccagtttaggggcctttattcctttcctttattctttgaagatcctaaagaacttagatggacaagcacttctggctgtctgttggctgggttctcatggcatgtctcttctgtaacatcagcattctgttaccactgttaccactgtaggtcgagttgtgaagggctgccacatgtgcacagatcacaactgacctttccttgttccacgcttattgagcaattacttgcccgtttgtggaactcacattattgtcttgcatttctggcccagtgtgaagtgggggcatccagg

SEQ ID NO: 62641 - DNA, 1099 bp, Homo sapiens
agacttcagtgtagactaagttcttttaagcatgtttgcacttttttttctgtctttttttttttttttcctttatgtggagaacgggacctcgctatattgcccaactcctgggctcaagttatcctcccatctctgcctccctaagagctgggattacaggcgtgagccaccatgcctggccataagcttgtttaatccagtcaaatttcagtaccaaataactatattcattgtcataaataggaatctgaagggggtagcaagggaagcctttcttttaatgtttccatcttcacatttgttttcctggatgaagtttaactcttatggacagaaatacagagttcacttgagcatgaaataccagacaaagagacaggtgtaaattggccctgttcttctgaaccctgcctgcctactttctaggaaggctagccttcccctcttttccccagcataagtccaaccccttccctcattatggtttgtcataagaactctctcttatactggtgcaagtggaaaaaagagagtattattccttttctttttttcacaaaatacttcttcctaccctggatttgctaacctctggcttaaatacgcaccaagcaaagatgtatatatagtcttcctcccttcctctctctccccttagtctgaaggaaagcagcaggtgatggaatgcataaaggatcggggcagggctagagtcttttctcacacactatggacgttgctcaacagaatgggtgtgaaatttagtcagagccacagcatgtgtttcagttttccagggaatttcctcttcctaactgtaggtttaaccctttcttctgtgtagggaatgccaggggctacccaagaaatatgaaatgagttatttgtaagaaggaaaaaatgccaggcttttaccaggctcctttgggatctaggatctccaacttacttcttgctaaatgattgtggaaaaagacatagactttggagttggatagacctggcttcatatcccatctctaccattgggtggtcttgggcagtcattggtggcagttacttgatcttttttttttatttgagacggagtttcgct

SEQ ID NO: 62642 - DNA, 1157 bp, Homo sapiens
cagaacctttaagacagctgaatctggaggagcaatcctcaaagggttggaaaacaatttcacaaaacatgggacagaagctgggcccagccaacacctgtttccccaacactgtctgtctgtctgtctcttgttttatcccaactgcacacttaatacaaaagctccattattctggtaaagttgcattccagcccagagtgcagagttaatgttttttacagccacatgccttcttgtgacggatgaccactttataataaaatactttatgctcaatcaacttacaaataatgggtattccattacatggcatttaaaacacaaccaaattcagaaaaatccagaaagaaataagaatagaaacaagaatgattcctagaaagagaggagggccgccagagaatcctctgtaagtccttcactcccaaagaatttatccattctcttattgaaggatatttgagttgtttccagttatttactattactgctgtatacattcctataaaagtctctttgtaaatgtgtttgtttctcttgactaaatacctaagagcgaaagtgctcagccacagggtagatgtgcatttaactttaaaagaaacagttcttcaatgttgctgcacacccctcccctctccaccagctctatattttcctcccctaagggcctaggttctttaagttgaggatttggcaggagagaagaagccacatcatgaggatccctgctgccagagcacagtggcctgaatcggacacttaaaaagctgaaacaggtgtttgaaaccctactccagcctccctgtttggtgccagccccctgagaggctaaggcttggccaggagaattcggctcatctaatggatgccgattagagacttttacaagacatagctacataatagtgtatatgctgtgacgtggtacatttaaagcaggtaagtgaacatcttaatcttaaggaggggggcctctggtggtccaaatgctcttgagcaaagggtagtcaggctacgtgccagatgaaagcccttcaccaacctctaccttttctccttatatatccacacaattgactaccactcagaaaagcaaaacagaaaaaaactactgatatatgcaacatggataaattccaaaaacatgctaa

SEQ ID NO: 62643 - DNA, 1028 bp, Homo sapiens
tattcatcatgctagctgactcacgttgtacagggtgggaagggcaagagaagaagttttccttggcactctggcttctctatgctttggaaagagttaagggtatggtaccttactcttggaagtttggttaggtttgtttgtttgtttgtttgtttgtttagttagagatggagtctcactctgtcgcccaggctggagtgcagtggtgtgatctcggctcactgcaagctccacctcccgggttcatgccagtctcctgcctcagcctcccgaggagctgggactacaggcgcccaccaccacgcccagctaattttttgtatttttagtaaagacggggtttcaccatgttagccaggatggtttcgatctcctgacctcatgatctgcccgccttggcctcccaaagtgctgggattacaggtgtgagccactgtgcctggcctggttaggtttatttttaaagttattttttcaaacataatgcatgcacattataagaagacagacaatagagatgttcaaaagaaaagttaattgtccttcctgtactttctcaatgttcctcctccttctttaggcaaatagtgtgaacagcctagtttgaatctttatgtttttctatgtctttataaatgaagtaccattcctttttaaaatgaaataaggccgggtgcggtggctcacgcctgtaagcctagcactttgggtggccaaggcgggtggatcacgaggtcaggagtttgagaccagcctggccaacatggtgaaaccccgtatctactaaaaatacaaatattagccaggcgtggtggcgggcttctgtaaccccagctactggggaggctgaggcaggtgaatcgcttgaacccgggaggcggagtttgcagagagcagagatcgcgccactgtactctaacctgagcaacagagcgagactctgtctcaaaaaaaaaaaaaaaagaatagaataaaatgaaataaaaataggattatgtgctacatattttcttttttcatttaat

SEQ ID NO: 62644 - DNA, 1040 bp, Homo sapiens
cgtccatctcttgggctcatgggctagggctagaatcagttctgaaatatgtcagggtcataaaaagtgaagaaacaattccaaggacaagcttcttggagacctctctaccaagctgaggtgaggtcagcattcttgctaacccctctctcttacccttgagtacctctcagtaccttgtttatcacagtaattcctttttcttcctgataggttctacggactctgctgctaaccccagtgggtgcccacctaaccaatgaatctgtgtgtgagattatgcagtcttgcttccggatctgctttgaaatgaggctcagtggtaggtgcttggatattagccccttcaccattcctggggccagtgtctgagtatgaatacaggaggctgtcttcccagagagatggaaaattcaggacttctccatcatctatctcatgcgatcataggggtctagaagaaatgtctgtacttggctattgtgaagctagaatagagacctcagcccattatgccagggcaggagttgggatggatcccagattgacttagcccaggcaccaaatcaccctctcttggggtttctgggattgacaccaacctgcaaccccctagaacacatctatacctccccttttttccctgactcagtagtgccacctagtgggccagtgaagttctggctgccaggctgagctggagctggttttaataagtttggcataatccttggtaaacaaggtttggaggggagtctgctctgagaaccctcttgataatagcacagcaagtaatgacacctgtgttatttgtttttgcctgtgcagagttattgagaaaatccgcagagcacactctcgtagacatggtgcagctgctcttcacaaggtaaacctgctgctgtttgcttcagcccggctgcccaggcctcttgagtctgcctgcttccacacagccacgtcagggacctggccaaccccacagccgcatcagaggccactgggattatggatggggggtagttctctgggcccagggt

SEQ ID NO: 62645 - DNA, 1088 bp, Homo sapiens
gccagttcttcatggaaactgcatggtacccatcagtcttggctaaaaatgtctgttgacaaagatgaaagtcctgccatcccctcaagacttagccttatccgcaggtagaaggcctagagaggctatgtcccaaatcctacctcaatgctgaattagactgggctcttgcttgtgctagtctgtattgaagagattagtcaagttaagaaccaaagggttcttaaactgctaggagaagaatagtggtcaaaagaatggcttctttctatcttgaactgaagccctggacttcacgggcctctgatgaggattccgcttgcagccctaagagggtctacctatggagatgacccttagctgtgtgatgcatgcacctgaccttctcctctcccctgtcatccatccccattcctgccctgttccctgttggtatgtgtctgagtttatttcactgttaaatcgtgcgtttgcctgtctttcgcagatatctccatgtctcctcaacaaactggagctaagtagtggggagcagaccaaagccctgaaccagttagagagggtactactctttaagaacctcaaggtctctctccctctctttcccttcccctttttatttctttcaatgtttattttttatatataacacctgggtcccatttccattgtgtagagcacaacttactcctccctagtaacacagcacggctttggaagagttgcacgtgattgtagctttgcagtgttgggaattctcctggggcatctggttgcctggatacaggagaaggaagacttgaacatcacatagttagcctagaaagcctggggtctgctgttaccttgtggggaggcttaagatctaccatttctagggaaaccgtgagggaccttcaagcaagacccttcccccttctaccttatccttgtctcagagctggcatagagagcttaagcacagtcctcagctctatctggattacctggactgggtttggagggaaagggtagtccatctagttgggatcttttttttttttttttttcttggttaccattaaagaggtcattccaaggattagaac

SEQ ID NO: 62646 - DNA, 1001 bp, Homo sapiens
aattccatgaatacctactgcccaccccacaccttcagaccttaggagagggagaatagctataccttttaagggctgaggcattcgtgagaactggcagcctcttggcccctactccagccagcaggctgagaacactaattgaaatgatcaggttggagcaagctttgcagaagatagagaaggaaacgtgaaaaactgatcctcgtatgggaaggaatctcaatgactgactggcttctcagtggaagtaggactgcctggagtccctgaaatgggggagcctcctggagagaaaggctacctcataaaagtagatccagttcttagtacttttgggagctcaatgataactgccagtagagccaggaggtctctcattgatctcttggcctcttgcccttttgcatgtttggcggactcttctcccataacattttttactatgaacttgatccagttgagctccagtggttcctggggagagaatccttttgcttcctccttagctatagcggtcagtacgcctgaagctcagttctaagcatatgactgcaggcattttggagatggatcatctagaagtataaatccagtatgaggctgttgctatgttactaagagctgggggaaggaagggctcagctgttcagcctcatctttattggaaggagctatgggtaggaatggaagaattgtgtggtttctaagcaaggaatcaaagattacccaggttctgagagcttgggggagcttgaggaagggagtcaatccctcactatcaaaaggaattgaacaggccatggacaataggatatattcagcctttaggaagaggcagagagaaaaagtgcttctgctctctttagagtcattctaatggtttctggaagagtgttgccattgcccaatccaggaatggtccaatccaagaatggtctatcagtctaggaatagtttagaatgactttgtagagggactgagttcaaacccaactgag

SEQ ID NO: 62647 - DNA, 1705 bp, Homo sapiens
aggtcaggagatcgagaccatcctggctagcacggtgaaaccccgtctctactaaaaatacaaaaagaattagccaggcttggtggcgggcgcctgtagtcccagctactcaggagactgaggcaggagaatggcgtgaacccaggaggcggagcttgcagtgagccaagatcacgccactgcactccagcctgggtggcacagtgagactctgtctcaaaaaaaaaaaaaaaaaaaatggggcctaaacaaagtaactttgaacttagaatggaggaaatacataaaaacacagatcctagggaatagttaacaaacaggtgatagagattgtcccttgccactaaaagtaagctataggaagaacagaaatacagcaagaggggagtgcaacagagcaaggagtcaaggaatcagtggccttaccatctgacaacataaaactgcatctggaaagaccaatagtgagagggccagagggacaggtagtctcattgatataacaaattgggagcagcagagagcacagcagcagcgtgacatgaccttctatcctgaactccacaaagaaactgggaggccactccttccttaactccaaggaatgagcttttgaccaatctgatacagaaattccagagagtaagagatatgttagctgggtgcagtggctcacacctgtaatcccagcactttgggaggctggggcaggcagatcacctaaggtcaggagttagagactagcctggccaacatagtgaaaccctgtctctactaaaaatacaaaaattatccaggcgtggtggtccacacctgtaatcccatttactcaggaggctgaggcaggagaatcacttgaacccaggaggcagaggttgcagtgagctgagatcgtgccactgcactccagcctgggtggcaaagctagactccatctcaaaaaaaaaaaaaaaaatatgtttatggcttaggcccagctcacataccagtaagaaaaccaggacaggaaggaataggctcttatagttggataaaactacaagtaggaggctgctctacaagctagttgaggaggaaagccgagagaccatgcacctgtagaactgagtgtcagggcaaaggaaaccctgcccttacactttctgcaagagggtcatgcatcatccatagggctcgggatttcctgcttaatgtaacactcaggacccagagaagcagagtgataagtgtgaggactggccctaccaatgaccagcccagaaacagaatgtcaccttctacatggaggctgccatgccaacctgtgaagtggtaaatgtagaagccaagttagaagagtaggaatgtgaactgatggtctagagtcttactttagcaaagatatggggtatagcttgttttctagagatcagtaggactaaatgaagggagattaatagggatagagtcttagtttgaataccattgctaatggggtatgatatttccagctgaaaatgagagccggaggcatgagtgattcatccaaatggaagaaacagaagagatcccctcggcccccacgccatatgaccaaagtcacaccaggttcagagctgcccactcccaatggaaccaccttatcatctaacctcactggtgagtgccctggactacttcctctgattagacaaaagaagagctcctttctctcttagggattttg

SEQ ID NO: 62648 - DNA, 1050 bp, Homo sapiens
cttgaaaacccacagcatgactcactgtgagagatagctcatgagatttatcaagttatgcatataggtagtacttgacaaaagggaaggagctggccattgctttttctggaaggtaatgatccaaatcctaagcctgtgagaggctctgtgtctctaaggttctagtcattgtaggtcagtgaagcctcaggagatgtttttctgagtccttcatcatactcctacctgagccatcttgcggtgattcataaaccactgagttggccctacatctgtagcccattagagacagcttggaagacagctacttcaggggagtaagttccaagttgctcttgcctcatccctcttcccatatctccctgctactggtcatagcaggaagggacccatgtggaaaagtcccagtcagcatctgtggagtccatccctgaagtgttagaggagtgcacgtcccctgccgaccactctgactctgcctctgtccatgacatggattacgtcaatccccggggcgtgcgctttacacagtcctcccagaaagaaggtgggtattctggtaggctctgccaattcacctcccccatcctacctactaagctgcctgagcctagaccgtcttaaaccaagatattggactactgcctgttgctccaagttctaggctattttctagtcaggaaatggagtcaagccatagactgttggcatggagggagcccttccctaacttatactacagggaggaagtttgatgggcaataggaagcaagaaggaagggaaaaaagcttaggacttttaacagaaaggtaggatcatcaattctgatttcctccagaagtagactagtcccctcatgtccccaggaaaaaaaaaaaaatccttttcctttttttttttttttcctgtcgcccaggctggattgctgcagtggcacaatcacagctcactatatcctcgacttcctgggttcaagcaatcctcccacctcagcctcccaagtatttgagactataggcatgcaccactgcacttggctactttta

SEQ ID NO: 62649 - DNA, 1574 bp, Homo sapiens
ggctggtctcaaactcctggcctcaaacagtcctcccaccttagcctcccaaagcactaggattacaggcatgagccatcacgcccagcccttttcttcaaagagaatcacttacctaaaattgccttgtgtaatgcagagcaggctaggcaaagccagcagactagttgttttatagcagtctcactctcctcctggccttccccaggcacagctttggtcccctatggtcttccctgcatccgcgagctcttccgcttcctcatctccctcaccaatccacacgaccgccataactcagaggttatgattcacatgggactgcatttgctgacagtggcccttgagtcagcccctgtagcccagtgccagaccctcttgggcctcatcaaggatgagatgtgccgtcacttattccaggtaagacaagattgctagagggtctcagagcctctttcaagggccaggggaacacagggaggtctggctgattacgcaaagagtataggacctaggaaagcatctccctcccagttggctagtagttttagtaagagggttccagtagttccccagggactctggcagccagagagaaatataggaatggctagatgtagagttccctggaagcaatggacctcagtgacaccttcactcagtttgcctcttctgcctctcttggttgagccatagtcagcttcagaaacctcacagccgggctgggtgcagtggctcacgcctgtaatcccagcactttgggaggccaaggcgggcggatcacgaggtcaggagattgagaccagcctgaccaatgtggtgaaacccagtctctactaaaaatatcaaattagctgggcatggtgacgtgcgcctgtaatcccagcttcttgggaggctgaggaaggagaatatcttaaacccaggaggcagaggttgcagtgagctgagattgcgccactgcactccagcgtgggcaacagagtgaaactccgcctcaaaaaaaaaaaaaaaaaactcatggcctaccctgctctcatctccagctactcagcatagagcgactaaacctttatgctgcttccctgcgagtatgcttcctactgtttgagagcatgcgagagcacctcaagttccaaatggaggtgagtttcttgatgtggaaagaaaagggggaaaaaaaatagggagatatatggcatcttcagtggggccagctctatcatgctacaggggtaggatttagggacttcctataggagagtccttttagcctccagagttcggttcaatcaactggcctcttttgtggaaaagttaaaaggagaccaaaggaaactggctgaccccaaatatgagaactgccaggtaaccttaccatgaatagggacagctcttctgcccagcagttactctgcaacacaggtaggtaagtcaagccagcattgtcactaaattgctaaaaggaactctaaataggaccaggtcatgttcacatagcacaaaagggcaagaggcaacttgtctgggaccaggtatgtggtagagagccaggccttatcccccaacatgga

SEQ ID NO: 62650 - DNA, 1797 bp, Homo sapiens
gatggtacctctcctctgtactagcactgaccagtgggttggtagtgagggtttaattggccagagaagggcattgacacaggcgggatctttgctttttcagaattgtaatggctccccatttgccaatagcgatgcctgcttttccctggcctatgctgtcatcatgcttaatactgaccagcacaaccacaatgttcgtaaacagaatgcacccatgaccctggaggtaagcttgggtcccagtcaaggcaaagaagacccagcacagcttgggaggtagcaggaaggacataggatttccagtgggcatgatggatggggttctgtccaagggaatcaggaagggctggccaacctagaaaagggactggggtggggaagtgggttttttcgcttaccttttcctaagtcctatttactgaaaacccaggagttccttaggtggggcttcagtgttgacacaaggggaaaaaacttactggcctgtctctaggagtttcgcaaaaatctgaaaggtgtgaatggaggcaaggactttgagcaagacatcctggaggacatgtaccatgccatcaagtgagtatacatagagaatagtgcagtatctctgttaagaagaagcacattgcttcctttcccagtttttagagtcatgtcagactgcagtgactcacatgccctggatttagcctcaggacttagttgggcagccccctctctgccaactgtttcttccttaaagaagcccaaatgatattgggactctagtactctaagccagggtccaaagtgctgctcttaagtaggatatcatggccccattttctgaacttaaaacaggtacattttcctgtatagattacaagatgctggctggtagagaacccaagatgggcactggagtgtgaggcccaggttacaggtcagaaatgggccacttagttttttactgtaaatcagaaaaggtagaattgttcattttatcacacctagtaagaatgtgtgatcttactatagaactaaaggcctcacttacagatagggctttgagattatgggacacttcctttctttctgtctgctcccactggtgggtggaaagcagaccactgagctgcagttctgatgacctctcatcagtggagagtgctagtatggatgaactcctagtcttggtttggaactagtcaggttcaaagcagtgcaactgctccttcccttacctcctgacaggaatgaggaaattgtaatgcctgaggagcagacaggcttggttcgggagaactatgtgtggaatgtgctgcttcatcgaggtgccacccctgagggcatattcctgcgtgtgcctactgccagctatgatcttgacctcttcaccatgacctggggccccactattgctgctctctcttatgtctttgacaaaagccttgaggagacaatcatccagaaagccatctcaggcttcaggtagcccagctttggccttggtcttcacctcccactagctctgtgagctaacatggttttctccatgcctctctgactcctactgttacttcattagaatggggttccccctgagtttttggagggaggctgaagcttgggtaggctcagtcttaaacagaaacaaaattaaaaggtttcttcctgggactgactggggaagagccccatgcaagctcagggacttggaagggctgcttggccttccagtgactctgtttctgggatggggggtaacattacaggaagtgcgccatgatctccgcccactatggcctcagcgat

SEQ ID NO: 62651 - DNA, 1011 bp, Homo sapiens
gggacagtattatttctgtcagggcagggccagtggttggcttcttttccatgcctactttcctgctgctgttccccttcaggctctggtctcagtgacaccagatgaagagacatatgatgaggaagatgctgctttctgcctagagatgctgctaaggattgtgttggagaacaggtaagatgagcgtagtctttaggcagaccccatgctgggcttgtgccaaagggatggaagccatcttgctgagtgggctctggggaactgtaggcagcaggggagaagcttactcatcatacctgtctacttagggtataataccaatgagtcctgaaaggcctaggggacctgttgcccagtggcccctctggctgagactatcttcattcctttatgtctacacagggatcgtgtgggctgtgtgtggcagactgttcgagaccatctataccacctctgtgttcaggcacaagatttctgcttccttgtggagcgggcagtggtggggttgctacgcctggccattcggcttctccggagagaagagatcagtgctcaggtaagcagaatgcatcttggagagtgggcaggtatgcaagggattaaggccacagttgtcaattatgaatatggcctgagacagagagtacatttagtgccccatagcatgagtccagtgaccaaccacagggctggtgcagtctagcgggtggtactgggagtgagcctggaatggcctcaggcatggagcttgtgtttggcacctcagcctcctatgaatctgctttgtaggactggcctgctactgccttataatagtctcagccctatacctggtttcctgtcatgcttatgaccctcttgagatctctttgcttaactacaaaaaacaacaagcatagaactaataagtggattcaacaaggtcacaggatgtgagatcaatacacaaaaagtaattatatctctacatgctaacaatgaacaatatggaaactgaaatttaaaata

SEQ ID NO: 62652 - DNA, 1041 bp, Homo sapiens
acgggaagatcgcttgagcctgggagttcaagaccagcctgggcaacatagcgagaccccatctttccaaaaaagaaaaaaaaaattagccaggtgtggtcacatgcacctgtagtcccagctactccagagactgaggcaggaggatcacttgagcccaggagtttcaggttgcagtgagctgtgattgtgctactgtgctccagcctgggagacagaccaagaccctgtctcaaataatataattaatatatttctatttgaaaaaaaaaaaaaagaccagagcagtatcctaaattgggtcctagccaaactgtcttcactggcctaaggagactggtgggaaagaaaactagacaggaagctgtgtgcccacacagctccccgcttccccgctccctgccctaaccccactccaggtgctgctctccctgcgcattttgctactgatgaagcccagtgtgctatcccgagtcagccaccaggttgcgtatgggctccatgaactcctgaagaccaatgcagccaacatccactcaggtgatgactgggccacactcttcacactgctggagtgcatcggctcaggtgtgaagcctccagctgctctgcaggccacagccagggcagatgcacctgatgccggtaagccctttcccagggagactcaggctggcagataaacagttacaccccaggagttgggacaggaaaacaaaacacaggttactgtgttcagcagattaaacagccctggctcctgccatcacttccagagcttccagtgcccgctggctagtacccataagttaaatagcatgagggcaaataagcaatgcagacggctgtgaagccaggcttcctactgtcctgaggactgatttgtcctgaggactgtttcccagtttctgtttctgagctgtcccgaggactgttttcccagaattctgggaaaatagaattctgtgagcagactttatatcactaaatcgatacatcactaaatcccagaaactgggaaaacagtcctcaggacagtgg

SEQ ID NO: 62653 - DNA, 1060 bp, Homo sapiens
cctgactctgcccttctccctgcctaccataggggcccagtcagatagtgagctcccatcctaccatcagaatgacgtgagcctggatcgagggtacacttccgactcagaggtctacactgaccatggcaggccgggcaagatacaccgatcagccacagatgccgatgtggtcaacagtggttggttagtggtgagtgacaatatgggcagcaattgagtctctcctgcttgacctgtgggaagaattcctggtcctctgcaaggacattcacacaggggccaagcctgtgtccccagctcctctgtgtactttacaggttgggaaggatgacgttgataactccaagccagggcccagccgcccaggcccttcacccctgatcaatcaatacagcctaacagtgggactggatttggggccacacgacactaagtctctgcttaagtgtgtggaatcgctgtccttcattgtgcgtgatgctgcccacatcacacctgacaactttgagctctgcgtcaagactctccggatctttgtggaggccagtctgaatggcggtgggtcagctgatgagggggcagctggggagtagccatgcaattatgcaggggagaggctgagaggggagaaaaggcagggtatctatgcctatatagacacagaaatgtgacctgagtctggctctgctcaggatgcaagtcccaggagaaacgtggcaagagtcacaaatatgacagcaaagggaaccgcttcaagaagaaatccaaagagggatcaatgcttcgccggcctcgaacctccagccaacatgcctctcggggcgggcagagtgatgatgatgaggacgaaggcgtgcctgccagctaccatacggtgtctttacaggtcagtcaggacgtaagtatggcaccctttacttcctctcctcccctgcacctgatactgggagcctggggcggccagggaaagccagggctgaggggaagggcccatgtgtgccagcccaggccctggaccaccatcttcacaatattcccttacccaaaaccttacctg

SEQ ID NO: 62654 - DNA, 1050 bp, Homo sapiens
gagcaagggagtgacaagatagaatccgaaattttgtatctgactgagcctgtagaccaggatgtatggggttggggtgggggcggcactaggaaactacttcttccatctgctaccatttagcccacaaaccgtgagcaaagcctggggctggatgtggttgagccagcggaggcaggcccggggctgtcctggtggagaagggtgtgagggctgcaggtgtgcagcaatggagaggatagtgctggccctacttgctgggaggaagggacagtggtggctctaggctggggagctctgagggaggtgccctgctctgaggaggcacagctacacattgtggaggcctgatctgagacgggagacatggcaggaccctcaggttgagccccccaagccacaaacactgggggagcttttccagggcgagcagaggccagaactgaagcgggggccgcggctccatggccagccccctctgaggtgatcacacctgcagagacgaggaggagctgagacgctctctgtctgagttggccgaccccaaccccaaggtcatcaagcggatcagcgggggcagtggcagtggctccagccctttcctggacctgactcccgagcctggggctgccgtctacaagcacggggccctggtgcgaaaggtgcacgcagaccctgactgcaggaagagtatgtggccgagttgcggggggcgggcgtctaggggatggatgggagtgggcctgttccagggccccctgacctgtcttctctccccgcagcacctcggggcaagcggggctggaagagcttccacgggatcctcaagggcatgatcctctacctgcagaaggtgcggggtcaggccagggggctggggctgggactgagttggctggtgggtgtggggtgatgggtgggaataggaggggctgggccaggctgcatttggggccaggacaagatggacacccctgcaggaggagtacaagcctgggaaggccctttcagagacggagctcaagaatgccatcagcatccaccatgccc

SEQ ID NO: 62655 - DNA, 1035 bp, Homo sapiens
tggaaagacagcaggagggctgactaggatttgctgagaggccttacctctcatcctgtccctgtcacctttgttgggcagatgggaaaccatagctctgagggagggggttatactctctggccttaaagataaaggtctagctcatagaccccatgaagctgagggctggagtctcaggataggtgggggtgctggaggcatccagtgtcctacccagggcttgtcctgttcccttcctgcagtggcttggatgaggtcatcttctcctatgtgcttggggtcctggaggacctgggcccctcgggcccatcagaggagaacttcgatatggaggctttcactgagatgatggaggcctatgtgcctggcttcgcccacatccccaggtaggttctggctagggccaggaggaggaaggggctggctgattatggggtgggcagagtcatcctctcactgccctcatcttttcaggggcacaataggggacatgatgcagaagctctcagggcagctgagcgatgccaggaacaaaggtgagtctggggctctgggcacctgagtgattcataatcccgctcccccaactgcctgctccccagagccttggcaaacctgatgctctctttgcctctttaagagaacctgcaaccgcagagctctggtgtccaaggtcaggtgcccatctccccagagcccctgcagcggcccgaaatgctcaaagaagagactaggtcttcggctgctgctgctgcagacacccaagatgaggtactggtagaggagggtaccgatgagggacccagggggctggaaaggggggagtattgcctcttgttaacgtttgtacccttaggcaactggcgctgaggaggagcttctgccaggggtggatgtactcctggaggtgttccctacctgttcggtggagcaggcccagtgggtgctggccaaagctcggggggacttggaagaagctgtgcagatgctggtagagggaaaggaagaggggcctgcagcctgggagggccc

SEQ ID NO: 62656 - DNA, 1675 bp, Homo sapiens
ggacatgcatttactgagaatggccttggaggagtaaagcacttgagagaacattagtttgggacacgctaactgtgagatgcctgtaaaacatacacgtggcagtgttagagaggtagatgtccaagcctgtagctcagaggagactggactagaggactggacatttgggaattgatgacatggcattggtacataaagatgtgggcccagatgagatcttccagagagagagagagcgctgcagtgagaaggagaggcagccttgcatgtgaggaactcccacatttagaggggagcagagaaggggacagagaaagggccttcgaagaaatggccagagaggtagaaggaaaccaggaaagaatggcatctcagaaaccaaagttggagctgctgaaagggcaaatagaaggtgaaatcatgagaaattcccccctttttttttgtagatcaaaaccagacaaaattggcaagctcatatggttcaacctaattagactaaaacctggaaaaagtaactgatgacctcagtctaagaaattttgaggccgggcacggtgactcatggctgtaatcccagcactttgggaggctgaggtgggcgaactgctttgagcccaggagttcgagaccagcctgggtctcgaaccctggactcaaaacatggcaaaactgcatctctactaaaacaaacaaacaaacaacaacaacaaaaaactagtaggtggtgtgtgcctgtagtccagctactccggaggctaaggcaggaggatggcttgagctggggagatggaggttgcagtgagccgagatcataccactgcactccagcctgggtgacagagccagaccctgcctaaaaaaaagaaaaagaagaaattttggtggagattttggagcagaagccagactcaggatagggagaagtggatacaatgcagataagaaggaaagaaggaaatagaattgacagacttggtgattgactggtaggggtgaaagagggcaaaatcaagggtaatccccaggtttcagctttggcagctgagtgagtggtgtcagctgatgaagcagatgtgtgtttggagggggatgtgcgcagatcagtagtctatgatgagtgtgaggtgcgtggaactggtggtgcctcggagccttctgagtgggatgatgagctggcatttggacctatgggtctggagccattcattaccacccatatgctcctgactcccaaacagacttttgggagtcaaaagcatgtagatgggaatggagcatgtcaacaggtatgtattcagcacctagccagtatgggcatttttctaggtgctagggttacactcatgaataagacagagtgtccccctcatccccaccttgctttggagcttccattttatgggggcagacagacaataggcaaataagcacaaaataatgttaatggtagtaagtgctatgtagggttaaggggcatggagaagacttacttgccataggttagtcagggaagggctctctgaggaggtaacatttgagcggagccctgaggagtgactggacgagccatggatgtcccgcaggacacagacaggaggaagctcagcaagtctgagggacagaaggtggggtgggagcaagctagggaggagggactggggaggctgga

SEQ ID NO: 62657 - DNA, 1023 bp, Homo sapiens
agggagctgcatgatgggatctagtatgcctgggctgagccattctgctcttcctcagggcccatgagggctctggcgcaggtggtatgaattcccctggtaggctggggcttctcagtcctgctttccaaagtgacccctgtgctatgagcaactctgttaccactcgggaccaggcaactgtaagcatagaaggtagccctgtcccaacccacttgaaagtcttgatatcctcccttccccagagtagcccctagaatagatgctgaactaggtgacctggatttaaatctgactaccgcagtcaagccaggtgactctgggcaagtcattaaacacactgaacttcatttcttcataggtaaattggggttcaactgtttattgagtgcccacttcatgagagatgctgagtatacactggtgaatgtcagcccggtgtttagtccctgcttcatgagacaactggaagaaacattaaacattgtccaaataataattatggctgtgaaaggtgctgctagtcagaaaacttgcagcctgcatagagagtgtaatatggcagggcccaaatgagttctaggtcaggggtgatgtcccttgaggaagaagggaattattttatttttatttgaaaatatttttcttttcttttttttttttttttgagacaaagtctcactctgtcgtccaggctggagtgcagtggtgcaatctcggctcactgcaacctccgcctcccaggttcatgtcattctcctgcctcagcctcctgagtagctgggactacaggcgcgtgccaccacacccagctaatttttgtatttttagtagagacggggtttcactgtgttagccaagatggtcttgatctcctgacctcgtgatccaaccccctgggtctcccaaagtgctgggattacaggcatgagcctccgtgcctggcctaaaaatatttttctacaaaaagagagatggggtcttgatatgttgccgaggctggtcttaaactcctgagctcaa

SEQ ID NO: 62658 - DNA, 1071 bp, Homo sapiens
gcctgcgttatgggtccagggcctcaggaaccgggcttcacaggggctgggagaagcagtgaagaccttccatgctagaccccttgctgcctccctgagaagttcgctaggactcctttcacactagctcccaggattcctcctcccacatggcctgctctccctccactttaagcacctccccaccccaagggagcagcatagtacttcttaccccactctcacttaaatttgtccacagtgtctctatctagcatctggagggtccaggcctgtgctgcccttgggaagctcccaggctagctgggagcagtgaaggtggggcagttagggttggctgcagaaagggagtcctgcagaatgagatttggagaggcagagggacagatgctctgggctgggagagtggtgtgagcaaagattctgaaatagacaatatagccagccaggcaggagaggagattcagaatataggatggggccacacaatttgcatcgtgagaggtgatgtagtgtggtggttaacagtgagggttctggatccagacagcctgggtgtaaatctgccattaacttgccttgtgaccttgggcaagttacttaacctcatagtgccttcatttcctttcaggtaaaatgtggataatacggccgggcgcggtggttcatgcctgtaatcccagcactttgggagaccgaggcgggtggattgcctgaggtcaggagttcgagaccagtctggccaacatggtgaaaccccgtctctactaaaaaatacaaaataaatttgccaggcatggtggcatgcgactgtaatcccagctactcaggaggctgaggcaggggaattgcttgaaccagggaggtggaggttgcagtgagctgagatcgcaccactgcactccagcctggatggcagagcgagactccgtctcaaaaatacataaataaataaaataaataaaataaaatggggagaataacagtatctacattttagagttattgtaaggattaggtaagttaatacatgtaaaagtgcttaggacaatgcctcgtaagcagaggcaa

SEQ ID NO: 62659 - DNA, 2221 bp, Homo sapiens
cctgaggtgaagctgtcgcctcttctgggacctgtgggggagggagagggagaaggtccccatctcaacaagttgaaagctcatttccagccggaggaggaggatgggcccccaccccccaaccctggtgctagaccctgctgtggggagactgggcaggaagacaagaccccgagagtgaaacaggaaacacagcagacaattcaggggtcagctgcctgttgagaaaagggcacatattatacctttcatgttcatttgttcatttggtattcctgaggataggcagagaatggaattgttttctctgcttcacagatgtaggaatagactcagatagtaagttaaagataatgttcacacctgacccagggctcctgactccaaattatgcctcttcttagcttttacctctgcactaatgtctcttgtacagtctgatacctctcactccaggggcccagttcggcattcttggtttccgccactaaattcatcaacctcccccacccaccataggttggttcagaaatcagggagatgttgctgcttccatccctttctagtctttacctaccaggggcctggtagggtgaaggggaagagttttgacacctgctagagggcttcttccaaacagatctgtcacttccccacccccagcgccccacctgttgtcctcagcatagaatcttgcacaaggtttacaaaacccttcctgatgtggcccctttctcccgcgctgctctgagctctcttcccagattgtttctgtgtctcttagcacagtgctgtgcacccggcgaaagcttaataaatgttcctctgttatgatcactattcttctttgtacctgctgccttgctttagtgtcttactcagagaggcacatcaagcctcccaggctgccccttctctctgactcccacagttaagcagaacacagagctaggaggggcacagtggggtctgaagatgacagttttcctatgactgctgctgctgttccctagggctgaggatgttgttgatattgaccttttaggggccaatcgacccagcagggattgactgagcaagctgagggagcctggtggaggcaaagggcagggatcaagggcgggactaacccagccctgctttttttttttttttttttaagagacggagtctcactctgtcctccaggctggagtgcagtggcgcgatttcggctcactgcaagctcctcctcccgggttcacgctattctgcctcagcctcccgagtaagctggtactacaggcgtgcccgccaccacgcctggctaatttttgtatttttagtagagaggaggtttcatcgtgttagccaggatgatctcgatctcctgacctcgtgattcgcccgcgtcggcctccccaagtgctgggattacaggcgtgagccaccgcgcccggtatcagccctgcttttaagaagcctgtgggctggaggaggggaagggaggcatttggatgcctgataagggggaaaacgggagagaacacgtgattgggtgtgcttgggaaagccgtgacactggatgagcaggatttgataagatgggggcagggtgtgggggggatgatgaagtgagaacgctgttgttttagtcaaaacctgttttgaatcttgactccagcacctactagctttgtaacttgggcctgttatttaatcttcagagccttggtttcttcatgtacagaacgtgaatgcagatagtaacagagctgtaaggggtctgatgatggatataaaagccaagcataccctgtatggctgaggaatagtatatagttatcctagggtatcttaggtgacaggaacagcatgaacaaaagtgtggaggtggcatttagaaaggaatttgatggatggcagacaagaggggctaggatattccaggtggcaaaaggcataaagcttgggtgctggaaagacaatttcaatcatggatttggcagaaaggtcaatgatttttatttttgattgatgttgccccagctggtctctaacttctggccccaagtaatccttctgtcttggccttcccaagtcctaaaattacaggcatgagccacaacgccccacctagtgactgatctttaaagatcatgaaaccacacggtggctctcgcctgtgagccagcacttcaggaggccaaggcgggcggattgcttgaggtcaggagttcaa

SEQ ID NO: 62660 - DNA, 1008 bp, Homo sapiens
tgtttgggttggagaggtggccttggacgtacacttgcctggctcggcaggggaagagatctaccctggcttggcttggttggcccctctggactgtggactgcaaacaccctctgctgcttctggaagattcctttgccccatccctgcttgagcccgtcatcacccccaaccttgagaagtgggcatcccataccctttggccatcagcccaacaggctaataagggggtggaaattggggcagaggaggagagtgtacccactggtgagttgtgcttcctaagttgcagactggggacttaggggacagtggcaccaccctgttgtgagtcccacaccctgggcctccatccctcccctggggcctgggcaaggggaacttcagcctgccaagtctgacacggcatctcccaacaactctcctttccccggcaggtcaggcgccgggctctcctcaagggctgtggtgctggcccgggtgcaggccctgggctggcatgggccgctgctggcgctgtcgttcctggcgttctgggtgccctgggccccagctggcctgcagttcttgctgtgcctgtgcctctatgatggcttcctgacgctcgtggacctgcaccaccatgccttgctggccgacctggccctctcagcccacgaccgcacccacctcaacttctactgctccctcttcagcgcggccggctccctctctgtctttgcatcctatgccttttggaacaaggaggatttctcctccttccgcgctttctgcgtgacactggctgtcagctctgggctgggctttctgggggccacacagctgctgaggcggcgggttgaggcggcccgaaaggacccagggtgctcaggcctggttgtggatagcgggtgagtggccagccccggctcttcaggtcctcaccagcaaccttctaagtctgatttcggtgctgggtccccggctgatgggggctgccctgggatgtgttgggggataactctggcc

SEQ ID NO: 62661 - DNA, 1019 bp, Homo sapiens
atccgtaaagtggggatgataatagtactcaccttaaggggctgtgaagatgaactaagacagtgaagctcttagcacagagcccagtgcatcgctagtgtacaggaatgcagtcggctgtgaagctgatggcgctcactggcactgcagcagtgcccttgacaaggtggctccccgtcttcctccccaggcctctcctatgtcgctccccatctcaacaacctctacttcctgtccctgtgccggcgctggggcgtctacgcggtggtgcgggggctcttcctgctcaagctgggacttagcctgctcatgttgttggccggcccggaccacctcagcctgctgtgcctcttcattgccaggtatgcccctgcccacgctccccgcaacacctccatcccatgccttcattcctgcctgctctctccctctactgcagcaaccgcgtcttcactgagggcacctgtaagctgctgaccttggtggtcactgacctggtagacgaggacctggtgctgaaccaccgcaagcaggcagcctcggcactcctctttggcatggttgccttggtgaccaagccaggccagacctttgccccgctgctgggcacctggctgctctgtttctacacaggtgagggcctggtagcaggcaagggctcttaaggctccagggggcacagcttacctggcacagtggctggcaagcctgggctctgggtccagtgacggaaggtggcaactggcgtcccctcaacatggctagagtcactgggtcaccgattccgccatgctttcttagttcattcatttattcattcattcaacaaatatgtacggaatcccttctctgcaggtcctgctgtgggtgccagggagctaaccatgaataagatagacaaagtctttgccaccacggagcttgtattctagtcaggggtgggctggggttggcaataaacatccaaacaagacattatcaggcagtaatagtgttatggtgaaattaaggtgatgtga

SEQ ID NO: 62662 - DNA, 2591 bp, Homo sapiens
ctggaaaatgccagagcgagaaggaaatataggagcctcccctcactagtttccaggaggcctatctttgttcctttaagcccttgacatgtagagtctgtcttgagcctggccttcatagccacccagttactaagtgacgtgcagaggggcgtcttccattcccactcccaaagggaccttggtcccagctccgacctcttcagctggccctcctacctgcagattggtccttcccgattccgggcccctgagttgctcttcaggccagatttgattggagaggagagtgaaggcatccacgaggtcctggtgttcgccattcagaagtcagacatggacctgcggcgcacgcttttctctaacattgtcctctcaggaggctctaccctgttcaaaggtttgtctcttctcttggagcccttcccctggaagtgttcagctcctgctggctccaggcaccctgagaattgacttgaagttctcctctttgcccattcaggttttggtgacaggctcctgagtgaagtgaagaaactagctccaaaagatgtgaagatcagggtaggagcatggtggggcctggcctgggtggaactaggcttccatggacagagtgccacctggcgtagcttccctctagctttgcccaagctcttcaagcagccatggctctacaagcagcgccaggttcccagcctgtacactgaccctgaggtctaggtcagccacagggaggctgagttctcattctccctcttcacaccaaaggcaggcagttctaatacccagatgaggcagggtactaggtagagggccccctgcgtgatctttcagggaaactataatcttaagaggagactgacttactgttgctgtgccccctgcccaggtggctcccctgtcacacagtctgacaccttagtgataggtgaaggaggttggctgtctgaggagagcggggatcctaaaggaaggagtacagttcttgccatggagtctgcttctccctgccccccccaatagtcccagcttccctgggacctgtggggactggaaacctgcttccccagatgagtggcaggctggccacagtgccctccagagaggccagagcttcaggcttgtgtaaaatgtatcccctgccatgggcagaaagaggagcattgtagggaaagggagcgggagggctggaagtctcagattcctctttcccccacctttgcagatatctgcacctcaggagagactgtattccacgtggattgggtgagtagctcttccaggagtaagaacagaacaggaagtgatggcactgataacccctcagcaccctctaaagaaaagcctgatttggtttggccccaggggactggtaggctccacacacagccacttctctctcacacagttcctctgggtttcctccctccaggggctccatccttgcctccctggacacctttaagaagatgtgggtctccaaaaaggaatatgaggaagacggtgcccgatccatccacagaaaaaccttctaatgtcgggacatcatcttcacctctctctgaagttaactccactttaaaactcgctttcttgagtcggagtgtttgcgaggaactgcctgtgtgtgagtgcgtgtgtggatatgagtgtgtgtgcacatgcgagtgccgtgtggccctgggaccctgggcccagaaaggacgatgaactacctgcagtggtgatggcctgaggcctggggttgaccactaactggctcctgacagggaagagcgctggcagaggctgtgctccctcctcaggtggcctctggctggctgtgggggactccgtttactaccacagggagacagagggaggtaagccatcccccgggagaccttgctgctgaccatcctaggctgggctggccccaccctcacccccacccccagggtgccctgaggccccaggcagctgctgcctccactatcgatgcctcctgactgcacactgaggactgggactggggttgagttctgtctggttttgttgccattttggtttgggaggctggaaaagcaccccaagagctattacagagactggagtcaggagagagcaggaggccctcatgttcaccagggaacaggaccacaccggccactggaggagggcaggagcagtcctcactctgaatggctgcagagttaatgttcccagcccagtcccctttcgggggccttgggagagtttaaggcacctgctggttccaggacctcgctttccatctgttcttgttgcaatgccatcttcaaaccgttttatttattgaagtgtttgttcagttaggggctggagagagggagcttgctgcctcctgccttgctacactaatgtttacagcacctaagcttagcctccagggccccacctctcccagctgatggtgagctgacagtgtccacaggttccaggaccatttgagattggaagctacactcaaagacactcccaccaggctctttctcccttttcctcttgctcactgccctggaatcaacaggctggttgctggttagattttctgaaacaggaggtaaaat

SEQ ID NO: 62663 - DNA, 1017 bp, Homo sapiens
acactcccaacacagggaggggaggcggggcctattgtcaagtcacaccttccctgcctgtgactggcacagacattagccaatgggtgcttggatagggtgcgccggcgccccgccccccttagcgccccgccgccccgaggcaccctctggcagactcggcggcggcgacagcctgggcggacagtgcgccgtgcgcaggcgcggagctagacctcgctgcagcccccatcgcctcggggagtctcacccaccgagtccgcccgctggcccgtcagtgctctccccgtcgtttgccctctccagttcccccagtgcctgccctacgcaccccgatggcggagctgcggcctagcggcgcccccggccccaccgcgcccccggcccctggcccgactgcccccccggccttcgcttcgctctttcccccgggactgcacgccatctacggagagtgccgccgcctttaccctgaccagccgaacccgctccaggttaccgctatcgtcaagtactggtatgctctgggccgcggggagacggacaggcgcgggctggaaagggttaaagcgccgagggcgaagtaatttgtgggaggtgggaggaggggtagagaatggttaaagcactcagaaggagggcttcttgctgcgagggaaggagttaaggctcaagttgggaatggggacaaaggggttaacggagcccgtgggtactgaggggttaaccgggattaggagaatagagtgaggactgggggtgtgtgtaggagcagaggggggaacggcaggagcgagggaactgtaaacgtggtgaaaagagggggcgcctgtagggggtcattagtgggcgaggggaagccaagcgggggcggccgaagtgggatgggagaggcgaggcggggcctggggagcatttgagagggctttggaggagcgaagccgaagaagctcagagggcacgagactgcatagaatggggggttcggggggcccagggctctcctgtggtgggtag

SEQ ID NO: 62664 - DNA, 1007 bp, Homo sapiens
agggcacaatatagtctttcaggaattagctgtctaagaggctggagtggagcagagcctctgcttccaggaacaatgcccattggggatgcttgggatggtctttcaacagaggccaattgattgactgatgtacctcttgccttgaagcttggcatgtatacaggcaccacagaagagagacaatccctgccaatctcatttgggatcggtaatttgaaacaggagaaagcaaaatgggtaaccatccagtctgttttatttctaaaagaggcccagtctttcaggggtaggagaagggagcctcttgggcttgcagagttgggcagccttagctgtccatcccttagtctcattctggagagatgtggcctctgtttagttacctttcacccaggttcctccaggatgggtcctttaggtttacaaagtagagcgccttagcttgacattgtctgatttccaggcttacactaacacccctgtgttttgttttttgcaggttgggtggcccagaccccttggactatgttagcatgtacaggaatgtggggagcccttctgctaacatccccgagcactggcactacatcagcttcggcctgagtgatctctatggtgacaacagagtccatgagtgagtatatgccacctgttctttatccagagccttattcctgaggtcttcctgagcaggggtgacaatgtcatagtgctgtgagcatggtacttctccgtggaacctctgcatttctgccctctgactatatctactcatgccaaggtggtcctcgttaacacctgattcctgcttatctagtgcaggaaagtcttgatgagcaggattcccaaatcaggtttttctaagcttgccctggagtttgggctcataggacaggaaggtagcatggttatgactcagaacttgggctgatgcctctgtgtctacttccttttattcccctagcttattatgaaacattttaaacataaagcaaagttggaag

SEQ ID NO: 62665 - DNA, 1027 bp, Homo sapiens
ccagacgttaatctgctccgtagattgtcatcgttgggacacagttctgggcatgaggcttgtagtaacaagcaacataaacctggtcctggtcctcattgggctgaagggtccttgagctagaagacattgtggggaggtgggcctgatacagtttcacagccttaggttatcacctggtgcctctttgtctcctcttcagcagtccatggcttgaggcctagtggagggctcttggcaagcaggagtcctgaggctcagaaatgatgtgaccaggcctgagtttgaggctgagacagttgtccatttgtcagcgagatcatagcttcacagcagcttctcagagaggtatggttcactggactccaggcccctagcatgttagtaaaagatagtggccctcacagatccctttccttcctactcctatgttactcagtctcttggagtccctggtcatagaatcagcttagccacaggaaggccaatcaaagagatgtcttgtttttctagtactaaccctcatgtgatacctggggcctcttggagccctgcctccgaccaccagtttctcttactctgacctcaggcctttcaacatgatgtcaggctgcccacggccatggctgtagggaagagtaactgctagagaatgggacttggcccaggctaccagtcccaggggggtcgagctggctggctgtgcttttggcctgtgatggatttgactcttcaaggcttctgacaaagcttggttggttagaggaaaaatgtagtgaaaacctacaggcaacaccatggcttgccctaaccctctcgtcttcctgttctagcttttcccatatatcaggttgcagacatgctgaattcccaccctcctggagccaagctgccaatttctcattcctgtaaccagtggttttgtgtagataaaaggcccagaaggaagatggtcgctgagcagggagccttcggagttagaccttctttagccagggccagtggacactcatctcatgaatcatgc

SEQ ID NO: 62666 - DNA, 1075 bp, Homo sapiens
ccagcctgggcaacatggggagaccctgtctcttaaaaaaatgaaagtaaagcagggcgccaagtgtggtgactcatgcctctaatcccagcactttgggaggccacgggggggtggatcacttgagccaggagttcgagagcagcctgggcaatgtggtgaaaccccatctctacaaaaaatacaaaaattagtcaggcatggtggtgcgtgcctgtagtcccagctacttgggaggctgaggtgggaggatcgcttgagcccaggaggcagaggctgcagtgagccaagatcgtgccactgcactccagcctaggtgacagagtgagaccctgtcttaaaaaaataaataaaattaaaaaagcagggatggtactctggagcttacatgggtagaagtagtggttgaggtgggtggggaggatgctgttagcagtaatcagtgatggcttccttgaagatttgaactgagacctcaaagaccggtggcagccagggctgtcacattgtacaactctagggccaccgttcacattattctgtgcaattgctgccccctggagttgtacaatgctgggagtcctgatgaaggtcctaggcagtgaaacagctagtataaaggccctgagggcagcacggacctcgaagtgtttaaggaaaagaaagaaggccagtgcatctgaggcttggtaagagagaacagtggaacaagatgaggttgcagagtttgaagacaatgtaaagaatgtgacattcaataaattataattattattattgtttttttttttttttttttttgagatggagtctcgctctgtcgcccaggctggagtgcagtggcagtggtgcgatctcagctcactgcaagctccgccttctggtgtcatgccattctcctgcctcagcctcccaagtagctgggaccacaggcacccaccaccacgcctggctaactttttgtatttttagtagagacagggtttcaccgtgttagccaggatggtctcgatctcctgaccttgtgatccgcccaccttggcctcccagagtgctgggattacaggcgtgagcc

SEQ ID NO: 62667 - DNA, 1024 bp, Homo sapiens
tcggcctcccaaagtgctgggattacaggtttgagctagtgcgcctggcccataactgcctttcttatgggcttctcttgaagcaggagccacagacagctaataatgttacctgcctggtgtctggctccttctactcccctgaccaaatgcaggtcattgccatctctaaacctgccatgcttctgtaaaatatctggtaggccacaggcagttgccgggagttccatgtgttagagcaagagaaaggtggcagatggacatgtagccagcagcccctgagttcttcactgtagacttgtgagttcttgggcataaatcctcttcattcacagatgatgctcctctgttttcctagtgcctttaacactgaacatttcaaactgctgccaggatcctctgttctctctgctttaaacttggtttccttgtatcttctgcatatgcaagaaccaggaaccaggaaggctatctttccctaagcccttgttctgtagccacactgggatccagcatggggcactgtgggccgttgtttggcccctgtcataagtgccaagtactaagaaagaacctggtcctttgcactagtagggtaaacagctgtccttccatgccaagggctgttcttcctagtctgcaggatcccctgagagcagcccacaggacccggagcacctagtggtctttgaaagcaagccagggtcccacaggaacaaaggacagctttctttcctggtggctctgtgcaccaagtgtgaactcctctgtattcactgtgcctttctggggcctgcttgctatcagtctctttagagctggcatatattcctgtgattcaagctctacactaaccagctgtgtgcccaaataagtccctcgccttctgggtcttaactttttctttttacttataaagtaaatagcccagacaagttgagccaagaattgtctgtctgcaactctttacctaagtgagggaccccagggcagccagtgcagaggaaaaagctcagactatccc

SEQ ID NO: 62668 - DNA, 1039 bp, Homo sapiens
aggtgccggggttgtctccccttcctgaaggtttagtgcccagtaaggtctctaaagcaccaggacctgtagtctgaggggaatagaatgtttcctctgaggctgtcagtattggttaccaatttgttagcaattggttgagaaatggtttctcctcctcctttgccaagaacattctccaacacacccctcaagcctgtcagactcaagtttcctgttatctcaggatcgatgatgatggactcagttcagatcagtgagcgtgacggtaatatctgtgctgcccactctgggacctgaccccatttcacatacaccacatggattgcaactgagaaagctgacccaaaatgtgctggcaccagtgtttgctcctctccctgttggggggcagccagcgtgggccatattttgtctgcgggtctgatttccccttagtcaggacttctgggccagggagctcttatgcatgggtcttcgcgggtttgtctgtggtctaaggaagatacagagctaaatcagaggctcagagcagctgatcaagcctgggcaatagcagccgggtgccggcctacttgggggtgtcaagcacttgctcttttcacacttcagcagcagctaaaaccttattagtgctcattctgtgctaggtaatgtgccagctactatgtgctgccattcatttatcttatcctcatagccatcctgtggtcgataatcttacatattcccctttaatggatgaggtacagagaggctaataagtatcttttccaaggttggaaaggggtagagcttagttacagccatctatcagccattaaaatggatgtaatcttccttaccccattctcagggaccccatgggggacacatcagactgtgtctctgagaaaataatgacctttactggtagaattcatctaactagttgcagcatgaatcaggacctctcacatggcaccaaggacaaggccaaagcctcatattagaagcttattgggcttatttaactaaactctaggggagttaaataact

SEQ ID NO: 62669 - DNA, 1050 bp, Homo sapiens
aaaatactgcattttgtcatttggttattggtgtttactattcaccttttgtggccttttactcctatattgtccttataagaaaatttgtcagaataaccaggttatacagccttgtgcttaataagaacttcagaggtgagctggtcccctctccctcgatcccacagccacacccttttccagttctgccttaaagggagacctgcaggtggttctttctctggaaagttcagagctttcgtcagcaatcagaaagcaaaaggaagaatctcccaggcaaggggcagaagccagaggttgggctgggctcagcaggccaaatccacttcacttgtgaatagttgccaagcttgatgccctggttcctgttcctgggcatccccaaggagaaggccccaagtcgtgtgtccactgcagacgtcatgactcacaggactgggattgtggctaaaaggagtctcaatggttcagctcctctcctttccacccatgctgccactgactgaatgggaccaatgccctttaggcgaatgtgaaaaattaagacttttccgttcagagagaccagggtggaggggaagcatggttgagactctgttggtctgttatgtgtaggtagggtgatcaaggcatgtactatgaactgtacactgctagaaatcaggaatctaccttgacactggaaggagagggtatattaggatctataaaaagtcaccttatgcagtgagaaatacaagtatagaatgtgttatatagacaggtggttaaagatgaaatagatcagtttagatcaattgcacctctaagccatcccataaaccaccccttggtgtggtgctctcaatatagaaggaatcctgggctggtcctcgcggctgagtgggcagtttttattgcgcatcaccttgtgccaggccttgcgtcgtgggatgcccttgttcctgtcttgtgacttagaacactgagacttagccaggttgtagaacttatctagcatcagactgcagggattaagtgtcagccaggatttgaacctgagtggtg

SEQ ID NO: 62670 - DNA, 1598 bp, Homo sapiens
ctcacagaacagtgacagggaagaagaacttgcacacttggggactccccactgtccccagcacctgggagtgagtttgaagggtaactagccttggccagccaccctgggcagcagacagagagcaaatggccagaatgaacaggacctggaggggcccactgccatcccacagccacatcctccccagccacttctctggcccaggcccagggcctttcaactggtgaagggttaattggaggcagcctgagaaggcagagggcaggttccacttcctttgctgatgagtggctctgcccattagctgcccctgcctgcccctcccccaggtgtatttccagactagggattaacagtaacttctgtggctccctgagtgaccccacttggcttcagcttgcttgcttgctttttttttaaagatgtgctgtggcctttgggccagccacttgaatgttatgggaaagcccaggagcaggtggaagattctgccctggacactgaagggtcccactgcggaggcactatcccatcgtcccagggaaacttgtctagacgctacttcacctccgtcccctaaggggggatgtgacccccctcttacctctgggcatgaccttcagcacattgctaccttccctctctgccctcaattttcctaagggaggtgagctccaggatctctgcagggcttttgaactcagtgttttctgctagctttgagcactttggaaggatgatgttagagaacttgtgagaggagcttctctttgaaggtgttgaaatgagcgtgtttggatacagtcccctgttgatgggcaggtgggcagccaggagggcatgttacctggcccgcggaccatagtccccactgtcccagagccttggccaggcctgctgtgcttggaactgtttccaagcccagctcctcactgtctccatgttcccatctccaggggcaggctcctgcatggacggcactttacatataaaagtatcacaggtgacatggccatcacgtttgtctccacgggagtggaaggcgcctttgccactgaggagcatccttacgcggctcatggaccctggttacaagtgagaaggccctttttcttctccctccttcctttcatagacttccttgcccacccctcctcttctcccttggcagctcttgatggcaccccttcctggggggctggtcatgaatgcctcatggattcagggcctggggcctgtgtgtaggtatggagtgtggatgctgctacccactccagcagcttaggagcacttcctgaccttctccccctgtcacctgagacacaagtgttaactctccaggccctggctcttggtaattctggttccccgtggaaatccaggttggagggatataagactttctgcaccttgggtaaaccaaggtacaagaactcaaggatgaagcaagatgggaggatgtgtggaggccactctccaatggctacatggaaatcccaccagaattcagacagtggcatgtgtgcctggaccagggctgggcaggcctcagtgggaagagcctccccttcttagcctacccccatctgacagcc

SEQ ID NO: 62671 - DNA, 1052 bp, Homo sapiens
ttggatgtaccttccagggcacttccagattccagatagggcttgtattccaaatccaaacagtttccttttgtccttctacggtgaggggcagagggggacactagagcctgactgggcagcagctttaatttaattttttttccttttaatttttcttttctgttcctttttcttcctgagattcctttttaccggccccaccagtgttcatctcccttctgggagcagcattcccagctctcccagtgtcctccctcccctccccattgtcccctgacccctttccttctatgcctcagtctgatattgcagggaggtgagggtgtggggggaatgacagctggggacaggcctcaaacacttccctgtgtcccttgaacagatcacagtgagctcatctctcctccatggtcagaagagaggtataacgcttggtggttggcaaaaagatcatacatttaaaaataataataaaagcctgccttgtgccttcacagattctgttgaccgaagagtttgtagagaaaatgttggaggatttagaagatttgacttctccagaggaagtaagcttgtttgacttttcctgacaacaggtcccgtctctgggaccatgtgtgtgcgtgcgtgtgcacgtctgtgcatgcatgtgtgcgtgtgtacctgtggtgcgtgtgtgcttgcatgtatctgtgtggctgcatctgtgggctcctccccaaggtgcagggataggctggagaggagactgtagatttctcttctgtttctatgcaccctcaccatcccctgccctacccccagcccttgtaaggacacccagcaaatcgtctgaattgccagctcctgagagcctcattgaagaggaagccagggccttcaggctagtacgagttctccccagcccctgctgttccctggcagattctgaacagaacgcccatgtctgttgccagagaacattccgctggggagttctggtgggcagcaagggactcctgctctcgcctcgggccacccaggagccactctcccttcttcgtcctcca

SEQ ID NO: 62672 - DNA, 2257 bp, Homo sapiens
cgccgccgcggagcccaagatggctgggcgctgagggtggcggctcggcctggccccgccgccgcaggctggctccgaccgcagccccgagccttccaggccccagcagaggccgagaagaaaagaaagtggggaggagggggccgggggggcgaagggggagggccgggggaggggaggggagggccgggagccgagcctcctgttcattagcagttgagaaaaattcctttctagtttgatcaatccttgttttcctcggcagagcccgggcgcccgcccagcgcggagacgggcgcgcggggtctctccgcggcgggggcgccgggcctcgggggagcgcagaagtagccgcccgggggtcaggccggagcgccgccggggcttctccctccctccctcgccggttgcctttttttccacttctctccctcccccttccgtttctatttgtgaagggaggaggaaggcagaggcgggctggtgtctctggccggggactggaatttcatctgaatgactgcccctgcgcgcacgcagcgccccggagtcggcccgcccgcgccccgcagcccgcgcccggccagccagccgggggacgcctgcaccgtggcccggggaccgccggcctgcccctcccgccccgtccggatctagcagccctcggcgcggccgccctcgcctcctggccccgcagaccccgggctccggcccctgcgagggaggtgcggcgccgacgagccaggcaggagccgccgctgccgccgccgccggaagaagtgtgctgctcccaagctccgtctgccgcggggcgcgccccaatgtcagccgcggggacgagcgcaggccgcgggccgccactgccctagccgcgccgacggggaggcggcctcttatatggaatttggaccccggcgctcccctccaaggctggagtcccggccgcggccctggcgcagtccgccgcctcccgctaggcgctcgggaggaggaggagacgcagcccgctgcgcgcgcggcgtgaggaccgcggctccctcctccggggggcgggcacgcggaaggcgctgctgactgagcgaccgtcggggccggctggggccggagctcggggctcggtgggcctacagcggctccggacggacccccggggctggggagtcggggaggcctgccccggccccctgcccgcggccgccatggcggagaattggaagaactgcttcgaggaggagctcatctgccctatctgcctgcacgttttcgtggagccagtgcagctgccgtgcaaacacaacttctgccggggctgcatcggcgaggcgtgggccaaggacagcggcctcgtacgctgcccagagtgcaaccaggcctacaaccagaagccgggcctggagaagaacctgaagctcaccaacatcgtggagaagttcaatgccctgcacgtggagaagccgccggcggcgctgcactgcgtgttctgccgccgcggccccccgctgcccgcgcagaaggtctgcctgcgctgcgaggcgccctgctgccagtcccacgtgcagacgcacctgcagcagccctccaccgcccgcgggcacctcctggtggaggcggacgacgtgcgggcctggagctgcccgcagcacaacgcctaccgcctctaccactgcgaggccgagcaggtggccgtgtgccagtactgctgctactacagcggcgcgcatcagggacactcggtgtgcgacgtggagatccgaaggaatgaaatccgggcaagtaccctacgcgcgcgcgcgcacacacacacacacagacacacagtcccttcctctctcccgccccgggaccacccatcccgacaggctgactcttgtgacatcaggccagtggcccctggccaaactcttctctgaaagtttggggacagggtcctgggaagaagggccccgggtcgctacttggtacattctcgcacctgtgcgcacagggtccgtcttctgagtgctttatgggattggggtgtgggaccgtcaggggtagagtctgggtgttgcttttctgtggtgcgcagctccctcccccagtcttgttgctgtaggccctacgggaagtcaccgaggcagtgaccccggtcctgcctctccagctgctgtttatgtaatgagtgtcccggtgccgctgctgtggctgacatgatccatgatgctggcataccaatgaggaagtaaacaaaagcagccatgttagttttcagcgctat

SEQ ID NO: 62673 - DNA, 1002 bp, Homo sapiens
ccttggggcctggggcctgggtgtgatatctgggggctaggctgcactctggtgggactgggagtgtctctgggtggggatccctggaggttagtggaggccagtgcggaggctggctatgaggaagctctgttcagggcatgattggagatggggctgtttcctgtgtggggggaccagtcagaatgagtcactgtttagcaattaaaaaacatacacatacaaccaacaaaaggcaggagggccaccacaggctggggcgggggcagcaaatacgatttgctgtataattagtttccaatcggatggactagccctgggtttgtgtgccaggataggcctctggtttcttaaaggaagtgtgtcctccaccccctgtgtcctccatccccgttcagggcaggcacagcccacactttccccagtattgggaagctgctgctattaataaagatggaagggctgggggaggaggccgggaaaagtgcagaggcaggagaaaggagggctgtccagttctgtcctgggattggcagtggaaaatgagaggaggggaaaggagatgtggctgaaaggaacaggggaggggcagcaacctgggcgatgggcggatgcctgcccgcacccacagtgctgctgtagctggtctgagttctagggatgtctttaattggggtgggggagaaaacgtcattatacctgacttggtgtaggaggatagctttaggtgtctgtgtttttgaatgtctttgagactgtgtgcttcgccctccaatgcacctgtctcctgtctctacagttcagggcacaggcaggggtgggtgggtggcatgtgcatgcagagtattccctggggtgccccccagcaggcccctcatttccagactcgtggattggatggaagcaggcactgaactttgtcggcaactccgcagggtgtgtgtgtgcgtgtgtgcgtgtgtgtgcgtgcgcgtgcatgcgcgtgctttcttgtgcctggtg

SEQ ID NO: 62674 - DNA, 1031 bp, Homo sapiens
agcaggccagaccagtgcagccccccggactcctccctggctggcaccccctggccagcctccttcctcttcctgctctcactccaacccctgcagcagagacaggagcccagtggcctcagcagcaggagggggaaatgaaaccctcccacctgctagggactgtgtggcctgggctggtgtcccacccagattgcctgggacagacagaagcttgggaagaccctgccggctcccagggtagaagtgctgtcaggggaggctgaggaaagcccggaagaagagggaaggggctgagccccacccccccaggactggacaggaaggccctccctctgctgtgccctgaggggtcactccctgggcatcagcaagggatggggcaaaggggcacccaccagcctgcggggtgggtgtggacagctcagttcctgtccccaaggaagctgcgctgggaccttggagctgcctctttcctacccctcccctgggactcacctgaatcctccctgaaccagctcctggtgggtttggtcgtggagaagcagccatgcagtaagcctgtggtgtgagatgtgtggggccagcagggcctttcagatgtcctgggcactggatggagggatcagcctggactctgaagagcacctggggggccctgtcctcctgagggtgggcttggggcaaccagcaggcaagaatttgagggccaattgttccaggggaggtcagtgggcctgatgttcccagagtgtcctggccacctcgccatcgtgccaggcctcttgccattgtctggggcctccaggaggtccagccttccctgtgagggggttgggtcaagtgcctttgcacctctggctgtgcccgccagcatacctgaggcgggctcggggctcaggtggcaaggtattcccatgtgcgtgcgcagctttgtgccaggtgcccctgcgcctgcccactcatgctgtgtgtgctgtcgggctctgacccttgggctggcagcagattcctgtgcctcttggtgcttc

SEQ ID NO: 62675 - DNA, 1036 bp, Homo sapiens
tatcaggccaggcgtggtggctcacgcctgtaatcccagcactttgggaggctgaggcaggcggatcacctgaggtcaggagttcgagaccagcctggccaacatggtgaaacctcgttgctactaaaaaaaatacaaaaaattagccaggcgtggtggtgggcatctgtaatcccagctactcgggaggctgaggcaggagaatcgcttgaacccaggaggtggaggttgcagtgagccaaggttgtgccatcgcattccagcctgggcaagaagagcgaaactccatctcaaaaaaaaaaaaaaaattaaaattctgtggcatattagggacaagtcccccaaatcaaggaaaaagaagcaaaaccaagaaatgggcgagtgagcatttagtgttcctctggaggctgactcaggcacggatcacagctcggcgctcggactgctcatggccccttttgtggacacaaggcaactgaaagcctatgtgacctgctcatggctcctgtctccaggaggaggagaggaacgtggggcagacatcacaagaaaaggtgagcatgagggggtggcctggagagcagcacccagggcacgatctgctggcttaaggttatgggaggaggcaagtctccgtggtgaccatggctagaggtcaggttaaaacttcggatctctgctttgagaggaaattcaaagccagtatcattttaattacacataccacacacacatgcacactcagagtattttagagagaaaatgtcttcaaatgcctggaactgtaacagcagaaagagctgtggtttggggttcaagttcaggtctgtgggtggaggagggatggatttctcgatacctttctctggctctaagccagatcctttgttcactattttctagacacccaaggagggaaaaaaaagactgagagtcccagtgcagaatgtttcatcctaggaggggccctggcaacctgggcctgacctcgagggcgcagagtgacacttcctccatgttgataatggagtctggc

SEQ ID NO: 62676 - DNA, 1364 bp, Homo sapiens
gctcgcctggaccagggagtggagaaagcctgcccacgtggctggcgggagcctcccggcctgggattggtcgaaaaggaggggcgtggggcgggcgtgggggcagttccccagcccaggtcctcctctcacccgggccagttttcaaggcgggctgtaactggtggcatttgtcccgggaccaggtaaggggccttgggacaatggcgctcgccctgtctacctccaatccccacatctcgggtgggtgctgagattgctgtcctgactgcccaggcggggctgcagcgcgggctggacttccacctgcagaagccacgtggcgcgaagtgcgccctggggctgcagatgggcccctctgctctgacccccattgcctaggagtgccaggccgagcggctggggcgttacgagctgtccgggatgggggagtaccgatggggggaggccgtctgtcggagggcaagaagcagcctgggggctggccctgagccctgaggtgagctgaaagcacaggtgaaaggcgttttggggatcggcccggtttttgttttgacacagggtgtcgctctgtcgcccgggccggagtgcggtggcgcgatctcggctcactgcagcctttgcctcacaggcttaagcgattctcccgcctcagactctcgagtagctgggattgcaggcgggcgccaccacgcctggataattttttgtattttgtttttgtagagacggagtttcgccatgttgcccaggctgggctcgaactcctggggtcaagccatccgcccgcctaggcctcccaaagtgctgagactacaggtgttccaaagtggtgagccactgtgcccagcctctggccggttttgctaagctgctttggacaggaccgcgtaccatctgtagtcctggaggaggcaaaaatgagcctgcatttttagccaaggaagagcaagtgggacactggggtgggttgggaagtgctacctcccatccctttcccgatgcagaggactataagaagagtttacacaaacgtgctaggccctgttctagacgctggagacacagcagtggacaaaatcagcccgtatggaaattacatccttcctaatgaaatacatttcataccaaatttcattttcacaacccctagaaattggtaattgcggccaggcgcagtggctcatgcctataatcccagcactttgagaggtggaaggggaggaaggcttgagcccaggagttggagaccagcccgggcaacacagtaggaccctgcctctacaaaaaaaaattttttttaattagccaggttccgtggcgcacttgtagtcctagctactcgggaggttgaggctggagga

SEQ ID NO: 62677 - DNA, 1080 bp, Homo sapiens
tttatctattctggatattttatataaacgggatcctacaatatgtggtctttgtgcctggctcctttcacttagcgtaatgtttataaggcccatccacatcgtagcatgtactagtacttcattcctgttcatgaccaagtaacattctgttatctgtaaaccacaatttatttatgcattgaagtgtctaatttttcctcaggatatgtttgtgtatactagaaataccatgtgaaaggaatgtagctcattttctagcccagtgtattcccttttcgagggttgggacccttctgttttagcctttgttggggttgtttttccagtggaaatcataaactggcagaagaaatatattttttttgtttactagaaatgttatagccctcaggaccagtaaagttaagtataggtattgacaacaaaatatagaatatagtaaatacagaatttacttttcctttgcacatgtctgtttctgtaagtatctcgaaaaggctgtccccagtaaccaataaataacatcggtagaggtttggtttaggaatgtcagagcctttggagatgggctggtcaaagataggaactagatccactttttcagcaacggggatgatggaaagtggaggttcctaccaggtcgtggagcctgggaggtgttgtgaacatgtggaaggggattgttaatgttatattctaattgcagtttgcaaaccacaggctgctttcttatatctgtggcacttctaatacttaattttggggacaggtgtcttttgtactttgttccatttggatgaatgctatcactgaccaacagctgttacacggttacaattcctgcagagaagggaaagttttcgtaatgagcagtggccctcttcctaaccagcccccacataccctcactcctgacgctccctatacaattccatcccccaccttatactcctgtctctttctgtctgggagtactagatatctatagtgagatttctgttttgaattttaaccttcggaatgcaagttactatataattattaactctgaatccaccgcaatttagtcagtgtatt

SEQ ID NO: 62678 - DNA, 1025 bp, Homo sapiens
cctgcgaggttggaggctacagtgagccatgatcgcaccactgcagtccagcttgggtgacagagcaagatcctgtctcaaaaacaaaaagccggcctggccaacatggtgaaaccatgtctctattgaaaatacaaaaattagctgggcatggtggcacgagcctgtagtcctagctacttgggaggctgagcaggagaattgcttgaactcaggaggcggaggttgcagtgagccgagattgcgcctctgcactccagcctgagcgacagagcgagactctgtctcaaaaaaaaaaaaagcaaaaaacaaatttcatctgagtgtgtttcatgtagttggtgtgatctacatccctccttttgttcttattccgatctttggtttggagagcaattgtgaggaggcatgaaatgtatctggagatagctatgagctgcagcctgctgattttcatgtaattcttggctacttgccagtatggttggggttaaactgtttccagggtaggaaaaacacgaacctagcattttgatatgaaaacaaacaaggctactttgtacttgatgaagctcaagttgcagatccagtgagagcccattaactattggtgaaggcccactgacagtgttgagtttcagagacccctgcacattctggagatggcagcgaattgttgtgcagcctacgaaagtaataaatatttctgcagtgattgtcaacaacaaaatgattttcttgtttggggggtggggaggcaagaggcagaaaccttaggaagctgttgcaaaccagtttcagcttctgctacttttatttctttccatttaaagctgggtgcagtggcacatgcctgtagtcccagttactcaggagcctgaggtgggaggctcacttgaacccaggattttgaggctgcagtgtattatgatggcccctgtaagtagccactgcaccccagccagggcaacataatgagaccctgtctctcaaaaaaaataaaagactgaggctgcaccaatgac

SEQ ID NO: 62679 - DNA, 1106 bp, Homo sapiens
gcgtgtgcctgtagtgccagctttttgggaggatgaggcaggaggatcacttgagcctagggtgacagaacaaaaccctatctcttaaaaaaacaaaacaaaaaaaaaaaaggaaggaagaaaaatatggaacacttcatagcccattagagcaaggtttattgtgtgttttggtcatagtggcatccccagtgcctaaaacaatgcctggcacactgtaggcattcagtgagcgtggagtgagtgaatgaatggtacacttatgccatggcactctttctggagaatttcaggtgccagtctgtcttgttagatcagtgcagattacattgcccatgaggggatgaggatgctgtttccatcagtttgattgccaaagttagtgctgcgtatgttttgtggttctcagtggttgccagggaaccgaggaagtgaaaggaaggggttgaaagcagcctcattgctgttccctgggcggctgtgccttgatgtccagccttgtctgtatggcagtttggcctggttgtgagagtggtgacaaggcctgggatagactgaccatgtcttgagaatatgtatgtgctgaagaatggcttcccagtccccaaacaccggcagcagcaggagccacttcttttacacatcagccaccttttcctctagcaatgaagctgtgatccattctttcagtgagtctcaaggaaatggttcagccagtttggcacattcattttcttgtcaggaaagtcaatgtgaccttgaccatcattggggacctgcggtaaacacgttgtgtgtctggctggattctaatgatcaaacagtgcttttggcacctcactgtgctgtacgtgtcatgtgctcctaatttattgtcctaggttgggggttataggtactaatttgcaagaatcatttctgacttacatggatcatgcccagcacagtgccactaccatggaggccttggataagtatcatgaaagaaaattgttgcagaaaatgaaaggaaagatgaaatatacttgctttgagtcctggacagtgtaattaatttgtagctgaggaagttattgaaaagtaactttttgtaatcccagcacttt

SEQ ID NO: 62680 - DNA, 1052 bp, Homo sapiens
tagcaagcatagatctgctttttccacacgcaccaggcttcagaggagaagttgactagatagccagtgtctcattttgtttgtggtgggcatgggatggtgaaaacggaaggaggaagaagtacaggggacaagatatttagatggtccacaacttgcgatggttcaacttaatggtttttcagctatgatggtgtgaatggcatacatggccagtagaaatcattctgtttttcacttttagtacaggattaagtagatggtatgagaaatccaacttgatagccagtgtctcattttgcttatggtggacatgggagggtggtggtggggcggcgggggaaggagcacatagaaggaactctgcgtgcaatgttgtgagggcctcattgtcagggtttatgaatttctcgtttccttctttctaaactgtcatatcagaatgtaaagtttttaagaccaagaaacacctaaagatttatggtggaaacgtgcactaagccggggaactggttttcagtcctgtgctttctcttgtcctctccgtgtggcttcaggtgccagtcctgtttctgcccagcctctagccctgtagacagtcactggagtgcctggtgtatacccttggccaagtagacagtgtagtaaagcatggcccagagaggaggagccgaccatgtgacttcagtttccactggcagctgtccgccggatgtgcactgtgggcagggccagcctgagttgccgcaaatactgtggctttagtttatttgctgagcagggcttttttccttcttaactctgagcttcttggggataaggacaatgtcttattcatctttgtatcccttgaacccaacacaatgcttggcacaaagacagcgtccagtaagtgactgtgttattgtttagaatgaagaaatgttgaaggccacatatagcagatgccttacaggtttcgtcatctgcatagtggccccaagtacattttgggctgaggttaacgttggtctgggaggtattttatatcttacatgtgaaactttttttta

SEQ ID NO: 62681 - DNA, 1117 bp, Homo sapiens
aaaccatattttttcccctaaactctgttgttgttgtgtaaatcttttaaagttttttttgtttgtttgtcttttttattttttatttttgagatggagtctcgctctgtcgcccaggctggagtgcagtggcgtgatcttggctcactgcaatctctgcctctcttgttcaagcgattttcctgcctcaacctcctgagtagctgggattacaggcgcgcaccaccacgcctggctaatttttatatttttagtagagacgggatttcatcatgttggtcaggctggtctcgaactcctgacctcgcgatctgcctgcctcggcctcccaaagtgctggcaatacaggtgtgagccaccgcgcctggccaaagttgattttcttaatggaataaacattgatacaaactgttttgggggctggtgaatagacaaccaggaggacaatgatgagaaggaaagtgttcaaaagctgtcatttaatatgctaacatgcttttttaattttttaggataaggaagcctgtgtgggtaccaacaatcaaagctacatctgtgacacaggacactgctgtggacagtctcagtgctgcaactactactatgaactctggtgtaagtccttgcttgggtgcctctcagtatcccagggtcccagttactgcctctgcttagtgggaaactctgggcattagcccttttcggattctcttggggacagtgttggtgagtggaatctgtttatgggttccagaagtgcttcctttgtagaggaagagagttctggtgctctttggactttgttagctgaagactagagaatatggtcttagccaggtctgctgcagaagctcttgcctgaggttctcctggctgccctctccattgtgtgctgagcagctgacaacaacttagatgcttccttgggccctcccagaagcccaggtttgcctttctttttttttttgacggagtctcgctctgtcaccaggctggagtgcaggcgcaacctcagctcattgcagcctctgcctcccgagttcaactgattctcctccctcagcctcctgagtagctggtactacaggtgtgcaccaccatgcccaactaatttttg

SEQ ID NO: 62682 - DNA, 1028 bp, Homo sapiens
gtgcagtggcgcaatcttggctcactacaacctctatctcctggttttaagtgattctcgtgcctcagcctcctgagtagctgggattacaggcgcctgccaccatacctggctgatttttgtatttttagtagagatgggggtttcaccatgttggccaggctggtctcgaactcctgacctcaagtgatccacccatcttggcctgggattacaggcatgagccaccacgcccggcctgttgtcatcattcttacattcctgcccacttctatcccatgtgtctttcactctggcacaagcatttatggaaattgatcacatggcttcaatgtaaattaactgggtgaggcccagccatgccagcttcaaccacgtgggcaccgtccagggacctccctgttccgcaagctgcccctctggctggtactcactgtgtgcctctctgtcttgccttgcccaccccccagggttctggctggtgtggaccatcatcatcatcctgagctgctgctgtgtttgccaccaccgccgagccaagcaccgccttcaggcccagcagcggcaacatgaaatcaacctgatcgcttaccgagaagcccacaattactcagcgctgccattttatttcagtacgtacacccaagcccccatacccaccctcaggagctcaggtgcacagacccagggctcacactgaatattggtggccaggctcctgtaggcatagggggtttgtcctctccctgcccctccgtagagcaaggtcttgaaagtacaggaacaaggggacactccttcagcacagaggagcatgtgctaggggtgcagttccctgaagccactgggccattccaaagctcacagtggctgggttctggctggatctctgcttctttagcacctgcgtacatacctacctacctaacttcctcccttcctccctcccttccttcctccctccctctttctctctttctttctttctttctttccctgcctgcctgcctttccatccctccctccct

SEQ ID NO: 62683 - DNA, 1804 bp, Homo sapiens
tactacctccttatgaggaagtggtgaaccgacctccaactcctcccccaccatacagtgccttccagctacagcagcagcagctgctgcctccacagtgtggccctgcaggtggcagtcccccgggcatcgatcccaccaggggatcccagggggcacagagcagccccttgtctgagcccagcagaagcagcacaagacccccaagcatcgctgaccctgatccctctgacctaccagttgaccgagcagccaccaaagccccagggatggagcccagtggctctgtggctggcctgggggagctggacccgggggccttcctggacaaagatgcagaatgtagggaggagctgctgaaagatgacagctctgaacacggcgcacccgacagcaaagagaagacgcctgggagacatcgccgcttcacaggtgactcgggcattgaagtgtgtgtgtgcaaccggggccaccatgacgatgacctcaaagagttcaacacactcatcgatgatgctctggatgggcccctggacttctgcgacagctgccatgtgcggccccctggtgatgaggaggaaggcctctgtcagtcctctgaggagcaggctcgagagcctgggcacccgcacctgccacggccgcccgcatgcctgctgctgaacaccatcaacgagcaggactctcccaactcccagagcagcagctcccccagctagagcaggtcctgccagcacccagcaacttggcaaagcaaccagggtaggggagaaccacgagagaagcattaagtgactttcaaagactttcagagtacagccacttggttcctttttgtttgttttccttctcctctcctgcattttcctccatctccaggtacagttcggggtgtggatgcctcttcctccacaagggcacagtgttgtggagggctaagttggttctgtgactcattcctcataccctaactccatctcctttctttaaagtcaaatctcacctacctgtttgggtcagagagatgtgttttaaaagcccccaaggaaggaggctgggactgtgccctgacatgattcttggtgatggaataggtttgtgctctgattctagtttaagagaacgttgctgtatctcagtccaggagaggcagcccatcttggccctggatgaagaaggaaacccacagaggcccagggcttgtcattgggctgccagtgtctgccaagccagcattgagctaatcctgtgggaggatgagagctactgggccgttgtatgataggttggtaggggcttgttgatctgtcaaattccaggtgacaagatctatgcaccccatgcgtccttgaggggcctcttccccgcaggctctggctggccgcaggctggttctggtgtgaaaggttatactgccttttctttgtttgtttgtttttttctctaaaaacaaacagcaaaagacagctgaaaacaagaacttcaccggtgggcaggcaagaattctcttctggaaaatgacgtttgtggctctttcccaagttggccttcaaagagcctgcctgctgttgagccagaagatgtctcgtgtgaaggctggggtggcggctgtcttggaacctctgtgagcaggaggccctaagccgcagcagtggatagaggtgcagctctctgcctctctgccctttggtctgtgttcacaggtgacccgtgtcagcctgcatcgcaagcacacaccctgcgggccttcaagtctcactgttccgtatgaggaaacagacagcggactgaggaagcgatggcc

SEQ ID NO: 62684 - DNA, 1016 bp, Homo sapiens
gtctcagcctctcaagtagctgggattaacaagcacccaccaacacacctggctaattttttgtatttttagtagagacgaggtttcgccacgttgggcaggctggtcttgaactcctgacctcaggtgatccgcccgcctcggcctcccaaagtgctgagattacgggcatgagccaccacacctggcctctccttactctgttataagcctgttcctcaccatagcttcagattcccttcatttcatgttttttcaccaagaaggctcaagaaacccaatcccacagaaactgtgacggaacacctgtgctggagccgtgagtttgtctttgggttctccacccgctgcccggcagtccatcagccctggctctgcggggacggagtgggcaggtggcaggccaggggctgtagtgggccctgcagggatggaacggggagggtgggttccccagggttccatcctgcggagggactcatctgcacacacccgctccccctcctgaccaaactggtggcttttggggaggtttgtataaaaccctgagaaggactcatttcgtgggtttggatatagacaacgacgagaaacccaatatttatcaaggcactaaatgtatttcataggttcacatttcatcctcacagtaacgctatgacacaaacatcccagttccctaccacccgcccccgccatattacagatgggaaaaccaaggcttaaggccacctaaggtgtccatggccacgcagtctgtaaatgacaacactgggaggatttgtctctgcaacctgacttcgagtcatttgcattcccgtctgtgtgggactctcctgcccacacactcttttctgcctctcatcctcaccagagcctcggaagatgggcagcgcaggtgttaggttcccccacattatccatggggaaattgaggctcaggaagttagtgatgggcctaagatccagggtcaggaaacgggagctggggcagagcaccggggtggtctgggtcc

SEQ ID NO: 62685 - DNA, 1042 bp, Homo sapiens
tgtccggctaattttttgtatttttttagtagagatggggtttcactgtgttagccaggatggtctcgatctcctgaccttgtgatcggcccacctcggcctcccagagtgctgggattacaggtgtgagccaccgcgcctggcccattttctttagatatatacccaagtagggggattgctgggtcatatagtagttctatttttaattttttgaggaatctccatactgtttcccataatggctgtactaatttaaattcccaccaacagtgtgtaaggattagtgctggtgaggatgtggagaaaacgatacttctgggcattttttcttctattgagactaaagttgcaactcttagtatttttttttatactaccctttaggaaggtgaaattgttgaagtggatgaagaaacagcagctatcttgaagaattcaagatttgctcaagattttctgatcagaccaattggagagaagttgccaacatctggaggctgttctgctttggagttaaaggttagtttggctttcactacctgagagaactattttatttatttatttttgagatggagtctctctctgtcacccagactggagtgcagtggtgtgatcttggctcactgcaacctccgcctcctgggttcaagcaattctccctgcctcagcctcccgattagctaagattacaggcacccaccaccacgcccggctaatttttgtgttttttagtagagatggggtttcgccatgttggccaggctggtcttgaactcctgacctcaggtaacccacctgcctcagtctcccaaagtgctgggattacaggcgtgagccactgtgcccggccagtatgcatggtctcttgaggcgcacttctcttgctggtcaaatgttgttagacggttatataccagttaaacgccaccattttgcctcttaatgtgcatgcttgagcccacttgcccaactcccgagatcttatcgggaagctgctgatcaccagtttcaggtgtttctgtttattgggagactt

SEQ ID NO: 62686 - DNA, 1810 bp, Homo sapiens
tgaggagacggtgatcatcgggctgcgactggaggacacgaacgacgtgtcgttcatggaagggggggcgctgcgggtgagcgaacggacccgggtcaagctgcgggtgtacgggcagaacatcaataacgagacgtggtcccgcatcgccttcaccgagcacgagcggcggcgccacagcccgggggagcgcgggctggggggccccgcgccgccagagccggacagcggcccccagcgatgcggcatccgcacctcagacatcatcatcttgccccacatcattctcaaccgccgcacctcgggcatcatcgagatcgagatcaaaccgctacgcaagatggagaagagcaagtcctattacctgtgcacgtcgctctccacgcccgccctgggcgccggcggctcggggtccacgggtggcgccgtcgggggcaagggtggctcgggggtggccgggctcccgccgcccccgtgggccgagaccacctggatttaccacgacggcgaggacaccaagatgatcgtaggcgaagagaagaagttcctgctgcccttctggctgcaggtgatcttcatttcgctgctgctgtgcctgtcgggcatgttcagcggcctcaacctggggctcatggccctggacccgatggagctgcgcatcgtgcagaactgcggcacggagaaggagaagaattacgccaagcgcatcgagccggtgcgcaggcagggcaactacctgctgtgctcactgctgctgggcaacgtgctggtcaacaccacgctcaccatcctgctcgacgacatcgccggctcgggcctcgtggccgtggtagtctccaccatcggtatcgtcatcttcggagagatcgtgccccaggccatctgctcccggcatggcctggctgtgggggccaacaccatcttcctcaccaagtttttcatgatgatgaccttccccgcttcctacccggtcagcaagctgctggactgcgtcctgggccaggagataggcaccgtctataaccgggaaaaactgctggagatgctccgggtcaccgatccctacaacgacctcgttaaggaggagctgaacatcatccaaggggcgctggagctccgcaccaagacggtggaggacgtgatgaccccactccgggactgcttcatgatcaccggcgaagccatcctggacttcaacaccatgtctgagatcatggagagcggctacacccgcattccagtgtttgaaggggagcgctccaatatcgtggacctgctgtttgtcaaagacttggccttcgtggatcccgatgactgtacccccctgaaaaccatcaccaaattttataaccaccccttgcactttgttttcaatgacaccaagttggacgctatgctggaagaatttaagaaaggtgggaaattttggtctctttcattggcttgctctttctctctccatcctcctccctacttgagtcctctaccctcagaccaaccccccaaggcgagttgaccgggatttctccttctccctcttaattgcaaagttgaaagggtggcgtggatttggggatggattgaactagtaagtgctactaggttattttaaagcacaagactgccatcacttactttttcccattatcaaaaagcaggctgtgtaatttctgtgcatgacacttatttatttttttttttttggtcccgtgtgtgggcctctgttcttgaggggtctgccgccttcattgtctgggttctcagtgagtaggtgaaggtaggggctggctgatgccatgccatttggtgg

SEQ ID NO: 62687 - DNA, 1064 bp, Homo sapiens
gatcacttgaggtcaggagttccagactgacagtctggccaccatggtgaaaccccgtttctaataaaaatacagaaaaattagctgtgcgtggtggtgggtgcttgaattcccagcttcttgggaggctgagacaggagaatcacttgaacttaggtggcggaggttgccgtgagctgagatcacgtcactggacgacaaagtgagactctgtctcaaaaaaaaaggagggggtggtggcaggctttcgaaggaggaactagaggtttgtggtctagcttagatgttgatggataatggggatgccaaaccctctccctgtgttacattagtgctatgactgaacataaacactgctgtaatggacggtgagatcttcgtgtcatcctatttaaccctcccttgctgtcattcggaggtgggagtgcttctttttgaattcacatgctgtggggaggatagcatctgttaatgcaaaggttaagaacaatgtgctcttcctggatctgttttggacaagtaacttatcctctttaaccctaagtttttttcaaagtaaaatggggatattttctaactcatatggtacttagtaagaattattgtactaataaatatataaatgtttctaacagtacctggcactttgtgcttaaccagtatttttattataacaattctttctgtaggctcttggttgttatcttagtctgtttgtgctgctgtaacaaaataccacagactgggtaacttaaaaataatagaaggtggccgggcattgtggctcatgcttgtaatccctgcactttgggaggccgaggcgggtggatcacctgaggtaagatcaccagcctggccaacatgatgaaaccctgtctctactaaaaacacaaaaaattagccagctgtggtggtgggcgcctgtaattccagctactcaggaggctgagggaggagaatctcttgaacccatgaggtggaggttgcagtgagccgggattgcgccactgcactccagcctgggcaacaagagtgaaactctgtctcaaaaaaaaaaaaaaaaa

SEQ ID NO: 62688 - DNA, 1118 bp, Homo sapiens
ttgatagacatttagacagtttccactttttggccattatgattggttattatgaataatgctgctgtgaacattggcatgcattttaaaagcaagtgcttgtggattttggaagcccttgaataaccaaagacttttaagactaaaggaagatcaaaaaagataaaatattttaacactgattgcataaaaagtataaaaaatggtaatgcctaatatagcaagtttgtattgcttatagcagtgtaaatttataatgattttggaaggcaactgggtgtcataaaaatgatttagtatttttttcccctggaaatcttaattcagtgatccaagagaagaaaagagctatgttagctttttatgttgtatgtgtgttgcagcgttatctagaaacagtgaaaaattggaagtaaatatctaacacttcaaggcaaggagtggaggagaaagagttaagaaaattataaatgtgaactatttccaaccattcagtgataatcttgaaagccacatagcaatatgggaaaatttgcactgattatttgcacggaatatagacatgcaaaaaaatatatatatgtatacactggaaggtaacgtggaaaaaatgaaaatagttgatgtattagggtggggtgatcatagccagtctttgtgaaaatctccttgttaactttgtacatgatatacctggaaaaaattcaaatctgctaagaacattatgaatcctgatcttgtgaaaactaaccattgctcgtattaaggaactcattccatttctcttgaggaacattttactgctgaaacagttggttcttttttaaaattttaaaaattgagatataattcacatatcttaaaactcacccttttaaagtatgtgatttgatgctttttggtatgttcacaaggttgtgcagtcattactactgtctacttacagaacattttcatcaccccgaaagaaactccatacctctttgcagtcacttctcattttctgttccccctagtcactggcaactaatttactgtctgtatggattagcttattctggacatttcatataacatgtaaatgaaatgtggccttttgtggctggcttctttcattt

SEQ ID NO: 62689 - DNA, 1059 bp, Homo sapiens
tgtttggggtgaaagatgagtagtattttaaagcccgtaatgtgtgtgagtacacacgtgacatcttagtaagattcattttgtgtgagaaataagggaatttaggcttttgggttacatttgttttcaaaacatgttaataggtgacaaaaatccagtttgtttagatttgtatgtagtctgcctggaatgaaacttttttatacttacatgatagccctgattaaataaaagtttggtgaaagccagcagggtggcatgtgccccatgatcccagctactcttgaggctgaggtaggaagatagcaagttcaagcccagcctgggcaaaatagcgagaccccatctcaaaaaaaaaaaaatgttttgttaagtagttgagttccaactagatctgtacttttaacataaagctataatcccaagatacctcttatttggggacatgatggttttggaaactggtgcttccttttgtctaaataaataatcactgtaaatctagtcttgattattaaaaggagacaaaaagataaaaggagtgttctgaaccacctgtgcttgaagctcagttaatagtttccagactattaagcctacaaaatgtatatcttacacattttgctaaaataaaaagaccttttagctttgatcaagacaagatcaaatatttggtttgattatactcctaaaacgtacatattctcagacagataaacagatgtgattttctttcgttctttttctggatgtatacagaaaccttttttttttctttttttggtagagacaggctctccctatgttgcccaggctggtctcaaactattgggctcaaacaatcctcccaccttggcttcccaaagtgttgggagtataggcatgagccactgcacccaaccccagaaacgtttaatttaactataggataagttagctatcatttaggtgcctttactaaagtctgttaaaatgacataaaataatgacaatgtgtggggcgcagtgactcacgcctataatccaagcactttgggaggcccagttgggaggatggct

SEQ ID NO: 62690 - DNA, 1014 bp, Homo sapiens
aaaaaagaaaaaattagctgagcatggtggcacacacctgtcatgctggctactcaggaggctgaagtagggggattgcttgagcctgggaagtagaggctgcagttagatgggattgcgccactgcactcctgcctgggtgacagagtgagaccctgtctcaaaaaaaaaaaaaaaaaaaaaaaaagacaacgcctctactcctttagccaactttctaaaaaaattaaacattttagggagagaaatcgatgtttcctttacttacagatggcattgctcttaaatagtcctatgcctattagacagttaaatttaatttttactgagttccttgatattaaaaatataccagcgttttgacctgattactgtagagtgaagatcatcagttgacacagaacttccagccagcattttaatgctttcctctgaaatatgaatggacagcgatagatctctgaatatttgaggagagcctctaataggagttatggagactaaaataaacaagcagacaaaggcccttagttgatttaagctgatttatctcacattacctaaatatccaaaaagtcagcagttattactttatctgtgacctcccaaagccacttaccaaaccaggtatgagtagcaaattcgaagatttgttgcctttttcagacatggtgtaggtaggatctttcctgtattcattcaacctgcctagttgtttgaggatcccagccaggttgaaggttgtaaatatttccttaaggcttacttagcttcagtgcaggatcagaggctaatttctggcagagttctatgtcttaggggatcattagctgtctatttttcctttctctttttactgcaagatttcttcaagaatagctagttacttccttttccttgccatctttaatcctctacaatcttgtttcaaacagttacaacccatgacttcttttattgccacatctacatcttggttgttacctttcctctcttgcttggcccctttactgt

SEQ ID NO: 62691 - DNA, 1019 bp, Homo sapiens
taatcccagctactcgggaggctgaggcaggagaatcgcttgaatccgggaggtggaggctgcagtgatctgagatcgcgccactgcactccagcctgggcgacagggtgagtctccatctcaaaaaacaaacaaacaacaacaacaacaacaacaaaaaaaaaaccgccatgtaggagacggccaaagaggaattagacagatttcctgctctcaggtaacttgaagtacatatgaatttatactcttttccattctgtatcttcttttttaaaaatttttatttttagtagatgtggggttttaccatgttggccaggctggtctcaaactcctgacctcaagtgatctgcctgccttggccttccaaggtgttgggattacaggtgtgagccactgcgcctggcctcccctctgtatattgttatcaaacataattgatctgttttgaaaacgcatcttttactttttgttttctctccattcccactgctacagtgccagcccttagcccctcttatttgtgcttattatgttttgggtgctccagaaatacattttgttttattttattttatttatttattttttgagatggagtctcactctgtcacccaggctggagtgcactggcgcaatctcggctcactgcaagctccgcctcccgggttcacaccattctcctgtctcagcctcccaagtagctgggactacaggtgcctgccaccatgcctggctaattttttgtatttttagtagagacagggtttcaccgtgttagccaggatggtcttgatctcctgacctcgtgatccgccctccttggcctcctaaagtgctgggattacaggtgtgagccaccgcgcctggtccttattttattattatttttttgagatggagtctcgttctgtcacccaggctggagtgcagtggcactatcttggctcactgaaacctccacctccagggttcaagtgattttcctgcctcagcctcccaggtagttgggattacag

SEQ ID NO: 62692 - DNA, 1062 bp, Homo sapiens
aaaaatgatcatatacaactggcaaggtcccatgggatatggccccttctttggctgcatctcctactcctccagcagctacagtgacctctggctgtttcctgagtgccacaggtactctaggcatgcccctgccttggagcctgtgttgttgctgctccttctccctggaatgtcctttcgccagatagctttgcagcttgctccctccttccttcagatctgtactcagatatccccgctgtggccaggctgtccatggcagtcttacgattccagcccctctcctgcaactttttctccttagccctctactgtactatatcttattcatcttttttctttttttttcacctgcctctcctactagaacgtaagctccataagggcagggacttgtctgtcttgttcactgctgcgttgccagggcccacagcagggcctggcacataggtgcttaatagatattgttgaatgattgaactgaatattgttgagaatgtgttgtgatactagtactcttttatgctactgatggtagtgttaatttgtataatcttcctaggaagccatttggctctatatttaagaacctgatactttttgtatatcttttcacctagtagctccacttccagaatgtgatcttaggaactaatcagaaatacatgtaaaacttaaaacacagaggtgctcatttaaatttctatttatttttaaacatttctgtaaaatataacataaaaattaccattttaaccatctcaagtatacgattcagtagtattaagtacattcacatggtgtgccaccattccagaacgcttttcatcttgcaaaactgaatctctatacctattaaacaaaacttcctattccccaattcccagcccatggcaaccaatgttctactttctgtctctatgattgtgacttctccaggtacctcatataaatggaattatatggtatttatctttttgtgactgacttattttactttatgtaatgttctcaaggttcatccatgttgtagcatgtgtcagaaattccttctttctt

SEQ ID NO: 62693 - DNA, 1057 bp, Homo sapiens
agtcccagctactcaggaggctggggcaggagaatggcgtgaacccgggaggtggagcttgcagtgagccgagattgcaccactacactccagcctggggatagagcgagactccctctcaaaaaacaaaaaaacaaacacaaacaaaaaccccacacaggtaaaaacattcatcttgtaattttctattatcaggtttcaaaagatcacttctttcttgaaacatacattgtatgtcttttggtgaacaagattgttgttgtcttcctggtgctgacagtttggtgggggagatagacatgaagcaaatcatcacacgaataaactcatctgcatgtgctgtgggggagaagtacttagtgccctgagaatattggcaggtgggacgggagggaagaaagtagcttttgggtgacttgagatctgacagataagtaggcgtcaactagaggaaatttgggtgtggaaaagagactattgcagggagacatgataaggtgggaggtaacattgtacactcaaggagctgaaagatgattagtgtggctggaacacaaataatttgtgtgtgtgcatgttgaggggtaggttgggtggtacaagatgctattggcgaagtcagcagaagcaagcagggactccagcaggcagaccttgcaggccacactaagggttccaggatttcttctaagagcaacaatatgtccttgaagtattgggggtacatgagcatgacattattagagttgcattttcaaaaggtcttctgtgtggaaaatcttttgatgaggagagagaaaagatgtggagagacagagactggcatttggaggcctttgcagaagtctggtaagaaatgatgacagctgggtggttgggatggggagaggatgattgatttgaagatgccaaaaaggacaaggctttaccaacccccctttcaatgatagagagagagaggcaaaatatagatattatcttcataaccggggcccgaaaagtcaaagatcatgcagttagtaagcagaagtagacctggcactggaagctgtctgac

SEQ ID NO: 62694 - DNA, 1049 bp, Homo sapiens
ttgggaggctgaggcaggcagatcacttgaggtcaggagttcgaaaccagcctggccaacatggtgaaaccccgtctctactaaaaataccaaaaaaattagccaggcatggtggcaggtgcctgtaatcccagctacttgggaggctgaggcaggagaatcgccttgtacctgggaggcggaggttgcagtgagccgagattgcaccactgcactccagcctgggcaacagagcgagactccgtctcaaaaaaataataataaataaaaaagatgataagatttcagctggtggagataggactaggagaggccatttctccttgaggggatgggaaagcaaaggtgaagatgagagaacaatgggagtggggctggaaacgtaaattggtttagaagggaaagtttttgagtgctaggataagtgatttgaactctatgcactaggtaattacattttcattaacatttatcaagaatctattaagctaagtcactgtttttaatgttaagaaatcaaagaattgtttttatagttgtccgacttttcaccaaagacagcacctttcataacctttatctcaggattccttccacgtccaaggtcctgacttttgtccttggaattaagccctaataggagagaaccatctttttaagacattgactgatttctctgtttaattttgatgcagtttaacaccatctaatataatctgccattttgagctatgttaggctggtagatcgcttacctgggcattacttgtttgcttctctggaatccttaaaaggatcacaatatagaatatagtactaaagggcagttgctgtgggagagttggaagtgctgagttgtgggatatttcagaagctctactttttcttttttctttgagatggagttttgctcttgtcgcccaggctggagtgcagtggcacgatcttggctcactgcaacctccgcctcctgggttcaagcgattttcctgcctcagcatcctgagtagctgggattacaggcatgtgccaccacacccggctaattt

SEQ ID NO: 62695 - DNA, 1053 bp, Homo sapiens
aaatgacacattatgtgtaggtacattttcacatttagatgggcaaaattaagtcctgagagcttgcatctgaaatcatatggccaatcagtttaagcgaactctaaacttctttgatgagaactttggcacaatttcatcaattctaggaaaacacttctgcagtacttaataagtgatatgagtaagtaaaatgggaagaggactaagtaagtagttccaaaaagagaaaccttttaaaaatggaaaaaggacaaacttccctgtccttgacttcttccccttcaccaccaccccctttccttggcctaactggaacgcacagtcacattaagtgatgccttgccctttgactgactctctcagtaaaagttcagatagccatctagtggaaagaagactctttaagaatgactttcctccagacacccaatatcatgtttgttcagttggcttgtccaaacaatttttctgtgttttcaccagagtagtatcaacttagcatgaagattaaagctgttctccatctgctttatctgccgttcttaattagaacctgatgacagaaatcaactttgattcaaggctgattgttcccggagaatctcattattattgtaaacagtttttatttttctttctttttttttattaaacacattgattctgagcatctatatggcagaagtgagggtaaaaaaataattttcttcatttaatcgtgtattcagcatctgctctgctagatgccgtggggcatattgaagttgcttaaagtctggtagagaagataaagcatgcacagaaatagtttttaatacaaacttgaggtgataagtgcccaaagggacaggcacaatgtatgtggaaattcagaggagcagttatttctcgttaaggaatcgtgttttctgagttttcttttagaaattaaacagatgtgcattgttctgatggactgaaaaaaagagaaacaaatggtcccttgctttcacactttattttactttatgagaaattaagaggcaaatgtttgtatatcaatcccttagg

SEQ ID NO: 62696 - DNA, 1105 bp, Homo sapiens
acagaggtataggaagtcacttaccccctcattctactcttacttgtcgccattattaggaatttatttccttttatacctttttctatgcagatataaacatagccagttgggttttgtggctgtttttttcagaaatgaaactgcagtgtacattttgttttaaaatgaaggtttttcagaacttggcccagggtatggtggctgtgcatacctgtagatttgctgtcttcattttagcagctgcatggcctttttttgtatgactctaccataatctacttaactgttgatgaagtttaaggtttttgcttatgtaagtaatgtccgtgtgtttcagttggccttactaacactggttatattcatctttaacatatttttctttttttggcctatttggtaagtgaaaaatagctcattgtcataacttgcacttcttcagtgagactgaacattttccttattttagccacttgtacttctatgaattatctattgcttatttttctttgggttgtttgtgtcttttaattggttgcagatctttatatattataaaccctaactcttaatttgcaaatatttcttacaattgatcgtttcttatttatggtggcgtttttccttacagaagtcttagttttgtatgttgtcagatctgtcaaacatttatagctcttggatttggaggtatgcttgcaacgtgtttccatgttttaatattctaagtgtaactatcttaattcagtgattcctaatcatgactgcatcagaataatttaggggaatttttttcagcatatatgctgtgatttccaactaagatattctttcttcgtagataaaatgtggggtccaaatctgtggagtttggtttgttttgttttggagagaggaagaagcttcctggccaggcacggtggctcatacctgtaatcccagcactttgggaggccgaggcaggcgaatcacgaggtcaggagatcaagaccatcctggctaacatggtgaaaccctgtctctactaaaaatacaaaaaaattagacgggcgtggtggcgggcgcctgtagtcccagctactcgggaggctgaggcaggaga

SEQ ID NO: 62697 - DNA, 1016 bp, Homo sapiens
tctttgagagtgtgaagggggtggtgctgcttggttccttttacttaacattcattgagttcctgtgacacacttggagaattagtaaggagagaattcatgcaactgataaggagagaaactgctgtacattgtaccctttgctgtgcactgtaactgtacaatcaagtttctttatcttgacaattgtgttaaaccacaagctattggctatatttcattggttgaaagatgcactttttttccccacgttttaacatccatgaaactgggatgacagcatgacatagtttatttggcagcattttaaattttgtagtataatggttcatcttagtcaacttggagaagttggataattttttatctttcatttttgtatctaaagtacatcagtacggtttttttttttccatactggccttcatgttcctgagtggtctcttctcttctagtgtttctttccttctaattaagttttatatactgctgccagattaatcttcccagaccatgattctgattaaatcactgctatatgcaataactttttttttttgagctagggtctcgctctgttgcccagactggaatacagtggtgcaattatggctcattggagcctcagcctcccaggctcaagtgatctcctacttctcagcctccagagtagctggaactactacaggcaaatgccaccacactcagctaatgtgtgcaatgtgagcctaaaatacactaaaacatgcatgcttgtgctaattttctgtgtgtgtgtgtgtgttttttttttttttggtagagacaaggtcttactatgttgtgcccccaggctggtcttaaactcctgggctcaagagatccacccaccttggcttcccagagtactgggattacaggcatgagccactgtgcctggccttatgcagtgacttttaataagaaacaactgtaacagaaagttcaaacattttaatatttcattttagaccctttgaatgaaatatttacctctt

SEQ ID NO: 62698 - DNA, 1066 bp, Homo sapiens
aactttatgccaaggtcttcataagcccaaattaacaaattgccaagtatgtcaaaacttgtgtctgtgttggcaggacctgtgaagcactcctctggaacatagtctgcaaaccacaacactaagtgattgatctctaaggcctccttccaattgtaaaattctttggtaaatgaccttgtaatatatgcttggcagtagtttagggttatggagtaacagaagcatagccaattaaaactatgagaaaacttaggtgtattataattggcccctctggaatttggccccagctttgaggatcataattacaacgaagtcagcagtttgaaataagttttcaccataggggagaagagactcagtggcactacggcttgctttcagtcttaagtgaaattctacttccttgtcttaaaagaacctcactggttctttcaattgagaaaccttgatggtttgaaagagatacttggaagagagtgattaatgaaaataatattggtgtgtataaagtcattgagcagctgaggggcttagaagctgagaagatctgaaagcaatgtgagcctaaaatacactaaaacatgcatgcttgtgctaattttctgtcaaatttacaaaatctttggagggagagtggaatttagaagagaaagcaaagtgaataacattttatgattaatgaaagaagaatttagtagagtagtgcagaattgaagccctaggcagattctgaattatcctttgtttcagggttctctgaaccctcaaggctgggttaggtgcccaccttggtactgtgtaacattatgtctgttacagtatcagttccaattcttgccttttttttttttttttttttttttttgagatggaatcttgctctgtcacccaggctggagtgcaggggtgtgattgcagcttagattgcagcttactgcaacctccgccttctgggttcaagcagttcccttgcctcaccctcatgagtagctggaattacaggtgtgcgccacacgcccaggtaattttttttttttttttttttttttttttgtatttt

SEQ ID NO: 62699 - DNA, 1921 bp, Homo sapiens
agaccagtctcaaaaaaaaaccccaaaacaaataattcccttcctcttttttcctatattaaattttttacctctggatccccacatcaggatctttgttggtttactcacttatcttgggagaacatatcctccagtagttcctagagaaaagtgatcctcccacctcagcctcccgagtagctgggacccacaggtgcatgccaccacacccggctaactttggtattttttttttttaagtcaaggttcgccatgttgcccaggctggttttgaactcctgagctcaagcgatttgcctgccttggcctcccaacgtgctgggattatagggatacaccaccacgcctgaccagggatggtaattttttttttgatcttgtgtatcagttatctattgccataatactatatctcagatcactgagagacctcagttgcacataatagtaagtgtttattggccatatgtctaggatagttggctgggaggctctgctgatctcgagggttggccagctattagctgatctaggatggccttggttggaatgactagggtgactgcctcttcttcatttgtttcatctttcttggaggaccagtggtctagccaaggtgtgcttttctcatggtaacagtggagggcaaatggaatgcataagtgcttttcttacatttgaagtatatccactacatattcagaaatatcctattttggaactatagtcatttggtgaccagaaaaattatccatgcaaatgtgcagagaaaaaatttaagatatttagtatccttcagacgactaaacagtcgtcactttctcaaggaggtgttctttgcctttttatattaggtaagattctcctttaaatctcactattagcacttggttattgttatttcataattatcacactggctatattatttgattcatattggtctgtctctctagaccttaagctccactgaagacagcaacccagtccagcatagggttagcctggggcctgcagtagtgagtacataataaatatttgtcagacaaatgaatgaaatgattagatctcaggaatagaaggtatttttagggttctttttattggctctttttgtatttgaagtgtgttccttcttcaaggatttggcagagaagaggaaaaacatagaccattactaatttgcaggagagagaagctggcccagctttgggctgtttgctcggcctagctgcattcccctgtgtaatcaagactgtaaagctttgatgggtagttagttctttgtggctttagggctttccgatataagtaattgttttcatgagtgtattaatttgactctggaacttgtaagcaactggaaacaagactgttcctacttgtttatgtgaatgtttgttgttctgaattggatgacgatactcattgttatttcagaggagtggttgaagaatacatttttaaactaattagtgatggagttgcaatacagttttgtcattggtgctgcattcaataaacttatattacagtctaaatcttggaatgtatggaaaattaacattaattaaactaatctaagttacagaaagctgacaagtgaacagaactgaatattaaaaactattccttaaacatgagtttacttcatccactctatggtgtttagttctacttaataattccagccttttcataatttgaaaggagacccatattttgtggcttattgtttgttcaactttgatattgattttaattgttaggacaggaaattgtgatagaactagaaatttcctcccaggattgaaaaaagaccttgctcaggtgtgatctaaatattatatttcttattaatgacaagtttttttgtgttttgcttttttgataattaaggagtaaaatatatgctata

SEQ ID NO: 62700 - DNA, 1051 bp, Homo sapiens
agtacaggaatcacatactttgacattcttctacttgcttccaaagtaaacatatttgccaaaaactttgcccaggtacccacattgtagtgggggcagccttttactgggagcaagctccaagttccttttttttttttttttttgagatgcagtttgctctcttgcccaggctggagtgcagtggtgtgatcttggctcactgcaacctctgcctcctgggttcaagtgattctcctgcctcagttttctgagcagctgggatttacaggcatctgccaccaagccctgctaatttttgtatttttagtagagatgggtttcaccatgttggccaggctggtctcgaactcctgatctcgaagtgatcctcccacctcggcctcccaaagtgctgggattacagatgtgagccaccgtgcccggcctccagttcttttctgtttggtttgtgagtgagtgagaatggagtgtgtgtaaagggggactgggaggctgggaggttgacctttgtgcagtctacctacttgtgaatgggaatgtgattccatgcctattgctgattctcaagcctgcctcggtaccacagtagttcacagcaagggctttggagtcagccctgtatttgaacctcagctctctgattttccagctggggatctatgttgggcaaatcaagttaatctgcttaaacttcagtttcctcacctagaaaatgaaggtcataattgcagcctcactagggtatctgtgatctaggagggatttttgatagtggtaaacagtagattcctgccttactaatgtgtaggtcagtttatcatctacctagcaccatcacttttttcaaaaaaggtcttttcaaccaagaatatgtcatacatatctgtattttctgactagattgcaggttcttggtccttgtcttacttgttttcgtaactggcttatagaacttgatactcagcacatgttaattgaatgactagatgatgcatggtctcctttgagcctaccatagcatttggatttaccatcattatgtttactt

SEQ ID NO: 62701 - DNA, 1028 bp, Homo sapiens
tttagtaaagacgaggttccaccatgttggccaggctggttttgaacccctgacctcaaatgatccacccgcctcggcctcccaaaatgctgggattacaggcatgagccaccgtgcccggcccccactcctattttcttaagattaatttgagctatttagttaagctttattaaaagtattggccaggcatggtggctcacacctgtaatcccagtactttaggatgctgaggcaggtggatcacctggtcaggagttcaagaccagcttggccaacatggcgaaaccccatctctacttaaaaaaaaaaaaaaaaaaataggcgggcgtggtggccagcacctgtaatcccagctcctcaggaggctgaggagaatcacttgaacccaggtggcagaggttgcagtgagctgagatggtgccactgcactccagcctgggtgacagagcaaaactccgtctcaaaataaataaataaatacataaataatctaccagacactgtgctagtttctaaggctttagatgtgaaagagaacccttccttcaataatctcacagaggactaaaaattcagaggagccaggcacggtggctcacgcctgtaatcccagcactttgggaggctgaggcgggtggatcacgaggttcaggagatagagaccagcctggctaacacgatgaaaccccgtctctactaaaaatacaaaaaaaaattagccaggcatggcggcacgtgcctgtagtcccagctactagggaggctgaggcgggagaatcccttgaacctgggaggcggaggttgcagtgagccaagatcacgccactgcactctagcctgggagacagagcaagactccgtctcaaaaaaaaaaaaaataatctcagaggagagtgagatagttattaatacagggtaataagtgccctaatggagccaatgaaggctttgtgggaacagtgacaggcaccaaacccagctggtctaggtgaggttaggaagacttccaagatgagatgatgctt

SEQ ID NO: 62702 - DNA, 1017 bp, Homo sapiens
ggctggagggctgtctttgataggaccatccacttggatggctagaagtaaatgacttggcttcttgtcttttaaacagtttaggtttctttgtttcagagggttactttactttctgtgtctgctgttgtcaccgggaagttcatggatcgaattctctggcatagcgcacacacattagtttgtcttcttatacgcatcagtcattagctgtcttggctttgggaaatgagaacttagtttaatcctagttttccttttgctttctgctttctgttaatccctttgtggtatagatcctgagtctatcagtcaggatccaaccagagaaacaaaaccaataggacacacacacacacacacactctttcatcaagggatttattataagactctagcttatgtattgtggaggatgtttaagaaagcccaaattgataggacaggtcattaggaagagaagatgacaagcaggctggaatcccacaggcacagtctgaagttgttttctatgggagaaatttcttctctccttcagaaagtcttaaggcccggcttttaaggccttccaactgattaagtcaggtctaccaagagtgatctcccttaaagtcaacccatgaagtcccattagggacttcatttgcatctgcaaaatcccttcacaacagcacctagattagtgtttaattgaattaccagggattgttaaattcatcaacacattgggagaagccaaagaggagctgcctggaaaatcatcctgccacaggtgtgcctctgcagacgtttatcaaatcgaggtggggtctctgctactctctccaaaaaccgtttctctcttagttatacaactacctgctgtatacctcacccaggaaagcatggttggctaatctttgtcaggattggacctcactcgggttttcaaatgttgcatgtaaaacaattttttgactgaaaaatgtttttctattgataaccgtttagtgagctttttaaatatttgtttaaact

SEQ ID NO: 62703 - DNA, 1135 bp, Homo sapiens
acaaaggaaaactctagaaatgtggagagggtagttttaggacaaatataaaatatcttttagctcagaaagttgtatacgttgaaaatatgtttaaaaggtttaaatgcgatttgtagatcactcattcagtaaatatctgcctgcctatagtgtgtcaggcaggtatctacagcttttttgtttttgtttttgttttttttaaacagctcttagttttgtcacccaggctggagtgcagtggtgcaatcttggctcactgcaacctccacctcttgggttcaagcgattctcctgcctcatcctcccaagcagctgggattacaggcatgtaccaccatacccagctaatttttgtatttttagtagagacggggtttcaccatgttggccagcctggtctcgaactcctgacttcaagccatttgcgcaccttagcctcccaaagtgcagggattacaggcgttgagtcaccgtgcctagcctacagtcttgtgtatttcaggaactttcctaacatgtaaatgttgatgtccttgagggtaaccatacctttcccaaatctccattgataaaactgtaaaatctgagaaccacctagattagtttttctcaatgtataatatttctggtcttactgcatggagatttttacagagaagtgaaattcaaccagtcaattttaaaataacactcctggctgctgcatgcactgtgccaagactgtttagccactaatggagaggacttgtctactttgcttctcctggttttaaacaaagtcttttagagggtgaccacctcagtgagtgctacctccctactgtcagagttgttcaagtggccaaagagcagcagcaacactgtcatcgacgctaatagataaattcagggtcctgtccaggagagggccctgtatcaaataaacctctaccctcaccaaaaaatgttagatttttttaaagaaaccatgattccatattccaccagtcagcctcactggcagacgcattagttcaggcctaaccaggagtgaggatgttcatggctggactgaaggaactgtcctgctagggaggtctgggccggccacttatgggtcagactttggaatttttggaagtagtaaaaggag

SEQ ID NO: 62704 - DNA, 1002 bp, Homo sapiens
aggcccatgtggatcacttgaggccaggagttccagaccagcctgagcaatatagcgagaccctgtctcaacaaaaaatttaaaaattagttgggcatggtggtgcacgcctatagtcctagctgctcaggaggctgaggtgggaggatcacttgagcccaggagttcaaggctgcagtgagctacgatcatgccactgcactccagccagggagtgagaccctgtctcagaaaaaaaaaaaaaagttgtttacattttctttttgatttatcccttgacaaggactaaagtccctgcagtgaatggttaagtgggaaggtgcatggaatcactgttctccaaaagcctgagtgaaggagagaggtgtcattgtttttcctttgtactgtgcacagggaagaagtttcagaaaacaggacttctcaccaggaattccaaagttaaaagaatgtggccctggggcagatggagaagtttcagccttgaaacaagtgaacttggaggaaaacttaattttcagtgtaagaagcctaattcacaggaataatttctcctagagtaaggccctttccagccaaatctgtcggtgctattgagctggtatttcaagtatgtccatctgcatttaaacgagttgctccaagacaatctgattatacggtagttactttggtgagaatagcgcctcagtggaatggaaacttcattttgagtctaatattagaccttgctttggaaaattccttttaaatgatcacaagctgggaatagcaaaagaatttaactttcgacagacagcattcaccaagaatttttaactgcttatgttgggtccttgggaaagcagatgtgagaaacctaccggaccaagtggatgagatgagaattgacttgacctgatgcagtgtttatatccattgctgataagtttccctcctcgtctcctctgctcaaaatgttttcattctttgagcgtgagcatgctagggatgaagattgta

SEQ ID NO: 62705 - DNA, 2981 bp, Homo sapiens
catcggtgtccctgataggcagccagtgcctttcatctgcatgcagtaaacttaaaccatgtttaaaagaaggctagccgcaaccacatggtggaatgctgtttaactctttaaggtcgtgttctcagacacatggaaatgctcacaatattatatttatcacatcagaaaatatagcttaatacaaagtggggagaaacagaatctaaaactatgtgtacattaagattagagttgtgtttttgtgtgtacacacatgtatacatgagcacacgtgcctgggcatggcactggaaagaaatgctcacttgattgctcagaatggtaatctgagtggttggcttatagataagtttttctttcttctttctttttctgtattttctaaaattcctgtaattactatcttattacaaaaaagtcacaagttaatacagaacttacagctttcataaatacataattagaaaataaaagaacagacgatgtctttcacttattattctttttctaattttgataatactgttcctcatttaagtaccacaaattaaaactaaacatctaggccgggcatggtggctcattgcctgtaatctcagctcttggcggggccaaggcaggctgattgcttgagaccagtctggccaacatgatgaaactctatctccactaaaaatacaaaaattagccaggcatggtggtgggtgcctgtaatcccagttactcgggaggctgaggcagaagaatcacttgaacccgggaggtggcggttgcagtgagccgagattgcgtcactgcactccagcctgggtgacagagtgagactccttctcaaaaaaaaaaaaaatttaaattaaaaaaaaagaaaactaaaactaaatctcctactctgcttctgagatatcatagagtccagttgtaggatagcacccttcagtcagtaatttttgtttttgttatttaaaataaaattgctgtctttgtaaatacttttgaacattactttttttttttaaattagcatgttgatgtgtgcacatgccctgctcttatttccagtctcgaccctctttgttccccacattccttggggtagttgagtgggagagggagacgtggggcacctgtgtgtgtgcgctggcactaaccgcacctgatgctcctgaccttggcttcttcctttggctgttggtcgacagtcaggctgttatggcttgttgaggggcatcccccgcactcaaggagcccgcttgccgttgattttcgtttctgtcagtgaaattagtgtacttttatgaggactgaagtcaatgatgggttgaaaaggaaagaagtaaaaggaacaaatgtgagaattcagcactttctaatttctcccaggtaatctgtccccagtggatcaccaaacggaagcctcgtccattcaaatgctatcactttgattccaagtattcttatctaaacacctcaattactattaatagtataatttttctctctctgtttgaaatgtaatatcaagttgtgtttatatctatagaagtagaagcatttagcccatcccagatgtcagagaagatccttctaaggctgctaaagcaccccaatgtcatccaggaactgaaatatgatgagaagaacaagaaagcccccgaatactacctctaccagcgcaacaagccagtagactacttcgttctcattctgcaggtcagaagaattattcaatagtggtttgctctcactgagtatccatctttcagtttggtgtaagtgaatgggtgtcaccgtgtacatactgaacctttctatagggggtagccttagacatgggagaattttatcttcctgttttcatatctgtaaagtaattctaatataaagcaatgccaatagttactttaattttcaatactaaaaggtgcttagtaggctcggtgcagtggcacatacctgtcattccaccactttgagaggccaaggtgggaggattgcttgaggccagaagttcaagaccagcctgggcaacatggcgagaccaccatctctacaaaaaatttaaaaatgagctggatgtggtggcatgcacctgtggtcccagctacttgggaggctaagacagggggcggggcggggattgcttgagcccaggaggttgccatgtttgcaccactgcactccagcctggatgacagagcaaaaccctgttttaaaaaaaaaaaaaaagttggggggatgcacctagtgattactgagtcagatgaaaatggtgaattcaattgttagtattttttgaagagtgtgggagagtttaccagtacatgtctgaatctcagtgggtgtttgaaatttaagtgtcatgggttattggtcctttttccatccttttttccatccttcatgaggacttaagtttatacagcttcttagagatatcttagcatctcttccattaacgccatcaaaataatccatttgttgttgtttttattcctggttaccaaccaaactgttttatagaggaactgataggataattacagcctcttacagcagagtagctaattccttctcactgtaacataattcagtagatgaggtgagaaggtcaattcattctaaacttcctttgagtggctttggtgcttgggttgacaggaggccttgttttatcacagtttcacttaatagagctctatccttggcatggaggccaaggtggatattagtcgataaaatgctaatgtggatcaaatgtgtagattcaagctcgggaaagtgttgtgttcatgtgtgaccccatgtttgggcagcattgtggtgtttggaagcaggagtgaggagtaggaaaatgccgagggttagctgattacatgtcacattcttacagtccttcttagaaacttctgtttgcaagtttactaatttagtacgctgattcatcttctaaatttagttttcctcaattgttttttttc

SEQ ID NO: 62706 - DNA, 1334 bp, Homo sapiens
tgtgggcctgtcgggattgaacgtgtggagatcagagaacctaaaaataagcattatcttggtttgttttctgtgccatcttctggccccagatctcaagacagcaataccaaaatgccttgatggcatcccggatggacaaaaccccccagtcttcagacagtgaaaacactaaaatcgaattgactcttacggagctgcatgacgggttgccagacgagacagccaacctgctcaacgaacagaactgtgtgacgcacagtaaggccaaccacagcctgcacaacgaaggcgccatctaggccgcgctggctgcacccgcccaggcccgcacccgcccagtcccgagggcccggccctgtctgcccatgacttcactggtgtgagcttgtccgccatgctgtaccctgcaacatcctgagaccaaagaccttgtgcccttcccaggagccgcggaggaggacagtgagggaggaatggaaacgagagatgtgaagttggcagccggggcatggcgttcaagattttggagatgaactgattccgcccaaatagaatcatgtttattttttcagctctcccttttatcattattcacactcctctgccctcgatttgcatgaagttgaaaattgttgcgatttattttttcaagagatcatgtttttaaagtgtcttttgcagagttttaagttgttctgtctgaactctgctgtgatcccatgatgtgaccctgatgggctggacttgcccctccggtagccttccttggccctcccagcgaggggcacccttcctctgtgccccagtgggcatcaccgtcgatctcgctggctgaatgaagaagaccgtgttactgcagaacctgccaagtctgtcatcactgtggggtgtagcctgcctcagagggacctgcaatcacctctctgagctcagtggtattttgagaatttaatgtttaactgtacccctttccctcaggaagatttaacatttgcttgggaatgtgattttgctcccaccctaaggaatttttatcaccaaaatgaatgttaatgaatttaaaacccatggtttatcattggcaagaggcaagttgacttcatcctgtcattccagcctggggtctgccagccagccctcctccccgacccagcgcctaagctcacagagtgtcgtcgcccacctccctggtccttgctcttgttaacccaagatgctgctacacagatgccaaatggaaatcttccacagggctttttcagtaaacacgtgatgtggagtgcaagctcctccccttcccactagaacatactttaacagaaaacgagtcg

SEQ ID NO: 62707 - DNA, 1041 bp, Homo sapiens
gagggcatctatccccctcttcgggtctgcgcagtgctggccttccctgagctgtggggagccaagcctgcctagcccagcttctctggcctcaggaactctgccctgtcaacctatctgggctcacgtctgcttctccacacacagtctctcggggatgccttgctactgggagagcctctggaatcagagctagtgtgttggtgcccttttcagagctctgctgttcctttataaatcctaaagaactgagtctggggagaggagaggggatgccagctgctgcctctgacttcagggagaagcagacttcttaatactgtcttacgtgctcggtgtgatggcttcttgcaaattattctcttataaaagagctcggcaggagtggcatcagtgaggctcccaaaggatgaaattttagccgccaagttcgtattcattttctgttattctttaccttctgttagtcacactattttataacattagggaatctaaaataattcctgtcaggtccctgaaggaatgaaggctaacatctcctttggggagagcttaggacccttcaaacaacactcatgtctgagcggccagattcctcctccaggccccattttccctcaggaaaccaacctctcagatggttggaggagaaacactgggctgttgcttctttggggcagcaggagaatgactttggcttggaaggcctctgccattcatctctacaaagccagtggggtccggcagagaaagaccgtggaatagctgcggtctcgatgtggctgctctttggcacctccgctggactgccctcccgcggcggtgaccttttcaagtgtggaagggagtgggtcgagtggaccagatgcagacccctgagttctggatactgatgggaggcctcaccctcctttacggggcctctctgggtgggacagagcctcacctgctcctgagcagccactggtgccccacggttcctctgaaactaaatccctagcatccagatagtcctgggacactctgcctgctctgtaa

SEQ ID NO: 62708 - DNA, 1061 bp, Homo sapiens
ccaggacaagagccagtttcctcagtaaggaagtaagcaatggcacctcagaggccttctggaccctaacctaccagctcagtcttgtatttctcctcaaccctttgcaaagaaaagcccatatctgggctcaaaagcagaggggagtttttcccatgccaccagggagcttgggtcatgctacatagcgtgcaaagccagccctccctggcctgctcttgcttggagccccagagaacaaggtgagcaccttcctgtgccagcccgggtgagtcatctgcctaggatcacccctggggaaccacaggggcaactctggttgcccaggagacctcaccttcctgggcctaggcaaggcgaggatggctacagatccccggctggccttcagatgacagaggtggttgtgtgtttttactaggcaggacacagacttgatcagccagggcctatacaggtctgctcctcaacccaaagagagaatttgagggcagaagttcatggtacctgcttagctcaaattcctattgctctatttcctagggaaaatgtatttctatttgtatctaccattattttcctaggcttggaaaagctggtcctttagtgtacagtgctgacgacagcacaggtaaatatactcacagttactgttccgtattagtgtgaagctctgcattcaacatttgcactgttccttgaagtcacattagaagatggtaagatgccccactccctcccacttggggatgccaaccacttcaacatggcattgaactccctgcagggagtgaggtgaggagggaggaaagaacagagttcaatgtaacctttcaagttcaaattatgtaagaatcaagatttaagccagttgattagcaccccgatatctgtgtaagtcttaagattttgttttcctaagagtttaaatgtatgattttgaatttgcctgacgcatatgggacaagcagtgaagggacggaacctccaaacagcaggagaaaagccctcctcatttacagagcaggcagagtgtcccaggactatctggatgctaggga

SEQ ID NO: 62709 - DNA, 1032 bp, Homo sapiens
tgagtcctttaaacccacaaatgtatatgctttattttatattatttattatgtacatatgcctgttagtacttcgtctgtgactaggacaaggtctgtcttgaagcttcctcatccatggatcctagggttctgctgtcctttaaggcgggtgagagggtagtgttgttttttataaacaggttgctgcttttatgttggccctagcatccccagcccctttagttgggcccacctgtattccttatgaccagtgttttggatgaggatggaggcaggtctcctaccttgtgggcagggcctctcaagtacctccatgaaatatttccaaggtggtttcttggtgacaggctctcttcccctatgtagggtacagtacagctgtgagtccacggcctccctcctcccaaggcaggtcacttgcctggccccacagtgataatggtttcttccacttaccttagattgcataatccatctttctggataatggaagctgcctgcctatctgggctcttaatatgccttttcttggttttgaggcccagtgccaacattgccttggccctcaagtaagaccctgctttgtgtctgactttgatcctcctcagcctttattcactgtatcatagtgtacaggtcatgcatttgagcagtgaagttttctgaacacagtattcagagctgtgtacataaacctaaataagcacaaatgacatgtataggattgagctgattgtcttaatgaatgcattttataattcaaatgatgtagatgtacagtctctcctatttattttgtaccaatttatttgtaaattttgtgattgttttacaaggtttttgtttatttctattctatttagataaatgatgttctgttcaccctgctagcagatgtgtgttccctcttccctttcatctgtgcaacaccaaccatgccattgtattcagcttggctgaaccaactgccctacccacttgcctggctttgctggtgggaaagctgggactggatctcagcatgacaac

SEQ ID NO: 62710 - DNA, 1037 bp, Homo sapiens
tccagatttctttgtcctctaagagttgattgctgtatattaaaattgaacatcagaggatgggaagagggctctgtaagccagaaccttactaaagtagagggcacaatcagtgtgaataaattcacttcagaatctcaagtcaaggccaggcacggcggctcacgcctgtaatcccagcactttgggaggccgagacaggcggatcacctgaggtcgggagttcgagaccagccttaccaacatggagaaaccccatctctactaaaaatacaaaattacctgggcgtggtggtgcatgcctgtaatcccatcatctactcaggaggctgaggcaggagaattgcttgaacccaggaggcggaggttgcagtgagccaggattgtgccattgcactccagcctgggcaacaagaacaaaactccatctcaaaaaataaaaatcccaatcccaagtcgaaatcacctcttgttttaaacaagaatgaatcattactgtgtatgttagggtattaaaactgtttcaccagtacagtgaaagttgtttcaacattttaaacaaacagtggttatagactctttctttaaccattgtatattttcttccattcttgtcattggtcaataggggagggtagattagctgctccagaattcaataaagtgtaatatttctaacggtgactttgacctattctgtagtacaactgtaatagctattggtcttcaagtgggtttagatttggtgacatcagtttgatattctcttaaaggaaataaatattcaagaactgattatgttctaacatgattatattcatggtgttacataggcctcaattttttcacagaaagatttttggaacaggactgtgaagtgaggctttttaaaaaattattttataagcagagaacacagcctgataacttagtcaaggatatactgtctgtctcactactttggacttatatggcttcagattaagtcatccaagaaacatacatacattctaaatggtatatattgggaatatatg

SEQ ID NO: 62711 - DNA, 1563 bp, Homo sapiens
tcctgacctcgtgatccacccaccttggcctcccaaagtgctgggattacaggcgtgagtcactgtgcccagcccaaaatttactacctcttaaaaacagttttttcccatgattaaagcatgtggaaaaactgatctaactccttaacttcatcttacttttgctgagacacttaaaaatttatagtactggcaagaagttccacttcccccaattcgctgtacatgtaaacttgatttagacacctggtgatttgtagtaaacagtcttacataaaccgttggtttgttgacttagttggtctagggatggcagtagcgaagccaaggtgataggttatttctgtgtgagtcattagttttctctatacccctacctcatatgctcctttcctccaaatgtgtgttcaaaaacatcttccagaggaagtatgtatcctccctgagaatgtcagaagcctttttttctttttggtatatggtaaagcattaatttctggcttccactgccatgatttcataaaatttagaggaaacaagaatgtggtgagtcctatgttgaaaaagacatgttttgtgaaaagcttgtaatttctttaggttatataccttttgcaaaagtagtatatggaccttatgttaaatttttttttccagaaaattatgacttacctgtttgacttcccacatggccccaaggtaccgtatgtgactcaatagaccactgctttaataacaatgaatgcatttaatcattctggaatattaagggggaaagaattggtcagaacccacccagaaaagtcctactttttaagcctattgtctaatcttcattaacattagaagtaatccaggagctagtagaatttaaaatcaaattgctaatttagagtccgcaacttgaatacttaatagacagaaataaaagggatattcatgtgatatttagtaggatgggatcagaataattttatgcccaagaagttctatgcaaaattaagtttgtgtggcaatgaaaggaattttcaggttgtggatgatatttgattaacagaaacagaaaatgtatgtgtattcttgacaacttctagattttgtattagttgttgctaagtttttgccaagagagcactcagccttgatatttagcagagaagtcttcatttctgcagtacggctgcacttaggtttaaggaatactccttgcaacttagtcacatacttacagaattttagtcctagactttagtgaataaacatcagcaaatccctgttttgagaacacctgaaatcacagtgtgcagtgcccttcaggttggtcttaaaaggttaatgccagggttccatttcaggatagtcatgattttaatgggcataactcagtattgtgattagcttacactgtgagccaaaagccagtgtgtacctagagccatcattctgagaatgtaaccagtaaaatttcctaatagttccatgttagtttgtatactttagctctgatgcctgcctctgtcttaatctgtcccttgggtattgatttgcatctctccctagctc

SEQ ID NO: 62712 - DNA, 1521 bp, Homo sapiens
tcttctgtatgaccttgagttaggtattattgttgcctctgttttatagataaaaaacctgagaaatagagggattaaataacttgccagaggtcacacagttagtaagtagtaaagctaagtcacacccaaatcataactactgcactagatcatctcaaaaatgtgcatatatgttactgttatttaaaatgcctttaacctgtcaacagagagtaatgaggaaagctttaaagtaccttaaaaggcattagtggcaaacctgataaaattttttaaaaaatctgtggttaatagtattgtaccaatgttaatttcatacttttcataattatactgtggttatataagatgttaatattaagggaaactggaggaagaatatatgggaactctttattttcacagcttttctataagtctagaactgttttagaataaaaattaaacacacatagtgccccaagatgacatacttctttcttttcctacagagtaaaagtagcagaatacagtattttctcaaagtactgtggtaaagatttcttgttttcagtttttgtgcttcctattttcacccacctcccttatttcaagaaagaacactgaatggggagggtccgggagaatttgagtgaaggaatctatttgctatgcgagaaggaaaagatatttttctttccaggcacatgaggggttagaatttcctcatttaagcgcacgtgggtgtgggtatttctaggtagcatctgcacatgtcatttcattctgcaaggtgttttataaaaccatagtgtacacactgaaagccatatctaataatctctatgtagagcatgtttaaatcagcttctgctgacctttaacacacctcacatacttcaagaaatctcaaggtaatttaaactctttcctgaggcagacatcatgaggaaggtagagatatgttgttaacagccatataacccctataaatatgtgtataattttacatgtaaatctattacatacactgtgtatactacatatgttaatactttattcatttatagtgataatgtgggcttttaagtgcaaaattctgaaatcagctaacccttaaaaggttcccccattcctgttgtggacagaaatccagtatttgacaactccaaagtgtaaagataaaaatgttttcgtgtttcactcattatccaattacatttcagggaaaactgcctttgcttctgagccggatgaaggaagtagggaaagtatttcttgctaccaacagtgactataaatatacagatgtaagtgcttcatgtgtatatttatttatgcagtggaattattttggcctaaagaactgtgaagacaatgaggaagatagaagtttattaagtgaaaatagtttcttgccttctcattttcaaagagtaaaaaggcaaaaatatacaggataacagtggttctcaaatttttctagaaatttattttaaccattttcactgattataattggctacttgaaaattttaa

SEQ ID NO: 62713 - DNA, 1026 bp, Homo sapiens
caggtaatttttaaagatatttttggattaagactagattaagactactttccttacccctcaaattagacattccagatttatccttaacaaaaaaaccccccaaaacattgaataattctttgttgtttttttggttggttgatgttgattctaaaattaccatgaactttccatatacaccatatcttggtgttcctgaattaagctcagtttattgcaactgaggaagacccacttacaggtaaaaaaggagattactaaaactgatgggcagtaatcacaggtggtgctatttggggctgttggcaaataggtacgtgtttctctaatacacttaacatgatagaagcttggcagtttccatttctggatttgatagggaatatttaagattaagaaaatgatgtttgagatgctatcatatatatcccacatacagcatctaatggagaaaaatataagccttctcagttgtccaagaaaaaagactatgttttagaatggtaccagctgtgtagtaagaagaatgttttttataccttgtttgattaagcacttattccttacagaaaacaattatgattttctgtctggacggagtcaatattttttagttgctttagaattagtttttaagattttactcactttagctatattaggacatactttgagttggtacaaagcttgaattaaatgaggttggttcatgatgattaaatactactacataaaattattgcctgtattactttgcattatcaataatgtcttcattttcacataggggacttgtctttgacacactgtatggaaatcttttgaaagtcgatgcctatggaaacctcttggtctgtgcacatggatttaactttataagggggtgagtacagagaacctttagcctctttctaatgttaaagtcaaacaatgtgaagatgacatcatctccccagatgtaatatatttccctattacttttcatcattaaagagcaaattcccttacataaggttagttaac

SEQ ID NO: 62714 - DNA, 1214 bp, Homo sapiens
atcaaaatttaaaaatttccttccattccaaatttagatatctggttagatttttagcagtgtgcagttgattctagtcatcttgataatgatgactagaatcttgataatgactaacctagtagttaggtataggtagactcagctaaaatgggtacttggaagcaagatgaggccactctggtatttgtatcctttattcagtctgtttcactacccatagtttaattttaaacaccatttgccagctgtattcagtttctatcgtgttagcctgaaatgtgctagagaaaataaactaagaccaatagacttatttttctgtttgtctttcgacttaacattttaggatcagacttggcttgtattccagactcagggtgccagaaaagtaaataatacacaataatacttaggcttatcttcaatacccttgttttgttatggccaattaggctaattttagtgatggtcagaggcttctaaattggagggcagtagtaactcctgtaaataccaatttccaaatggtatctctctgttccagcccatcacaacagttttaaaaccagcttttgtttttgtttttgttttgttttgttgctttttgttttttaacaggagagccagtgtaactccttcaagactggagtgacacacactgcatctgcatctgcctcatgtgagttctcattttggcagcagcactctgctaggctggaacctctgtagaggtttgccctttatttttctaaatctataaattactacatagtgtgtcttggtggcaatggtaaaaagtgcatgagaattccaaacttctctgcagaaagttttctgctcattccaaagggactttgtcctttaatatgtattctatcttgtatgaacagcatctactcaaaacagagcccacaactttcatcctgaaaacatagttattttttgaagaactgttttttccttgcagattatggagtaaagaatatctttaaatgctctcagtaacttcaactttcaaagcgttggttgttttctttatagtctaattatgtaacctgagaacactgtgtgctgtcctagtggctgaagcagtcctccttttgggactctagcccttaaaatagcttcttcctttgtcttccgatattgagtaactaggggtaggccagagtaccttctgggagaagaaataagcagatattgtgtgaagt

SEQ ID NO: 62715 - DNA, 1030 bp, Homo sapiens
gtcaggtaaactttatagtaccttgagaaattggttataaaaatgagttatctgtataagcctgaataagtcagacataaatcatgcataggttttaagaagacttcctgggctggattgattggtcctctttttgtctctctatactttcttagtcatttgattagtcttagttattgatctcctaaaacttattataaatatctaaatgtatatcccctctaatatgccatgagctataagctctttcacggcccaggatcatacattattttgtttcttcttctcagcttctagtacctggtacactgtaggtatccaaatgtttgttaaattcttctaactttagtataggcatttgagtgctgtgatctgtttttatttttgaaaaaaaaaatattagctatttctgtttttgtattacaagcagctcctttggttaaagacgatttttaaaagttatttcaataattttcaatttttctgtcttaaattgaaaacagtactgaaaatacaagatatttgtaagtgttcagattctcagatggaatatttttgaagtaggtatttttttcattttatttaaaaatattcttctaatattcttagtattttttaaacaaataactcttaattaccatttaattttgcatttgcttgcaataaactgaaattggcagttgctcaaactccactttacttatttacacatctagttatttgggaatgtgttttactttgtattactaaaagtattgctatgatatctagctgttttaagtaaattaaaattgaggccattttaggaaatttgctttgaaaatttagaaagatatgaaaatatcttttttaggtcatttgtgatctcttaggttagagataggatttttgcctgtgtctatttaatgtgttaggaggattttcatatagttttggaaaatggaaaaaagtccttgggcatttgtttatatgataattggaaagatctcacttaaaattttctcagagaaaaatgtgcgttatcaccttt

SEQ ID NO: 62716 - DNA, 1057 bp, Homo sapiens
atgatctaatggtgataaactgggaggaacttagtaagctctgttcattcagattctttgctgcgtccctgggtcttcagaggtaaggatgttcctttcctcgtggtataaggatgacacctctcaaatgagagtagtatgacctgctttaggggaaggtgagaaaaattcttcctagattttatgacttccttcagggaagaagtcgggaggtgagagtgaccttcctgcttctgctgttttctcaaatgcccaggtatcatattttgggttcagatgtcctaaatcctatcagtaactagcaacagatttgttaaaactcatagctggaatttaaactcaggtcagtttctatttctcatgctgctcccagctttcagaacagaaattatccagtaactctagatgagatatcaataagagacaaaaacccataaacaaagaagatcatccttaattttttccccccaaatgaaaaccctgcctggggcaaaactgcatgtttcttttgcagttgaattgtaatcttccatctttagaatacagatagaaactgtgttaaaacacagtttttcttttgcttaatttttagaaataatcttaaagcttcgttaagcctcaggattactatataagtactgtattagaaatgttgttagaattattattattttgagacagagtcttgccctgtcacctaggtgggagtgcagtggggtgatctcggctcactacaaccccctcctcccggattcaagcgattctggcgcctcagtctcccaagtagctgggattacaggcgtctgccaccacgcctggctaatttttgtatttttagtagagacagggttggctaggctggtccaggctggtcttgaactactgacctcaggtgatctgccctcctcagcctcctaaaatgctgggattacaggcttgagccatcgtgcctggccgagaattctaaaattaaatagtgcatttttttctcaattaaaaaatcttagggggattggaaatacattttaggtccctctcttttgaatttttctgccct

SEQ ID NO: 62717 - DNA, 1055 bp, Homo sapiens
agtgatatccaatgacaagttaaattaaacacagaggtgttttctccagcactgtctcggaagatacatgcttttgaggggcctgattcaggttaaacttcttgaagttaagtcacaaaaaaactatactagggaccttacgaagaattttgttatgtgacttcaagaactagttgactcagatagttttacacttttcaaaacggcaaccagtgacagatgaggtaatactgctttgaattacaagttaaagccattaagattgctatttacaaaatttcaaatttaataaattgcatgttcatgttacttaagtgtgagaatattcttatttctaaagcacattatattaatggctctatttcttatggttaatatttatatttacttggatggagtttattcaagtttaatgtcttaactgctgtgggatatgataataaaagctgttacatttgtctttatattgaagtctgtgcttcgttttagagtgttcctgtcacctagagattgtttttcatgttaatgctcaaatctgcaacttacaaagacttagtatgttggaattgctggctaattgtgctttaagattggatgcttagtttagtcatgctttctagggcggcaagtttgtgcttttttaaaagcaagcttcgggaagttaatttctccgatatgttcaagctcttgaacataggggtggagtatgttccacttgttaataatttagaaatgtgacacagtaaactgacattggcaaaggtacagtcaaggtccggagaccaatagaaatttttggattcctcaagcagataaatctttttgttttgaaatgtatgatggggcagtgggccagccttgtaattgatatagtaccttttagttgatatagtacctaacactttgttttgctataacctcagtgaagagtagtcattagtttgagaccaagagattagtttctcttgaagactgtatcctggagacatggtatttcatgctttaaggctgcctctgtgctgaagtcactgcatactttaagcatttgggtgttt

SEQ ID NO: 62718 - DNA, 1160 bp, Homo sapiens
tgaacaaaataaaattggcccactttactgctatttttagatttcattattgaataacgagaacaaccaggggtataagtaattctgtattatttttagaccttttatgacatcactagaaatttgaggtttcttttaaatgtgaaaattatgaaaggactgctgttttagattggtatattttcttaaaggactgcctttttaggttggtatattttctttccttctaccactggctatagataggtaggtgttaaaccatttttatgataaggactatcacaggtgctagtatgtttgtcaatcttgtacacagggttgtttataaagctattatagtttgtagatttaagatgaattgtatttctagacgcggttaaagttcttggaagtagttagtgctaatttttaccctatggtaaagtatatgttagacttggttagttagagaaagttggagggacctatattacccctctaggacactgtaacggcagattttttttttaggtttatctctaggagcctctggagcaatgtctgtactgtccgaatggataataagtgcatttgaagtacatggagtatataaatgacatcaattaagttttattctctatgctatctttagaaataaatggatacattttgtgcttggggatgaaaaaaattcttacattcaccgttttcataagtgcaatattgacatttagtaccgtgttatcatttgatagctatgaaatatttccctaatagtaataggaaaagattaatagagttaaatcacccaaagttatacttgagctttatgtaagtctatggtaattaagacagtgtgatattagtgttaagataggcatatagattatggaaccaaatggggagttcatagacccacatatatataatcaattgattttcagcaatgaagttaagctaattcaatggcgagaggctagtgtttttttttttttttaagaacaggtttcactcttgttgcccaggctggagtgcagtggcgtaatcttggctcaccgcaacctccacctccaggttgaagcgattctcctgcctcagccttccttagtagctgggattacaggcatgcaccaccatgcccggctaattttatatttttagtagagacaggatttctccat

SEQ ID NO: 62719 - DNA, 1057 bp, Homo sapiens
tcaatatagagatgccagtcatatgtcattattaagaaactagcctttaaaatgtatgactgttgctccttcttcatttccttatggttgtttagttttctgggctgaggataagtcatcaggccaaacctttcagtggaatgtgttttgctatatggttagaagacaagctgagctgctcagatgtcatagtgacctgaaagaggcagcttcaaaaattacctcttaaatagtttttgtttaatactagaatcttttagtgatcactatagatcagaatttgtatttaccaatccaagaatggaacaattaggtttttcatctgctctctacattgactgtgcccaggataccgaagtcaggtatttagtttttacgtttgtaaagctctgatgcttccagtagaacagaatttctgtaggacaatgaattggctttttctttgtgaacacagcttattaatttagcagtggttttatcatattgaactgaaatgtggcacgttattaggcttgtgaattttttgttaaccagtcttttgccttattttagaaaatattgcagtgatttttctctttaaaattctttaaagacttttgtatatttatcttaaattatatatctgaagtttttttttttttagttgcagtttaggcttccagagccatatcagtctttatataaatctgttgaataatcgtttcttctaaaatcaaagtaaatttcttgtacatgtttaaggagtgaaaaggaatttgtgtatatgtaattttgctagtacttatggcttcgatctagaaatgtttatgatggaccaggcacggtggcttatgcctgtgatcctagcactttgggagacccaggcgggtggatggctcattgagcacaggagttcaagaccagcctgggcaacatggcaaaccccgtctttaccaaaaatacaaaaattagctgggcatggtggtgtgcacctgtagtcctggttactcaggagtctaaggcgggaggattgcttgtgcctgggaggtcaaggctgcagtgagccatgattgcgcca

SEQ ID NO: 62720 - DNA, 1144 bp, Homo sapiens
aatgacaacaatgcacgagggttcaaatttctccatatccttgccaacacatgttattttccattaaaaaaactatatccacgcgtatgaagtgtatgtatttgattctaactctcctatatcctcgagaatccatctcttctgaaactctgaagatctttggggtcactaatctggcatgaggcttacaatgacctgccttcattttttacccaagtgtctgatttccttaatagatgttcagcaactttggaacaaggtgtgggtgggggatcaatttgaatctccagtgtctactatctggtagatgttcaacaaataaaataattgcgataaaggtcgcagatcttgtctctctcacactgtagacacccagtggaagtttccaaaaggcatctgagagatttttgcttaattcaaatgaattaattttcatgactatgtgaggcagttagttgttggttacatttaaactgctaatctgatccctgccactctgcttgatgcccgtcagttactctccattgcacttaaggttggggcccctgttcattaacgtggtctgcagtgccctgccaggtctgaccttgcctccctccagggctttctccctttttctttaggcttgggttattccttagatacacaagactcatctctagcaccagctgttttctctttcactcttgcaaacaagttccccctcacttttgcctccctcactcccttccttccttcctctccctctctttattcctctctttctctctctctttctttccttttttgaaacagggtgttgttctgtcactcaggcaggagtgcagtggtccggtcatagctcactgaaacctcaaactcctgggctcaagtgaccctcctgcttcagcctcccaagtagctaggactataggtatgtgccaccatgctgggctaattaaaaaaaattttttttttgtagagatggggtcttgctacgttctccaggctggtcttaaactcctgggctcaagcgatcctcctgtctcaacctcccaaagtgctgggattacaggtatgagccactgcacccggccctctcactttttcacctgagtcctactcacccttcagatctcagctgagatgtcatttcctcagggaa

SEQ ID NO: 62721 - DNA, 1091 bp, Homo sapiens
catgtgactcagcaatttcactcctgagtatttcgcccagaaaagggaaaacctatgttcacacaaaaatgagtacatgaaagttcatagcagctttctatatgatgtactaaaacaggagacaacccacatgtctttcagcaggtgaatggataaacaaactaaaatacattcatacaatggaatactgttcaccattagaaagaatgaactattgacacatgaaacaacttgggtgaattataagggcattttgctgagtaaaagctaatctcaaaatgttacatattacatgattccatttataaaacattcttgaagcaaagaaatcatagtgatggggaaaagatcaatggttgacagcaattaaggttgtagggttgtgggaggatgtaactataaaggggctaacaggaggaaatttttgtggtaatggaacatttctgctactcaaatctgtacacatgataaaaattcagagggtgggagagagaagagagaaacctaatgaaatccaaataaggtctctagtgaattaaggtgttgtatcaatgtcattttcctggttttgataatgtactatagttatataagatggtatcataggggggagctgggtaaattgtacatgggaactttctgtactatttttgcaatttttttatgtcttaaactatttcaaagtaagacatatataaaaataggcaaatgttcttaggagatacatactgaagttttagggttgcggtatcataatttatgtaacttactcttagatgatttggcaaaaatgctgtccacacataccacacacacaaatgcacacagaagggggaggtaaaacaaatgcgtcaaaaagttgaccattggtgagtttaggtgaaaaatgtacagttgtttattgtattagccttgcaacttctctaggtttaaaatttccaaattaaaaattcaggaaaaaaaattttttttttgagacagaatcttgttctgttgcccaggctggagtgcagtggcacgatctcggctcactgcagcctctgcctcccaagttcaagcatttctcctgcctcagcctcacaagagtagct

SEQ ID NO: 62722 - DNA, 1064 bp, Homo sapiens
ctcctgctcagagtctggccgggagagggaaggggggcatccaggagtgggggcggggaggcgcagtgactaccgcagctgcgcgcgcgacgacctggggcgccgggacagggccatctgcatcggagtcgcccctttccgcagcgcttctccccaagaatcgactgcttcggaagtgactcgagcggaggggtgcctaaacgactgaggtttcccatccggaaaccacacagctctgtcgcatcccttgaccctatcccctcttctttaaccgactgggaggttaggggtttctgggaggtgtcccctacacccaccctcatcctgaggtgaggcgcacagaaagccttcccgagggcgaggtcgtgtttttccagttacagtgaggacctgcagagcgagcccttgtccccttcctcagggtccccaaggagaaaggtgggagatgctacgtcagaaagcatctctccagctgcccctctgcagctcctggggaggctccgggcggaaagatgttcagcaagtgcctctcccagaagagaggggagatcagtaaagaaagtgaccccgagctgcggagagtggggagaagcggcggtacagaggggaaaagaggccagacttggagaagcaggaggcgctgggaattgctggggctcatcgttagggcactaaagcatggcacaggccaggaccacaagctgctggaaagggggctgcagacttttgtgtttagagcattatattttaaaatatttcgaaaggagcatttttaaaccaggagatttcacctgtaaagaaattggatttctggcttcttctgaaaatgggaagagctgggatgcccacagtggcagaggtgagttgcccttgccatttgtataagaagtgtgctctcctgttcactacagtccctgccattctccactgaattacgccccccttcttaattcatttactttacctctctgaccctgtgggcatttgagatttcagtttgtgtaaatccagcagggcaggttctcaactggcttcagagagccactccctgtgcagatctcttt

SEQ ID NO: 62723 - DNA, 1048 bp, Homo sapiens
ctaacctgaggctttgggttttggaaagcacatgctacaacagagttatttagcagcaacacaacaagcaagggagggatggtaagtgtaaaaaaaaaaaaaatcatctccatgttcagttcagaactatatgccgtgtggctatcctgaaaagggcaggtgttcacttgccctctgggtaaaagttcccagtcctcaccatgagtccaaatctcctggggacctttatgaaaaaaatgcaaatgctgggaccccaccccagaaccagtgaatctggatctggactcagggacagacctggatataagcaagttataagttcattagatgattttaatgtgtagtcagggctgggaatccttgccttctggaaatcttgaggaatttcagctggtttggcctaactattttggatatgttacttttcaggatagcattgggcagctggagaatgatctgaggaacaccaagagtgagatggcacgccaccttcgggaataccaggacttgctcaatgtcaaaatggctcttgacattgagatagcagcttacaggtactgcaaaggacctgcttacccgagtaaatccagtcacctaggggcaatgctgcccaaataagtggatctagtctctctggcttctgactggtgagggagggaagaagggcatcactggcccctttcaggtgagctgactgctctgtccctctacttagatataatccagctccatctgactagtcccagagtattctgtgtacctctgaaaggatttaaggggataatgtgagtacacagaggttaaaataaaaacccatgagactcgtaactttaaaaatagggtttggggccaagtgcagtagctcactcctataatcccagcactttgggaggccaaggtgggtggatcacttgagatcaggagttcaagaccagcctggccaacatggtgaaacccagtctctactaaaaacacaaaaattggccaggcgtggtggcacacacctgcagtcccagctactctggaggctgaggcaagagaatcgctt

SEQ ID NO: 62724 - DNA, 1040 bp, Homo sapiens
gtattgaatacttacattctctaataagaaaaccaccccttagattgaagtaaactgcagtcctggagcaatcacagatgagttatctaagaatacagctttctgaccttcagctcacgcttcacagtgatcgatgattcaggtgcagaggaagtacaaactaaggtgctaaatctgcgatcatcgtcatttgctgtgaactgaaattaaaactattcatgctacccagccattacccagctaaataatcttactctagatacctaaaacataagatcactgccagagataaactaatggtccacacccaattccactctgatagaattatttcacaaataataggtgtttgtttaatggacacttttcacctccttcaattccatatatccttttcttctatgtaggaaaaaaatagtctagtgtagtattcttcccttttaaacacattttggttcttctcaaaagaacttacccccattcgcgctctgctcagtgggtaaaattagatgcatgttgaccatgtctatgattcgtgtaattacttatccctgcccatttcatattctttcaattctgtaggttaaaaaaatggcagtgatgaattttaagggtttcccccaacatataaaataatgcaaagaatccctagactttaggctttcagcttacacaaatctatttaattaggaaaaaaactattaaggatgtagcttttcacctttactttagaagcacagtaaatatcccaaactgtgatgaagccgaccttagatttagtagtgtaagctagaagaagtgagtgtttctatgagtggaaaaagccaaggtgtcatttatgtgtcagttcatttgtggtgatatagaattagctttttcatccccttacccttagaatccacgtattccccttcccactagcctaggtcataaagaggcgttgctttcactctcctatgccttttacgagtgctaagtgtaggatattttgtcaccagaacacaatgctaccgccccaaagtaaaagaaaccacttctgg

SEQ ID NO: 62725 - DNA, 1892 bp, Homo sapiens
gcagtgagctgagattgcaccactgcactccagcctgggcaacagagtgagactctgtctcaaaaaaaaaaaaaagcacattcacaaggagtgtttggtgaataagaaactatatggtccacttattttctttaaattaaagaatttcaccttagtgttagattattaaaaaaaagtaagccagctttgacttgatcatttgcattactggtttgaaagaactgcaaaatcgtctttttttctccccttttcaggatggtctgcttgtccttcattatggtcttgtggtttctcctctgaagataacttgaagattctaggcacattatgaggagggaaacaaaggaggcttctgcaggactgcatctcaccaaagatttccatgaaatgtaattgctaccactttgctgttcaagacataacttacctatttttagcaccaagaattatagcgtttataagtacaacttggaacgatggaatgcatctgttactagagactgtatataaaaagcagccaaagctcaggggaaatttttcaaaaattgaattttaaaatttcttatgattttaaataccttgacattgattttgcttcccatctttgaagtaattggttagttttctttgttcagccatttcaagttggtggttgggatatctgctctctgggatggcatcagttgggcagtcatctttttggaagagaagtgtgcttttgagtggaagattcaaagccagtctttgttaaactgcagggtgtactctcaaagaccaaaactattggccacttttgtatgttgccagcatattttgaacttgtacctttttttatactagcaacactacaaaggagaagttactcatttcaaaatggatgaattgttattatgtgtgaagagactctgagtttatgatctgtgccataaaatttcagtgtaataagacttcttcaatacatcttccaataaggggtgcttctttgtgacagtatttttatttctgacattcattttatttgggtacatagtgtggttgttgataccttgcaatagtattgcttctgaaagtaataaaaaattttaggagaatttgagaagtttacagaattacttattcattgttttcttagtaagtcagtttaatgtttatttttctcattatttcatcactgcaataaagaataagggtgtttgagctcacctccatgcaaagacttcagttttaaaacattatttgcctaaaattagcattgtgatgctttctgaaagaaatattttataaatcctgtttaacagcagaatttctgaatgtgtagagactactacaaaattggaaaaagattggcaattctttgtaaagaatttgtgaattgtgtataaatttattctaacatttaataaaaatgtattttaacctatttgggaatgttagtgtttactgtgggttaaaaaaaaaataaccaggccagggctgggtgcagtggctcacgcctgtaatcccagcactttggaagaccgaggcaggtggatcacctgaggtcaggagtttgagaccagcctggccaatatggttaagcctcgtctctactaaaaatacaaaaattagctgggtgtggtagcaggtacctgtaatcccagctactcaggaggctgaggaaggagaattgcttgaatctgggaggcagtgagctgagattgcaccattgcattccagcctgggagacagagcaagactccatctcacaaaaaaaaaaaaaaaaaccaggtcaggcactgtggctcatgcctgtaatcccagcactttgggaggccagacgggcagatcatttgaggtcaggagtttgaaaccagcctggccaacgtctctactaaaaatacaaaagtagctgg

SEQ ID NO: 62726 - DNA, 1529 bp, Homo sapiens
agagacggggtttctccatgttggtcaggctggtctcgaactcctgacctcaaacaatctgcctgcctctgcctcccaaagtgctgggattgcaggcgtgagccaccatgcccggcctcaaagttgtttcagacatttggtattgggtgttttctctgtgtctttaaagtgtaagttcagtacttgaaatgaatgaataaattttactctgagttttgttttttcaatgaaacattaaaataaaccagcaagcctatttagaaaaattgttgacatacttttcagaaagggaaagctaagcagaatttccatttttcttctctgatatgtgtattaacttgtttcatagtaagttttttcaagagtctattgaatcatcttcgctataaaattttctttaatgtttacacattacatatatatacacatacgtcatgcatgtacaggtatatttaacctaaaaatagttttatctgtctgtttttgtagccattggaaaagaagtttgttcgagtttcaggagaagcaactattggacatgtagaaaaattcctcagaagaaaaatgggtcttgatccagcttgtcaggtacagtacatatatgtaaaagaataggtaaagttgtgagcttacctttagcacactgtagaaagaactctgtaggatttcatgcaattatttttgttatttttgttttatgatgttgtagacattgttttttttttttttttttgagatggagtcttgctctgtcgcccaggctggagtgcagtggcacgatctcagctcactgcaagctcagcctcccgggttcacgccattcttctgcgtcagcctcccgagtagctgggactacaggcacctgccactgcacccggctgattttttttttgtatttttagtagagaaggggtttcactgtggtctcgatctcctgacctcgtgatccgcccgcctcggcctcccaaagtgctgggattacaggcatgagccaccgcgcctggacattgttaatgctaattgaatattgatacatagtgattcacacctccagctttaatcacatttgatttactgtccatttctttttttgagacagggtctgtttctgttgcccaggctgaagtacattgacacgatcatggctcactacaaccttgaggttttcctgggcttgggtggtcctccctcctgtctcagcctcctgagtagttaggactagaggcacatgccaccatgcccagctaatttttttttttttttttttttaagagatgcggtcttgcttttgtccaggctggtctcaaactcctggcctcaagtaatcctcttgcctcagcttcccaaagcactaggattataggagttagccactgtgccaggctagtatccatttcctactgccactgatggcaatctattagtgtcatagaaaagctgaagatagaaatattaaagaggcctcagttccagctctttccattttggtagtagagaaaaatattgcttatcatccgctttctttatag

SEQ ID NO: 62727 - DNA, 1038 bp, Homo sapiens
tgtgttctagaattacaatgaattgatgtttctcaaatatttatatatgttgttttatgattaaacatatagcttaaagtattaaatattgattaattttgctctcatttttcagtgctaatgaaggcacgggacattttaaggtattttactttttttttcattcatttcacaagaggactctgtagcacacaaattcgagtcagattagcaaccaaatggagattgtataaataagttatttaaatatgaagtacatttaataatattatagatttatgaataaaagttattaagtagggatttgttcattcagaacagtagtctaaggaaaattaagtgaatactttttaaaactaaaaccaaatgctatgttaatttggtgataaaaaatgtctcaaagcatttttgcatatttggcatttagaattaaatatgagcttaaaattttatttgcatgtaacattttttgctcaagttattttgccctacttgttacttcaattattcactgaagttttagaggtaagaatgaactcctttgtaacatatttaagttcagagttgatttaaagattccgaaatcacaggtaacattgtatacagtgttactactataatgtgagtcatcaggaaaaggtaactttttaaaaaggggtaaatcagaccttatagtttcttgggaggtaaatatacaaggaataggtgactttgatctgtttagattttcagtgactttgtcaagtgtctgtactgaaagttaggtgaattatacctagttggatatactgtactgttttatgaacacactagctcagagacatgaattaaagcataggaatagataggtaattctctgggtgaagcatattatacatgtgtctcagagattgatgtgatagagggaatgcagttttaagtcctcatgatttttttttttttttttttttaaatggagtcttcctctgttgcccaggctagagcacagtggcgcaatcttggctcactgcaacttccgccgtctgggttcaagcaatt

SEQ ID NO: 62728 - DNA, 1023 bp, Homo sapiens
ccttgtatcaatacactatataattccttaaaataaataaacgtacatacttcagaacaggaactttatacttcctaagggaaataatcttggatggaggtgatttgccacagaggaaatgcataattggtactcaagtggaaatgattattatttgtgatgcaacgtcacatgctacctagttcagtgctctgtgaattaggtgatgcaaacagaatattgttgcttggaacggtagcaattttgctgtttttaaaaggcggcgaagagagcgtccccttccaaggagaaaatctggtgagattcctttaaagtgcggcccgcgcgccccgcagcctgccccggagctgcagggtttgcgccccgcggaggtgagggccgctaaaccacatttcccggcgagcccctcaggctgccgcgcctgcgcagtggtggcgtccgaggccggccgaactcccgcgctctcccgccgcctcgcctcgcctggtgtctctcccgaccatggagggggtcgcggtggtgacggcgggcagcgtaggcgctgccaaaaccgagggagctgcagccttgccgcctccgcctcctgtctccccgcccgccctcacccctgcacccgcagcgggtgaggagggaccggcgcctctgtctgagacgggggctcccggctgctccggctcccggccccctgagctggagccggagcgcagcctgggccgcttcagaggccgcttcgaggacgaggacgaggagttggaagaagaagaggagctggaggaggaagaagaggaggaggaggaggacatgagtcacttctcgttgaggctggagggaggccggcaggactcggaggacgaggaggaggtatttagagcccccgcgcgaccccgctgggcccaagcggcgtcagggacgtagctggccctcgtctgccgggcgccggcccgatcctagtgcgccgccgccgcgcggagcactggagcggacctcccccgacctctgccccggctgcctaggcgtgtggcg

SEQ ID NO: 62729 - DNA, 1050 bp, Homo sapiens
ccaacactttgggaggccgaggcgggaggatcacaaggtcaagatatcaagaccatcctggccaacatggtgaaaccctgtctctactgaaaatatgaaaattagctgggcatggtggcacacgcttgtagtcccagctacttgggaggccgaggcaagacactcgcctgcgaggtggaggttgcagtgagccgagatctccccaccgccctccagcctggcgacagagccagactccctctcaaaaaaaaaaaaaaaagattatgtgattgtgttgaggaagagacagtgggaagaaagagacaacagtctgagaaacaactcacctgtgggctttaacaatacagccatagtcacatggtcataataggtcattttcttaaaagttttttgttttttaaatagttggaagtgttgctgtggaagaccagccagatgtcagtgccgtgttgtcagcctacaaccaacaaggagatcccacaatgtatgaagaatactatagtggactgaaacacttcattgaatgttccctggactgccatcgggcagagttgtcccaacttttttatcctctgtttgtgcacatgtacttggagctagtctacaatcaacatgagaatgaagcaaagtcattctttgagaagtatgtaaatttttacatatatatatatacacacatacgtagtgtgtgtgtgtgcgtgcatatgttttcacatctgtaaccacaaaaatgtaagactgcaacttaaaaagtacgttgtgaaggagaggtacctgaggctatgagaacttaaaatgtggggtttgatctagctggagaagtcagagaaggcttccagaggaaatgatacttgaagtgagatttgagatctgaagattaggtaggagttaaccagatgaagagaagagggaaaagcatgtgtaaaagctctctggtgggaaggatcctggtaggtacagaggctgaaagatggccagggtagctggagcagagaatgggatgggggtgtggtatactatgaagctgggaattggttagggactggaaca

SEQ ID NO: 62730 - DNA, 1060 bp, Homo sapiens
gtaaggaaaaaggggagaatggctattgggtagacaaatacagaaccctgcttcagagtgtaaattactattttgtaattgtgatttatcctatcaagatgtaaaatgggtatattaatgaataaataattttaaaaatgttggctcttttgacttgtaggtattttttggtttattaaaagaaccagaaattgaggtacctttggatgacgaggatgaagagggagaaaatgaagaaggaaaacctaaaaagaagaagcctaaaaaagatagtattggatccaaaagcaaaaaacaagatcccaatgctccacctcagaacaggtgaggaaaaaacttcaggaacttgtgtgtggaggtataagacaacatgttatatagagttcaagtttgttaatagtcaaaaggtaattttgactctctttttctttcacagaatccctcttcctgagttgaaagattcagataagttggataagataatgaatatgaaagaaaccaccaaacgagtgcgccttgggccggactgcttaccctccatttgtttctatacatttctcaatgcttaccaggttggtaaaaaaattgggcgatttctgcctggagagtcatgtaggatgatgatttaccattaagagagaaacaaatgtattagctaaaatggagtttcgttatttaaactccttttttttttttttctgagacagagtctcgctctgtcgcccagctggagtgcagtggcgcgatctcagctcactgcaatgtccgcctcccaggttcatgccattcttctgcctcagcttccccagcagctgggactacaggcgcataccgccatgcccggctaattttttgtatttttagtagagatggggtttcaccgtgttagccaggatggtctcgatctcctgaccttgtgatccgcctgcctcagcctcccaaagtgctgggattacaggcatgagccaccgcatgtggcccctaaactcttatacaatttaaagacagcattcaggaagagagaattggatactgcacagaatagatagaagtcaatgtt

SEQ ID NO: 62731 - DNA, 1044 bp, Homo sapiens
gtttttttttctttttcttcaaaagacatttcctttttaattcttacatagcttacacagcatgggaaaatagcatctttattttagggtcaaaaattgttgagttttaagtgacatatcacatttcttaaactttctcaattgaccttatttgactatactttgttaattacccctgctatttttttcttgtaaagaactctgattttccctaagtttttgtatcatattacctcattcagtaggtgctcggtatatgtagagtgtcagggttaacattagtttggttagttctttcaattgatacctactgtgaattgcgtgtatgaattaaaagtgagatgcagcatgttaggtatatttaatatagtcaaatatatataaaatattaaatgtattcaaatgtatataaaactgggcaggtgaccaaaggttactctgggagtcaaatatatcaccttctcttctctcaggaactatctgctttcctcttcagaggacggaactgttagattgtggagccttcaaacatttacttgtttggtgggatataaaggacacaactatccagtatgggacacacaattttctccatatggatattattttgtgtcagggggccatgaccgagtagctcggtaagaacactgtgatcttatgactgggtctattcaatgaacagaatggtttcttgttgggaattacacagccagccaaattcatttacacttccattattgaggttcaactttctgagaagcttttgcatttataacttatttgaaattggggccgggcgcagtggcttatgcctgtaatcccagcactttgggaggccgaggtggatggatcacctgaggtcaagagtttgagaccagcctggccaacatggtggaaccccgtctctactaaaaatacaaaaattagccgggcgtggtggtaggcacctgtaatcccagctattcaggaggctgaggcaggagaatcatttgaacctgagaggcggaggttgcagtgagccgagatcgcaccattgcactccag

SEQ ID NO: 62732 - DNA, 1169 bp, Homo sapiens
tcaatcacttctcaggttaaagtactgcttgataatgctccttaggaaggaatagagttattggtcaagtttagatttttcacccaaaatgtacagtaaatacatagtgtagtggacaaaatgtccgaatgtaaatatgatggatgcaactaatggtttcctttgacttccccttaggttcaatggataatacagttcgattatgggatgctatcaaagcctttgaagatttagagaccgatgactttactacagccactgggcatataaatttacctgagaattcacaggagttattgttgggaacatatatgaccaaatcaacaccagttgtacaccttcattttactcgaagaaacctggttctagctgcaggagcttatagtccacaataaaccatcggtattaaagaccttttggaagctactgtttttaaaaagggagactaaaagcaaatacctcagtgattaatatttaagctacagagaatgtttttgtctatatggatctggaagtatgctgcttggaaaaatctgaacaggacagttccacgtttctatagcaaccacatttgactaatttccgttagttgaataagaggtattatgatcatggaggggacatttatggtgctttggattgtgtggaaactatgcattttctgttcaaatgctattttaatttattacatttagaaaaaaagttgatttcaataattcatcctgcttcaagattcaaattcagaaatatactatcatcttgaattttagctgaagaatcctatgagcatgtatgtttctgctgtaaaaacgtagttactgtatggcactcaaaaactatgttaaatgatccactaactttttttttcttggcccatgattaatggaatgtatgtaactaggtagggttcctttcttagatctagaggaagtacagccacccactgacatctgaatttatatacctgttgagttttgagtgcacccaaacactcgataaaccaggtgaagaaatttagcttccatgttctacttcagctaaaacagctacatacaacctagtacacttgaagtcagacagacatttcagttgcttacctccagtactgagccttgctttgggaaactaaaagatttagaccaagtcactgccagtttttgcctttgttg

SEQ ID NO: 62733 - DNA, 1042 bp, Homo sapiens
tagcttatttgttaaaggtggaatgttaggttaaaatgtattaatctgaggccaggcacagtggcttacacctgtaatcccagtactttgggaggctgaggcgggtggatcacttgaggtcaggagttcgagaccagcctgaccaacatggtgaaaccctgtctctactaaaaaatacaaaattagccgggtgtggtggcacatgcctgtaatcccagctacttgggaggctgaggcaggggaatcacttgaacctgggacgcggaggttgcagtgagccgagattgtgccattgcactccagcctgggcaacaagagcgaactctgtctcaaaaaaaaaaaagtattaatctgagatacactttaatttttttggtgttacatctttgacaatctaataaattcgcattcagtttcagtgggttcatgttaccttagtaattcttgagtgtcttaagagtaaagctggccacatttgtatctaaactgtttgctttgtttataggattttaaactgtctacggttcttaacctcatctgttaagttcccatgcctggagaagctaatgccaactcatcatgtgataattcaatttgtacaataaattatgaacctggaaaagctggttgtctttatttacaagatatcaaaaatataaaaactgtacaaaatgcaacaaaggcaaaaactggcagtgacttggtctaaatcttttagtttcccaaagcaaggctcagtactggaggtaagcaactgaaatgtctgtctgacttcaagtgtactaggttgtatgtagctgttttagctgaagtagaacatggaagctaaatttcttcacctggtttatcgagtgtttgggtgcactcaaaactcaacaggtatataaattcagatgtcagtgggtggctgtacttcctctagatctaagaaaggaaccctacctagttacatacattccattaatcatgggccaagaaaaaaaaagttagtggatcatttaacatagtttttgagtgccatacagtaactacgtttttacag

SEQ ID NO: 62734 - DNA, 1397 bp, Homo sapiens
ccatttaataaattatcccttctcccttctcccatggaggtcctaaattacttataacaagaaaaattgtataagtaggggttgtaattgagctgtttagttgatggtcacccgttgaatgtttgaaaaataccagctccaatttttgagtagccttaaaatggattaattcaatggactgtggtgtgatggagccaggaatgaaaatattaagctgtattgggtcagagaatgaacttagcaggggctattgtgtgatttgatgtattctgaggtgttcatgaaatagcgatcaaggtaaaatcctacttccaaaagcttttctttcaggaaggctttttccaccatctttgctactactgtgttgggtgagatatagataaaaatttacagtatttatatgcagtgaccttgagtttttagactaaaacaagacaaaatttatttacttttaaattacatccaaaccaatttaatgttgctttctttctttttttaaaagattgaaatcatggcaggtccagaaagtgatgcgcaataccagttcactggtattaaaaaatatttcaactcttatactctcacaggtagaatgaacgtaagtattgataactttaagcagttatattttaaaataatatagatggaacaacaagtcttgtttacttttttctttctttctcagtgtgtactggccacatatggaagcattgcattgattgtcttatatttcaagttaaggtccaaaaaaactccagctgtgaaagcaacataaatggtaagaagttgacatttaaacctttataatttagccattttgatgttaggatttttccctaacatttagtataaaaataaaccattgtcattttgcaaaatttatagcatacaagaaaaaaaaatacagaggcctagtatagtggctcatacctgtaatcccagcactttggcaggccaaggcgggcagatgacttgagcccaggagttcaagaccagcctgggcaacatgatgaaaccccatctctaccaaaaaacaaaaattagccagggtgggagaactgcttaagtccaggaggcgaaggttgcagtgagccgagatcacgccactgcattccagcttgggcgaaagagcaaaatcgtgtctcaaaaaaaagaaaaagaggctgggtgcagtggcttgtgcctgtaatcccagcacaatgggaggccgaggcaggcggatcacctgaggtcaggagtttgagactagcctggccaacatggtgaaaccccatctctactaaaaatacaaaagttagccaggtgtggtggcaggcgcctataatcccagctactcgggaggctgaggcaggagaatagcttgagcccaagaggcagaggttgcagtgagctgagat

SEQ ID NO: 62735 - DNA, 1059 bp, Homo sapiens
cctcgagggacgcttcgcggagggcctcatttttctccactggcgaatgcaatctaagggtcttcggaaactgtgggagcccttgggcgcacctatccgcctcacctcgaggcttctcacccgctggccgcccccttgcgcccctcgttttttctagctcctttcccattccccaccgtttctctcctccaaagctaagaactcgagttgctcctcggccagaaacggcgggcggtcctgcaacgtgcaggcgccaggtccaagcccggactcccctcttcacccacctgccaaagccgcaaattccgcagctggtgtccttcaacgaatgtaaccacctctcggcccggccggaagaagccacctcccccgcacgcgtttagccggcccccgcgattcggcctaatgcgacgattggctatggctccaaatcccgcccttccgattcctgtctctaggtcacctccgcaacacagcaacggaagtagggtgttgagcccgcccacacttccggaagaattgcactggactgtgggtatcctggtctccgcgtgtgtgagtaccgcggcgcgaggttagtggtagctgggtgcagacgccgtggcgctggtgagtaaaggcagaggcgaaaaaggaggaaacctcatggctgtcaggtctgtcccaggcctggttccctgccaggcacacgctagatgagtgtggttcggccaccttagccccgcttcgaagccggctctgttgtagcagcccctgtaaccccaggctttgtgttcggaaagtagcctaagtatcttctgtgcccctggatcgccttacttttcagagcctcagtttccccttgcttgaaaggaaattaagggtgaaattatcagcaaactagaccccccaaactttcctgtttctatgaatcatatacccatccctgattccatatccttggccccacccggtcatcacttctttagtctaaagcccttgtagagtcttattaccaagtgtctgtcagaactaacctctcctgtcttctgttttcacttatacccagttctggttctc

SEQ ID NO: 62736 - DNA, 1019 bp, Homo sapiens
ttgccttatcccttcctacatctttgtgatcatttataatctgatttgcattttaagttacttgcataattgttttatcttccaaaaagtgtgcatgttctttgaaggcagaggattatatattcatctgtagagctacagtgtatctctgacttaactgtagcttcttagtgagtatgtgctacattgaatctataacttctttttctggaagaaggtgggtggacttgtggttttgaagcagagacctttggaaagatgaagtatggattattccgggcctgacatctaaaccatctatgttgtagtcctgaatgttgtctagcatattgctggaacgttctgtctcttgcccgttgataacacctttctgaaatctgctaccaagacaacatgtcaccattatcctttgcattgtttttaggagacccaaacatggcaaacctggaagaaagcttcccccgaggaggtacaagaaagatccacaaaccagagaaagctttccagcagtcagttgaacaagacaacttatttgatgtaagtagtatgcttgtttggtgacactcactggaaacttttactgtagtgtcttgtgaaaaatgagccttatttgagaatgtgttatttttccagattttttttgcattgaagtctacttctataaatttaactcatttagagaggccataccaccacaaggctgtatcttttgaagcttggcatttagtattaaagtactgttattagctgggcgtagtggctcatgcctgtaatcccagcagtttgggaagccgaggcaggcggatcacttgaggctaggaattcaagagcagcctggccaacatggtgaaaccccgtctatactaataccaaaactagctgggcatggtagtatacctgtagtcctagctacttgggaggctgaggcatgagaattgcttgaaccaagaaggtggaggttgcactgacccaatattgtgccactgctctcctgcctgggcgacagagtgagactctgt

SEQ ID NO: 62737 - DNA, 1062 bp, Homo sapiens
ctggagtgcagtgacatgatctcagctcactgcaacctccagctcccagattcaagcaattctcctgcctcagcctcctgagtagctgggattacaggcagatgtcaccacacccagctaatttttgtatttttagtagagacagggttttaccatgttggccaggctggtctcaaactcctgacgtcaggtgatctgcccgccttggcctccctaagtgctgggattacaggcatgagccaccacacccgaccctcaagtgctttttaatggtcatgtaagagatagactgcaaaactgaccactggatttaacaatatggaactcattggtgattctatgggagatagagtggtggagtgagaggggtggaaagcagattgcagtgagccgaagaatgagtaagggatgaagtagaggcagaaagtgtagacaactcttttgacaagtcattttacatgccagttatgtggaaatatttgaaggccttatgctgaaattcaagactgtggctaggccacagacccaacttcctttgtggatggggggttattcctcacccaccttttgggttctctggggtctgaggatgagaagtcactgagccaaagctgggtaatggatttttggttcaggagaagggtgtatatcaggtctttctcatttgtgttatgcaggacctacttcacttgcctgaacttttctcacctggaatgctggtaagatgtgtggtgagcagtctgggcatcacagacaggggcaagaagagtgtcaagctgtctctgaaccccaaaaatgtcaacagagtgctgagtgctgaggccctgaagcctggcatggtaggtgtctagggtcggggaggaagagtggcaatgtgccttctctctgcctctgagggagcgtggtctaggccaccttttactttcagctcaattgtgacacataggagtggttctttttctggaaggaaggtctcttgggttctttgggcacttaatggacattgaagacttgaacctaatcattacattggagaagagaaaagagaaagcaagtccaaat

SEQ ID NO: 62738 - DNA, 1836 bp, Homo sapiens
ctgttgttgcccaggctagaaagcagtggcatgatctcggctcaccacagcctccacctcctgggtttaagcaattcttctgcctcaacctcctgaggcagggattacaggtgccatgcccagctaatttttgtatttttaatagagacgggatttcaccatgttggccaggctggtctcaaactcttgacctcaagtgatctgcctgcctcagccttccaaaatgctgggattacaggcatgagccactgtgccctgccgaaagtttgctatcttttgaaaccacttgaggcaagagactcttctatattgttccatcattcagctgtgttaaacattcctcattgcctggcaaccatcagctccttcaagcctgggagtgttgaatttgatgtctgctgtctagtgggattgtggcttaaggtttaatgtgggagtgggatagtggcagagtgtgagcttagtggcaggaacattcaagtttggatgttttgtgtgtgtcccattacctttgaattggaacttctgggactactttctcttccccagctacttacaggtaccgtatccagcctggaagaccatggctacctagtggacattggtgttgatgggaccagagcttttctgccactgctgaaagcccaggagtacatcagacagaagaacaaaggtgagggcaagaaaaggggccagtacatggtggtgaggtggtacatgtggggattatatttaagtgccattttgatgagtaacatgacagaatggtgaccctgaaggtgctgtggctttggtaaaaccagcacttaatcctagttaataggaaaggaaagatgtatgaagggccagcgagtggtaaggtctcactaagatctgatggaacagtgtcagtttttctaacctggaagattccactgcaattagggcccccatggcttctgaaccagcagtctcctggcttgtgtatttttgtgtggtaattgaattccagatcaattaggataacttcgtttccttcttgtagttggccccttaaagattgggaatttggggagtaactgatgctaactgggcaggtaggccatgggtcttttcaggtattacttgggcccacgttaaaagtccttctcatagatacatttttccttttggggcctgggtctgggcttacaggtgctaaactaaaggtgggtcagtacctgaactgcattgttgaaaaggtgaaaggcaacggaggagttgttagtctgtctgttggtcactcagaggtttctacggccattgctactgaacagcagagctggaaccttaataacttgctaccaggactggtggtcaaagctcaggtacagaaggtaagctgttatgctactactactttttaaaataaaaataattcttttcaaaatattaaatgcataaagtctaaaactactgtctgataaaggtagtcactagtcacttacgcccattgagcatttcaaatgtggccagtgccacatgttgaaatgataatattttggatatattaggttaaaaaactatactaaaaagtcttttgtttctttgtagtttctaaaatgtgactgctagaaaacttaaaattacttgtgtgactgacattgtatttctgttggacagtgctgatctgaaaggtcaaatggaattaaaaggtttataatgaagaacttatccgtcataacccccatctttaactcttttagcttatcttttgaaatttctctccatatttttgagtaataagcttctgctggtatctcttgatttttccatcttaggcattgagttttaactttttatcaaggtagaaaagat

SEQ ID NO: 62739 - DNA, 1038 bp, Homo sapiens
acaagcccagtgaggggcagagggttcccgtgggttgttaggggtgaggacagccctggtgtctgcctggcttgctgtgaatgtgccttcttgactgggtgccctctcctggaggctctgttttttttgttgttgttgtttgtttttgtttttgttttttttttttgagatggagtctcactctgtcgcccaggctggagtgcagtggcgcaatctcggcttacagcaacctctgcctcccggattcaagtgattctcctgccccagcctcccgagtagctggaattgcaggtgcatgccaccactcctggctaatttttgtatttttagtagagtcagggtttcaccatgttggtcaggctggtctggaactcctgaccccatgatctgcccgcctcggcctcccgaagtgctgggattacaggcgtgagccactgctcccagccaatccggaggctctgtttttatggaagggaagtagagctgtgttcagagagggcttgggggagcttcctaggccccatttccccctactcacgtacccctttccaggaacatcaagtgggttgtcttaatgaagacctttcctcttctcatctcctgcctgttcttctgttcagatcatgagtgacaaatttgtgacctccacaagtgaccactttgttgagggccagacagtagcggcaaaggtgaccaatgtggatgaggagaagcagcggatgctgctgtcactgcggctgtcggactgtggtctgggggacttggctatcaccagcctcctcctcctgaatcagtgcctggaggagctgcagggcgtgcgcagccttatgagcaaccgaggtggggcacctgtggggcaggggaggtgggccaggggtgggagtatgtgttgtaaattacacctgttgttaggtgagttgttgggcttcccagaacataagaaaaaaaaatttggggccgggcgcggtggctcacgcctgtaatcccagcactttgggaggccgaggcgggtggatcatgaggtcaggagatcgagac

SEQ ID NO: 62740 - DNA, 1127 bp, Homo sapiens
aggtaattcagaggcagccccatgagtttagtgtacaggagaggaaagctaggtccagggagtgaaggctagtctgttccagctcagaccagccttgagttccctagccttgggaccccagagggtttcctcagccacaccctgcccagtggggccatgagtgagtgaccatgctgtgtaaggaaagcagggatggtggcttttctctcttctagctgaggaaaggcagcgaacaccaggcgattgtgcagcacttggagaagtcctttgccattgcctccttggtagagacgggccacctggcagctttctccctgacctctcacctcaacgacaccttccgctttgactcagagaaattgcaggtgggacagggtgtctccctaaccctcaagaccacagaaccaggagtgactggccttcttttggctgtggaggggccggctgccaagaggaccatgaggccgacccagaaggactctgagacagttgatgaggatgaagaagtggatccagctctgactgtagggaccataaagaagcacaccctctccatcggggacatggtcacagggactgtcaagtccattaagcctacccatgtggttgtgactctggaagatggcattattggctgtatccatgcctcccacattctagatgatgttccagagggcacctctcctactaccaagctgaaggttgggaagacggtcactgcccgagtgattggcgggcgagacatgaagacattcaagtatggaggctctgggggtgggctggcttcgagggagattgttgttgttgtgggaggactgggaaagtaggtgggctccaaaaagttgcatgtaagtcagattctcttttagttaacaaaaggcattcaccaaagaattattttgcaagattcttttttttttcttttttttgagacggagtctcactctgttgcccaggctgaagtgcagtggtgtgatctcgcctcactgcaagctctgcctcctgggttcacacccttctcctgcctcagcctcccaagtagctgggactacaggcacccaccaccacgcccggctaactttttgtgtttttaatagagatggggtttcactgtgttagccaggatg

SEQ ID NO: 62741 - DNA, 1052 bp, Homo sapiens
aggctgggtgtagtggctgaaccctgtaatcccagcactttgggacgatgagggaggtggaaaacctgagcccaggagttcaagacctgcctgggcaacatggtgagaccccatctctacaaaaaaaaaaataaataaataaaaataaaaattagctgggcatggtggcatacacctatagtcccagctacttgggaggctgagctgggaggattgcttgagcccaggagattgaggctacagtgagccatgattgcgccactgcattccagcttgggtgacagagtgagaccttgtcccagaaaaaaaaaaaattcagatgagcctgctccttactaataactgcaaaggttgggaatggaaaccttcagcctgacacatctgtcttcagtggtggtgtgacagtggaacagggtgcttttgtgagcttggtttggtggagagtagggagaaatcctgacctacagattactgtgttacagagatgaagagaaatgattcagcttatttgtttctccaggtatctcccaataagtcaccccagattcgttcgaaccatcccggagctgagtgttcggccaaggtgagggggacattagcagcactgtcttacggaaagagcactgggctttggaattaggaatcccgaattcgaatcttgattttaccagtgttaggattgatttttgcctttctctgtccaagttttcttgtttctctagtggggatatttggttctcctagggctggagggatcatatgaaaattaatgcaaaagctgtgtacaggttttaagtatcaatttaaagcctggtttcagttctgtttgtcagcatgtcacaaaaagaaacatttttgctctcaacccaattttctataactcagtaattccctaaataagcaacatgtatccaagaatacctgttatttcaacctagacgactgtgtggtgggctggaggctgaataggaatttcaggtcatggtggggtagattctgaagagaagggtgttccatgagatactctgtggggaggagaacgaggagttctc

SEQ ID NO: 62742 - DNA, 1067 bp, Homo sapiens
gggcttagaaattatttgaattggtaagtaggggtggcagttttgtgattcctttgaggtgattgtggactgataactttcaggctacatccctttgtggtttttctgagaagaaaaaagaaaatcaaaggctgagtgccgtggctgacatccataatctcagcactctgggaggccaaggccagtggatcacttgaggtcaggagttcgagaccagcctggccaacatggtgaaaccttgtctctactaaaaatacaaagaaattagctgggtgtggtggcgggtgcctgtaatctcagtttttgggaggctgagacatgagaatcacttgaacctggggggtggaagttgcagtgacccgagattgtgccactgcactccagcctgggtgacaaagcaagactctgtctcaaaaaaaagaaaaaaaaattacttgaataaatgaatgctcattttattaaaaaaaaaaatcaagaaaatgctaatggaagggtagcatagggcagagagccctggattttgagtcagaagccctgattttaactcctggttcagtagcataaaatgggcttaatatctcccctgctgaactcacacagttgtcaaattcagtgagagataatttttgaatgcagttttgcaaagtaaagcaacagccaaagtattatgaaagaagtaaaacaattttgtttcctgagtttataaagcctattgtgggctacctgctttaaaagcagcttgttcataagtagatgaatgaaacggaaaagattagcctcgggccagtattgtggacattcccctttgaggagagaaacggccttggagggtgagtatgagtaggggagtcccgtacagtcaatccgtggccacttgggagagatggtttcaaactggaagtcttatccagagatgggtttactgtttacatttcctttctgcaaacagtgagctggaggatggccacactgctcttaacactcactctgttagccccatggagaagattaaacagtaccaggccggccagactgttacttgcttcttaaagaaagtaagtagtttt

SEQ ID NO: 62743 - DNA, 1861 bp, Homo sapiens
gagcgagactctgtctcaaaaaaaaaggagaaaattggagtgcatatttagggcaagacactgcataaacagtgaaggatccaaatccaaattggtttagaaattaaaaattggcctctggagatggttaacaatcgctgggcacagctgagcttggaggaggctacagaggtctgtgggattggttctccagtttgaggacatctctggagtctcttttgcctcctggtcagctgagaccctggaagagatgcacattctgctaggctagcaaaggttctgagctggagtctgagggaagctggtgagaagtggaggttgggcaagggcagtgggatggaagggtggattcctgtctcttggaaaagtgtactggggccctttccaccttgtggttttaggaaagttttaatggcgggaaaccttgtatttgtatttgccctactctggttcctttttttccctcagtacaatgtggtgaagaaatggcttgaggtggagattgccccagacatccgggggagaattcccttattgctcacttctctgagcttcaaggtcagtgtgcttgagatccctggagaggggacccaagttccctaagcttggcccagtgcctggtgtgtgggtttacagtggatttgaggaagcttgttctttatttaagggttgctttgggagatacttgctttggagacttaaatgctgtggttttggataaatgacagcctttcttcaagcatcacaggagtttttttatccttccaggttctgaagcatccagataagaagttccgggttggccaggccctgagggccaccgttgttggcccagattcctccaagaccctcttatgtctgtccctcacaggtgtggggatgaaacagtgcctggtcggggaaggggagcggcaggaaggggtgggatgggttttcagctattgcttgagttggaggaccccttcggtattggaatcctcagaaagcctggtgtgggaccttcttggaacagtttttctcttgggctttgctctggcccagttactccactgctctctgagttacctttacctatacaggttacccttacctacacaggtgtttttctcaagtccctgggaaagagttgtccaccacttggccctgaggtccttggctacatggcagggtgatctcagtctagatggttctggatcactcagcccagataccccaagtctgggcagcctccaccttccccagcctgtgtgtggctggcattcccgctcctcccttagctcatttcctcttccctgaatcaggttggttcttccaccaggtcctcacaagcttgaggaaggggaagtggccatgggccgagtggtgaaggtgactcccaacgaggggctgaccgtctccttcccctttgggaagataggaacagtcagtatatttcacatgagtgactcctactccgagacgcccctggaagacttcgtcccccagaaggttgtcaggtaagcgaagtgttcttcctcttttcacctgtctgtggaattggtatatttaaaaaaaaacgttgttgtaatacatgactttttatcagaaaaacaggtatatgaaatagaaaatgaaaatttctgtaacccctctgtttctctaccactttttgccattatgtactttgatttctatctttctagactttaatgcatatatatatagtttttctttatataaataatagaatatcatttgatatactgtttttttctcatagtttatcatgaatttttttccttttctatgctaatatatcaaaatctattttgtccttttaccttattttaaaacgtttgtttagtattctggggttttttta

SEQ ID NO: 62744 - DNA, 1082 bp, Homo sapiens
tacccagaaaagctgaggctgttcagattgctgcaagaatcctgtctgctcaggctcttgttttccatggaaagggtcagatatccagatgtgggtgtccaaggttgcagatggtagtcctggtgaggggagatgctttagcctccagggttccattgtaggggtgagcgtgccatgtatggagttggcttgaggtcagcttgctgtatggttagacatcaatgttaatgaggccaaggctttaggtttgacctctctggcttggtccgcctctccccatttctacatagctgggccccaggcacctgcttctggcctggcaagatgttaggagagagtagagttgggctctaaaggttatatcctgctgacaggtccagagtcatattcttatttactaagtatgatggttgcaggtgtattgggggtggcatgggacagtggaggttaaaggtgtgcatgtaagccttttattcctttagaacaaacccggagacgaaaagcaaagtagaagatccagagattaactccatccaggacattaaggaagggcagcttctgaggggctatgtagggtccatccagccacacggtgtgttctttcggtgagtgaggggggctctgcacccggacccaagtgccttccctgagcctgtgttgctctggggtccactgtgttcctcggtcaacttctttgatgggaatatgaagggaggagagtttatgagtccccactcatttttaaaattccaagttttctaatacttttaaaacaactgttgagttattagttatttggtgttttggacaaagaatatggcatttctaatttctgttctaagtaagtctggggccgggcgtggtggctcatgcctggaatcctagcgctttgagaggccgagatgagagaattgctttgaaggccaggagttcaagaccagcctgggcaacaaagcaagacccccatgtctccagaaaaaaattaaaaattaaccaggtgtggtagcatgagcctgtagtcccagctatttggaaggctgaggcgggaggattgcttgagcccataagttcgaggttacatt

SEQ ID NO: 62745 - DNA, 1902 bp, Homo sapiens
cgcctctgtgttcctccaggagaagcaaaccaagccagcagaagcgccccggctgcagctgtcttcaggcttcgcttggaatgtgggactagactctctgaccccggccttgccacctctagcagagagctcagacagcgaggaggatgagaagccacaccaagccacggtgctgtattttgcagggcatgtcctttttgcagggaccccttggtgtcagtctcttgtgctctgttcctagactgggtgtcttcctgggtgagtgggggagggggcagcggccagtcccaggccagggggtatatatagagccctgggctgcccagccaactcgtgacttccaccacagacctcccctaggccttgaggagcagatgactcacggtgtttctgctttccatagcagataaagaaaagcaagaaagaaagggagttggagaagcagaaggcagagaaggaactgtcccgcattgaggaggcgctgatggatcctgggcggcagccagagtccgcggatgattttgaccgactggtgctgagctcccccaacagctccattctgtggctgcagtacatggctttccacctgcaggccacggagatcgagaaggcccgtgccgtggctgagagggcccttaagaccatctccttcaggtctcagctttgccccagggagcacagtgtcttcgcacgttctgggctgggaagtttctcaacctgtggggtagctcctcctaggcaggccggcagcattttgggtggctgccaccaggggcccatgggtcctcaggctttctgccatagctgcggccatctgtgaaatagatctactcatttatattttatagtcttcttccctgaaactgctaagggtaaccttcacaagagtccatacacttatatgagggaaccagtttgagcagaaacacagtaagaaaagaactcactacatacctgggcgaaatccctgtggtggttttccaaacagagggagtttttgaggcctaatgaagagggaaggcagtcctttgcttcatcctcttagcttgaagagagaatcagacccaggactctgcgtccagcccaaacctcaggcccgtttgggatctggtgggcatcctttctaggaatggaggcagaatccaggagagcctcagactcagccattggggttggggcaggggtttctaatgctgcaggagctgtggggacacagcctcttagggtctacatttggggtgggatctgaggacacagatagaggctgggagggggaggtggttcctgagtctgtctggatggggcgggaggctcactggtttcatgtggcgctcatgtgctgactgctctccctccagagaggagcaggagaagctgaacgtgtgggtggctctgctgaacctggagaacatgtacggctctcaggagtccctgaccaaggtctttgagcgagccgtgcagtacaacgagcctctcaaagtctttctccacctggctgacatctacgccaagtcagagaaattccaggtaggaggttgggccacagacgaactcctgggagttccagggccacaatctcagagaagagcccctggggtgctgggtccagtcctgctgtgagcttgccacccaacatcggggccccaacttccctatcttccaagtaaaagaagtcatttccctcacctcttcttcaggcctgtggggtcaaggtgagggaaggagtggctttggaagtgaaggggcagtggacccctggtgtgtctgccttgggctgctggcagggcatcacagacagaaggggacgtcccggcccagcatccgctctggcgtctctcctactcccccttgtcattctcatgttctaggctaggaccgccctcccatgggtgcggatcagca

SEQ ID NO: 62746 - DNA, 1058 bp, Homo sapiens
aaatcctatgccgtgttagggaaggggacaggactaaaatggcccacaggggtggcagggagggtgcagtgagtaccaggggttcaacacaggggaaggctctggggctgatgatctctttgcagttgggttctattatctgatttggtgtggggaagagatgaagcctggcctttctcagaaggaaacagtctgaaatttcacgagtcagaagattctgcgctcagtgggcaggccagaactagctctcgtaacctagtgctcatgtccaagaagcaggccagccccagcttctccttcctcccatccctgcccgccacccgccccacctctagaacctttggatgctctcccttggccctgtccggcttcctggcatatgactcagtcatttcccatggaaaagctctcaggacacttaaagctctgccagagaaaacgtttaattccctcatgaccaagacaaaaaagaactggcttcaacaactagctgggtctgtgctggcctccaagaccttgaatagcccagatatggagaggttaggtaatgtggccatagtgggcgtgggatgagacatcatcagttcacgccaacacccgtggctttcctcagcagcccaggtttctccatttccccctctgggctctgaatttgtcctcctgtcccagactcatagcctcccctaaagggcagaaggtaccagtgaggctgaggctgaaggaacacccagagactccaagatcggaggggagggcccactccctggagcctactgaccccctccagctggactgacagcctgccagggacaaagcaggaccctgaccacaggaccctcgggaatagcccctctactcttgctccccagggaactcccctggaagagggaccctcagcatttctgggagtccaggggcctgctgcccacaatccccaggtagcctcagataaggaaaaagataacaagttggtactgaaaataaagcaagcgaagagggatttaaaaaatctcaacttccttttcatcctgacaggatttccccaagcgtgctgcaga

SEQ ID NO: 62747 - DNA, 1056 bp, Homo sapiens
cagagacaagcaggcacattttcatttttagtgcttactactgggaatgtgaaggtctgtttagtcttgtccagctaacataaaccagccggaactgggccgtggcagggaactttgctgtagttcccttatttggaatgaaattcattgtttttcactgggaggtattgggggctttggggaggccccactgggccctgccccagggtgtggcctgagtggcctctccaaggctcactgaggtgcctgtgccacagaggctagccctgggatacctcagcccctgccaggttcacagactgcggacagccgcgagccacgcctagtgcctcaggaatggagagtgtctggggtcatgtccaactctgtcagttcacagaggagaaactgaggctcacagaggagcagggacctacccagactcacagggcaagttgaagcaggtggaggtctagaacccagggcccctggtcctctggttctcagacctctatactgtggggccagggtgcctctggcctaggagctggtgagggtggggggtgggaggacaggggtgcggatgaatctggctggagtggtctgcagcttgggaatcccccaaggcctctggggcaggctagtgtgaggcctggggcagtgaggccgggggagggctgtgggagaggaggaaggggaggtgagaggagagggagaggtgtccaagaggctgggggagctggatccggccctgaccccgctgttgtcagtgtgactttagccttggtttcccccatctgtcccagaggctcagtctttttactttttctctttctttttgcacctctcccaggaggtctcctggatgaactgagttggggatgtttctttttctttttttttcttttttttgagacagagtcttgctggagtgtagtggcacgatcttggctcactgcaacctccgcctcctggggttcaagcaattctcctacctcagcctcccaagtagctgggactacagcatgcgccaccaagcccagctaattttttttgtatttttagtagagatggggt

SEQ ID NO: 62748 - DNA, 1169 bp, Homo sapiens
ctggggcacctgtcccaacccccgaggacgccctctgggctccctggctccagtttctctgcagcacttggcttgcactctccatctctgagtacttttgctctcctctccctcctcatctctcactcttccagactcgaggcagcagcctccactcttgtcctggctctgggcatagaaggaagctttcagctggggttccctgcttcctattctctactgccaggcccagcctaatgagtagagaggatggggccctggcaggatggccataagcctcaaatgctgatgaggcggctcatcaactcaatcaaattatcccttgttcttgatgaaggaaacactatagcagcaaggggctgcctcccagctcctccacagcagggtcacctcctcttcctggcctccccagaccctagtcacttccccctacttcataaaaagaagttaccccctcccttgtccagtgttgtcttctatacctcctgatgcctggatttatatgtcatattaggcatagcagcagaagacattactcctgggtcccagtcctccttgccttccacccactgtgtggccttggcaaagtctctatcatttattgggccttctttgctacacctgtaaaatgggcccagaacttctttgcctgcttgaaggtaggggctggccccagtgctctctggaggctcttccccattagagagcttggtgactgtgactgtgatggtttctattccccagtgaatttgttccatgttttattctggagttgctggctctgccttagactttgagttctgagagggcaggtttaggctgggaatgaggtgctaggccttggggaacctggatgagagaggacttggtgaggaaagccttgagctaggtagaccatcatggaaaccaagatggcacccaagggaagaggagctgtctgaaaggggtcaggggacaggagatggcagggaaaagagggacagctatagtagtggggagggccttgggagctgaatgggttcagagagccaaggggcctaaggttccctagatggcatgagaggacagatgcagctggggattctgtcagaccaggcccccaggggcactgccagccctgcttcctgcctgcaggctttgaggtattaagtccccacccaggtcatata

SEQ ID NO: 62749 - DNA, 1051 bp, Homo sapiens
ccggaagtcgtgggcatgcctctggctcaggggagcatcggccgactgggcttgctctcccccagatcccgcccagccctctgctgatgactctaggtcaggcctgaatgtccctcctaaccgcttccccagacccactcagaagtgggagcagcagggtcttgagctgcgggctcaggacccagtccagtcccttacagggcccaggcctctgagttccatctgctgtgggacagcctccacctttcccgtggccccttcctcagcccctacccctctgtcctcccacctgcccgctggctttctcttcccacccagccctttccctggggtccaagatcccagaccttgaggacaggggctggtgtccaggccagggccagggaggatggtgctgtcctgttgtcctggtagaggcccctgagcttgtgttggatggtgacattgtccctcagacatggcctgagtcctggtcctgcctgtgacctgctgggtaacctcacgcaagctccttagcctctcagaacctccactttcttctctgtaaaacagatatcatcatagccactgccacccacacagttcctggtgcacggtgcatgctcattgcatggcagctgctctcttgatgatgatctgggctcccggcatgcctgcccagggctggaggggcctgccatcccagcctccctcttccccctctgttcccacctttccctcttccctgagtgtggggtgccagtgtccaccttaagatttctctagaaactttgcgagtctgtggaagcaggcgtatgttgactgtggacattgagaggtgtgcatgtaaccatgtgagtacatgtctggtggtcagtagatggctgagtgcgctcagtggtgaatgctcccaagtgcttatgagcccatgtatatgcacatttgtgtgacatgatgcagaagaatagtgcaggtctgtgttggggtgtgtggtgtgtgtgtatgtgcatggttaaagggataggttggtgtgggggggaaaagcctggattctggtgctgcactgcctggg

SEQ ID NO: 62750 - DNA, 1073 bp, Homo sapiens
atgctgtgaactaggctatagggatacagtagtaaaaaagacaatggctctgggcaccatggcttacgcctgtaatcccagcattttgggaggcctaggcgggcagatcatgaggtcaggagttcgagaccagcctgaccaacatagtaaaaccccgtctctactaaaaatacaaaaattagccaggcgtggtggctcgcgcctgtaatcccagctactcaggaggccgaggcaggagaatcacttgaacctgggaggcggaggttgcagtgagccaagatcacgccacgactctccaccctgggtgaccgagccagactccgtctcaaagcaaacaaacaaacaaaaaaagaaagtggtctctgccctagggaggctcacagtccatcagggggaaagacaggcacaaataaccttgcagcctttcccagtgcagtgctactctgcagaacacagaagctgatgggagtgacttctcaactctcctgaggatggcatagaaccaaaatcattctggatgcagaagagacaagtcaatgcattgcatacaacaagtgcctcggggtatctgggcttaatcttgtgtaagaaccaggattgggaaaggctgcttggtgatgcgtcctctgttagggggctgatggggtcctcaaaggtccatagtaaggcccctaacctagtctgggggtcagagagacttctgggaaaaatctacgtccgaaggatgcatgagaaaggcagatatataggtgggaaggaggaaggaaatgttcccagcacagaaatgggcctgggccaagcctggaaatcaaagacaggtgtgggaggtggaggcccctttagggaacccaaagaagtttaattctgcccagttttacaatcatctctgtcccccaagttccatccccacctgtccttctcccaccaggagtcaggcatccccagctttccaaccattctcctaaatcctttcccccagagggagccctgttcagttaatgcagttaaacgagtccatatcaggaccaccctggcaatctgagattaggacgtttggggtaaaataagactga

SEQ ID NO: 62751 - DNA, 1073 bp, Homo sapiens
taggtaagcaggtcaggccatggatgggttgtgtccccagacagagtggaggcaggggctggtgtctctccccagtggacggtcctccctgccctggccagaatccaagcccacaatggtgcccatgccatggccccagcaggccctcctccctgttatggtgcccatgccacagccccagcaggccctcctccctgttatgctggagttctgcagatcacctctttctttggggcgccctggcccaagcccaggctggtatcgtcaagaataacagcttccttcctccagggagaaggacccgccagcaactaaataaacacaggttttatggggtgattaatacatggaaaaagaagctcctatcccagtatctcaaggtctccttgctcctctcagaaatgtcaattcaggaagagcagctgtgagtcccagcaggacttggctggcgggccaagagcccacttacagggtgctccagagcatcccttggtgcctaccactgcctaggcactaagcgggggcaggtgggagacagaagaatcaaaaacccagcccctctcctggaataatgttttccctgggggacacatcatataactgatgcaaggtggcccaagttcaattctgcaatcaagtgtgacctgaagagtaaaactgtgtgtatgtgtgggaggggagtgcagctagagagcaatccaggaggacttcctgtaggagacaagttttaagtcaggaactaagtgaggtgaaaagaatggattggttgaggaacaatttaggtcagacaggggggtgtccacaggtgcagaggtggggaattggcggtcagtaggggagcagatccaggaggggaaggaatgaggtagaaaggtagtgggtgacttgtggaggtgaggggtgtgcacaggtgtgggtatgtgtatgcatcacaggggagagagccatgagagctgaaagcttccagcagcttttgtgctgtcaagttgttcagtaagagggactggctggttgacagtggagaagtatgagacccagagatggggagaggcctgcccaaactctcccagctg

SEQ ID NO: 62752 - DNA, 1004 bp, Homo sapiens
gtgctgagcatgagtgatccccagccgaggaccacactgccatctgggccttctgcttcccaggctaaaccaatatttaccctcagctgtggctgctaggggccaagaggcaaatattagtttaaggagcctgagccagctgttgggctgggggaaacagctgaggctgccgatcatgatttcttcctctttgatgattttcatttctttttgattaagaaaaaaatcttgcttttccttctgcttcagagggttttctggtgcttcctttctgcttaccccaaattctgccagctatatcagtgccccacaccaaaccctcccctccattaggaagctttcccagacctccctcattcaaaatgacccttcctcctcctgaccatcggaagcacttggagacctaagtggtataagcagctttgagtcatgtattgtcctgctctttaaagatccagcatatatcctctttgtatataaaggaaggtattattgtgcccattttgtagataaggaacagaggctgagagaggtctgataacctgcccaaggtcacacagctggcagttggtggagctgggatttgaacccaggagcttgggctacattaccttccagcttctctagatgtgagtccatctgatctccctattaggtctggatacccgacaagagcggggacagtggccctcctgtgccttccagagtcgagcttacaagagctcaaggcatcaaggatcaactgcacatgttgggcacagataggccaccagggccccagcagtgctggtacaaggaagaggggcagtgcagcgcccaggatgccagattcagtggggaaggtcggtctgcctgccttatagttccccggaggctcccgagggctttgtctggttcagttattcctgtgcactctagttttctaccacaatgaatatatatcaagttgaaccatatgtaatcaccagtattggactgtttttaacttacaagaaaggcaatct

SEQ ID NO: 62753 - DNA, 4101 bp, Homo sapiens
acgtgtcccggcaccgattatgtaacttgttgcttccgaatgtggggccaccccactgcttggggtgagaggttgcccatctggtttttctaagccttacccatcaagtggtgcagtcttgggccgaggttggtcccatggtgttctcccatggcttggggccccaaacactgccctgacctctaacttggtatcagctcactcaactgtgacctttgccgtcccttctgcggagggtgttctaaccagctcctgtgtctcgagtttcatctatttcagggcttcgacacagctgggctcactgatgggatggttattttggagctgctggctgcctgcagctgctcctgaccctgaggggtggagagggagagaagacagacttgggctgggcactggccctagggattcgttccgtttttagctgtttcccagcagcttttgtccctcccctcccaactctagcaagatttcaagcaaggctaaagggatcctcttcctacccccttctctttgtacatcctccactgtttctcctttctttcttctttatcctctcacctctacattttagctgctgcttcttggtctttggtgatttcattcaatgagtatttcctgggtacccatcatgactgatgtgaaatcctgcattaaggttcaaaaagcccatggtctgaggacaggtgtacctgacttttagttgagactgtgctcaagccaagcaaatactaatatctgaagttatcgggtagcttctgggtgctgggggtggtcccactttacctcggatctttccaacaacaactcagggcaggtattattacccctattctctaggtgagaaatttgaggctgggaggaaggttgcttacccaaaagccaccagccaagtgctggatcagacatttaaacctaggcctgatccagacctggatcaccccaaagcccatgcactttcttctgaatcatgtggcatttcacatgccaataacaacggcttatattaacctaatgactgtgccaggtctcctattaggtgccctgtgtaccttactccttttcatcctcacagcgtctcttctaaggggagtattagatacagattttatgtaaatcagtagatgctgatttcactgctgaagaggccccaagaagttcagctatttgtccagtcatatagccctgtcatacaggaaatggcagggccaggatttgaacctagactgatgacttcaaattcattgcacttaactgtgctcctgtcctgcctactagtatatgaatgttggttactgaaaaaaacctaatgtacttttaggttgcattattagaagtatagcatatataccaagggaggtgatggccacactatgccttgagctggttggtgcacatctagagtactgagtctggttttgttcattatctaagaggtgggaaggtgtgtggggactctgagtattccctgagaattgtcttcagtactgggctgataggcagctcaggaggtagtgggttaaatacagggaggtagattttggtttaaaagaaggaaatactctttaaagacagattaactccacaatggaacaggttgcctggaagttagtgagcacctggtagtgtgcatgtttaagtagaaggggactcctgaaggggcagagagaccaggatagcttgcatccagccccattaagagctctgttctgagggtctgcccagccccaggagctctggactgattgtcctgagggggtggtgtgggccctgtgacagctgtgttcctggaggctctggctggacatctctgagcgacctgattcctcttctccctgctgttactgccccttcccctctctgtctcccaccctctgaagttcccaagggtcagtgcctggaatcccagaggggtgagggagcagggactgttccccagggtccaggtcagcccactggctttcccccactctgcaccatttgtctctcctacctcccccctgcacaggccctcctggcctctgcctctgcctctctgcagccccccagcctctatgcaccatcactgtcacagagtcaattccctggaataatcacattttctggccggctccctcctcctcgccaacacgattccaggaaaccccaatcagccaggccccaggaggcttctccagagcttcaggaggcttggggggaagggcccacacccagagctttctgggggccagacaacacagttcctggaaggggcagtgaaagggtgaaagaaaagagggaggtttagtgaccatgtctacattcagttggaactgaattttggcctctgctgtccctaccagaccaatcccccaagctttgctgtcatacctgagaaccccagccatccttaacccagttcctgaagagacagcacagattctcccttggagaggttcagggagaaggcccaaaggaagggatcggtccatggtgcggcttacagtggcaccaggcatatttggagagattgactcacgcagaaaggcttcaataaacaaggagagtctggaagtgaagaatgcggcattaggagttggacagacctttttttcaatcctggatctgccacatggcggctgtcataacgccgctgagctttatctgtaaaacgggaacacttccacgggctgccgtaaggatgaattgcaggggtaattcatggaacatggtgatcacttttattgaaagttataggactccataaagcagaacataacacagccattagaagaatatggtgttggaaacagttattggcacggagaggtgttcagatgctggggataagatggaaggagcccaggagttaaatttttgaaaattttgaaaaaagctaccagggttcttagcctggagtccttgcccatgaatggcttcatgtagttcatgaatgccgagaaattatctacagaatttagtgagaatgttcatttttctggggaaaagggtcaatgtcatcacattttcaaagtgatgtagtacatataaaaggtaaaaaacaagtgatgtttatatagcatgactcaatttttgcactaaaaaaagtaaccagctgggtgtggtggctcacacttctaatcgtagcactttgggagactgaggcaggaggatcgcttgagcctaggagttggagaccagatgggcaacatggcgaaataccgtctctaccccaaaaatacaaaaattagctgggcgcggtggtgcatcccagctacttgggaggctgaggtgaggatggcttgagcctgggaggcggaggttgctgtaagctgagatatctccactgcactccagcctgggccacagagcaagatcctgtctcaaaaaaaaaaaaaaaaaaaaaaaaaaagccaaacaaacaaaaaacccaaaaatacagcctttaaaaaggccaaaagatcatacatccaaatattaaaaatgcttttctctgggtggtgggcttataggcgattgttttttctttttgctgaactgaattttctacaaaataccgttttatattttgtataacttgtatgatttaaaaaagaacgatgagtttgattccctgttaagccactttcaaaagggtatcttggatagatctacttctcagcctgtgtcctgacatggcaatggtagcctcaaaaggtgattgttaaggttagatgagacaatgtacgcaaagagggtgtctgtgtgtttgctggggggtggttgctccctggctttccaggatgttaggccttcgtcagtgcactcgacagacggttactgtttgtcaacagaatgcttggcgctgttctagctgctagggataagacggaaggagcccaggagttaaatttttgaaaattttaaattatgaggaatacaagtttactgtagaaaatgaggaagtacacatatgcatatagcaagcacctgtgagcatttggaagcatccacatggtttcagtttcggtgcttccccccacctattcctctgcttaaacagatgtcctgcaagagtcgtttcttgactgtgttcgctaatttatgtcacaagcatcgtgtgcgccattagccatccgggat

SEQ ID NO: 62754 - DNA, 1421 bp, Homo sapiens
cacttccctttgactgtccaatccaaagccagtctctcaagttgtatggctcaaagagcagtgaccacaatgggtcatacagtagggacccacctccacaaattagaaccagagttcagactccattgggcacatctgggaggaaggcaacctcctttgtcgtcttgttggtaccagtcattctcaagtatctctgacacctgtggtggttcagtttgctgagcctgccacctggtatgaattagactgggtgtgatgaacattcatccatggatataccctaccattttgcgttgccttataaccaaggcacactccccataagagtttactgcagagaaagaacagcaaaacagccaccctccttgaatttacaactcattatctgcaacaggttttctttaaatccaagacacaggatgggaaatgggtttccccaccaggtactcagaggtctgcaggaagtgactcccgggcaaggcagacttcagtaatccctgaagcgtgagcatgtggactgcatggctgggtggggactggtggatgtctctggagctccagaaccttggagaattcctcatggaattcccctcccagctcttagtgggctctgtggggtcaggaggagcccttcctccaggttttccttctttcctcctcagcagagaaactggagaaaggacattaaactcagtgcagtcgatttgagtgctgaaatatttccagaatcaatggtggtgctaaactatctccatgtttctagcatttttaatagtggagttggtttgtttttaatctcatcacaaaaatgcagtgcccttggggaagggaccagccccttggcctgccactttccaggtgtcctttatcactttgacgggactctttggtctgcagaaaatgctctgtcttggcatgcttctagactgtaagatttgggttttgttttgtattttatgtttacatgcatcttatatttccctgaaaactaaataaagttttgggcctttttaaccgaacggaatcacctcttaattctccctgtcaccaaaaacacccatccagctgaacagccaatgtcccattatcccaaattgcaaagtggacttcaggatcccagggccctctgaaagaaaggacactggagggtgggggcaggtaggtaagctctcgcttttttttttttttttaacagggtctcaccctgtcacccaggctggagtgcagtagcatgatcataggtcactgcaacctcgacctcccttactcaagcgatcctcccacctcagcctcctgagtagttgggactacaggcgcaccaccatgcccagatgatttttctattatttgtagagacaggttcttgctatgttgccaaggctggtctcaagctcctgggctcaagcaatcctcctgcctca

SEQ ID NO: 62755 - DNA, 2378 bp, Homo sapiens
gactttgggggcagtgagagagagctggaaaggggcaaccctgagcagcaggtgtgccccatgccctgtgggtttcccctatgtccaatgactgtagacgggctgtcttgccaggcctcagccccgtctaccctaagcctggccccaaaggtttctctttcttcctccttgattttccatcttgacgaaggcattatatagaatcattttaatcactttcagatgttagagcagcgtattttacaggcatttatatccattgctttcctcagcaaggcatgttactacttttatcatctaaggaaaaaagacaagggaattccagtcaggcattattttcctattactagtgtttgcagaataggtgtaggactatttaagtttagaccttggtttggtagttcttgtttttaataaggggaaaaagataaaataacccctatttttcctgttattgtatttaactaatatattatttctttaaggttactcacttcccctacccctccaaataccttgcattctcaatcaaaaatggaaacaatctgagagacaggaaaagtgcaatattaccaagatggatgccagggctcattggggacaatggagggaataccagtggcgctcagagagcaagaggcagggagcggggtgctgaaggaatcctagctgtggaacaggtgggtgggttggtggagtttgatcttgtggcgttctcctctcccccttctttgggaagatgataggggtccctgccagatccacccagaagaaagggattcaggcatggggcccttgacctctaggccccagtccctggagcagaggcaggccctcgggagctgttccttgttttgatttctgttgtggtgcagccagctgctcagagagacctggcctaaaaatgactcccagcagccctctctcaccccagtgtcctgatatttgggctgtgatccttctggtgtatgtttgaatctttctaaaactgggtgccctcagttcagtttctaggcaggaagcctagaagtcaccagatctttttgggggatgtgagaaccttgagccgcgcacaccctggtgagacaccaattcccacaagcctgcagcagggcctggggctgagcctgggctgcccattcatctcagcgacttcagcctgagaagtgagccctgcctgggctccacacccagagagtccatacaaattctgctccgggaagagtcggggggtctattcaagtttctctgcagacaaaacttcccacaacaggtaccaatctggcctccttcctcagcaccggtagagaaagcaacagaatgggaagtttcctctgggttggagcctcagagctctgcccctcaaggtgacagggacgtccctgtggcttgttccctccacctccagtactgtatgcttgctacttcaaccccctatttggtgaatttctgcacagacacagatctctgtgcctggaatgggactgtgccctgtgcgggtctctcccttggcgtatatccatctagatatttagtctttgagaatctcaaagcagagctctctgggaagagaactgtccacattgctaaataattaagattccctcacttttttgagggccatgtgttgtgagagagagagagagagagagagtgtgtgtgtgtgtgtgtgtgtgtgtgtgtctgtgtatgcaagtgttggtaacttcccacttgaactaaataacatggggttagagaaaaaaaaataccaggcaagctgtctccattgaacaagtccttggcaatgggcaggtcccaagggactcacagcttctggcagcaagtgtgtcattcacacacatcattctggctggagagtgcaatgtgtcatttttttttctttttgtaattattttattaagtatttagttggaaatttcacactggcattaacaggtctagcataagtggcctaggcagtcatcccaggctccaaaatgaagatgtgcaaaagagatgccactgggaatagaaacactgagttggttcagttaggtcatcccctgcagacgtgtcatcgagcaggctgactcccacccctcagccatgccatgggtatgagaagccccttataatgaaagctgccagccctttcgtccttgtttcagagggtgggtcaggtggttggggtgagaacttgctcacggtgcacccaacaagacctgcaggtgcatataagtttagtcccaactgcagggccagaccaaacacttcctgggaagtgtgtggagggctgtgctagaccttcctgagtttctggctaaatcatcagccctgtttggtgcagtctcatgtctctgtggttcccaagctgcatgatcagagccagtgagaag

SEQ ID NO: 62756 - DNA, 1910 bp, Homo sapiens
ggcagaacgaaggcaaatcagacagcctggagaagatcgagaggcgcgtccaagcactgaacaccgtcaaccagagcaagaaggccacgccccccatcccctccaaacctcccgggggcttcggcaagacctcaggcactccagcggtgaagatgaggaacggagtgcggcaggtggcggtcaggccccagtcggtgtttgtgtccccgccacccaaggacaacaacctgtcctgcgccctgcggaggaatgagtcactcacggccactgatggcctccgaggcgtccgacggaactcctcctttagcactgctcgctccgctgccgccgaggccaagggccgcctggccgaacgggctgccagccagggttcagactcacccctactgcccgcccagcgcaacagcatacccgtgtcccctgtgcgccccaagcccatcgagaagtctcagttcatccacaataacctcaaagatgtgtacgtctctatcgcagactacgagggggatgaggagacagcaggcttccaggagggggtgtccatggaggttctggagaggaaccctaatggctggtggtactgccagatcctggatggtgtgaagcccttcaaaggctgggtgccttccaactaccttgagaaaaagaactagcagagggcctgggctcttccagcctcagtgtgcctctctggccgcccactggatgagcggtgagacgaacaaaagggaaaggaaaaaatgggggtggggggtggggggtggacaacattcaacactgcagaatgggtgacctcaaagatgccccctgtccaagccatcccacagctggaaggtaggggatgggggtgcccacactgagtgaggaagggaatggaccagggagtcccaggcctgggacccagagccaagaaagctgagatatcctgtgcaccatagggacttcaccaatggattacatgccatctgggacaggccatgtgggagaccccagttgtgcctttgctacagatctggaaaagacaaggtcatgggggcctccagtgtcctgcccctgcttggcccagttttgattgctggcatcttgccaccccaggtatccctggtattgtcctaagctgtatttgtgaattgtgctggtttcctgggcattgccacgcctaccacaggtgggtacattagaagccaccactggctttcaggcttgggggtgtcttctgagctcaagcctgcttctgggccaggccattgtcactgttagttgaagaaaaagcagttcccaggtgccagcaaagaccatctttcataactgtcactgtcttggccttgagaagagagcccgctctccgtggggcaccccatggaggacacagtaccagagtttacagagagggtgggcgaagccaccggtctcttcctaatctgcacagactattttgggtatttctgggcgggcagttcctttgcatgtttcgggagaggtttgttgatttggggcttatatgtcaggcctttggtttgcgtcttattttaggggttgtttgggggcctgggtggtcggcctcacatgggaaggggatgggtagtggatggggtttctgttgtatcttgtgggcgggtgattttgcttttgtttttgtttcacattcttccccctccacaagccaaagtcgtttcatttggtttccactgtgtggactgtgctggagcttggcgcctgccagaaaaatttggggctaggcaagccccaggttgcagacatggtgaagcagagaaactgttcttctggttcctgcacaacctcagaggggcaaaaaccctccccaggaaggaggagggtgttcaggagccagacttttggagagaaggcagctcccagcctgctgggtgaccgccattctgcgtgtgttc

SEQ ID NO: 62757 - DNA, 1686 bp, Homo sapiens
ctggcctcgggcctgtacctcccaggtcacttcatctgcatcttcccatactcttctgaccctagagaccctttcaaggaactcaaagggaggacctagcaacatcgagggtacgaggagggaaggggcagcagaagggcagtgttttcttcatacgtgtccttagtctactggcaggattgtagggactgggaacagtgcagtttagggggaggcagagtgggccagctcaacccggctgttaacacagacatggaggatcagggagggaacttggcaagtgggaacccaccaaccatgagatgatagagacctaggtttgaattctggtgcattatttactatattgggttttgggccacttactcagtggctcggtttattatctgtaaaatggagataatttatcccagagccaaagtatgatactcctaccttgggatgtcatagggttccagatcctcccaactcactggcttgtctgcactcgtaccccaggtcattgataagaactcaggtggctggtggtacgtgcagatcggtgagaaggagggctgggcccccgcatcatacatcgataagcgcaagaagcccaacctgagccgccgcacaagcacgctgacccggcccaaggtgcccccgccagcaccccccagcaagcccaaggaggccgaggagggccctacgggggccagtgagagccaggactccccgcggaagctcaagtatgaggagcctgagtatgacatccctgcattcggctttgactcagagcctgagctgagcgaggagcccgtggaggacagagcctcaggggagaggcggcctgcccagccccaccggccctcgccggcctcttctctgcagcgggcccgcttcaaggtgggtgagtcttcagaggatgtggccctggaagaggagaccatctatgagaatgagggcttccggccatatgcagaggacaccctgtcagccagaggctcctccggggacagcgactccccaggcagctcctcgctgtccctgaccaggaaaaactcccccaaatcaggctcccccaagtcatcatcactcctaaagctcaaggcagagaagaatgcccaggcagaaatggggaagaaccactcctcagcctccttttcctcatccatcaccatcaacaccacttgctgctcctcctcttcctcctcctcctcttccttgtccaaaaccagtggcgacctgaagccccgctctgcttcggacgcaggcatccgcggcactcccaaggtcagggcaaagaaggatgctgatgcgaacgctgggctgacctcctgtccccgggccaagccatcggtccggcccaagccattcctaaaccgagcagagtcgcagagccaagagaagatggacatcagcactttacggcgccagctgagacccacaggccagctccgtggagggctcaagggctccaagagtgaggattcggagctgcccccgcagacggcctccgaggctcccagtgaggggtctaggagaagctcatccgacctcatcaccctcccagccaccactcccccatgtcccaccaagaaggaatgggaagggccagccacctcgtacatgacatgcagcgcctaccagaaggtccaggactcggagatcagcttccccgcgggcgtggaggtgcaggtgctggagaag

SEQ ID NO: 62758 - DNA, 1052 bp, Homo sapiens
tctatggatttaatagtaagcaaaaaacagacatggtctctgctcctaactttgaaaacctgataaatctatacacccgttaccctgaaaaatgcccacatagctgcacattttgaaaagtgcacataattttagagtgttcatagatcccctggaagcacagccaaggtaaaggtctatagtttccccttgaaaaagcccaaccacagtgcccatagtgacttagagtgtcaagtccttcataaaggctgagctaaagcatgaacttgaaggatcaggagttagtttcacctagggaaggcaggtatgggtactgttgcccatcgtctgactaggatttctgaagccatgtctcttcctctaggctccccgaacctacggacaagacctccaccacgcagagaatccagcctggtatgtgtactgaatttcttctcccctttccttccttttctgtgaatgcgctatagccacccgatcaattggctatcttgcggcagagcctcttgatccaggggttttccagagccctgctggggcttctagttttgtggggctaggggcagggagggaagcctgcagatcccagccttcctggaggcctggctggacagtttataatcggaaacacactgcactccaaagctaaataaatccatcccagccactgcattggcagacataaacatttagactgcccggcaaaagtgtccagccagggcattgccagaggctggaaatggggctcctgtccatgctagcctggaagcctttcagctttccctggtcaggaatgcccagtggaggtggtggatggcagagtctgggagggcagagggcagatcagtgaacgtcttccagggaggagtgtgagttgcaaggagtggctcacgccccagctttaagaggttaacactgccagggtccctggttcatgtgggtggggtttcctggtgtccagaccctcgggcaggtagatacgcatcaggggccagggcttggggtgcctgcgatgctggtggcaggctgagagccttggaacaaagaactgt

SEQ ID NO: 62759 - DNA, 1012 bp, Homo sapiens
acacaaatacagcactcggggccctaagcaggcctgaccgtcacctccatgagccccctctccccatagctctacagtgtccatgtagaaaaatcgtcagtgagggccagtgggctcatctttgtcttttctctgagatgcaagagcaccaggctctgggccagatgctgctaagcgctcactgtgtgacccccttgcttttctgagccgtagttgttggctcacataagattaggtatttttactcgttgcttccatccacccttaaaattctgtgcttctgtttgcacccattgcatcagggagccaaagacaggcccctgactcccacccacgtgttaactcacctctgcctcccaatccctggggaggcgagcttggctcagcctgcctgcatgtttctgtgacagaacgtaaggagccacctcctacctgagctttctcgcaaagctcagacatgttgataggaacttcagctttcatattccttttctcccacctaatgagcgcccaagaacaaggtcagatcaggaagacggtgggcggggcggggggggaggtgttcagacatctggtgtggaggagccattccaaagagccagatgtgtccagggagcagatggggacattgcaacccagacttgggggcactggccagcgactactggaccaggaagtgaagtccccatgggtttgggtgaaaactcaacaccacgaggaaaaaaggaaaagcttgttttcagaagtcatcgaatcaccagaaattaagtcagccctatcatttgccttttgcctttgtttatgagcttttggttttgtttccttttgttttgttttgtttttgttttgctttggttttagttttatctagtcatgtgcttttgtcttttcacttatggtttctgcttttggagccccacttagattttctcaacccccaacattatgtcaatcttctatttgttaattctgctatatggtataaagccagtgtctgtcttacttgtttttc

SEQ ID NO: 62760 - DNA, 1023 bp, Homo sapiens
ttggaaccaaaaggcctctctcagtggggttgggtaagtcgtgggggcaggaagggagtggggagactgctgacagaggggaaagtgttggggaagaggaggcttctgtggtttggaaactacaggacatccagcccctgcctccaaaaccaaagcaggcctatccccctcacccacccggctgaccgcctggccagccctccccagggcaggctgccaccgtctcctggtggcgtggtcagtgttcacggccccagtgcttcccagaagcccggaggatcccactggagctcacagcctcccttccctcaaccccatttccgacgggacatctcttcccaagaccctgaccaccctgaatcatgcagctgcccgctgaggccatgtccgtctgtctgggcctcctcttgtctggcgcccccagatggggtttgtggcccaggcaagtctctcttccttgggacacctgtgagttggaaggcctgagacccacaaggcctgtgtccacatggaaagtccatgcctctgccatctgagccaactgggtggaaacccaggagctgggacggcctggtctgcctgcctagccctgccagggaggagggctctgggttctcatccctgcaacctgtgcagtgaccggggcaggacgagcctcccatccaggagctctcaccagcagcacgtgaactcctggacatctgtggttgctgcagccccagagtccccaagaaccttttgcaggagcagctcaactttaccggccagaactgatatccctggttctgcccccacccccaagaggtcaggagaaagcctgagcttacatggcccacgggattctgtcttccacgcaccccgggaggctgcgaaggctggggctgggccctagtggcccaggaggctgagcccacatgatgggctagaccttgttctctgccatgaagcagggcagggctcctctgatcttcccacgagaagggctgtcatttttccctgcaaatgcaaccttgcctaggaaaa

SEQ ID NO: 62761 - DNA, 1795 bp, Homo sapiens
gctgatggtccctcagtagccctgttgcatggtgcagagctgaagtgtcaggggtgaagacaagcatagtcgagaaggcttcctggaggcattgagcagggctgggagaatgaagggattagacaggcagagcgaggagtacagggcgtggtggggctgcgactgcaaagcaggcatgcatctatgtgccccaagcagaagaaaagcgggagctgggcagcaggaggtgggagggtggggcctcgggaagctggtgagccggagaactccctgagaagggtgagccttgaggcaagccctccgggctgtgtggggaggagggtggcaggcacaggtgtggcaggggctgggcagctctgcaaatagtgctttcttccagctggatccacagtgcctattgtcagggaggcatccaagggcttgtcaatgccaagtgctgccagctacctgcgtggagccagctgccaggcaggcaggtggggcagtgagcatgggggtgctccctccaccatgctgtcaccctgcccaggttggacaggcctggtgtccagttgctgtggcctgactctgtggacctactggctctgtggacctctcatgtcccaaactcctccaaggccattttccttgaatagttatttctcagcaaaatatatgggttagtggtggcctcggtgtggcatgcagccctggaaatcccacagaagtgccagagtgacaaccactgctcacccgagttgtagcctcagggcaatacctggccgccttccctttgggggacaaacaggtttctactgactgagcccatgagcatctccaaaatgttatttttccaagtttgaacaccaaggggcctgtgaagctggtcttccgatggctggtcggtcggtcatcagtaaatctgtacgagctgactaagtgtcaggctgggatccagaagtgacagaggccaacaaagccctcatggggctcaaatattgcgaagagacatgtgacaagtaaaccaaggaagtaattctaggtgttgacaagtacaagtcaggaaacaagcaggcgctgtggagacgtcagcagcagggagggggcaggggtgtggtcaggaaagacaccactgaggtgttgttaaagctggggacaggtgggccttggtgaatgcagggaacagcagaaggcccgctggttctgggagggcaggagtgagcaagggcagagacgggtgccgggccaaggagtattattctaggtacagctgtcactgcctgcctactcgaagccccgcagcggagctgacagaggtgacttgcctcctctgactcaggtgtacctttgcacaggtgtcctgtgagtgggcaaccctggagatcctctgcctgcccccaacacacagacactgcctttgtcctcagtggaaatgacaggtctctcacccccctccccggctgaagtgcagggaaaagatcaccccacacattttctccactgttacgtaacagatttcagcaaagtgtaaagcaaacactttctggggagtataatttttcaggaccttggggaatttgggttgggaaattgccccttcctcattctctccccagcttatcctgtggccatgtgatattacacccttcagcagttgggttttctgtaattgttccggtgggagtgggggatagctgccctcatccctctcagcatcttttcagattccataacctcatcctctgggtttccagtgctgacctagaatcctggcctcattgtgggggtgtagctgtggtgacccagttcacccaga

SEQ ID NO: 62762 - DNA, 1064 bp, Homo sapiens
cccagcaagccataccagggcatgcagccgccattgttactttgtctttggaaacccctctacccttgacataagcaaaagtgcataaggcgcctcctctttaggacattcatttgcctcaaatactgcattggcttccctctccagcaggcataatttctggcagcgtggtgacatcagggtcctggtcactctgatttgtgtgttgagcaaagctgcatccaacttcctaggattgtttcttcttaggactgcaggccaggggaagaagtggggagatgagtcaacaaaatttttcctgcctcacctttcttctctgagtctttgcttacttcctggcaccgggcatgatacattgggagttcttatacttccatggaagcaagaaattttgagctcctggtccatcattttttttacaagtgagaaaaccaaaccttgggaagaatttgagaatttttactcccctctagggtcaatgctttagtcccagttgagttgtgagcggagaacagaaattcactcagactttctcaagagactgttgaagcaataaaggaaaatctcaccaaacccaggggtgagaagtaaatcagccttaggaggctggaactgggaaccaaaagtcagcacgagccaaagcagcttctctgtctctcttacttaccatgtagattttttttttttttttttgagatggagtttcactcttgttgcccaggctggagtgcagtggcatgatctcggctcactgcaacctccacctcctgggtcaagcgattctcctgccttagcctccaagtagttgggattacaggcacctgctaccacggctgactaatttttgtatttttagtagagacagggttttactatgttggccaggctggtctcaaactccttacctcaggtgatccacccgcctcggcctcccaaagtgctgggatcacaggcatgagccaccgcgcccagctaccatgcagatttaaagcacagctatgctcttctaactgtagaccagcctgccttctcctctcatccgaccatgacagcagcttgtttga

SEQ ID NO: 62763 - DNA, 1273 bp, Homo sapiens
cctccccgatgcccctgccggcccgagagggaggccggagagaccccgtcggccccaggcctccccgcaggctccctcatgccgggctgtgactaactcatcgcagcacaaggcttctttctgagcttccttggcctccgcctccgctctgcctctctctttcctcctcctcctgcccgtcccctccccggccccctggctccccatgtcccccggaccccgcggtgcagcgggccggtctggggccttgctatatggcctgtccttggcgccctgtgagctgcgagccccggctgcgggctgcccctgggagcggcgctggcgacagagcagccacccccgaggaggccgatggacagggggcgccctggccgcggggccatggctggccgctggctcaccgcgtgctttctgccctcgccaggtgccgacgccaccgccgagcccatgatcctggaacagtacgtggtggtgtccaactataagaagcaggagaactcggagctgagcctccaggccggggaggtggtggatgtcatcgagaagaacgagagcggtgagtgccctggccaatggccgtccactggggttccggtctggcccccgggccgagctggtttttgttcctccctcctcccccaccgctgcagctatacgttatttccatctggcagagagagggccgaggcggctgaagtttccccctgttggtttgggctgcaggccagcagtttgcctggtggtggaagaatgtctccttgctcggggtaattaaccagcctgtgttaattgcacgtttcaggcacagcgcgggaataaatggccagccctgctggggtccccgtgccctcggaggcccgtggggcagggtgctctcagctcagggatgcccagcaacaaccacgttctgagccagggtccagggtccaggcaggacagcccagccagctggtggggaaggcaggccctgctgtcaccatggggtccagggtccccgggtcgctggcaagtttgtggaagggccaggcctgcgggcgttggttggggtctggttggggatctgactgccccctgccgagctggaggccccaggacctggaaagcaagcgcagtgagggggatgcagccaggcctgggccaggcaaggtccggcactgacaggggccgtactgacagctgcccggggcagctggttctcagggtgccacggagggggcaaaggtaccttggtgtccctggcagcaggagtcatggcaggtgaagagaggagagc

SEQ ID NO: 62764 - DNA, 1085 bp, Homo sapiens
gcatttctgcctgaaatacaatcccggctttagcagggctgctcgggactgtgcacgtgcgaatgtatgtggcacactcagctgtgcagggtcccttctgcttctccaaagggctgagatgggcctgcagggcccacacctcatgggagaaaactgccggggggcagtgggtttctttccctggaaggaggcctccctttgggatttcctagagttctgtggccattgccgtctgccctaggttggagggagcctccccctacagaaggacccaaagatctaagtagtgcttcttgcacctgggtgcacacaagcaccatagggacacaggggggatgtccaaaaactactcatgcctgagtcccagaccaaagaaacctgtctctctggagcccagcatcagtacttttaaaaagctccctgggtgattctgtgcttccaagttgaggattactgtgctagaagaaccagactgatggaaacaaatcagaggcagttattctgcaatggaaagacagatgggcttgggcctgaacaaaatcatactgaatgaatgtgatgctcttcatagcagctgtgggagctagagtcgtctcttgcctgctgtagaggggcctctggttagtcttttgtgaaatggaagataagggggatgttgtgggcatgaaatggggcggttaatgtgcctggcacatcacatttgccaagtcaaactcaggcgtgtggggaatgtggctataggctgaggcaccaagggggctgtgtggaacttggagaccctcagcaatttttgtagccaggctagtgacatgaagccccctagccttcaaggagattggcagacatatagtttatgccagtcgcagtggcctatgcctataatcccagcactttgagagactgaggcgggaggatcacttgagcccaggagttcaagaccagcctgggcaacaaagtgagacctcagctctacaaaacataaaaaaattagccgggtatggtggtgtgtgcctttggtcccagctacatgggaggctgaggtgggaggattgcttgaatccaggaggtcaaggctgcagtaagcc

SEQ ID NO: 62765 - DNA, 1090 bp, Homo sapiens
ggcgtgatcatgcctcactgcagcctcgacctccctgggctcaagcaatcctcccacttcagcctccagagtagctgggaccacaggtaggcaccaccacgcctggctagatttttattttttgtagacatggggtctcactatgttgcccaggctggtctccaactcctgggcttaagcaatcctcccacagtggtctcccaaagtgctgggattacagacgcgagccaccatgcccagcctttattattattatttttaagaccagtcgagtgcagtagtgagatggggagaaagagtggaagaagaagtttgacgtgtaattcactgggaacagttgagatactcaccatcttcagagcagccaaggaccctctcctaacctaggcctatccagttgttcctatgaagtccttggatgtatgtgtgctggatggggtgggttgtccttaaagtcaggggcacctgcagtgttgttctttggtttctcagcatcacctgggcctgtcaagaatcaggttcagcatctaagtacctttgggtccctgtatttggccggaatctccaggcccctggttttctcctggcctggcttcttgctggtattgcgagcaatgccaggacggacagccatggcagggacatgagcactatgggctgtgtgagggagggacatggcatacctgccatttccaggaacctactgcttttgctttcagctttgtccctaccacttactcctctttgtgtccagaggcctaattcccagccctccaaaacctttcccaggcattaggccatttcagtcttaaccctgcaaagaaggcagggcaggtgttttttccccgtttacagaagaaggaacagatgttcagagatttcctagctatcccagagtcagcgagctaagtggcaaagccagcacaagaaccaaggttgcttttattcttgctccagatctctgccctctgtgcctcctgaatcatccgctattttggactcgggttgcctcaattgagcctgcattcaagtggttttcccaggaaggacagtccgtttctctggaaagattcatttccgctgtggtccc

SEQ ID NO: 62766 - DNA, 1204 bp, Homo sapiens
ggatccctgtgagtaagggtgtcctcagctcagccctggagcaccttaggctctttgagtgttggaagaggatcaggtctgggtacataacttcccagctggagggtcagatccttgctatgctaagcagtgatgacaggctggtgacaacagaccaaactaagactgtctttgtatgttggcaatggcccccccagggggaccttgcaaatatgcagattttaacatccctcatttcagatctgtcagggtgggacaagttcttctggcctgtgagctcctgccatacacagtcctggagcctgctggctctgagttgctcatttgcatttggccacagggttctggtcaggggaactcccctctcccccacccttcctccatgacttggctcgctccttctgctccaagcccatggctcagtggacactaggcagctgtctcctggggcgcagggagggtacccttgaaggctagtggataggaagcaagtttctgaatggacactggtactaggtcttccttctgggatgaggtggctccttccagactaaagctggcttttctggctctggctgtgcctgccttctaggtttgtctactgcacatctgacaggtcttgtgatggaacctcagtgataccaagatggagacaatgaggtccttgtcctcagaggactcctggccagatgggggaggtgggcaaggaaacagcagttttaaaacagtgtcacaagtgctgcacggggctggggccacgccatgtaggggtctctgagcaaggcacacagacctgcatggctgctgagcctaatttactgagctttctaaatgggtcagctgggtgaagaggacagtacctgtgcagaggacatctgttcagtggtaggagccactgtccccatgtgccacgtcttccatgtggggcatctctttcatagccctggagcacctactgtgtggttctgtttcagaggagctattgcagattgctacttgttcaataaaattattgaagtttaaaatgttctaattaatatgtgttggcccaggagccacctcccaccttttccttattgttaggaagagcccagccgtttcctgggagacaaaggaggccatgaatcttgactccttgtgattccaggatcactgtcctgcagccaggttcctgacactaggagatgcacatgaaatatcctcc

SEQ ID NO: 62767 - DNA, 1321 bp, Homo sapiens
ctggttgaacctgggctcaaattctggctctgtgtgaccttaggcaagtttcataacttctctgtgcctcagtttcctcattttctttaaaacaaaaatgctaatgttatctgcctcacacatagaggattaagtatgttaatgtggaatagtcctggcaccgaataactactgtacaagtatcagttctcagcagcagcagcagtagcactttctgaaggcctgggacctagtcctgcctccattgccacttttctccctatgtgaccttgggcaaattccttctctatgctgggcctcagttacccccataaaggcaagagctggaacaaataacctctcaggtcccccgccacaatctctggggctcagcttctgtgctgcttcctaagcaatgcagggccacacccaggctgcctcccccagggaaagccaacccccagtttctctgtcttccactctcacgccaggaaaaggatggatggagaaatttaatttatattggtgtgcttatgataatggccacttagtgtcatggttgaaaatgccagctctgaagccagacagctggagttgagagtctggcttctctcctctgtgaccttgggtagatttcttagcctctctgtgcccattacttcttctgtacatttgggataatattcatacccattttgtgatggtttattatgtgtcaacttggctgggccacagtgcccagatatttggtcaagcattattctagatgtttctgcaaaggtgttttctaggtgagattcatatttaaataaatcagtggattttgagtaaagcagattactctccataatgcaggctagcctcatccaattggttgaaggcctcttaatggaacaaagactgacacacacacaccctccctcagcaaggaggagttctgccagcagctgcctttggactcagctgcagctcttcccttagtctctgccggcctcccccatcacattttggactctcaaacctccacaatcacataagccagttcctaaaataaatctccctctgtcttcaagctctctatgcacctcccattggttctgtttctctggagaacactgactaatacacacctcatatggttataacgaagattagataaactaatatatgtaagcatgtttagaacactgcctgccacctagaaagctcccctggaagtgctagatgctgttatcgaatgagcatctactatgtgcgaggacattttcacgtttcctcatttgctgatcagagccacagtacatgatgggtggtgggattcccattttgcaaatgagaagct

SEQ ID NO: 62768 - DNA, 1048 bp, Homo sapiens
cccccctgcccccactgcaagcagcagggatttgaactggaggcctccgtctccagaacctgctcatccaaacatagcttgcatcatcctatggggaggggccaagagaggaaccgtatcacccggggatggggcggggtgggagtagaggccccaggagtccttgtttagatggggagggatggagtgctggttggaggaactccacccctctttcccagccaggccagacctgtggaccacaggagatcacccatcccagtttgtccagtttgagccctgaaagtcccatgtccctgttttcctgggactgtgggtcactgtacctgtggtttgagtcacccctggaccagctgcagagaatgaatggctgagtggtctgatgggagctgttttaggacacagcttgggaggccttttcaattacattagcctctggcaacgctagagggagatgctagccccgcccttcctcccctcctcttcttcctgtggctccctggccgatatgattcagcagcaagtcggaagcaggctagactgtgacctaccaggagtggagtcaccggcagggtgggggctgtcagcaccagctcagggcaagacttggagcaaggacggagtgtggattggagaaggggactgatgggaagagggggggttcttgagttgttagggaactgagccccagcagagggccctgctgtcctgccagactggaactggttatagggcagtgggaagtggtcatggtgtgaagggggatccctgcctttgcgtcttgccctcgtatgtgagggatgggagagtcccagccactggatacctaaactgcttatcaccctattcagcagctaaaaatatgaaatggctttgctaaaggatgcccaactggaaacttccagaaggtctcctattagggcagcgcctgctcgggcaggccagacaccctgaaggattcaggattcctcttcgttcccaccattcagtcacagcctggtgacccccactgccaggacctcagcctccaccccattaaccccatgtg

SEQ ID NO: 62769 - DNA, 1013 bp, Homo sapiens
ccatctcactatggaggtttcacagataattcgaattctcacaatagccctgtgaggacactcagagtagcctcctgttaggactggggaatccgagggctcctgccacagtgggaaatatcacactgcagctcgatacgcagacagacatctgatgcaggtgccacaaaacagccttgccaggggtgactcgctgatcatttctagtctgttcttcttaaaatgctcattgggaccattaaattgattctgaaactcactaatgggtcactgcctgtcatttgaaaagcactagtttgaagtggcttgtccagggtcaccagcccctgagggggcagagctgggcccagaacccgggtctgtggacattcagcactggactttgacagcccctctcctgcccccaacccccagctgtcaacctctcctcttaacaaaattttcctccagccaggatctgaccaaatcactccccaattctgcaaacttctggatttcacagccagacatcaaagccctgctcagccttgcctttcctggcccgtccacccactaccctcactgcccagtccacaactgtttggagctgcttgctcctgcttgtagagctttccccctgcatccctctatggatccaaacccccttgtcctttaaggcctcctcctccaggaagctacctgggatgttctgtagcccccaggacctctcttttctctgcactgagtgtaacccctcctgtaattctcagcgtggattgtctgagaatgttggctttctcgttggacttatgtcacatatatctcttctgcctgcctgcacaggccttaatgaggttgcctacagcgagagcttaaaaagtgcttttaggttgataacagcagtcaaaatcattatgtacctcaagagccccacgtcactcccctggccaaggttgcatcttctccagccctcatattctagatagtgcccatgtccccagtgactgctgggctctgaaggtcacccccaagtc

SEQ ID NO: 62770 - DNA, 1013 bp, Homo sapiens
acctgtgttcatggaaggctggggaacagaatggaatgtgtgcacgttccgtccctacctgacttttgcagggaggggctgtgaagcatttggccgctccatcaccaggccagcaggggttatctgcctctttcttgaggtggtattggccacgtgggccagttcaccactggtctggcaagttatgggcctgggaataggaatgcctccagccccaagacaggtctgaggctcaggaagtgagctcagctgtggccaggcagttctgaggggctccccctccccgggcccggccctgtctctgctccgcctccaggacccaccaagagagacctgtgttcccctgcagagtgtgcctgccacaaaagagccagagcttgtccatgaccctcggctgacaggctgccgacgtgtcagcctagtgcctgcacctcctccctctccggctgtttggacctttccaggcgactgtgcacctcccttccctccagcctagaacataaacacgggatcgagtaacagcatattttgactctggggcgactgtggagtggcttatcaaattatcaaagcctgtggatttaattggaattttgtagataacccctggcttctttcaagtgtgctgctgcagggtccattgagaattcatgggggctggggtgggggaccgtcttccctttccatcttccagagaagacaaggtctgtcacagcccagactcagtgggggaggtgggcagcaggcctgagcgcctcggctttgatcccaggccactcgctggcttctgcaggcggagagccagacccatctccggtcagttagtggttgctcttccagaccactggccctgcacagaaaggatgttcttcatggacacctttgatgagcctggcacagagcagccatggtggttttgcctcctcacacggaaggataatgggatttgcgcccttatgaaagaggctccagcaaggcccttgccccttccatcatgtgaggacacagcattt

SEQ ID NO: 62771 - DNA, 1068 bp, Homo sapiens
tagatttgaaaagtggtgagtgcctggggctcctgtggtcaaaggcagaagctccatccctggagaagctgacccagacagggctcattggctcttgggggacagatggagtgttgtgcagtggtgctgaggttgggggtaaggattgggggtctgtgagtagggccaacaaggtggtagagtggggagccagtatactgctgacccaggggctgacattggcatatccatcaaatcctatagaaaattttgtaggggaactgcccgtaagagagcccccgaattgttttcatcagggctagaacctgctttctggaccctggaagtgaaaatccactgtgtctgggaccaccagcctttatgaagtctgcagagccttggaagggcaatgagaagctatggacccacgtgggactggcagttctccagcaaggcatcctgggaaagaaaacccagacgtttcatggtcaggaaggggcagagagttactccagagcccagacaccctgaagagtggtggtgggggcaaggggtagagggaaggaaagggagcccccccaggcctatgcctccaaaccccgtattatgtgagactgagggagacacacccatctcttttgctggcctttgcagccttcctttgagacaaggcccttatccgcctctgtcatgtttctatcatgaggctggatggggggtgctttgttaagacatgttgggcgcagtggctcacacccgcaatgccagcactttgggaggctgagatgggtggatcacttgaggccaggagttccagaccagcctggacaatatggtgaaacccccatctctgctaaaaatacaaccaaaaagttagccaggcatagtggcacatgcctgtagtcccagctacttgggagactgaggtgagagaatcacttgaacctgggaggcagaggtcacagtgagcaagattgtgccactgcactccagcctgggtgacagagcgagactctgtatcaaaaaaaaaaaaaaaaaaaaaaaaaagacgtgttgattgctcctagtgtgtgcctagccttatcctag

SEQ ID NO: 62772 - DNA, 1058 bp, Homo sapiens
ttggtagcccatctgggatgctgtgggcacaagagtcctagaggcaacctgaggccacagcgtgttaggctggccttggggcatgaaggtcgcctgtttgctccagaagaatgggcttctcccacttcttcctcagctagcactccagagaaagagcaccccatcactattccatcagcagctgtttaccagggctcagcctgtcagagctgatggggctgggtggcctggtgaattaaagggagatctgaatttgttttcctcatctacggaacgctcaggctagtggagagaagacctgctccatcatcccaggaccatttaaggcaggatgtgactgtaccactgtgcaatttgagggtgactggagagggagctcagagaacagtgacctcattgtgagctgaggaagtcagcagagacctcctgaacgaggggggcctggagctggcccccacaggatgggtaggcttggagggtggaacgcagggcaaaggcttgtgtactgccgctacctcagccccttgtctcaggagtcaaactgcccgggttcaccctggaaaccctggctctgctgattaccaatacagagaagttgcattagcttctctgtgcttcagtttcctcatctggaaaatggggataatgatagaatgtacttcgtggggctgtttcaagcataaaataaatgagtgtatctcaggtgcttacaactatggcagctcctagtaggggccaaataaatgttagtccttattattactaatgttccatacatgcctagcattttacaccacaatttacatatataatctgatttgatcctcccaactaggtgatcatccccattttactgactaggaaactgaggccaagggaggctaatagacttgcacaaggctacacagccaggaagcacagcccacaccagagctgtcattcctgactcctgggccagggctcccttccacatcagctgcccaggtgccgagaacacaatagctgccacaggactgaggacctctctgaacttcagtttccacttacaggattgcagt

SEQ ID NO: 62773 - DNA, 1051 bp, Homo sapiens
cagatcgtctgtctctgcacagaactctccaggacttccccttccatcacgacaagccctgagtcttcaccacagcctcaccaggccctctgtgctctggcccatcctgccactcagatctcattgcctgtccctctcatcctggctcactccactccagccacatcggccttgccaggctctttttgcacgtcctgcttccctgcctgaaacgttctccctctccagcgtagcttgcttcctcgcccccctgcaggtctctgtagaattgctagctcgaggtcaggccttctttgccgccctatataaaatgacaactcctgtactgttcccgtaccatatcctacttgattttcctccgcagcactgatctgatcttccctggcacatgacattcttacttgtttgctgtttgtctccctccaccggagtgtaaactccctgagcgcaagaactttgtctattttctttactgccctttccttagtgcccagtgctgtaaagtggatgctcaatatgtatttgaaagactgattggacttcaaagatcatgtgactgatccttctcattctaccaaggaggggcctgaggcccaaccttgagaggctccattccttgcctgaggtcacacagctggggcagcaggactagatcatgactcccctcctgcctatgcctcagaaaggaaatcagccacacacaaaggggccctggcctcatccatcctgtctcctgtgtgtttttccagtttacatagaatttcagtccagaatagcaaaaaaaaaaaaaaaaaaaaaaaacaaaacagttgttcctccagaaccctggaaactcttccagtgggtccgtccttggaaaaacagcagcgacctcagggtgggaaggtaggaagtggaggaatggtcttccggcagcaggggcaatgggatggatttggttttgcaattaaaataacagctggttctgtttccacagcacggttctggaaggtgggtggtctgtctaaagtatcaggtggggccttcccccatcctggcccaagagggttcg

SEQ ID NO: 62774 - DNA, 1074 bp, Homo sapiens
ctgacttgattggatctaaggatagaaccgcaggaggaatctacattttctattgccttccctcttttagtttgtttcaatagaccttgattgagctcctctgtatgagtcagggcaggctaactgctgtataacaaactcagtgactcaacatatttattttctgcacaggtcccagacctaaacaagtcactagagggctctgctccaggcagtcattcaggaactcagactcccccagctggtgaccccatcctgcgtggagttttgcatctagccagcaggcaaaggaagagagaatatgaaggactgcagggagattctgtgggttatgccaaagggaagggtacattaccctgctcatgtgccactggtcaggatttagttccatgattgtacctcccagcaagggaggctgggaaatgtattctagtcataggtccaggtatgtgttggataccatgatggacagtggaaatatcaaggcacagacatgactttcaagaagctcacaggcttttggaaggaaacagtttcacaagcaaatcattaagtccagtatggtaagcatagttctagaagtgtgaccgatctgcaggagtgatggggaggagggagctgtggaacagcaggttacacctgtggagacctcaggcaggccaggcagtgtgcagggacggacaagcaagggtggcagggcgtgtgactagagaggtcagttgagcagaggtcatgaataggcttgtgtcccacaggcagcagagagccaacaaagggtgtgaagccgaagatgaaatctgcagagtggggagcaagttgcagcaacattagagactggttcaaacttagcactctccttgcctggacctgcagagaggtttcacatgtatcttggtttctcatgccaggaaatttctaacagaggaggaaggggtggcagtggggaggtgactctccaagtcacctggtgcaggcagtgcttctggctggagtttgctgcgcctgcctgacctttgagggttccactcagcaacacagggcctggatggtggcttccagtgtcttcaaggatgc

SEQ ID NO: 62775 - DNA, 1073 bp, Homo sapiens
gtagttccagttactcagtcggctgagatgggaggatggctggagcccaggaggttgagcctgcagtaaaccgtgatcacaccactgcactccagcctgggtgacagagtgagaccctgtctcaaaaaaaaaaaaaattctaaaaagctaggcatcgtgatgaacacctgtagtctagctacccgggaggctgaagtgggaagatcacttgagcccaggaattggaggctgcagtgagctatgattatgccactgcattccagcctcggcaacagcaagaccctgtctctaaaaacaaataagtaaatgcaatgcttcaaactacctcttcatttatttgacctctaccacactcccagatagtctagtaaaccttattcttagggaaaatgtaacaataaaaataacagctgacctttctaaatgttttctatgtgctaagcatctcatatggatgttctcagaacagccccacgcagcatgtagctcccaccagcatccatactgtacaggtgacagcacaaaggctcagagagctcaaatgaattgccagatgccacgcagctgatgagctgcatgtggagaggcctgcactgacccaggtctgctggctccaaagcctgccctgtccccacagagaccgcttaatgacacattacacacccaggatgcctgggctccatggttccaccttaggcctagttggttggctcctcaagccgtgagatcttccacatgtcacctcccccttctagaactacatttgcccatctagaaaatggtgcaactgtttcttttcaggcttgccttgcagagcggagggcaggtataacagctgctttggaaagcactgagcccagagatgatagctgtgtgaggaggtcccttgatcccccagtctgggttcttaattatctagggcagggatgctatacaaagtgagttgttcctgaccccagggaatttttaaacaaggttcacctgcccagccacctctcctgagaagcctcatagacagagtcgactcaggagtacttaggctcttagtgaagatctcttctagaaaacggcct

SEQ ID NO: 62776 - DNA, 1010 bp, Homo sapiens
aggtcgcgaagctaagcgcccactgggcagccagcagccgtggagtttcttcgcagggctgtgatctccagggaagcctcttctgtccttcctccttcgcacccccgcccccccggtttctttttttggcattggaattggcaagtggctgcccttgtctgttacaacggtgaagtcatctgtccgcctttgatggatggtggggggagctttcgtcaacccctcacagagcagccccgtcgggaaagcgcatctcctcggccctccccaggggccctgggcgctcacgctcacacagcccgagatgctttcagagctcgccctggagaaggaagcctcgcgccctgcctcccacgccagctctgtctctgccttcctaggcctggggctgggggcagaaggaagccgccgcccccttgcccaacctccaccctccgcgctaagctttgatttccctcataaagccattgtgtccgtcggtgtgaggagaattgtggcttttccttttatccctcctctggacgtgacccttaaccgggttcatttcctcttaagtgatgctccatctccagacacgaggaggcgaatgtttgctgtggtctccgaggaaccgcccctcccccttcctcccccaaactttaatgagaaggggttaaggttgactggggcagctccagagcctatgtgacagttcccctttcatctcagccggtcctgtcttcccatccctcacaccttaggaagtaaacacggtgtccttgacccctctgagcgtctgtgctcctgtacttgagatagaagagacccaagcacagaggactgcatgttatttgcaaattgggtatttagaggagcagttccagtgctcaaagcattaatcttaacagttaaaacaggcgctggttgctgccctggattgtacattgatctctgaagtgccttttcttccactgttgcaaagggactggggtttgtggcaatgtcagcctcgggctactctttttgccttt

SEQ ID NO: 62777 - DNA, 1060 bp, Homo sapiens
gagaggaatgagaacaggccaaaggtaggaatcccttctcaccaggcagccgcatcaaatcaggacttagggggaagcatacggaggctgcagcaaaccagctctgctgtgagtttcaagagggctcctccctgagaaactagaggtttggcactgaatacgttacacttatacatgtaattaccccacagaaaaaagtttatcaagcactaaaaatccactaggttacagataaaaaaatctttgattgggaatccttgaaggttgaagttcagagtccctgagcagtggctccatgtcgccgtggtgacatcaggggcctgagaacaggtgtttctgttttgtttttgtgatcaggtagatcatgcatttctgactttaatgtgcataaagatcatctggggatctggtcagaatgcagatgccaagtcaggtatggagaggacagaggagggcctgacagttgtgtccacactcagccacctacctttttcctgcagacatggagaagggctgtcacttcctgcacatcttggcctgtgctcgcctgagcatccgcccgggcctgagcgaggctgtgctgcagcaagttctggagctcctggaggaccagagtgacattgtcagcacaatggagcactactacacagcgttctgagcagagacacgcagaccagctgaggaggacaaagataaggtggcattcacccccaggctctgactttcagcatcatgcaggggcttatctgtctggaggcagttacctcataataaactataaaatatagtcatcttgggaatgggatttggcataaatgttgttggctcccttctgtccactatgtccttggtgtacaatgactttgatctcagccatgacacaacaagaaaaccctccctgttgagctcctggctggactgtgcgttgttcgcagagcagaatggggaggaaacagtgttggcagcttaactgatgtgtgtggttggagtctcttccatggcaaagggacaccacagggtagtgaacattcaggaactgaggggcatatggcctgatcac

SEQ ID NO: 62778 - DNA, 1020 bp, Homo sapiens
ttttttttttctccttttatttttccttgtggttgggagaagcaagaaaactgatgcaacacaagacaggtgtcagggcccagaagaaggagtcatggggtggagattggaggccttgatcactgtgcctcgctcaaaactataacaacaaataacaaaaatgtgttatgagtgttgaagaagaaagttgtcccttaaaagtatgcaattccagctttttttttgttttaacctcattgccccaatgaaccaactcccaaggacgtgtcctctgggcagaactggtttgacactaggccaagtatcaaacaccacattaatggtgtagggaagatgattattatgtaatctttagaaactatcctgaatactaatttggaagtctggatgacacaactgctgtgttacctaagaacactctctctctcaactatttttcctatttaggtaaccagagaagacaaagacctgcacagaaagatccaccggatcattcagcaggactgccagaaaccaaatcgtaagtggtataatgtacaagtgatgccctggtgccctggaaggggatactgtctcccggggagcactggatggagagtcaggagacccgggacttttcccagtagtgacttggaaaggtgatagtcaaagtacctgccctccctgagcctccatctcctctctaaaggagtgttgggctagcacagttgttgtgatcttggctgtacataagattcaaccttggagccctctgaacattcagagcccagattctaccctggggattttgtttccatagaggatgaggtgggggctagacaaggaattctgatacagtgaggtcaccacactaggacgttttgatgtcattctgcttctcatgttctctctgatttgtgttatttcctatttcatgcttgccccccttctttgaacacaaacctgacatttccctctattctaacatcaaagcctttcagtgttggaagggatggttctagacatgactgtttatgaacg

SEQ ID NO: 62779 - DNA, 1003 bp, Homo sapiens
aatccccaaattattccaacatacaaaaaatctttgaagtccctaggaagagattgtatacagcctcaattttaatggaaaagggggctaatatatatatacagtgttttggttttgtataaaaaataagtcaaagattgtccaacagtgagggtagctttttttattctgcactatggagtgttgagttcattaaaaaaaaaaaaatcacaactaaggtagggaacagttatgaaaggtgacctgccggggcacacttctcagtcctccttaaataccatcctgctaggccggtacataccaggatctttttgactcagcagttaaaaggcctgttggacaaattcatgaaccagttggtctaggagttgttctcaggtgccgtaaggtgagacttatttcttttcttttttctttttcctctctttacaggtgaattttaagaaggacaccacttccaaggcaattcatagtatatttaagaatgctatacaactgctgcaggaaaaaggacttgttttccagaaagatgatggttttgataacctatactatgtaagacacttgcaacttaactttttttctttgtagcttcaattacaaatatatttattacttatgaataaccacttaattattcttaaaaatcattaaggaggtacataaaatcagaagtgaaagttggcccttatccttccccgaggtatctcttttaataatacagttgacccatgaaccacacaagtttgaattgcatgggtctacttatatgcagactttttcaaccaaatgcagatggaaagtacagtatttgcagatgtgaaacccacatatgagggctaactttttgtacatgcaggtttcacagagccaacttcaggacttgagtgtgtgtggattttggtatacctgagggtcctggaactgatccactgagtataccgagagataactgtatatccttctagacatttatctgtacatttacagatgcatacatata

SEQ ID NO: 62780 - DNA, 1021 bp, Homo sapiens
gcccacctcagcctcccagagtgctgggattacagccgtgtgccactgtgcctggccagaaatttcttgaataccattaagtccattaactttaaatgaaaacagctaatcagaaatatgacagttccccatcatcttccctttgcacgtgctggctggttttcagttggaaatctcaaggacagcccctgctgtccaccagaggagcagacgaatcaatacattgatgtgctttcctggttccttggccctggccaagcccatgacacttagggcatcgcattccctcatgcaggatgactgggagccatttagtgcatctagactgtgatccctgggcactcacaaggaaggaggcccacccagcacctcatttactgttgtcttagcagcagtttgggcctgggaaagaattgatctcaatgtaatttgtaatttctgtagcatcttttttctggtcacttgttagataaagtggacgacccagtgtggaacattcaaattgcaaggatgcttgagctgcccactatctacaggaaagtttatgaccagccttttcacagctcagccctagagaaagaagaggcactaaggtaagtggtgacttatcactgctgagcacgtgaccacggcagaaaactgaagcagctgagcccagatgctgggatcggcctaggttcaaatcccgaatcatccacctatgcactgtggggctctgggcaagccctctaaccctctctatgcttcaatttcctcaactgtaacatgaagagaataatagcacagatgtcctagggttgtcgtgaggaaattatgggtgtaattggagtcactgaaggaggagtggaggcaggagcagagaaaaacacttggaagaaataataatgcctgacatttttccaagtttgataaaaactttaaactcacagatccaggaagctcaatgaaccccaaggcaagaaacctgaagaaaaatgcaccaagtcacctcataatcaaaatatgataccatagcacgtca

SEQ ID NO: 62781 - DNA, 1004 bp, Homo sapiens
caatcacagtaggtagccttaagattgctttgcaaatataacgagaaggtaagagtagaaggagaaaacctaaaaatgattctcatcgtctttaaattgttcccaactagcccattctctccttttaatttaattgcccttagtttaaaagctttccattggaaggtggccagcaaagactaattttttaaacaaaatttagtctgagtcaaaatcatgttccactcagttaaagtaaaagaatataatattagctttcataaatgtcacattgaatgtaccatttggacttagcttatgagcaaagttaagatttcctggccctgagtattcgaatgttaaaggggatttatctttcatgatggaatagacactgaaagtgaagttctgtcaggctccagtcttctcattatattcatttaattacacagcttgagcctccttttggcaacttggctcaccctttaagtgaaaggtgggcctctttttctcagaccaaccatcagtctgatcatttcagtggtgctatgtgaagcatttattatcacctataatgtctgcataatgacaatgagatttataaatacctttaaaattcagcctaagtagaagagggcctggggataggaactgctacttttgaaaaagtagcagttggggattttttgaagaaacccagtaagctctgagcagcggtaatgctgattgcgtccaggttcctacctggactcactgaatgcacagagttctctgtgctccctatgttgctgtttccctgggtatagtaggtgtgttcaaggaaaattaatgcctctgtacattacagagccacagttgtcaaaattatattaggttgattttgatgaagggtttctctataaagaaatacagagagtagatcatcttgtgtaaaaacacagcctctcctgcaatttaaaagcaaaataagatgtacggaataattatgtattttttaaggtattaaaaatccaaatgactgaagc

SEQ ID NO: 62782 - DNA, 1393 bp, Homo sapiens
tctaaccacactccacacgatgctctcttgtttcagggtgggagagaaaggctgattttctatgtgagcagtcattcagtttttgcacttaacttcccaaggccaccatttttagtagagaggtgtagaccagcatcatgagggtacccttgagggtactaatcgttagtaccttgaggtaggataagtgaaatgctgaccatatcccactgggcttgtgtattacattgacttgtgcagacaagcagtttatactcgtatgtagtgagaggttgtttcaaaggtggaaggagagtttgataagggatttgcttctccaggctattgaaagaggtcatctttcagtatggctgaatgcaatgacagcatgctaattcaccagccttgcccaaatctctcttatacccttttgcttttctcttgcagtggatgacagcactggagttataaactgcatctgctggaaaaagttgaatactgagtctgtatcaggtaattttatttgccacattcctttacttttcacctaactaatggattttactcaatgtagttcatcaaaacagctatagggctaaattttcacatttatctgctggtgagttacattgatctacctgaagcactatacccagagctttggctgctctgaaaactgatgccataggagagccagttgcttttctttctcccatctctttggtgctcactgcttcctaagcctacaagaatgtgaataggttacagggagtttcagcaattcatttttaccatgcccattattacataagtcaaggtgtcttagcctaattgcaagtcaggtctgaatccccttgtcccagccatatcacttgaccaaagaacattttgaagactgtttctctcacatggttgccactaacttctgtgctgccatggtccagattttctaaaatctctgtgttcaaacaaataataccaggaattctaagactgagaaggtaagataggattcctttggaaattatccattaagtaatataaattaaaagaactttaaaattgtatagtgaatacattgactataactgaaacaacatttggagttgcttgaatatattttaataatttttagatacttttttttttttttaaagttaggttctcactatgtttccagggctggtctcaaactcctggacacaagtgatcctcctgcctcagcctcccaaagtgttaggattacaggcttgagccaccacacccggcctaatttttagatattttttaatttaagttcataatatgaaagaatatcgtgcaatattggtgatggtttttggttctagagaagctttgaaaactggaaccttgtttttcctgtgttttacaacatatacagtatagtgccata

SEQ ID NO: 62783 - DNA, 1029 bp, Homo sapiens
catgtcaaactttaatgatgggttaaataatagtgactcttttatttaaatcagcatataatacttatcctattattctagtgggtacaatgaagtggaaataatatattcataagaattatattaaatctggttgaaaaagattatcttaggtgttttaatgctgtcaaacataaataacatagcatcgattaaataacagcagttaaactaaaaagagagcaatcaaaagtacttttaaaaagagaaaacagtcaaatgtcttgctgtggttgtggatgttcagggttggctgcttgaaatccgagtcaacctgcctgtgaccctagatccctgaacccttatagcttgaccctcctccttcttgggggcctgatgatccagggggtcctctgatgcttttaggcctctgtgggctgcatgtggaacagcaggaacacaagggccttgggaaaggctggaacatgagctctgttatctagtatttgttaccattttcttttcttagttcattaagctttctctcagttgacagagcagccatccaactttcctgagctctcttcttatagaagatcactttgatacaagaaaatggctctctaattcttttttccatgtcttcagccatctttttgtagatgctgtgcatctgatacgtatagttcacgtttctatatacttggagaagtttcttctttctaagcagtgtatttcctcctcagttgcttttctctgagttttaaaattcaaactatctgttatagtcttctgatctctttctccgttgttctgtgatgcttttaagattttttttttttcatcagccacttggaactggaagggttttgttgcatcttcatcttgagtgactgtccttaaaggcaagtcattgttgtcagtccgtgagatgaaaattcacagggctcacttttctgtcctttttcaagaaagtctactgtgtccacaagtgaagacctgttcagatttttattaagtgttgccacatacaaagttgataccattgga

SEQ ID NO: 62784 - DNA, 1620 bp, Homo sapiens
gctcggcttctcgactgcccgcctccgaggccgccggccgcttctctctcccagagtggccgccgcccctggagactcgccgtgacacgggcctaagccgccgccgcgggagtcctgaccgctcggacccgtcggatcaggccgggtgggagcgagcttgcgggcaggtgccgctcccggagggtgggccggaggcgaggcgcccaccgcgcggctcgcgggccgggctcggcggaggggccgctcgcgcagcacccccaccgcgggccggagcccgggtcgccgccccgccttctcccgggaccgcccggccggagctgcgggggccgagggacgccgcgcccgccgccgccagccgggctcgcgcgggagagcagggaagagaaactttgccttttattgtttttagtccttaagtgcaaggaactctgtgttgggaggaaaaatgtccttcttcaatttccgtaagatcttcaagttggggagcgagaagaagaagaagcagtacgaacacgtgaagagggacctgaaccccgaagacttttgggagattataggagaactgggcgacggagcctttgggaaagtgtacaaggtaagagggggaaaacgggaagttgtactgcgaaggtaaaacagccactggcctggagtggcgggaggacttctgctcccctggtccttatcctgtccttcttttgactgttacggttcgatgcaactttacttggctgatcatccaaggagtagctaagaagtcgggtttacggtggaacaaaatggggcctggatggagtttaaagagcgattggaaaaggagacagggttataaagtctactctttcaaacttcaaaggaaatgagagtgttctttaatttataggaggggtctggttgtgcccttcaagtattttagaatgagaaactcattgcactttgcagtggatttgtctactgactgcattcgcgtgcatgcttgtactccaacagttctgtttttagggtccagtatatatatttggttgtatctagagctaatacagaactagttgggatcaaagtgattgctacttgcagtctcttcttgagttagttgcttgacagcatactataaaatagaatggaatttctgacaaaatttccaaaaaaccttcatgtggtactagttttaaatatatttatggtaagcattgactagaagtcagtatcagcgcttaagcagttaaaaacacacacgcatgtatttatttcaatagaaagaggcttggcgtttcaacctgaaggcattaatgttaactatttaatatctcctaaggaacatatgaatgatgtcattggagtattttcatcctgaagggcgaattttttatgagacagcgtttaggggaaggacccacagggttgcctagaagtgaaaacgtaagaaaataacttatgtttatacaggactttgaagtttttaagtactttcaaataatttggcccccacaaaaatcttgtgaggtaggcaggtcagtattagtatccacatttcacagatgaagatattgaaattgttcacagtcacatgagtctcagcctagacttgaactcaggtcttctgagcccatatttagtatt

SEQ ID NO: 62785 - DNA, 1007 bp, Homo sapiens
ttgacaaaatcttcgtttagtatatcgtttccataaccagattatttgatagctatttctttatcttttttgctaagctgaagaaaaaatactgaaactcaaaactccatgtagttttagacacacgcttttttttttttttttgcatgcagatcctcattgaattttgtgcaggtggagcagtagatgctgtgatgcttggtaaatacctttttgttctttctgttcatatcttaaattatacttgataagatgaaagaatttcaaccatatataaatatattcaaatatgtaagtatcgagtaaagttcagtaagttaactcaagtatgtttttatattcttggataattatagtaaaattctaaaatgaaatgttgagtgtgtcaagaatgtgatctttgtagatatagttcttttaaaataaattccctgcatatgatctttgacagtgatgatatatacagaaaggtatatagcctgctaatatgttttcactgtataaaaagcagatttttttttttactttctccttatagaacttgagagaccattaactgagtcccaaatacaagtagtttgcaagcagactttagatgcattgaactacttacatgataataagatcatccacagagatctgaaggctggcaacattctctttaccttagatggagatatcaaattgggtaagttattcacttaaataaaacattagaatttttactctgaaatttccatctttatgtatgtgacttaatgtggttttattactacttaaatatgtgaaacatggagaactaactccatgctggtttttaaaaaacacttttttaggtaaatactcatttttctataatttctaaatatcagcacctaattgaatgctttaaaaagaagataagaaagaatgaatttttattttcaaaaaggcatgctttttaaagaccaatttcaagtttgtacccttaaatttttgtacgtagacttaatacttgtaaatgtttt

SEQ ID NO: 62786 - DNA, 1062 bp, Homo sapiens
accagaaattgtgtagcttaagtttagtactttgtagacatagctttgtaatcactacctagatcaaaaagtagaactttgacaggcatcccagaagctcttccgtatgcccatctcagccactgcccttctcttctccacattttatcctgacttttatattatttccttccttgtgtttctttatggcttagtcacccagtattcatctctagatgttagggtttaaacttgctcatataaaacttgggtttttaaagtctcttaacttacaggccttcccccattcctttcttttctttatattatggcatgtgtaatgggggatgagggcaatatcacccacatgggtgcaaaaattagttctttagggccaaaaaaaaaccttatgcattacaatggtttgtgaccttccaaaggccccagtacatgaagagatataacactgtatctatggcattaaaattttatgggaggagggatgatgtgaaaaaaatgtttaaaatgactccttagaggggctagtaatgaaacactgatccatggaacctgggctgtttggcctgttgtgtttccctcaaactgcattttgctattgcatactcctgatgattgaagttcctttctgtatttccttcagtttggcagatgaatccaaaggcttgatcagtctcaagcctgatcctttggcaagacttacaggtggttttgcattctttcattgggaggcacaccgtgtctgctttgtgcccttttttgatgttgcatctattgaggcttaatgcctacacctctgtcttttggggttgcaaaacgaattccattattttgttttcattattttcgataatgattttgatataaacaccaattatttcattattttcattcattataaaattagtaatgaagataatgacttggctgtctcttatcctcaattgatgaccagtgttttaaaaaatattgttagttcatggatttaattttatttggttggtttcaaatccattgcagtttttattcttattgaagctcatgttgttccatctttagtcagtg

SEQ ID NO: 62787 - DNA, 1032 bp, Homo sapiens
tcaagattaagatgggagagacatctttttctttctgtttaacttactttttataataagattagccttattaaagacttaaaatgctttttctccccattgaatacaatgaacaatgcttaaaagttctcattaatgcttttgtgtgattatttcaagcggattttggagtatcagctaaaaacacgaggacaattcaaagaagagattcctttattggtacaccatattggtatgtattcagttttatgaatttatagtattagtcatgtcagcagttataattactcatgaatttttgtccacataattgattataccatgtgttttgcaatcactgttcttaaacatgttaacttttaattatctgtcttcataggatggctcctgaagtagtcatgtgtgaaacatctaaggacagaccctatgactacaaagctgatgtttggtccctgggtatcactttaatagaaatggctgagatagaaccacctcatcatgaattaaatccaatgcgagtgctgctaaaaatagcaaaatctgagccacctacattagcacagccatccagatggtaaaaatattcttaaaaaagcttaataagaaacaaatgatactaggaagcagaacttgatgttatattctcacaattttccaagagtatttaaaattggatacatggttcgaagactatatgaattagaaaagtgatttttggtatatttctcttaaagaccattaaaactcttcgagctcacttttcccatatatctgaaaatatgaatgatttgagttttgcatgagaaaggtattttctgtactatgaggaagtgaggtatatagattgatctatatttgtgaaatttattagaaattttgtgctttttggcatacttgtgagtatatggctgtctcagtgattatgtacctacttacatatatgtctaacatgtatttacagatgaataagttttacaaaatcttaatagtctcattaactagttatttaaatgttgaattaatactattaca

SEQ ID NO: 62788 - DNA, 1032 bp, Homo sapiens
ggtagttatttccattatgtctctccagttactagaaagcaagctccttggggacaggggccgtgaactaattaattaaaaaatgtcttacagtgagggtaaatagtaaatattgttgacttaaaaaaatgttgttaaagcgattgggtaaatttaattttgctttatagaaggactacttgtaatatattaattaaaaattgtcaattttataggtgggcaaataaaatgacaaatcttgaggcaattactgttaggttattatgtaactccatcatagtgttttaggttgacctatttatctgggggaataaagcaggaaaaaattgctttgttgtgtgcagcaagtatacccctggaacacactttctattattattttgttacccccacacttgaagcccttagtctgcgacagacactgttaaatgttgagtatacaaagatgagtaaaatggcttctcattctcaagaattttagaaccatgtcaaaaatacaggtgtttatagatacttctaacagaattctaaagctttttataattttgaggctttgatagggtttatagagatggttactttttaagaagtaataatgaggccaggtgtagtggctcatgcctgtaatcccagcactttgggaggccgaggcgggtggatcacctgaggtcaggagttccagaccagcctggccaatatagtgaaaccctgtctctactaaaaatacaaaaaatcagccgggcatggtggcacatgcctgtaatcttagctactcgggaggctgaggcaggagaatctcttgaacctgggagatggagattgcagtaagttgaaatcgtgccactgccttctagcctgagtgatagagtgagactccgtctcaaaaaaaaaaaaaaaaaaaaaaaaaaaagtaataatgtagtgacctgacatttgctttaaatttcaattaaaattttttattacgaagttttcaaacacacagaaagtacatgtacctactacccagatataacaattcttatcattttt

SEQ ID NO: 62789 - DNA, 3213 bp, Homo sapiens
gagtctcactctgtcacccaggttggagtgcagtggtcactacaacctctgcctcccggtgtcaggtggttcttgggcctcagcctcccgagtagctgggactacaggcatgcgccaccacacccaactaatttttgtatttttagtagagatggggtttcaccatgttggccaggctagtctcgaactcctgacctcaagtgatcttccctcctcggtctcccaaagtgctgggattacaggtgtgtgccaccgcacccggcccatttttgttatatttcttgtgagaagaattgttaattctttaaattcagcaacatttactgaataaagatctgaaatcactgtaggtctgtaaacattgttttggtcactctaaggtcatgttttaacactaaaaatacattaaatcttttttagccaatacctgcaagtaagcgtgcatcttctgaccttagtatcgccagctctgaagaagataaactttcacaaaatgcttgtattttggagtctgtctcagaaaaaacagaacgtagtaactctgaagataaactcaacagcaaaattcttaatgaaaaacccaccactgatgaacctgaaaaggctgtggaggatattaatgaacatattaccgatgctcagttagaagcaatgactgaactccatgacagaacagcagtaatcaaggagaatgaaagagagaagaggcccaagcttgaaaatctgcctgacacagaagaccaagaaactgtggacattaattcagtcagtgaaggaaaagagaataatataatgataaccttagaaacaaatattgaacataatctaaaatctgaggaagaaaaggatcaggaaaagcaacagatgtttgaaaataagcttataaaatctgaagaaattaaagatactattttgcaaacagtagatttagtttctcaagagactggagaaaaagaggcaaatattcaggcagttgatagtgaagttgggcttacaaaggaagacacccaagagaaattgggggaagacgacaaaactcaaaaagatgtgatcagcaatacaagtgatgtgataggaacatgtgaggcagcagatgtggctcagaaagtggatgaagacagtgctgaggatacgcagagtaatgatgggaaagaagtggtcgaagtaggccagaaattaattaataagcccatggtgggtcctgaggctggtggtactaaggaagttcctattaaagaaatagttgaaatgaatgaaatagaagaaggtaaaaataaggaacaagcaataaacagttcagagaacataatggacatcaatgaggaaccaggaacaactgaaggtgaagaaatcactgagtcaagtagcactgaagaaatggaggtcagaagtgtggtggctgatactgaccaaaaggctttaggaagtgaagttcaggatgcttctaaagtcactactcagatagataaagagaaaaaagaaattccagtgtcaattaaaaaagagcctgaagttactgtagtttcacagcccactgaacctcagcctgttctaatacccagtattaatatcaactctgacagtggagaaaataaagaagaaataggttctttatcaaaaactgaaactattctgccaccagaatctgagaatccaaaggaaaatgataatgattcaggcactggttccactgctgatactagcagtattgacttgaatttatccatctctagctttctaagtaaaactaaagacagtggatcgatatctttacaagtaagtgtacatgagtcattgtttgggttttcctttgccattttctcaattcagagtttatgtgaaattgatgtcttgaaaataaaacagcattaaattaatgtagtattaacaatataaattcttacagcctatgaaagcaattaaaaagaactaaggagattgtggatctaatctttaaattttgtggtaggatctacctatttttgcagacctgatgcagataaacagtgtaatatggttgcttggtgtgattaggttcctttattggacatatctagatgcaacattagcaagaatcaacaatgtatgagagaattagaaattgaaagaatgatgtctttttaagcacatttagggtgtaaacaatccttgatttaccattggcccatacagtcacagacattgctactgccatgagaaccattgtggggaaaacaaaacaaacactaaagcccagaacacttggagctttgagtgtaattctcaaattttagtgtgcttaggagttactagcggctatgtagaagtctggagtgggtcccaaggatcactatttgtaaaaaaaaaagatcccacagagttctgatgcaggtgatccatgggctgccccttggaaaatacttcctagaccctctgggttgatagtagcagaagagaagacagaaaagcaggaacaacctaagaaaactgacatagatggatctctagggcatgagtgattagtctgcctatctgccccaaattcctaggattttcttacatgtattcctaggattttcttcttttttcagtttactttctttcactgactgaaataaccaccactctgaaattcattcactgacttaatagcctcttttaaaaatgcaaataacttgtataagaatgaagaagatattaattattgaacttttagtaggagctgaagaaatgtgaagtttggaggttaaggtgtagataggtgtattttttggagtctgccaactttagattttagaggaatcctgggtagggtaccatagtcctggactttggaagaagagcatgaggatcctggaagcttggagaagagaacagtaagaggagaggatgcagaaaggtgattggaaggtgccaaagagaaactgtttaaaatttggatgcattttgagtttagcattttcacattccatttttgcttcctctgccttctaaccctttcttccatatcaacacccagtaagtatctgccctgaacacttagtttaccaaaatgtatttgtaggagtcttatatgtctgttatttctgtttgcatttaaatgtttttggataccagttgaggaatgaagagtttagtcttaataaagaattttaggtcatagctagcagccaaatctggtacttttgggtgcagcagaggcactgtctttctagtaaccctaaaatcatacat

SEQ ID NO: 62790 - DNA, 1404 bp, Homo sapiens
agacctgtcaatttagtttttttttaagagatgagccccacaaattcatttttaattgttttgtcagtgaaaaagcagaggtatctgagaaactacaaattgaaaagatgaaaaaaaaggataacatgtaaagttctactgattagctatgtgaactgctcatcacttatgcctaattataatgtgtcataaaagctatacatgaagatgatcaaaatgcatactttgaaaaaatttgatttcatctgtaaagacgtgtaagtcagatgacgtttaaggtgttataactggttccacagatgagtctattgctttatatttatactttctatgtgtagtctgcatggctgttcagttgttttgttttaaaaaagaaagaaatgtttaaggaagaagaaaatgttttctacctccagtattccttgtacaaagcctaactaaaataaaatctcactcaggaaacaagaagacaaaagaaaacattgaagaaaacacgcaaatttattgttgatggtgtagaagtgagtgtaacaacatcaaagatagttacagatagtgattccaaaactgaagaattgcggtttcttaggtgagtagagaaacaacgtaattaaaactggtttgtgacttcttttcagtctctgaaaagtcagaagaatagagaaacaagggtaaattattggctaatttttttttattcttttactaccgttccactcgaaagaaaatttttaaagctttaaaaaaaaacgtatttcagaagtgtaatttttgctgtcttctctatcattaccattaaattttatcagacgtcaggaacttcgggaattaagatttcttcagaaagaagagcaaagagcccaacaacagctcaatagcaaactacagcaacaacgagaacaaattttccggcgctttgagcaggaaatgatggtaaagtctgattgttataccattttatatcattttgtgttaataatgacatttactgcattaaaaacagacaaacaaaaaaggttgtagaacttgttctctgattgccagatttctctagctttgtgatttatttctggcatttttacccttttggtgttctggatgccttttattgatttattcttttttcttgaaaggattttctatcccagtctaccttaagctggtttatggtgtgatgggttgttttttctctcatgaaaacttatgaagccagtaaacaaagttcctagatttgcctattgctgggtaatttttcagtgctctaattcgatctttcagatttggaatccaagattttaagccagtttagagcaattgccttcaaacctagctgagcagtaggactcctcaggggctttttaaaaatgtgctttattctctggcttctacagttaagcctccaca

SEQ ID NO: 62791 - DNA, 1057 bp, Homo sapiens
gaggccgaagcaggaggattgcttgagcgcagaagtttaagaccagcctaggcaacatagtgatagccctatctctccaaataaataaataaataaataaataaataaaaagataagttggtcatggtggcatgcactgtagtcccagctacttgggaggctgaagcaggaggatagtttgagcccaggaggccgaggctgcagtgaactgtgattgtgcaactgcactccagcctgggtgacagagtgagaccctgtctctaataaataaaatagaaaaaaaatttccatgttagaaaaaaagaactcatttttttgagaattttcataacatattttagtgcatttgactttttcagtattgtgaaggttatagtacattactaaatttaaatactagttatgttctcttaggaaacatctttactataaggtattaatatgggtgatggaaaagttatcatcttgagctatattgttttacagagtaaaaagcgacaatatgaccaggaaattgagaatctagaaaaacagcagaaacagactatcgaacgcctggaacaagagcacacaaatcgcttgcgagatgaagccaaacgcatcaaaggagaacaagagaaagagttgtccaaatttcagaatatgctgaagaaccgaaagaaggaggtaagtgtaaactactgtttttaattactaaagctttttttttaaaaaaattgttttaagactatctaaggatttaggaatactaataatacttgagagttaaatagcacctattcattctttcattcggtcttctcaacagtcatatagagttgtcataaggtcaatcattattcccattttactgccaagaaaactggagtaagagaggttttagtgacctgtttaagttcacctcaagagaggttttaatgacctgttcacagactacccctaaatatccagctaaaccttgaatcaggtcttcaaattgagtttaatccatcttaaggtctaccattgtccttaatgcaacacatttaagtccttatataaaagtattttttagaaa

SEQ ID NO: 62792 - DNA, 1040 bp, Homo sapiens
tgattgtgatcaattttattagggttggaacaaacagaaacctcagccaaactaataaatgcattttcacttttgttacacatctcaaatacccagattcattgactttaacatttaaattgagaagaaaattgaatgtcatactgctgaatcttaaggatttgctttaaaaagggtagagtcaaacattaataaatacagtgattttatgatttctttagataaagatgaatgaaatggtatgtgattttatttgatgtggcttccatttctaaaaatcactattttattactatttctgatgttttatgtagaattgctgtatatactgtgaggtatgacattactggggctacatgttaattttctctcaagtagtttttgagatattctttatctcagtgaaatttaaaaaattttacagataaatatatggtttaatcctaaatataaaagtctcagttattgtttttgtttgggggtaggagagtttcagccacgaacatgtttgagatcgtgatatgcatattttaaataattacattatgtatttttttttccttattgctaaacttcttgcatttggggagtctcttccttttaatggtgatttggtttcatgagggattactgatgggaaattttaaatacacgatgttaaatcaaaatcagtctctttcacggaccatcaatagcatgtggtgatttggaatctggtttcttttggtgcttctacttgtaaacacatgattgtttttcatagttggattacagatctattgttagatggaatatacttctagtattttgaaatgattaaaagaaggagctctaaaatgtacttcattctgtattttatctgctataataaatcatagcttactaaacttacttttaagagtgcttatattaccaatttttaagttgacaggcttagcttaacttgtcagcaaaggggaatattctaatcctattcaagatcatcagatacattcatttttaccacaccgtgtataaaatggtgtgtttatgaaaaaact

SEQ ID NO: 62793 - DNA, 1006 bp, Homo sapiens
tccatttatttctcctttgtgtattctaagacttgctttccttttttgtttttggcctcattaagtagattttatttagcattatttctttagtatgatcaagccaattatgaaattttgcacttttataaatggcattagctttccttatgttcaatatttccaactatgtcaatagatacgtttataattttatgatctttcaacaaggtcagttgagtttatcacctgtagttcagcatcagtgctgcaagtaattcttcgctggttgtctttggacctttaagaaagagaatgatacatagggttattaagcaactaattaacctttgtgtggtgtaatgtccctttctgcactgagattatgcatgttctcttctttcattctttttcaccagactaacacctatgctaatgcatgttgaaaggaactttttaacaactttaatatttgacttgtagcttatctgctctcataaatgcttgctgtggagaaagtatcatttccccacctcctgcatgcttatacactgtaggttataaatgaagtggagaaagcacccaaagagctgagaaaagagctcatgaaacgcaggaaagaggagcttgcacaaagccagcatgctcaggtaacagcagcagcttaatgctactaaaaccagaaagcaccattttctcacagcttgataaaccatggttgaaagggtaaattttaagtgttattattatatgatgttgacttctccccattcaaaaactcctggaatcttctttatttaatactaaattcctactaatggtgacatttaagttgctaatatgaagttaagtggaatgtttggaaagttgactccagatgaaataaacaagtatatgaatgtataatccactgttatctgattttaatcttgatgggagcttatagttttaagtagtaatgccaatgtttgttagaaaacttttaggacataaaaatagaggatggtatataagctttgtgcttaca

SEQ ID NO: 62794 - DNA, 3114 bp, Homo sapiens
tgggtagtggtagagccaggattctcatccagataagtttgggtacatgtttcacacactgattcgctgcaccatgctgcctctcatatttaagctacctacttgtgctgcaacttaaactctcgtcagcttgactcagtggttcttggccatgtcttgttaccaagtgaagaggaagtccttgctggccacacatgtacttttggttaatttggatttcaaaccagattagaataatatggtttttgccttataaaggaatatagatttttattaattccaaaaggccatgtatcaaattctaaagtcaaaactgagaattaatgttgaatgaattaggtaatactatgttttaataagactttgttggtgatttttcatataattttggtaacaggccagtattttctgagtagagctgaaagtaatcataaattccttcagtaaatctaatgaggaatttagtaatctaacaaatattaaaagtatttctatctactgctttaagcgaaggtacaaaagctttataactttacagtctatttcaaactttttttgagaattcataagtaatggtcatacagtcatggagctagaacatatttgatcatttaagtccagtggttttcaaactatactaacaggaattttgactttgaaagaagcaactatgggagtccctaagacggcaagaactctgggctgtgagcccctgcttctgcttcaactcaagcaacaccacttttgctgtggtttataaactgggatttttgggggtgaattttaaaaaagggggttctactagcttaaaaaacaacagcaacacactagagtttggaaaccactgatctagttcaaatccttcattttacagatgagaaagaggtccatctgttaagtgacttgttccaggcctcaagaaactcaacatttgtataattattcttttcgtttacaaaaagtcattcagatatattctcacctgggaggtgcattctattctgatccacagggtgttgctcagatcatgattcagtcttttcagttgtcatcttgtgcagtcttcaacgcccaaatgcaggacgtaagtcccacgtgcctgtgggaggatggcttctcctgttttacctgccttttcacatgtgccttttcattgttggcttcatttgccaaaatctagatgattgatacatgataatgtttgtaatgacaataatagtgataacctgactttagacttcagtattcttcagagttttcacatttggttctcattgccaccaccctaatatagggatggagtcatataaccattttacagatgaagaaattgaggcacagaagactgtgatctgcctcaagtcacataagagattaacggtagagctggaactagagcacttttaacacggtgttctgtctaccccgccacaaattctaatttgggattttcatgtttctcaagaaaataaaataccctctcaatagtataagctttgcacatgtgagaaattgaatgctgtgattagatttttattttcgtgtgaagtgacattttgattgcatatatgtttatgtagatgttttaattatggatatggtcagaaaagccatgttaaaagtagtgattttcattccgtttaactctattttccatttattcaagtagtcaataatgaatagtgagtttctattctccttattgtagttttaagttaagttggaaattccaagctgtattctttcttgcagtttctatagggaaataactagctcatttaacactgtaatttttgtttgtgacgtctgatatatacaacaggagtagatagaatacagcttgatttcaacccctcctttttcctctcctgaaattagacttgttttttattattggcagctgtttgactttttactgttttctaagagagtaagtaaaacattgatttttaaaaggagagggagaaattatgaattacgatcacttttctgatcattaccatttttagcctttgttttcatttaaaatgatcaaattctatacaaatagcccaatatatcataaccctttcttacagttttctagaccccaaagttatatttttaatgtttatagttatctgattaatatgataaaattgtttatccacatttaaacttgtacttttaaagggcactcattttacaatttatgtgtttactttaaaaaatgatttttggccttaataatttgggttcttttgttgttgtcttttatttgttaatccaagtgattaagttcatctttttttttttaaggtgtgtttgtgtaatctatttgaaatgtgagtgctcttttcatacctgaaagtaatttctaattataaattccatgtgaatgttattgtatttggcttttgaagttagggaatttagtgaatgtgtaataacattaacattttgtttgttttgaggtaatgaaatatattgattagtgtgtaagggaccttttcagataatttttagctttaatataaaaaatcctttatacagtgtccgactacatagtcatccagattctgcttaatttttcaagtctacagctctgtaaggcagctgggttctttgctaactctaattgttaggacttgtatacactggacttatatctgcctatcttcacttttacctgttgatccctatcttacttctggagccacacagtgctagttctgcctgcttcagtatataaacagtcatagctcctctttaccctttaggagttagctgctttaaggaacacttctctagttctttcaggcagtcattgtgaggcatggtttctgaaccctttattcccagctttgagttttctgtggtttacttttgaacttttaaaaatgtgatactaagggaagggacccactactctttatgtggactgagaccaagactgttgatacttgggaccaattgagtggaagctccttgaaggcagaactctctttcattaattttagtaaccttctaagtagtatagtgtccaccatttactaagtgcttaataaaggttttctttgaattgaactcttactgtgtttaatttagacataaatacagtaatatgaacaaaaa

SEQ ID NO: 62795 - DNA, 1050 bp, Homo sapiens
tttgagacagagtctcgctctgtcacctgggctggagtgcagtggcactcagtcatagctcacttaacctcgaactcctgggttcaagggatcctcctacctcagcctcccaagtacattcatgcaccaccacaccctgctaattaaaaaaaaaaattttgtgtgtggagacagggtctcactatgtttcacaggctggtctcaaactcctaggctcaagtgatcctcctatgtcagcctcccaaagtgctgggattacaggtgtcagccaccagacctagcctaacttcttacaagttattttgtgcctagtattttgctggtcactgcaacaagggagagggtaattataggaaacaacaataacaaaatgacatatttgaatatgcatgtgggtactgactattgtttctgcgtcactggattctatttaaaactttcataggaaacagagcaaatgcagcgttacaatcaaagacttattgaggaattgaaaaacagacagactcaagaaagagcaagactgcccaagattcagcgcagtgaagccaagactcgaatggccatgtttaagaagagtttgagaattaactcaacagccacaccagatcaggaccgtgataaaattaaacaggtaaatatgcaagttagtctcttctcttttaggtttaaaatttttgaatgaccattagaagttctacaaaattcctttctttctaaacaattagagccaccttaggcttgttgatgttcactttaattctgtgggctgggactatagatacatggcatataccaattagtcttccccaggatggtggtcacagagagcaaagcccttcctcctataccccataccagctcctgagctagactggtcctaagaccagccctgggaatgagatgactcggacaacttttcaagtcaagatatatggcctcactgtgatacttctgtagtcatggtcacacacacaaattaactcagatcactaagcagataggaggatcaaggttttaatcagaagttcctgctcttctctgaagctg

SEQ ID NO: 62796 - DNA, 1095 bp, Homo sapiens
ctatatatttgcttaatttactatagtagaacagatcctaatagattggcctaatgggccaatagatcttttacaggaatagatctattaggccaaccctttagtaccagatcccacattctgtactcacgggtaaaatgtatgcaggctgccttctgaagtgtcagttttatgagcaaatcttcttagaaaggaaaaacaaaagctcaagctagttctttttaagttctttttatatggtatgtaatagttctagcttctaaacttgtaaaaatgaagctatgattcatttcctaattcatggcccttggtttttatagaggaaaacttgaatctcagtaatagcatgatatttgatgagtaatttattattatggaagataattgtatttgtgaaaaattgcttagttgatctgaaatttttttaaatcccaactttattttcagaatgaaaaatgccacttgttggttgagcatgagactcagaaactgaaggagttagatgaggaacatagccaagaattaaaggagtggagagagaaattgagacctaggaaaaaggtaattttaaaagctttaattaaaatgatatgtgtgtactcgtccgtctacccagctattggctctttacctactgtgtcaggtacagtgtcaggggcaggaaacatagagatgaaaagacaaagtttttgtccccagaagttttggaatctagtgacaagcagttaggaattggtagggtcattgctctgaaggaggtgagtacaggatacaagggaaaggaacagattttgtaagcagaggaggaggagagcttaaatctgcctgggtaagtcagggagggtcttcaagaggagatgccttgcaagccaagtgagtcttgaagggtgagtaagaacttgctaagcggatgggctgattggagtggaatgggatgatttgagtagggagaagagaatgagtgaaaaggaagcgtacagagaattgtagatcgttctctgacattggagtatgagagggggtgtgtgccagtgtgtagtcattagggaggaagaaaaggaaggaaggaaggaagcgatgacagctgagtctgaa

SEQ ID NO: 62797 - DNA, 1050 bp, Homo sapiens
tagagcatgaattgtaaagtcatacaggtgtgtgttcagatctcagtactgacacttactgattaattttctcacttaccatttctaggcctagttttcctaatttgtaaaatgagagtgatactacctatttggtgttgtttatatagcagttatctagtacctgagctatagtaatggttcagtgaatggttgctgttgctattattgtttcttgtttttattatcagtttgggcagtaagcgcccattttccatctgggtgttatgctcctcctcatttcacctaggccttgtgaccttttttggtcactgtatctcagtagcacctatactgaaccccaaacattctgtatctgctctcctttctttgtttttctttgtaacaattcatcaccaccagacacatttgtttattgtcccctcttgcgagtgagaatataaactccttaaaagcatgccatgatcgcttcatttattgatatgtacccagtttctagaacagttcctggcacattgtacagatgactacatacctgttcagtgttgactaaagagtataaactcagtagagagaaaaccaaactcagcatccttttccttcatctccatctcacctttccccactcactgcaggcccactcactgccagatgttccttcatctccatctcacgtttccgcgctcactgcaggccactcaccatcagatgttcttttctgcattcctgttctcttaactgacatctacgctagaaaccagaattatttttcatttctgtcacaccctacattcaatcaggcgccaattaatttggactctttttcataatgtgtctcctttctttctcactgctatcctggtgcttgtttaaattattcaggaatttcctaatgggccttctaatttctagttccctttcctttcttcccactcgcctgccatcaccggaggatttatcctcaaggacatctcttgacactgtcatactgatgttgagaaatcttcagttccatcagagtaaaatgtaaattaatgcctcagtttgact

SEQ ID NO: 62798 - DNA, 1020 bp, Homo sapiens
gtattatggggataaaaatgattctgatttaagttgtacctttaaacagcttatattatagtctagtgtgaaagaaaatacaggcgcatcgtaactaaaataacaagtaggcaggggtaagtgccatgtgggagaaacacataatagttaataataggtaccatatattagagtgcatagtatgtgtaagtacatcattatcacatttatacttcacatagcaaattatccctatttttacagcagaggaattgaggaattaaatggttctctaatatagggaagttaagtaatggacccaaattgtccatttatgtggctgagctggacttgcacatagggctgtacaaagcttatgatcttaaaaaattgagcaggcgtgtcttcttgaggattatatacaaagaaagtgttttggacaagtagttttatcttggctgtcagcataaattctatatataataccagcacatagcaatttctttttccctttctttttaagacactggaagaagagtttgccaggaaactacaggaacaggaagtattctttaaaatgactggggagtctgaatgccttaacccatcaacacagagccggatttccaaattttatcctattcccagcttgcattccaccggatcataacaaagggaagcattctgtgcgtgggtttggctctttcagtatgtcattctgttctcatcttctgccacagtctctcagatagctcatgaagacaatcacctgcctcaccttctaggtgttttccttttttgttttttttgttttgttttgtttttaagcaaagatgaagggaaaacgaactaagacagacgctaggccatgttggcaaagtagcatcttggtgactaaggtgactttgtatattcatcttaaaaattatgttctttagacactgctacctgaaaactgttggagaaataatgtttaaagttatttaagaaaaactgttacatcactaagtattaataaattcttcttacctgacgtaactt

SEQ ID NO: 62799 - DNA, 1051 bp, Homo sapiens
ctgtgagttatatttataaatatatcttcagaaattaatcttaaaagaggcattagttcagaatacttttttaaaagtttaaattaaatatttaggcacgtcaggaattacttttccttattttgaaatgaggctacttatgtcttggttttattttgttccatgtttaaatcattcactttgatttgagtgggaaaagcctgaagcctttatcatgtggttgctggtgtgtgtaattattaatgaaatgttcactcctagtcccttatgaggcttagaatttcaaccacgtgtcaggtcagacagtattataaactgtactttgctgtctgagacagcacatttgtgaatgatgcttgctgcctgccattttcaacctattctctcttaagagtgctaggtaccaaattgtgaaagtttgttttcagttatattacttttgaggctggtgaaaaatttaaatgtaactttgtgggaacactgattcatatttagaaaatgtaaatgtctgtagcactttcttgcagttaatttgaaaactttggatgctgaaccttgtttgtcagtgatttagatgatttaaaaatgcatgtgtgatttgaattttataattgttttgacaagcataatttacttggacaacttcgtaggtagccttaacttctggccaagtttgttttttatataaatatatatacatatatacatattatgtatggttgtaaattcatacacttatcacatgaatgtgttactgtatacaaaactcttaatgctttattctcaaatgctgggttgaaaaatgttttgaaagccttttaaaatatatatctttataaagtaatattcaggatgatgataaaaattgtttatattgttatgataaaaatgacagtataatgttgcccagtgtatttaatgatttatttgaagagggattgggaaggaacgtcttcataccactttctcctttgaaattttcagtttattgacttttaaaaaatgaatacctcaggcagtagacattttttttctagtatcatttaattga

SEQ ID NO: 62800 - DNA, 1052 bp, Homo sapiens
ttgattaaagaaaatctagaactgaagtgaaagaagagagttccagttctaatagtcttttgattaacaattcttttctgagaaatgatttttataagaaatggggtgattctttaaatgcttttcttaagttgaaggcacaacagttaatggctgtattgttgctattccgttgctgacatgtttttgataaagctttaacattcctgctactaattttggcggagagtgtttgccaggtttcaatgtgggctgcagctttttgtgctccttctctggtttgcagtgtaatgagttcataagctaaattttcagaaagaattttgtttaagattatgcctcttatctacttgagagcaacatgtcttttcaatcatgggattgacacatgaaaaataaagttatttcttaatcaattttgggaagcagtcttttattgagaatctttgaaactggagtgtcctgcctgagaacactttgcagttgttggtcctagttatattgtaaaacttgcagtccccgcaggtcttctgacccttccagagttagtattcctagctgtgtgtagtccacagcatacacgcaaacacacacacactcaaatgtagtttttagtgataacttgctgggggttgtctttcagaatgcaaacccctcctttgggaggtgcttaaaatatttctatcagcctatgtatatatgtgtatgtttttaatttcttttcctcttgggatggatgatttttctcaccaagcatttcacaaatcatatgacctcacttctgcaaaaatagtctcttcgtcattgataacgttcatgcaagattcagtagacgctaggcagcatcactcggcacgtgtccagctggagggaggcatggagtgtcattttctaatctgggagcgttgtgcactattgagctcattcttgacttaaaaaaaaaaaatgaaacaaaagaggctaacatccattgccatccagctgaggacataacctcatatctgcccatcctctttctgagttttgtccagagaaggtagtaagtttggact

SEQ ID NO: 62801 - DNA, 1046 bp, Homo sapiens
ggggtccctgcggcccaggagggcctggggggccaacaatgaagctgcgcacatcaggacctgcagggtgagaagctgcatgagtgggagctcagatctcggtggagagaaagacttgggagttagggagtctctcccagggtgtcaatgcccctgagagaccagaagtgaacttcagggttcttgtacccgagtgggagaattttggtgtggaaggaaaccgggcttaccccaccagtggctctcgtgtggccttcctgtccctttaagtgcctccctgccccacttacagggaaaagcaaggcctgcggggtgcctggtggggcatcaccgtcggggcacctacttgtgaggtagctgatcagctcgctccggaagctgtcgctgttttcagctgcataggttgccagggctcctgagacacccgggggccctcgaggccctgggggaccaggaggtcctggagggcctgggatgaatgacaagccggcagctgggcagaaggaagagaaagaaaggtcggggtagtgctgcggaggaagctgaattcccagcctgtgctcggggcgctgtgggccccacctgaaaggaggggatgaggctgggcctcccgggtgatgggaggagagaaaagcaggaggccagagcctgctgtttcctgacatcatccaggaatggctgttcccgtcaggctctcccactcccaattctgagcctcattcaactcagccctccagtcactgagaggtggagccccaggtcggccctaatcacacaccgggctgcgcctgggaaagccatctctccccacctctgtccctgccacggctgaaggccccttgccagcacatgtggcgctctccagggccctgcacccagcactgtacaggctccaggagcacttagactgcccttgctaaagcccatgggagcccccaaggcccggctgcatcccctgccctccccatcccactccacagtgccctactatgtaagtaagacgagaggtcctccacgctgatgctggaccacacattgcctgggat

SEQ ID NO: 62802 - DNA, 1127 bp, Homo sapiens
ttactgggataaacttctcaacacttttggaaaggtgttgatcttgctgaagtaaaaaggaaataaaacaaatggagcttccagaaattaaagtcattttgtgatgccttctttagatgtggagacagaaagccatctagtggtgtctagcatagaaatggaaggactttatttctggtgatttattgacattaagaatgtttttcttgattcacatttttaatgttttgtgctctttatagcctatgagtgcaacacttagagaaagattaaggaaaacaagattttcatttaattcctcttacaatgtggtgaaacgtcttaaagtagagagtgaagaaaatgatcagaccttttcagagaaaccagcatcttccacagaggaaaactgtttggaatttcaagaaagttttaaacatatagacagtgaatttgaagaaaatacaaatttgaaaaatactttgaagaatctcaatgtctgtgaatctcagtcacttgattctggatcatgcagtgctctccaaaatgagtttgtgagtgagaagcttcctaaacaaagattaaacgctgaaaaagccaaattggtgaagcaggttcaggagaaagaagaccttcttcggaggctaaaactagtcaaaatgtatagatcaaaggtgagaagaatttcaggaccattgcataatttttatttttacataaattacaggaaagtaatttcaaaaatagaatttttttttttaccataataagcaataagccaaatattcagaaacctggcttccaacagctttaattcaactccagatttagagtagaaaaggcccttaaacaccaggtaaaactttttaagaatctcagctctgatttaatatgcagttaaacttttctctctagtttctagcccacagcaatattagaagtattaaatgttagatgcaagtacaatgggaacagaagtgaaagctgacagtgaattagtaaaactaaaaatgggctgtagagtacaataaaaggtatttttagtaatgatcttgtgtctcccccaaataattaatgtgattcagccattttatttgagaaaatatatatatatatatattatattttagatttcaacccatataggt

SEQ ID NO: 62803 - DNA, 1057 bp, Homo sapiens
tagacatagagtcttgctattttgcacagtgtagtcttgaactcctgggctcaagcagtcctcccaccttggcctcctaaggtgctgggatcccaggtgtgagccaccatccccagcctaaaaaaatatttttaacttgaatattgtaattttaaagagcagttttaggttcatagcaacatttagtggaaagcatagtgtcattttttaaaaagtacagttgtaatacagtagatttttccctgtattattgcttcttgacatagttttggccctatttaatgatttgatttttcccttatcataaagatggcccagagcttaagccaacaaaatagccatagaactcaagttgagtgacattgtaaccattctacatatgaccatcctactttttcctagatagaagtcccattcatccctgtgtatgttagcctttaaacctgcacatccactaatttaacaactttaattaagttgaactagcatgactagttattgacatacatgtttttttttctgtttcagaatgatctgtctcagttacagttgttaataaagaagtggagaagctgtagccagctcttgctttatgagttgcagtcagctgtgtctgaagagaacaagaaactaagccttactcaattgatagaccactatgggttagatgataaattactacactataacagaagtgaagaagaatttatagatgtttaattcctgatttttgctccagaatatctttgagaatgacaacttaattaaaagatacttaggcactttttttttttttttgagactgagtttcgctcttgtcatcctggctggagtgtgatggtgcgatcttgactcactgcaacctctgcctctcgggttccagcaattctcctgcctcagcctcccgagtagctgagattacaggcgcccgccaccatgcccggctaatttttgcatttttagtagagactgggtttcaccacgttggccaggctggtctcgaactcctgacctcaggtgatccaccgcctaggcctcccaaaaccattagggctca

SEQ ID NO: 62804 - DNA, 1080 bp, Homo sapiens
ggttagctgaggtgggcggatctcttgagctcaggagttcgaggccagcctggccaacatggcaaaacctactctctacaaaacatacaaaaattagccgggcatggtggttcctgcctgtggtcccaggcacttgagggggctgaggtgggaggatcaattgagcccaggaggtggaggttgcattgagccaagatcataccactgcactgcagcttgggcaacagagggacaccctgtctcaaaaaaaaaaaaaaaaaaaaaaagaaaagaaacactggggactactagagggaggaggcagggagggaggaagggctgaaaaattatggggtactatgctcagtacctgtgtgacggaatcattccgtaccccaaacctcagcatcacacaatatacctaagtaacaaacttgtacatgtactccctgaatctaaaataaaagttgaaattattttaaacaatgtatttttaaagaaatgctgatagctttttaactgttgtatacattttaggattactgattacttttaaagaaacctacagttggttaaagaaaaaaaagcatgcttacccattgcattacagatgtcttttctctctgagacagctaccaactcttctcgtagattgcagcttagggcataatttgctatatctttttgattgctgaactttccaagttttttgagtagtttcttgcagttttccacattctttttgtgcatctgaaatttttgttcccatgacaccccacaaaattaattttgaaaaatgtaatttatcctataaagacattattcttatattttaaatacattatcatcattaagataacatcttaccgccatatctgtagtgcctggcatagtaggcactcgagttatttgttgaaaggtagaatggtatgttaataacaaattttagaaaaaacattttgtatattcttaaactgagagaatattttaaaagcttgagattgctttgtttctaatatatgctacataataaaaactgaccatttttattcagtgatgattaaataaaacctttccaatgccaaggaaagactaccaaca

SEQ ID NO: 62805 - DNA, 1070 bp, Homo sapiens
attctaagccaggagtgtttcaaaatatatctgtgagttatttttcttccaacagtttacatttgcagcctccagttcttcatgacccatttagtagaatcattctactcagagctaaggatttcctgtcaaacccggtggtccttcaattctctgtagcatttaaccatcttaatttctcattcctttggctttcatcaccccaaattaattttgcttccaacatgtcataccactctacctcttttactggattctcttttgcctctaacacttcaatatagccgttcttcaagattttgcccttagctatgtttgtgtttctttccatacctctccctgggtgatgtcctctgtttttctaacttcaacgatcactcctacaaactaatccaagttctgtggattccaagccatgccccatttctatagttttcacctcccagcagctcttcttagtttgccttttttgtacatcccaaatctacttttcaaggtctagtttaaataccaccttctccttcataaaacctttcttgattttccaagcctggagaaattccatctcattacaaaccacctttgaattagcatgacactctacatggcttctggcaaccaatcatatctatgtgatcattttcccatgaagactaggacatgttatctatctttgtatctccctcagtgtctttaactaggactttgttaatgtgggactcaagtggaacaacacttaaatgtttggtgagttgaataaatgaattaatgaatgagaaaataaagtaggcatttgtaataattggtgctttgatgtaataattagtgtacatgaatgtattgatggctaaatacagggaaatattatggcacaaaagccaaatcaatctttttttgttttttttgagatggggttttgctctttttgcccaggtggagtgcaatggtgtgatatccgctcactacaacctccacctcctgggttcaagcaattctcctgcctcaccctcccggagcagctgggattacaggcatgtgccaccacgcccaactaattttttgtatttttt

SEQ ID NO: 62806 - DNA, 1050 bp, Homo sapiens
ctaatctgatcctacctactccattaatattatttccaactatgccctggtatgagttttctgagccagtcatttattttcaccatttcacagacatgcctctagcccattcccttggcacttactgtctctgaatctgccaatgcccagctcaaataccaccccctccagcaagttttccccattgcattgtccctcatctgccttttttcctattctctgactcactttccctgtaaaactgaggccatgaggtttcacttccctcccaactccctttctctcttccctttactcctactataccctccagccttgctcctctctctaatctagcatctatgttagttacatagatctgatgatagagaattcaaaaacaacttataagatttacatcagtaaaagtagcttttattattcattgttacattgtacttttaattacgtcacctgctttaccttgtttttcttttccagaagacagaagaaattttatcagtccagtaaccttggtatatcagaaggagggcgtgctggcttctggaattgtaatgtattctttttttcaaattaattggtttaaagaaaattcacaattcccatttgttgccatttactattatgagccatattttaggatgtcagatctgtcacattattaattaaaatggtttcctctttgggtactattaaaaaggatttattatgaatagcttcaaatctatacaaaatagaggggacgatataatgaactaccatatattactgcaaacaaacacaaatagaatttaaaaatccattgcccttccgcaatgaaaaaatacctaatatctgtaacccaattccatgctcatttctacacttaatgtattagcttatcagacacgaatttggaatcctttgtctaagctgcagcttagactcttgtgaatgcccatttaacttacatgtatcataatgttattgttgatattcgaatcagtattaatagcctccatttacttggtgcttgctttgtgccaggcaccaagctaagtactttacttg

SEQ ID NO: 62807 - DNA, 1050 bp, Homo sapiens
gtctttgtgatttatagtttaaggttagatgtcataaaaaaaactcaggaaacttttcaataatggtgataacggtgaataactctcttccttatgagtcaaatctcaatcagacaccacagaagtgtcactattcagcagcagtttaattttttggagtgggaaaggtggtttgcctttttcttgatccactgggtgaccagattgttacccaactatttattttctaactatctaaggctatgagggcatgaaaggtacaaataataaattaaagtcagtctgtccttaaaaaaaattattatgatgaatgctcaatgttcctatgttttctgcgtctatggggttaagtatggttcctttttgtcagttgttctggtgagtatttctcaggcttttagccgtgattgttttcttaacacaaggttttattctctccctgaagccgaaagatgatctatatcctttgcttcacccgactatgcattgctggactccaacaagtgacttgtacattggctgtgaagagggtcatcttttaatgattaatggagacaccttgcaagtgactgtacttaataagatagaagaggaatcgccattgggtaagaaactgtcctacttcatattcctgtatagccatgggtgttggtttttttggttttccctatttttctctttcttggagacatctttgaatcctccttcttcttaatcctctggctgttactgtgctgttggcattctaccatcactttatatgcatatttcatgtaatcctcagaacaacattatgaggagagacaccttaatctccacgatacagaagagatatgttaggaaacatggcccagtccacgtaaactgtggagctgacacctgaacccaggcaataatacctcagagtccaagttcttggctactgtgctgtatccttttctatacatatgcccattctgcttagtctgctaatcataccctttcctgcccccaccccaacccttttctccaggctgatcatctgttaagcccaaaagccatcttgaaaat

SEQ ID NO: 62808 - DNA, 1047 bp, Homo sapiens
ccataaggttgtaaatttttgtaaggatgttgttgcgggattgtacgaccagtgttacctcccatttaccgtaagatttccacattattttccaaattctgttttgagtttggcagccaccttgccttactccggcttcttggacgatagagctattcagggttacttttggtcataatctgggtgtagaataattaacatagaacattcctgattgtattccctgttcttattttaataaattgtcagtttctctctttgggcaagttctcacattaactgaacaaattgcttcactctagtctcattccttttgtgtaaaaaagggacctctatagtgtctttcaaattgaatattctattacaggcatttttaaatatttttaatgaaatatttaagggaaaaaagtgaaactgtagagtaataattacatatgggagactctgtgatgtcatcctagttgacctagctcacacctttcattttttcctcttcccacaggtgtgtagaccacactccaaaactgaaactgtggatggcagccatgaaggaagatcccacagtctcagccctgcttactagtgagaaagactggcaaggtttcctagagctctacttacagaacagccctgaggcctgtgactatgggctctgaagggggcaggagtcagcaataaagctatgtctgatattttccttcactaatatgaataatagcatgcttttattttaccaaggttcaggttgcatgggatcatcttctctgactgatttgacatcaacagccaaacggtgggggtctccttaacgcccccctacagaaatgaaaatgcatttcctgtctcaggatgctgaaacgactctgagggttctatcatagtccatgctgaaaacccccaaattatcatctttagcaaaatctggacttgaatcttttttttttttttgagacggagtttcactcttgttgaccaggctggagtgcaatggcctgatctcagctcaccgcaacctccgcctcctgagttcaagcgattctcctgcct

SEQ ID NO: 62809 - DNA, 1034 bp, Homo sapiens
agggtgtgcatggaagcaagaactatggaaacctagctccagtctgcaggctctgagcccctagttcctcactccagcggggctccctcactgcacagaacccaccccttctgtgtgggcactgctgaccacacagatgacccagacccaaagagcctggcagaagctctgtggttggagctgggctccgtctccaggtctggttcagggggatcaggaaggctcttttccacctgtggcttcactggccctttgagatttcctatctcaccgttacttcagttacccttgcagggggccagggagtcaagaatataccgtgttcctccagggtttaagccggccatgccttcccgagagcataaccaacttgacaggggtgcccagttaccccacaaactgaaggaaggagatccttcccccatccccaggagtgctctcaaccagcctcagaaagcttgagaagatggaccctttgcccaccagggttaattcctggtggggcagctcggctgtgatcagggcaaccaaacctataggaagccttccagtgtgagctggaattagactgaacatgtgcttgggcctgcctctccctagacgcagttgcggggcactccagggaatgaaccagctcaagtgtgtccctaacagcagcctggagctacccccaatccctcacagcctgaccctcctcattccatcagatgcatttgtagaatcggggcaaatttccttatttatttatggcccatgcctttccccctcttcatcctgatcccgttttgctttgaagagaccccagtaaccaaaaaacagcctccagaagccaaaaccatgcctggatctcccatagcttctcctttgcttccaggagaaagttcactgaaaaaaaaatatcttctggcttcttgtgtgtacagagacaacagaactcggtggggaaacgggaatcttttctgcaccaaagctgcttctaaagcagaaagcagtggggctcttggtgtttcatgctgccttatttatattaaagg

SEQ ID NO: 62810 - DNA, 1012 bp, Homo sapiens
ttttttgcagagaaggctttccattccttttatctcaaatagcccaggccacactcacagaatcttggtagaaggagtctcataagttcattaggttttactccctgcttcatgcccacatttcatctagattgtcacctacccttccctaaacagtccgggtgaggaaagtccataggtacatgtctaatgtttcacagataccaggtcactgagcagcacagctcgtggcttcatgggaagagtataggcttgaaagtcagataggtttggattcagatcctggctctatgatgttggtgagtggcctcacctctgtgcctcagttgccttatctgtaaaatggagataagtgcctgcctcagaggtttgatgtgagaatgatacatgtaaagctttattgtgcaatgcttaagcctcaataaatgggatgcagtggttgtaattcattaaaccctcccatggtgtgtcagggccctgaggcttgtccagttttttcctgaaagaagaattacttctctgctccttctcttactctgtaatcctctgtttatttctacaagaagcttgagcaagaagggaggtgtccacggcaaggcagctgagggtcagaaaacgtgtcagggttcattcctgggccattttctaaacgttggcagtgagtctgcctgcagttacatgaaggccagtccagaccaaacggggctgcaaccgtctctgtctccagggctacgtctggaagggattttgctggaagggattttccaaggcacttacactgttagcactttgtttttctgactgcagtgcccctcccaggaagaaagaatgtagaagttactttatccagagctttccacttcactccaggaatttcaaattcctgctcctgggagtaaaggcagtgaggttcttttcccaatcctaactccattcatgtattcagcaagcattcattatagcaactaccctcttccaaagctgggtactcagaacctaatggaagagctgt

SEQ ID NO: 62811 - DNA, 1003 bp, Homo sapiens
aaactagatgatatagtaggtgtctctgtagaggtttcaggaatcgccttgtccttccacttgaaggcacctgattaaagtttttgttttgtgcaactaggcataacttcaggtgcttttctgatgtccagcatttcggtggctaaagtcattgccctaattcttgtatgcacctagctttttcaggtttataaataaaaattagagtatcattaatctgcagaatccaccgttatggatatgacattgttcatataagtagaatggccttattaaaaaaaaatagtggcttcatttactgagcaaagccccattctaggggtttacacatatttatttctcctcctcacaatggcccttcaaggtgggtgttatcctagttttacaggtgaaagaacagactcagagggacttgccccaaacggacaacaacagagaagagattcgaatttagatttgctctctcccagggccttggactctttctgccacctcaggcgtctgtctggacactgtagcccagaacacatacagatggcataaagaatcccacaaagttttaagtgtcaatactgagaaaacagcaagcagaccaccaactccaggcctgagacttctggtcccttcctgctgtctcactctgatattagcagacctagtgagctttggagactccttctgccaagagattctgtgagtgtggcctgagctatctgagggtgaaaggaaggaaaggctttcccttccagcactgtttgcttttctgtttaataggcacagtaacaaccagttcctgataatattcagagcactttgcagtcctctgctggaagtccctaggaaaaatacaaagccccgcaattatcaaatgactcacttccaggtgcataacacagtgggacactcactgcctgggaagaggggctcagcttggaagcaaccctgggctgctactgctttctctcccttctaggtcatttccctgaagctgatgcaggagtcc

SEQ ID NO: 62812 - DNA, 1087 bp, Homo sapiens
aaccggctgatgaacccaggacaagaaccattatcccagctcacaatcgggtgggctttctgtgtcttttgtatttcctttgtttggtaggttatgttttagttttaaagtacaatgccacacaaaacatatcatatcctctgtttgaaagaagtagcgcattagcaggagtcatgaacagacgcatcagaaccttccctcctctgtcagtattcagctagctgaccttggcattccaggtcatggctctgggcttcaggctctccaccttcaacatgggggtcatggggtgggtacaaggtgctacatggtctctaagatgctttccatctcctttaaagaactgtcacaagttttgttcctactttgtgccaggcaatgctcaggcagctgagtcatacatgggtctgtccatagccctttagttgttgtgagacctgtttcttcttttctggtctcagtggagaagaaaaatttggccaccattacaaacctgatctcccaatgcttatttatttttgcatcttatgctggaaagcatcctttcaagaaggcagcacaaatattatagcccaaacgtgcaggtgctttagcaaaataattaaggctgtggggtctaaagtgagatagaaatgggaatgagtccatgattcactaaaatctaagagaatgaccttctaaatactagtattagggcagtattagtattagtaatcagaaactgaaacctggggaggttaactgtacctcgcagctaagatatggccagggcacaactgttttgtataataggactacagaatagtgaacccgaatacaggagtgatgggaggagggaagggaggcagcacattcaatataataattattacaatgttataatttagtacttaaaatacacattttatttttgtaatatacaatagaaaaaaaatttcttactacaaattctgccaaattcttatgacatctggggattcatggcacatatcagattttgcaaaggaaaggcatttcttatgtttctcagatgcagatatggactcgcaaaactaaggaacccaaaagtagctttgccactgtgggg

SEQ ID NO: 62813 - DNA, 1033 bp, Homo sapiens
aaataacagtggattgacttagaattccattttcagtaattgtgtaagtagaatttaagtcatttcacaattatattcactcatctgcttaagatatggaacgctgtaatttgtcacaaatgcactctacaaggcgagtttaagttttcaaggtactctgcagtgtgagccaagttgacagcaaaaggccctgtaatacttcaccaaatggtccatgattgttatttcatcaggattggatgggagtgtttacagcaaactttcataaaactttgtggcaaaataaaaacaaggaaaaattgagaaacactccttacagtgtgccctggagatatatgtataggtcatagacatcctgtgaaagataaaacaaacattgtaaagagaggagaaaaacctattgtgggcaagaaaacgctggattttagctgtgttattgtggtaagtccaggccaacaattcttggccagttagaagaattagtatacaaatgggtccctgatttctacctgaggtctagatcggtatttctagactgataaaggacagttgttacttttttgtctcccttaaatctaccacagattgatatttttgcaaaatatagtaaatatagattactataaaaatgaaataaaaaatcaaaggcatacaaaatgtaagcctttttattattagatttaataggcataaaattacttgcaaattgctataaagttatataagtgcttattctcaattttagaacttgtctcatcatggacaggtaacaatttgcagactgacacctatctaaagaattatatatagtagcactaatttattgctgataggtcatgattagaatgttaaagatgatggataagcgtaattaaattcttgctatatatgaggtattttactaaattatttatttaattttttcattttaagttctggggtacatgtgtaggatgtactggtttgttacagaggtaaaggtgtgccacggtggtttgctgtacctgtcaacccatcaccttggtattgagcc

SEQ ID NO: 62814 - DNA, 1037 bp, Homo sapiens
ttttataaagatggtttcactgtatccaggcctatttagccaaaaggctggaaaatgtgaagcatgttcaatacagaaggctttgtgagaccagaggaatgcaaatgtgaagcccagtgatgtttgggtggagagtgaatatggtgatgtggtacaactcagtgatggggaggatggcactgagagaagggtggcaggagaagcttaacaagagatccacaaggatgcagggtgaccttcacacgctctagaggctgtggcccctggataaattggccctagacaccagaaaccaaaaccagattcagtctccaaagcaagggtttgaagctattacttatcagccctgctaattaccaaccctgtctgcagcagaactacagtaggagaaactggctcaggtcaaaagaaagaaggaccctggtactcttcttaaaatcaagtcaaaggtagagctgctctattatcccagctttacgcagttttgagaatgaaaatgcaatccaaggttttgttaagggcggaaacaaaacagttccttgggagctaaactacctcacatgacaaatctcaaaatgtctctactttttaaattgtcaatgccacaaacaaaacctgaggtctaacattcacatcagcaatgcctgcagccctccatcactcctggcaactcctgacagttagtgcaggctgataattcctaccgcttacaacacagaaggccaaaggcttgggttttacacatctggaggaaaagcaaaaccctcccattctgtcaactacttcagggagtttctcaattatctaatttccatctgatttaaataataatagtaacagcatgcttccctcagagtttagagatccaaaatttcccaaccttaccttaaatggtttaaatgagaacaaacttccagtttcttttaggtagtttcaactttgccaacattttgctgaaagctgaaaacaacacttctggctactagaatgaaggtgacaggcactgagaaatgtcatgaatctgacgcttctcatca

SEQ ID NO: 62815 - DNA, 1001 bp, Homo sapiens
cagtcttggcttactgcagcctccccagttcaagcagttctctgcctcagcctttccagtagctaggattacaggccaccatgcctggctaatttttgtatttttagtagagacaggatttcaccgtcttggccaggctggtcttgaacttgaacatgatcacagggtggtcctgatctacccgcttcggcctcccaaagtgctgcgattacaggtgtgagccaccgcacctggcctcatttctacattcttttaatctgtaaaaagtggtgctttttgaacttctcctttgactggtcacaacatttgccaggttcccttgttataagtaaaataaaatctttgacccaaatcctttttatgcctgtatgaaaatcatgattttgtttttttttaaattatcacttagcattgtattattattgttgctgctactgtcactaccactgctgctgcaattgcttactgtttctaccatgacgaatattttttgagcaatgtcagtgctcaacttcccatgtagccctaacttaggaagaaaagagcaatttgatgcattagaaaagcaacacttcggataacttttatgaacatgtatctcacccagtgaagtgaaggcaaaattccacagccacgcaggacgtttttttccccataccttcccaacttgtaggataacctgtgggtagcttcactttgataatccatgccagagcatagcagaaaaaaacaaaacaatacaacctgctgaacaaatcccgttacttttcctgcccatccagacagatgtagtacctttttattcaaactcatttctaaggctgttcttctattctctgttaccctgttcttactttttttttttttttgagatggagtctcgctctgtctcccaggctggagtgcggtggtgcgatctcggctcactgctagctctgcctcccaggttcacgccattctcctgcctcagcctcccgagtagctgggactacaggcgcccg

SEQ ID NO: 62816 - DNA, 1034 bp, Homo sapiens
attgctgatggggagagggtgatgtggtgtcactgggagtacagttttctgccctatcataggtgagttctccccttctcccacttctctgcttccctcctcacctgattctttctggcttgcccctagaaaccccaaactttccctcctgtgatgcctggcccagctgacatctgctgagatttttttttccaaacaacaaaccatgatccaggtatattttcaaccaaatccaatgttactcttaagaagaattctggtatcagttattaagataataaaatttccccttatcctgttacacttcagaaatcccgttttcatcatgaggaagtaaatttgagcccagcccctggctgaatttgtaaaacctgaattaaggaggtataatctggaggctagtgcctgatttggaaactagaatggctcagaagtccctgaagctaaattattgtttgccagagccaagcttctgctggtgcaaatggaaacagtttgtcttgtaagtcaactcaaagtgatttctcctctgacaaagtgaagagatgagagaaaaaatgtgtaccctgaactccagaatcctgtttcttctgtgtaatttaaggccagggactaagcacgttttcttaaatgaaacaaatggtgctataaatggtaatagcaaccatgcatcttcactttttgatgtggctctgatgagctcctgttaatgaaacaggacacagcagatgcaaaactgtcagagtagaagatggaaaatgagattccatgtgaaatacagacttcagtgcccagagatctgatcttagagaagacaaatgatgtttgcctatttgtgtgtgtgcatctgtgtgtgtgtatgtatgtttggtggtggcagtggtgtgtgtgtccatatttgccagtttatgtgtgtgtatgttcgtgtgtgtatgtttttagttgttagaagtgctgggcattacctgtttttttccattaaacctgaattacgtaaatctatattttaatgcaggctcttggaaggcatttta

SEQ ID NO: 62817 - DNA, 1045 bp, Homo sapiens
atttgaaagctaaatctctcttgttttttatcatacattttattttgttaatcttttaggtgggagctgctcatgaggaaggttgtaagctagccaaaggcaagagctggggtccatccaagataccttaattattggccagtaaatcctggcttctgtgttagcttggagttctccttttggtgatgtttctgtggcgtgtgtactgacttccacagagctgtcaattttctagggttctagtcagattgattgactcactctgggccttcctggtttgcttctgaagtatctgtggcctcaaatttttatcacccatttttcggaattggggcacaaatttcttctgagggttaattagctgacatcccagcctctagcagcctttctgtgttctggctctttgccttacactggcaagatgtagcaaaaaattgttagcagtgatggttcctagagcaagtggtgactgttcacttctttcctgtcttcttcaggaatcagtactgagatcaggggaagcactaataccaaccctccattatgacaaacaatgtagaatgtggccattttaaatatgtgtagtttgtagtcacttaacaataatggcctaattccagaaagggtctgtattggcacatccatggaactcttccaaagaatggtaaaaatcctatatttagtgaaaggtaccatgtctttcagagtctttctttatgatctcaacaccagtttttttttttttttgagacagagtcttgctctgttgcccaggctggagtgcagtggcgcaatctcagctcactgcaagctccacctcccgggttcatgtcattttcctgactcagcctcccaagtagctgggactacaggcacccaccactgtgcccggctaatttttttgtatttttagtagagacgtggtttcaccacgttagccaggatggtctcgatctcctgacctcgtgatctacctgcattggcctcccaaagtgctgggattacaggcctgagccaccgtgcccagccgatctcaacaccattt

SEQ ID NO: 62818 - DNA, 2030 bp, Homo sapiens
gtgacctgatgttgcccattctctctggatttttctctcaccacactccctaactctctctttttttttttgagacggagtttcactctttcgcccaggctggagtgcaatggctcaacctcggctcactgcaacctctgcctcctgggttcaagtgattctcctgcctcagcctcctgagtagctgggattacaggcgctggccaccacgcctggctaatttttgtatttttagtagagatggggtttcaccaggttgtccgggctggtctcaaactcctgacctcaggtgatctgcccgctttggcctcccaaagtgctgggattacaggtgtgagccaccacgcctggcccatacttcctaactctctgcttcagaccttcaggcttctttcagcccttggtaacttccagattcctttccacggaactttgcacttgccactgcctctaccggggacgtctcctctctctccacttgtcacctcccactcacaattgagatctcagttaaagcttcggtttctcggggaagcactccctgaccttgctgaccagctcagagccccctaccctaacccctcttagaaccacgcatgctgctctgtgttagcacttaacgcatgtataagtcagcatttattttgtgatgatttgactggtggtctgtcttccccactagacttttaactttgtagtgtgagaggccatatttattttttcacagtttcatctctggcacctagcacaatacttggcatgtggtaaccaagtatcataaataattttgtattcattcaaccaatatttgttaagtattcgctaactgactctagtgactattgcacaaagtgagcaaggaaaacaaaacaaaaggttaatggtggaatcactgtagaaaaggaagttgcagagtaactcgatttaaagaggcaaatgaataaaatgtagaagttagtaaaacagttccagtctttgaccaagaaaggctcttggcctgtcccactttcatgcacctactactactaagtccttgtggtttctcaggattacaaactcagtgatgtgccagcgcttcctatgagacatcaaaacagcagtggggagtcgctcagagctctgggaaattcaactgagaatttttatttcatttagcaaatatgtacttagacgtagccttttatggggtaactctaaaatgttaggagcagcaggaacagcctcacctgttcagaagtgattcagccacaggcagaatgtactttgatggctgtatgaaagagttatagcctagatttatttatgtcatctaaggcatatctacagacagcatctttcagaatggaaatcaaattctggagatgaagaactgtttttgaaagaaattgtgtttgtactaacacggtaacttgagagcatcaatttgagcctttgtatccagaatttactgaactgtagaataaatatacgatacatcatatctcttatgcattgcactgtgaatatttcgtggttttaaatatgtgccatgattaggtatgtgctttagtaatcaactgaataagggtttaaatcaatgaaatcaaagtatctcctttcaattcggcatgtttccttctgggaggtttaaaaatatatcacaaagaaaattctattgccaaggctaaagctcttctggtgatatcagaattgagcaatgggatcccaagtcttggtctttagtgctccattttttaaagaagaaaatcccttaaagtgctcatggaagtcttcagcttttccacagatttgtgttgcagttagataatattactccaaaagtgaataaagagtgagagttttagcataaaatggccttgaaatgaaatgaaccaataaacaaataacattcaacaaatattactatatatttatatacttatagtgagctgtttaatatccaatttgagatgccaactaggggctcctggcaccatagagatcaagataagattggttcaaatccctaaagccatgtcctgtgaaagtcc

SEQ ID NO: 62819 - DNA, 1080 bp, Homo sapiens
acctgttcttccccaaggcagcctcagagcaaagtttgatttaattggctgtagcccgagaagcaaaggtaacaggtgctgggtgcttggagcttcctgcctggacctgctttgtcttggcattaagtccaagagacataaactaggcaagatggccccataaggattgaggaccagaataaaactctaatgtgccagagctcagagggaagatgaggagataaaaatgtagataaaaaaaaaaaaatcactcttcctcacttttaaataaatgataaaataaatgttgggtaggaaaatgggcattgtgttgaatttaaagaaggaagctgatctcgtttctttgtcttgctcactgtattccctggtgaagttttatgtataaggtaggaggattcaaggaaggggacagatgtggggcccctgctgtgaacactccagggactgacttgtgggacgcttgttcgccttctggaaagagtccatctgtgcctcctgccagtgagggggctgcccccaccaccccagctctcaccacttctttagcttgagggctgtgcctggcatctggctgcctgacagtaaccatcagttgttcctcatcaggctcattcccggttaggggtgggcaattgtgaaaggaaccaaggttgaactaacaagccatgagggaggtgttgccctcgtgtttcccagcaactgggggtttataccagtaatgatatgaagacaaagtagagtgctttggggcatctttcaagcaccgttggcctctagcaagagacaagatgggggactgggagggctgcgagaggggaggaaggatactgtgcttgctagttcctgcaggtagctggtgcagcagttaagaaattcatagaatcatggattaagaacaacgatgcagatcctggcaaggtggcagcagttgtgccatagtgtttgaatctctccaaataacttcataaaaacacggataaactggggtagcaaaactaaaattcagggatgagctttgcaccaaatatacaggtgtcaagcatctccacaaacccttaataagagcacgtgaagactaac

SEQ ID NO: 62820 - DNA, 1521 bp, Homo sapiens
ggcactatcagtctcatcagcttccagacagctacccccatagacagtgatgagagtggcttgttgtcctcttggtaaaacctgcttcactccagacttcaccttttcccgtatacaaccaaggaggagagttcaccctttttcctgcctcagagcttttgccatcatgtctagtggatcagcccctgcccaggcaccaagtcctgccagcaggtccttcctttcactctcttttttgtctcctgctcttgtggcatgttgagttgagagtctgaaaactaagtttactcccagcgccattctgctgcaccacagtctttaaccaccgcaggttttgggttcatctaggcagctacactcaaaagacacccatgggcttggctgatcctagttttttattcagctttttcagtggatataggatatgtagcccagtgtgttggcaggacagcttcgagtgtctctctcagcaggagttctcacagagtccggggctattcccccacttaccacctcccaggatggctcaggtttaagggaatgaagccacacaggtgggagcaggagctactggcttagagactgctgtctataatagtaaactgttctgggagccttttcaccagaagccatgaagtctggtcctatgtatttccggggaaacagaacacaaggaaaatacttacctgtgagtaaggagaaagggtgttgcacaccttttctctcagcttgtgatcttagcacatgggggcctttgctgttgacctgtgtagccagttgttaaagatgtagtggtgaataccgtgtctgtccttctcttccctgcagtgcgactggctcaacaattaccacctgacctgcagggatgtgattgggaaggaattgcagaaacagggccgccaggaagctctcgagtggctcatcagagagacgcaacccatctccaaacagcattaataaatacctccccggttttgtttttgtaaaatgctctggaggaaggaagaaacgtggcagatccctgacatctttcccctttcctttccttcttccctacctcccctttttactttagactttaagaagaacagaaaatcttcttatcctctttgatattttattgcaaacactcagtcttttatgattttttaattgttgagaacaagccaagaataaaattgctgcaccagaaggagggtccctccaaagttgaacacttggtgaaaggaagatgccccgacttctttggccagtgatggggaatcagtgagtgctccatgatggtcatgttccaggtgctagtacatcattcatgatcaccttaatgctcatgagactatatttatgatcagtgaataaaaatgtcagaactgtgctttgtcttagctgtctctttcttcatggtgctgtcccccggcatgtcgggtgagctgatctccagggctgctggctctgtggcagacatttcctaggtggaagggcccctttgagaagagacccctggcctccccgcacatttgg

SEQ ID NO: 62821 - DNA, 1045 bp, Homo sapiens
tcctccatagctgcagtgaggcgtgtttagcaaatatgagcctatgtgtgtccctacaaaaagccagatggatggtggggcctcttggccactgtacataccagattgttttcttgtgttacatgaaacattaaggaaatggaaagcaaaatctattatcgtatgtcctgttttcacacagacaaggagaaagatagtaccagcccttctcggttactactgtggtcactctggggcagtgaaacccttcacaaagcctggggcacaacagtgcttacttgcccagctcagagggttatgggtcttaactccttcagaccctggactggtaaggccaggtcagatggcagtcctggggacatgagaaaggcctgaagaatcacacagatgttcaaggtcagagcagaaacaagggtcagaaatggggtaggaactgttagcactagacagacaaaacagttcccaaaccaggaagctggaagccaggaggacacaaattccagagcaaggcaggggtcagaagttccaatgaaaagcaaatgactggtgggagccgaaggcagggtaagcacggtgggttactctcggaataagaatattttgttatctgaggcagccaatggcctttgagtgcctctcaaggcaggaacatttcctcactggcgcccacttgggcctcgttcttgacactgtaaaggaaagggtctttgggggttaaggaccttcccttccacaggagctgtggaatgggattctcccagctagaagcctcttctgcctgttccagttcacaggtgggtgatgagaaagtccatccacttcctgcttagctttcctctgtgcttgagcgcctctgcttaaccatccgtgcccttggttcagctaaacattcccactcacaggacccacatgggccttgctgataccgggtgggttatgcagcttgtagatggatatggaaaaggaaactcagcctatcagcacaatgtctggtgtgtctcttcagcaggaagagtccttccagtgtccaggggctcttgtccag

SEQ ID NO: 62822 - DNA, 1108 bp, Homo sapiens
acatctgtccccattctgcaacatgcccctgggttttctttgcaggaatgcttcacatatgtcctcaagggccacatagctgtgagtgcagccgttttcccgactggaaccaaaggtaggtggtgcattctgtcacatggcaggctctttttcttgtttgagaatcaaatatgtctatgtttgagtgaaagaacatgtcgttccttcactgtgaggtccccatcccacttcaggcccagccaggtgctcatggggtgagtctccataacccactgactgagcccagaggcctcagggagccgggttaggattgggcccagtaccccctgtgcaccattctcctgaccacttatggtattggatgacacatgtggatggctcccaggagaggacaaaccagatatgaaggtcacagggcctgagtggaagttggtgcagcctcctgtctgccctttagtactgggccagtgcttcctttcgggattcttaggatttattttactgggaccctgacttcagctatgtactactttgcttgaggcctggtgggtggagcattggactgggcattgacaagacctgggctgccttgcttttgggtagattagacatgtactcatctccctaggcctcagtttcctcatctgtcatgcctgcctgtctgcttgcagtctggttagagtctcatctttgtaattctgaaaccttagggtcgcagagctggcaagggaacgtccatgtctgatacggcctctgtgtgctgtaggtgtctatccccgctcaccagcatcctgaatggatgatcgcctagcttcagactgagctctgatggtttctcaggagctctgattgttagaaagttcttccttgtgctgtgctgaaatctgaaccctccagtaacttacctattggtttctgtttcacgttctggagccacacataataaatttaatctctaaagcgctgtacaaatacaattaagtggctctttatgtctttcaggtcaccttcttgactcctttgcccgttcagctttatgggattcaggcctagattacttgcacgggactggacatggtgttgggtcttttttgaatgtccatgaggg

SEQ ID NO: 62823 - DNA, 1138 bp, Homo sapiens
ggggtttcactgtgttagccaggatggtctcgatctcctgaccttgtgatccgcccgcctcggcctcccaaagtgctgggattacaggcgtgagccaccgtgcctggccgtaaattatttttaaaaatataaattatttttacatgtctcttagtgtgcagataaattttttttctttttttttttcttattttgagatggggtctcatctgttgcacaggctggagagtagtggtgtgatcacagctcactgcagcctcagcctccccaagctcaggtgatcctcccacctcagcctcccgattagttgggactacagcccacctgattttttctgatttttttgtagagataaggttttgccatgttgcccaggctgatctgaaactcctgggctcaagcgatccacctatcttggcctcccaaagtgctaggattataggtgtgagccatcacacctggcttagatatgattttgtgttttattttattctcttagaatcatagtgtgaacattttccatgtacattgaggccttaaaaaaggatccaaatgaaaactgcatctagtggctcttctgatttactaacccagtcctcctatttttaaatgtttgggttgtttttaattttttgctgttatcagtaatcctgcaataatctctccgcatttatcttttttatttctctagaatgattttcttacgatgatttcttaggaggggatgcttttgaatttttaaacttagatatgttgttttgggaggttttaggataaaatactgaagcacaatagttgagtgaaaaattaaatgaatagaaactattggattttagatagctttggtgagagcctttgggagttctcccttgctaaagatgtgtcctgtagattggtcagttgggatgaagcaattgaggaaaaagtgagcttttaatgtacctcctctaatttgtaagaggcacacatgaatttatctcaccagatgatttataagcaattttctcataggttcccaaaggtggtgtgacagagatctcagctgctgacaaagctgaggagtttcgcaggtaaggatccatttggggggacccaggagcctcgtgctgattttcttgctagttgaatgaggctggaa

SEQ ID NO: 62824 - DNA, 1024 bp, Homo sapiens
gacaggaagctccgtctccatggggctcactgacccttacagaggaggcttgcctggcttcccttgtgggagggtctcagtttttctaccctaggtcatctgcctcagaagggagagagtgctcgtctccttcctttttatttgggagcgccagaggtttgtcggcttcaaggccaggcctggcaggtcaccactaggcggatcatttcaactccttgtgggggcagttctcaggatttcaactaatagcttttattcccttctccgggcagtgatgtggaagcctgagaaacagctctggtgccatcacgtggtggacatgagcaattgcagctcagaggtggaaccagacgggagtcaggcttccagcctttctgtgcgattccactgaatccttgcgcagcagctggactccaagctgaagctcttccctcccgctacaagcgaccccttaacatcttaagtcagacaggtgacagggattttgatttcttttctagggctatttaatctccgaggatcagatgtggagcacaatccagtatttttctcctacgcaatcataggactagagacgatcatgtgagtgtttgccctgcatctggaactcccttccagagctcctcagagccctagtgtgccctttctggtcctggcccacccatcactgcctgatatttcactgatgtgcttcttttttcttgcccttttaacattttcccttcttgttttccttagcagtaggtgtttatttatatcctgcctctctttgagcccccaaaatggtttgaaacgcatgaaagtgtctatagttcgggccacccatttgatgtcaagttttctagcagccagtgttaaggggtatatatgctcaattatacaattctgggtccacaatgcaaataaacccagtcattttgaaggtcaaaaataatatgggaaaacccctccaactacgctttgttgaattgtcagtttattttttcaaagcatttcgtgtggccttcttttcattactgttcta

SEQ ID NO: 62825 - DNA, 2219 bp, Homo sapiens
ggagctgacaggaggattttgccctactctgccccagtgggatatttgaagaagcaggagctttgtttgtttccactgttgccacctacttgccacttagtttggctttggttattttcgcaaagctcgtttgggtggctttttgggtgctgctgaaaagactgagttttttttatccactcagctgctaactgccactcgaacgtatttgatattggaaatagagcatagaggtttctaggttccatttcccttcttatgtcagcatttgtagatttaccttcctaggcctttgtcctccatcttgtaccttctgctttagaggctttggggtgtgggtgtgtttccttggcctgtgcgatagtgatgggtaagcagcatgttctctgaaccattgtgtggatttatgaagcagtgagggggcagagagagaggcctggaggtggggctgcaggggagggcgtcttgctgtagaaacagaggtagatgggggatggctgtggaatgtaggcagattgcccagaggggtcctgggaagaaagcgtgacagcctagattctgggccaagttttaaacagcattcccgaactgatcttcagtgcagccctgggtgtgggggcagccccagcctgctttcttgtgtgacatcctcaccagaggggtattgcggaatggggaggatgggtccagtgagtggcccagggtcagctaaatattttccatcagcgtggtttgaagtttttttcactagagcagaagctctgacttgttgcttataggagaggggagagcaaatgttgctgttcagtacacatttgggtgcctactatctgcaggatgctgtgcgaggtgctgagtgaataagacagatgcccaccctgctcacaggtggctgttccctgagttatgaatgctgccctggtagggtggttgtggtggcaatggggtgagctcctctagcaccacgatttcatcttgcagagcaacagagaggccttggcagtgtctgaaagggcaagtgtgatttggaagtggtaatcacagtgagtcagactacagggaattcctaggtcttagcactgaaaggcaagtcttgcagcccccaggaacatcaagtggtgggtgctgttcccctgacccctgagactgggtgagttccctttgctgggtagtgtgttgatataggtccctgtgtgtcccctgttgcatcagtatttacagtagtgtgttaattgctggtttaattatctgtcttcccttctatattgtaagccccatgaagacagggactgggtctggctcagatctgtaaccacagtgaccagcagagtgcctggcacgtatctatgcctggcagatctagatgttacacaggcatttgtgggatgcgtaaatgaatgaattttactggtgaggcaatcaaggctcacgacagtcaagtggcttggacacttcttgtatagggcttgaatccaggcctcctgcctgtttaagtagcgtgctcctgtaagaaatggtgctgattaaagatgtttagggtaggttctttcactgggttcctactgctttctgggaccagggctggagttaaagcacatttgtttcttgcaggcatctcctggaaggacaaggttgcagaccttcggttgaaaatggctgagaggaacgtcatgtggtttgtggtcactgccttggatgagattgcgtgtgagtgctctggtttcgctgtttgggcatgttacccgatctctcctttgggtctctgggtatctgtgtgttcatgccattcaactttctgagtggccagggaataagaagaagactacgtcaccaaatgggtataggagatgccaactaggatgaaggagaaagaattacagggagctggggaggggagtgaggcttgtccagagcagtattacagctgggtgatgcccacctctggccagtccctcaggaccatggcacctctgaggaagggcatttcctacaaatattttatgtctgtcagcctctgtaggtgtagaagtgggctcataggagaggccttctttctttacacttgtcctgtggtttcctaaggtctttatagtgagaatgttctgggagcatttctacctcagaaaactaggaactaaaagttcctccccaagccctttgatgtaatagtagtttctcagtctttggaccttaacccaccttcatgcagttgttcagca

SEQ ID NO: 62826 - DNA, 1107 bp, Homo sapiens
ggaaaggtgaaacagctcccctggggtgtctggtggagcagaggagtggctgtaattgctgagcaggaaccatccctccctgtgtcttgttgattatacgagaccactttggccataggtctacagttctccattctctgttcttgactcatactgtgcaagtggagtcctttttgtgcagggaccagtgccaggtagcttgggtctcaggactgttctttcagagcttgacacacagcttgttttcagtagtgtggtcttctcttgcccagaggtttctttggagtcaaggacccatctgccccactaggagctgatgcctcttactgctcttgcctgtctactgtcattttgtgcagcttctgagcagttgttagaaacctttcttcttcttttttttttctcccctgcttcaggcacagccatcatcacagaagagcatgcagccatgtggactgacgggcgctactttctccaggctgccaagcaaatggacagcaactggacacttatgaagatgggtgggtacaggcatggctagcccaaacttagttggcctgatctgggcagggatcctagaggtcctcaggactcctggatcttaatccttttatgcagtcatggacccttttgagaatccaaggaaaactgagaaaaaaaaaaatggcatgcctatacatacgtaccaatgtgcattcaattttggaggacgctggttcaggatacttattttactgaggggaaactgagggctagagaggacagttgatttgctgcagatcacattgctgtgcatttcactcctgtactgggggccttctactatttgctgcctcatgattcagagtgagataaaggcaaggagtcattggcaacagaagccagaaagctttcccctgaggctctctctgaggatcttggatttgcttctggaagcttagctctggagaagagcagcattcaggacaagcgaacaggtctggaacttgcttgggctagtcgcttcacttgagtgctttagtttcctcatctgtaaaatgggttaatcacagtaagtaacatataaagtggtgagaattaaagcattactatgtggaaagcatatag

SEQ ID NO: 62827 - DNA, 1151 bp, Homo sapiens
atacagaggcaaggggattatcagctgagaagaccttggttttggacatgacattttattttgctgaagcctcctggattggatgaagcgtttccgctcactctgtagcaggaagggacagggtctgcatgggagagattggtgatgctacctcagaggaggacccaaacaggaagtttggaaacaagtcagtatctacagaaacttaagttagggaattgttggtgcttaacacagaaattcagccttacttttcagaaaaataacagatgcctaaatgtcagtggcaaggaggggagaaggctattattggtttgatttttgagtaagatctcagtgaagaaagagcagtttttatctgtttctcctgatgtgctttggttctcctaatgaggaaatagaggctaaagggaacagctctctctgcccttaattaattcaatcttctgcagtgtgtgctaatctgttgttttcagctagactgttggcttcttgagggcgggggccaaggattccccagtcttcatagtccccgctgagcctagcacaaggctaagcaggcagaacagtctgctcatgactgatcgaggcccactttgttgtcatctttgttttccagagtgagtatattgctccatgtgactgtcggcgggcttttgtctctggattcgatggctctgcgggtgagtcactactttttctctgttcttgctgcacctttgttcgcctcctaaaaataactgaaccgagtttcagcctgtgatatagaagcaaaaagaaaatgcaaaccagatgctccacattgactctctgcagaaaggtgtgggttcccagtctttccctgctccccaaggtcacctttcagtaaccctttttattcctctctgtatctttgcttcaaagttttaacaatttttatttttaaaaagtttttgaactttttattgaatataacatacatataaaagttctatcaattaaactgaatatacctgtgttactagcaccccaaataagaaatgagactttaatatagtttcagaacctcctctcttagcttattggtcccagataattctcccaagtgcttggcttttggtttctgttttcactcttggcttaaataacaaaggttaactctaagctgcatt

SEQ ID NO: 62828 - DNA, 1097 bp, Homo sapiens
ccacactctagctagggtaacagaaggcgatcctgtctccaaaagaaaaaaaaaaaaaaaaagacaaatatctagagtatgtgtgtgctatacagagacttaaaagtggccaggtggctattatagctgggtagtacaggtaggcctctctgtagaggtgatatttgatctcaaatgtaatgatgagaaggacctagccataccatgatcagaaatacttttataggcacaaggaagcacatgtgccaaggccttgaggcaggaatgagctcaggatatgcaaagagcagaaaggaggtgggtgtgtctggagcatggtgaatgggagcagagctgcaagaggactggcaaagtcagatcagctggtaccttgactgggccagagtttggattttatcttaaatataataggaagccattggagggttttaaggaggttgctaacatgatcttagatatttggaaaagctcactctgagtgtatgtgcagagtggattgtaggggcggtagtccaggtagagatgatggaggcttggactgagtgctgctattagaaatggagagaagtgggtggttttgagaaaaagccagcagctgtgcttctttgtgcctttttcctagcatgctacagctttggtttattttaggccctatgctgtgttctaaggagaccgcccctgggcgttgccagcttcatgcctgggagaaggagagtgacagccctgggcccagtgcttgtctggcttctgcatagcctgtcagtgtggaggtgaggctgtggccagccttgcttagcaatgtctttctggaatgttgaccacttaggtcatgtctggacattcttaccccagaccttgtctccatcccaaactaaacatgtccatttgctgttaattccacctccctttggaggaactctttccttgcctttgctgatggagaagtctaggtaaaccctgcggatcttccatctctcccaagcttgcccagaaaggggtggggcatccctagagtactatgtccctgaatggaagagtccagccgggctcagacctgcactgcattctctgccagtctttgccagtatcttcaccct

SEQ ID NO: 62829 - DNA, 1032 bp, Homo sapiens
ggagaacagtggcctggttaagaccatccatgaattacccctgactggtcatggttgtccttgaccaccagaatcaggattttagagtgacatgatcagagggagcagtgtttagtatgggttggagaaaggagactctgggaattgagaaacctgttaggccttgcaggatctcagagttggggtaaagagggcctggacttgggtactggggttaggagcggagaggaggggtaggatttggagaagtagtacaacctggattaaatgtggaccttgcaggcaggtggtagaggggattgggaaggtttgaagcctgggagtgtttgtggtgccatcaacagaaggaaatgggttccttgttttagttcctgtggagaagagccacatagttggggcgactctgttaagtgggactctggatccttgctgtgattgtgagaacaagaaggaagggctggcttcatgtgtgacctgccatagtagcctcctcagtaatagagaggctgctgttccctgtggctcttgttcctaattgtttcatttcagggtagattctgggttgatggagtttctcctacggctggggaggggagggtgttggagaagtgaaggggaatcttgaattctgtcctttgtgtactttccaaaacacaaatatacacacccacacgctgttccctgcaagagagaaaacgtacctcaaatgcataattacgcaaggacttggcactgcagtggtctgcttctctctgtcctctgcaactctaagggtttcttctttttaaactcagagcaagggttgtggtattagggttgttgtattaatgagcttgggccctgggggacttttatagcaaggaatcgtctgttctctctggtaatctggatactttcatgtaccatcctagtcgtatattgggattcgtgggcaccacttgcctcaaagcaggagaatccttggttggagtcagagctgtgccagcactgccttttagaaatcttgattcctcatcctcctcatccgtagac

SEQ ID NO: 62830 - DNA, 2823 bp, Homo sapiens
gtgaggaagtaggctggccactgtgatttgagcctgagttatggtatgagtcgtaggtagcagaggagctgggcactcccccatttaagaagggcagaccattgccttgtcttcaaggaattttgttttttcttttctttgggcccctctgatgagctcttccttgtttcctgtcagtcctaggcctcagcctttggatgtgggcttcatgtcacctggattctctgctggattcaccagtggcatttttaattttctgcccttcaagcattggacagttgccctaggctgatttgattgcagtcaccctgttagtgttgagcagatggtggttcccgcaactggagcacatgatgattatgtagcagttggtttgggcagttctgtaagtcccctggcacagttgtctgaaattggggccctcctccgaaagggttctcacaggtcgtcatggagcctcagctgaagactcctaatagctctactatttgtgaatctttacctccaggggaggcctcagtgtacagaaagattcgacctgctaatgttacttgaattaagagttgaaggtttctggttaagggtgtgttggaagctttgtagtgtttgtatttcaatttcagttttcttttgcctggagttaggatattatctgtgtgtttactagtaggagacaccgacatcttatagctgagtcaagtttatcttgatgttcttggtcctgggtgctgttcctttgccagctttttttgtttgtttggtcatcataaagctgatttttggacaccctgactgatacttaaaaatgttctatctttgacagtaggtgtggcctattacacccgaagcaattccttctgggagtggcagtgaggccatctaagccacaggggatgttccaggctttccctcagctctttatctcctactaatgatcctgcaatatcagaattagatggcttttccctccatgaggaaactgaggctctaatctgagacagatgtgttttgtagcaacatcctgaaaatacaaaatgtatcaagcttgcttggtgttagctgttgctcttattgcagaagtcactgtttagacttcacagacttacatttttgcactcttgctgtccttccatcttcatcacccctctccactctttcttttataatcttaactgtcatttctattgctgtagcttagctgtctgtcttacatacgtggagaaattgtgttttgtttgtttgcatgttttctgactgctgctcagggctaggtctggggcaaatgcagagggcaggtagttagcatataggtaagcgtatgagctctagagcctctctgggttcagatgccagatttgctacttactagttgcttgacatcaggcaagttacatgaaattctgaagtgtcaattaaactttctgggtctcagtttctgcattcgcaaaaaggagattgtgacagtgtggtatgtaccgcatgggctattgttaggatgaaatgggttcatactgtagatgtgaatgcttgaagcacttgaatgcttgctgcttgaatgcttgatgtcacttgaaaagtctcgtcatattagctgccgctattgttgttattactgttgtggagatgaatgagattccctttgaagagattaaataataggtaagccacagtcataaatgagaacacaaaaagaaactggtgaatgtcatgggaaaggacctcattagcactgtctaagtagaatctgtgagatacacatgtaatattcaatgttctcatagacacattaaagtaaaagagcagtgaaattaattttaacaatatattaatccaacatatccaaaatattattttagcacatcatcattataaaaattattaagaagatactttacattcctttttatgctgtggtttcaaatatgggaagtttttacatttacaaaacttcgcaatttgaatgtgaaattttcattggaaatatttgatctgtgtttagatttcataagactgacagttgaaaaggtggactcacgtacccaagttgttctaaacatacttagaagttttccagtaactgaatcttgaatatcagtttttaaatttgtatttcaatttattaaagtgaaataaaattaagtattctgtttctcagtcacaatagccacatttcaagtgcttagacacatgtggctggtggcaactgtaatgtaagtttacttaaagtgtgaactgaattcaaaggtgacagagtattttaagctggcaggatcagggaagtcttcatggagaaagtaggatttaaattggaacgtgaacaggtagaatttggatgcatggaaagagggagagaagtacaagaaataccatggaaatctttttttaaattatactttaagttctagggtacatgagcacaacgtgcaggtttgttaacatatgtatacatgtgccatgttggtgtgctgcacccattaactcatcatttacattaggtatatctcctaatgctatccctcccccctccccccaccccatgacaggccccagtgtgtgatgttccattgttcagttgccacctgtgagtgagaacatgcggtgtttggttttctgtccttgcgatagtttgctcagaatgatggtttccagcttcatccatgtccctacaaaggacataaactcatccttttttatggctgcatagaattccatggtgtatatgtgccacattttctgaatccagtctatcactgatggacatttgggttggttccaagtctttgctattgtgaatagtgccgcaataaacatatgtgtgcatgt

SEQ ID NO: 62831 - DNA, 1073 bp, Homo sapiens
aaatagagggatggggtggaggaggaggaaagaggttctaggtaaaagtattagtggcagcaaaggcaaagaaacagggaagcttcggatgctcttcagaaacagtgggacaggtttccctggcaagagaccagggaagtaaaaagcagtggtgggaaataaagctgttgttacaggattcttcagttgcaggtaatagaaactgccttgagataccttgagcaataaaaatgctttataaggattcaagggcagagccaccatattggcacaactccagattgtgaatggtgctctcagagttatgtgtgtcagggcctcagatagggtgtcttgtggaacatgagggcaggaatgtagcaggccctcaagaagaactgggacgggagggttttcaggtcttgctgcatatcagtttctctttttcagccaactggttgggtcatataaacctgacaacacctacatttatatcttttcctctcttactttcaagataccagattgaactagaaccttaatcccccaaattcaaagtccaggatgagaacttgattggtatatgtagcaacttggttctgcatggtcctggttactctgtgtgtgtgcacgtgtgcgtgtctgtgtctgtgtgtgtgtctgtgtgatgtcagacatgagtaatgggggtccaccagtccaccatgatggagggggtggtagataagggtatttctgtaagttgagcaaagatcacaaaacatgtccattctggctggctgacttcctgcctctccccagaggtcctggtctacatggttgcgacaaggtcaggcctgtattaacctgggaacaactcaacctcaagattggatctctgcctggagacatggatttcctggccttaggagcaaatgaagggcttgaaatgaataagcaaagggatcggatatttgaggcaacagtatgaagtttaggatactttgatgtttagaacagtgttccccaaactgtgtgtgttcttcagtattcctgttgtgtcttgtaagatgctctacaaaaaatatatttgttagttgagaaaatagtgaaat

SEQ ID NO: 62832 - DNA, 1023 bp, Homo sapiens
atgtaattcttttctaggtctgtgtaatttttaatgagtacacagtatactgttgtacgtattatagtttatttaactgaccatacacttctcctgcttttttctactataaacaaagataaacacctaaatttctgtgtacttatctcctattcttgaataaagtcctaggagtgaaagaggtaaccagtcaagttggaaatggttagtagctgaacttttctggccacaaatggctatttggaggtagtatttaagaactgtgaacattagtgtttctggcagctttggtcttggtctggtggtggagtgatcaatttgaagacctaactgggagtggggcagaacgtagaaggcacttctctctgtggcccacttcgaactggacgttgaattgctgggggcaggctggttttgaaatttgctctcctgttgttgcagacggcagaatgcctccaaaggtgacttcagagctgcttcggcagctgagacaagccatgaggaactctgagtatgtgaccgaaccgatccaggcctacatcatcccatcgggagatgctcatcaggtactgcatggcaatgggcctctcctttcttttcagtcttttttccccagccctaatgtgtttgtaggattctaattgtcaacccacaaccagggccacaaccaagcccttccagggcttgctatggggatctgtgtccaataggtctcactgaatgcttgtggattggccctagcttccttgattccagtgacttagccatctttcaatgaagaattagtgggcaaattaagggacagaagttctggaactttctgttgctggcatactccacatctcctctgccacactgtgttcctagcagaattgtttgccctgtctctcttttgcccaatccaggagagttggagaggcagagacctcatgtgatagggttgatgggcggtagggtaaaaggattctaggatccactgtgaagtcattgagtcagcaagtgtttgagtgcttacactgtggt

SEQ ID NO: 62833 - DNA, 1949 bp, Homo sapiens
agtgaaaaatcttgtttgtgataaaggctgaaggtgtgggaacttatttctaaaagcagacctgtatatgcaagacttttaagtgagtcattctctgtaaggcatagtttgaaaatacctggcagtgtatgggctaatgtttcatcgtggactaggcctgttgctcttggcttcctactttgctgcatactttgcttagctcttggctgtttctaacatttctgaaaagtcataggatgtggaatgagcagatgtcataatacagcaccttgcaagagcctatctgtcactgaagattcattactgttcattgagactgaaaagatcatagatccaatgttgtgaatttgatttagccatctttgagtgagcatatgtatatgttaattgtagatacatggatacagagatgacatcatccctgccttccggagaagtggtatacacacctgtttacacaatttatcacattgcatttatggttagttgtgtgtctaactctaataacattaaacatttacatgacatttgttatgtgccaggtactgtttctaagtgccatatgtatagtaactcatttactccttatacaaattatgagggtcattagctacaactttcacttcctccatcttggctgccttttcaaccagtgccacctcaatggctaggacttatataattgcaccaactttgttctctccttagctccagctgctcactcattcaatcactttccatcacctgttttccttgtgggtacagctgcctcaaccaccagggcccactgtattcacttcagtggtagctgcctcactgcctcagccattgcctgttgctatcttcttcaccttcactgttgctgccactgccccttaccacatcctaactattggttatggtattgggacttctttcatcatgtctaatattgatgataaagaagtagctgcattgcacccagaacatgaatgtgatcggcctgaaggatgaggaagtaggaagagggaaagtgttgagtgttgatgggggtaggtagcattgtggaggggagtgtcagtgagactgataaagctgatgattctgtgggggtctgatatgccagtcaccaggggaaacgtgatgatgtgatggtggtagtgatgaagatcagaatgtgggaatgaggaggcaggttgtgatgaccaggaagcagaggatgtttttgaacagatccagtttgtttttgttggtttttagtttgcagttgaagattttgtgctcatgattggttgtgttaacgttattgatgaagttagtgactgataatattgatactacaatcagcactaaacacccagtcagtgccaccaaaatccttacgtcagaatgtacctgaatggaaggcagagtctataaagaaataaatgatcttgaaagaaagtatattagactcttatatttttgcattttaaaactcctgaagccaaggctgtactccagaccagttaagtcagatgtttcccggatagtcctaatgtgcagccagtgttgaagtcctgctcctaaagaaagcttcatttttgcttgactgtttttaagaatgataacttgctcagaaatatggtttgaaaacacaataaatctattctgaagctcctgaaagatatcagagtaaaatttttagatgctggcaagcttgggagatcacaatgggctttattttgaacccccagtggaggtgttgacatataaacttggatcagaccagatacttccgatccctttttctctgataggtgagaaattataggcccagtagattagacgaaaggatagctggatgtggtggtgtgtacctgtagtcccatttacttgggaagctgaggcgggaggatcacttgaacccaggagtccagcctggacaatgtagtaagaccccgtctcccctcagaaaaaaaaagaatgcc

SEQ ID NO: 62834 - DNA, 1030 bp, Homo sapiens
ctggttcctggacgcgtatgcccgcggaactgctgcactcggcctgagggggcggcggccgtcacagttcctggcccgcgggaaggccccgttcttggaggaagttggcccctcttcgtgtccggggaggtgggcgagcctttgccctcgcttctgttacccaggaatctaaacctcaagttacaatctcgacaatactgactcctgcaattcactctactgatctgtcaccgccacaaggatagacggtcgcgggcccctccctacccaaatggtttcagaggctgtgtaagggaatattttggtataatctccaggaaaatccccccagtagcctgccctgggctctccttgggcataggagggtgagacagataatttcccggcctcaagttaaacatgttttagtttattcccctgccataaccaggatgtacttatcagagcctctgacaaagtgggagacggagagaggtgttcagagttcatggaggccacaggccagactccctggccatccccaaggggtcacccacctgctaaccacttgagacatgaatgcactcactttgcagcatggccaggctttcttgctgaacacagaccatggctcctgcttgtgtttgtgagtaggggggtcccaaacctaccttgacctggatttgccgttgccacagcttgttaagggtgagcagaaaaccagacccaccctgtggaagtatgtgggaggggtggagaacttccatctggaaggagcttcctgtaagtgaagtgctggaaatggagtcaggcaagtggataatgatgagttaggctgtaggcctcaggtggtctttagggggccaaggtgatctgtgctagatttatagactcacagccttttaggagcagaagagtcttttctacaccagctggtagagtcttttttacctcaaaggaaagtccagtgaaaggctgagagaggggaagccattttccacaggcgcctcccctactggtagaatttgagtgccattccttgtaaaagtga

SEQ ID NO: 62835 - DNA, 1132 bp, Homo sapiens
taatttccttggcacatgtgctgttgcaattaacctggtagagtgttaaggaatttaacttagccaagaggctttgagggaggattatatgcaagtttggggaaggaattgataagattctggggtatgggactagctacatacacgtgcgtgcaagtttacgttaaattatgtagcattttagatttagcagtattaaatggttgcttttcttggaatggcttctgactacatagtgcagggtacgttcctaattttggctttagaagactcctagtgagagtgtttttaaagattgaaaaaataagagtacagtgcaatttgtcgttttcaagttaaatacttgactgttaaaaatatttgtgtaattaagttatgggaccaacccatttatagggttaagttacttaaccctataaataactggaacattataaatggagcatttgtagaaagtttttatatcgaagtctccattatattgtacttgcattataacttattttcctttgcttaaatggagcagattaactttatggaaggaggaccaggataaaataaaggcagctacatttaactcttcatctttctgaagagttcagtctgtgataacacttaaggtgcccagaagtgctggcatgttggtaatagtttttaaagaagaaacgggtgtatctattttgaatgttaaacataatttgaaggagttcttgagatagttggttatgagacattcaatgtattgctacattttacatatatgatatcaggaaatgtttggtgaacatttgacatagttgatcatatgacacttgggaaatattttgcatgatagaaggatagtattttcgtaatgtaagtttcaagcattgactgaaagggagaaaattacacactttgctgtctcacccctttcttcaatattatgctggcatgaatgtgaattctgcctaattatgtttaaagtgtagatctggcctttgtaaaaccagaatgtcttttgagaccaagagaacataacatcagcaacagcccaactcctacacacaatcctaaaacctagatacagggtggtgcccaacttctgaggttttgaggcttcctgaagtaggcctatcatgtctgagtgctt

SEQ ID NO: 62836 - DNA, 2173 bp, Homo sapiens
acattatcaatgaattagaaattcattgctttaaaaatacttgttttttgaaaaactagagctgcactaattttcatattagaatgtttgattttttttttttttttgagatggagtctcgctctgtcgcccaggctggagtgcagtggcctgatctcggctcactgcaagctccgcctcctgggttcatgccattctcctgcctcagcctcccaagcagctggaactacaagcacccaccaccatgctcggctaattttttatattttagtggagacagggttttaccatgttagcccggatggtctcgatctcctgacctcgtgatccgtccgcctcggcctcccaaagttctgggattacaggtgtgagccactgcgcctggcagaatgtttgattttttttttaagtggacatcaaatttattttcagttaaaaatgctgaaagtaatacatttttacttcatctgtcatagtgaatgttgataatgataaaatcttatttctctaagcactttgccatagctaaataccttagtaaaacatgcgatagacaagggtccggtcactagccacagaaaggctgtcactgttatagcagaatgtaatagggaaggaacattttatgcctcaataagaacagtgtatttgcttgagatagtaataacctctgagaagctgattaattggtaatcacttaagttagatgattttatattgtttgatgtcttataatctaaacgtccctgtgctcttttagagtgtctgccttgaccagtcagcatttcaggagggattgtgactgtcagttaagtgctttgaagagagaacccctgctttgtgtcacacctgaatgtaacaggacatacttcttggggctgtttaatttgggctcaaagggaagagtgccatctactgaatggccagcatcaagttgagcagctcctgttttccttacagaactcagccagttcctggagaaaccaggcccagcttcatttggaggatttgacaggatcttagtaccaagtggaattgttgcctgcttaattttaattatgcttcccagcaggaggcctaaacacatgatgaagaactaattcagtacttgttggaatgcatgggaaaagagaaacctgaagaagttgttgagccttatgttaaaaacagccgagtagtggtgaaattaaattaagtggtaaagaaaattattttaatgagagcagtctttcaatagcaggtctggttggttattgatggctcctgcagacaataatgatgttaaaatctgcttgggcttagaatcagcaaacaaatcatttgcctaactggaggtaagggttttaagaatacttgaatacttcgattgtttttttctcctgccctttttgtctcattttgtaaggcaatgattcctacttgagtgaattcactgtttcaaagtagattttgttgttgttttggtgtatggtagtggtttcctggtttttgtttgttttttctttccctattttccaaaaacttactgtggtagcagccatgggtagaactggaggtagtagaactagttacaggtcagtggaggtttaaggtatctggaataggcttgtcaaagccagacaagaaggaactttgaaaatatgaattgaaaggaagctttgaaattgttgctataaaaatacacttgattgttacatatttatatatattatatgtaattacttaattagtaatcatttttgttagcctttaaaacctgccaaggatcattttaagcacttcacataaattatccaaagtttagtgaagtaacttgcccaagatcgtaccgttaacaaagggcagagccaagatttgaggtcagggctaatacccttaagcactatgctatatactgctgatttatttatgtttatttttgttggtgactgcacagaagagttgaaccaagattagaatgatatttctgccttggctggaaaatactgatgctggggttcttggtttctgttgttgtttttaaggaagtggtaacatgggtaaatacgattgagaattcactagaatcaggacgtatacatgagatgaacttccaaatgttttctatttgattttgtctatgttaacttttgttccttctgctatatttaaaaccacaagaaaagtttactga

SEQ ID NO: 62837 - DNA, 1049 bp, Homo sapiens
tttaatgtatcttataaaaccttgaatttattttaactgctaaggacacttggtcctgaaggaaaccattttctctagggattgaacaactttattttaatcaaaatgtgaaaataaaaatagtgttgttactgccctttaaaaatggaacagtctggctgttcctcagagttaacgtggttaaaaatggtaacggtttacgatccagcacttctcataggtatatacccaagagaattgaaaatgtgttcccacaaaaaaattgtacactagtgaccatagcaacattattcataatagcccaaaaatggaaacaacccatatgcctatcaactgataaatggataaacaaatgcggtatccatgcagtgggatattatgcagtcataaaaaggaatgaattactgatgcattttatattataaatgaaccttgaaaacatgctaagtaaaaaagccagatacacaaggccacatattatatggttccacttacatgaaatgtctagaatagacatttatagagacagaagggagattagtggttgtcaggagctgcagggagggggaaatggggagtggcagcttaatgggtactgggtttccttttgaaaaggaaagatgatgaaaaagttctggagctagatagtggtgatggttgtgcaacattgcgaatatactgaaaaccactgaaatgtacaattattagtaaattttatggtatatgaattatgtctcaagtttttaaaaataccaggaaaaaaaatctgtgcgtgcaaattcagatgtatggaagaataactaaaataacttatgtggaccttatttctaaaacagaactgttttcccagtagaaagttggatgaaacaagaattaccgcactcaacctggtttagcctgctttgcttaaagaggctaggttaagatgcttttcttgtccaggtagaaatcaggaggtggtttgtgatacttgataactcaggggtgagtctaattttttttttaacacttgattttgtcagggatgatctagagaagctgaagaagcc

SEQ ID NO: 62838 - DNA, 1053 bp, Homo sapiens
catttagaacataaggttttagaatatgatttatgagaatgcataaatcagtctaattgacatatgtattacctcaatacttttttttttttgtgataacatttaaagtttcccctcttagcaacttcaaagagatttaatcttattggcagccagttgaacggtatagatcaagcctatgactttctcacctggaaaatcagtcacaaaaaatgtttcagatgccttcaggaagagatacaagaagagtctcctttgctaaatgccaggaatatcaaatcttggacttcagagactggccatataaggaaagagatttttatagacaaagagggttgaagtaaaataatgggatagaataagcatattaagctggataagtgttatgtaatcctaggtcatctcttaatggccatgtccttgacattgttgcattaagaatgagagctcggagaaatagtccatgtgttggcatgctagtctctaagttagaatagatgtgatcacaaatcatgagtgctcttaaagggtggatcctgcattcactcatccacttctgccttcattcaggctcaagcaagtggtggtgactttggaaagataaggagagaaaaggaaggacaaaaaaggaaaaagggagtaaaaccagactggggaagtgggcagcagggatacttgggcaaattcagagtgcatagtatttgtacatgtacatgcatattgtatttataatactaagagctatgtaaactgtaaaatactatttcaggaaagagtatagtatgctagaaagagaatttctgactaggtggtgtggattcagctttctcagctctaccattaccctaagtgtgtaaccttatgaaagtgttagaatctgaaataatcgctattctattaatacttctctggctttccttcctgattaagatcatgctaagtttgaaaacactttgtgcgtgctcatatgctgtatacatgttgttattgtttttatactgttaattatttctcttcatctaaagtattgcctaccagaaactttatcgagag

SEQ ID NO: 62839 - DNA, 1644 bp, Homo sapiens
aagtgctggtttgaaatttacttgggatccatccagctggcagatcagctgtgctaatcagatgggcccgtttctggggaatgggatttcatagagggagcagtgttcttgaagtatagttacttaaaaaccagttaatttttaatttaaaaattctcataagtgctatattaaaatgtatatagtgcaagtattatgtatatagtgcaaatactttgtgcattcttgtaaataataaatagggacaataaagtcattgtgctatactcagctgcctttaatttctattttgaatctctgggaccgtaatttgctagttgcctgcagtgtttattaggattaactcatctgcatttcccactaatgtagatcattagttctaagagatttctcaggataaatagtgccaaatatgtttgggaaactactttctgtaccatctcttaaaggtttatattgtaccttagcatagcaaagactgagaagtacagcaattaagtacagggtttgctttgttttgttaaaactcagtgtgtctcaagtatgtcactagaccacagaaatcagtctctagttccatcccgtggagctcctgtttcttagaacactcttagggaaaacactgcccttaagttatgagttaacaaatctctagagtttatttttttgattacattttggaactactacaattaaaatttgtagttacaaatatctcagcctaggggatataatgcttttgttttaaaaatcagtattcataaggtcattttacatagaaatgttaatttctatggggtatgtctttgaattgatattgacatatatcttgggacattttggtattttgtaaatataattttccttttgtttcaaaaaattacattttttgataaacaagataatttctttagcaagtattttataatttaaaattatattttttcattaataaaataaaatataattattttaaattcaactgtaagataaatgttttagtagcaattaaactagtctgtaattctcatttgagctgaaaggaaaaccaaagatttcaatagtccaagatactgccatgtaatcagttattaaatggggctttgagactctcaacctagacaatcatactctaaagataagcaaattacttacgtataccagtctactgtttatattctctaatctgaatataaagggttttaaacatttctttgctttccatgaattccttaaaaatgacatctgagaatgttttttaaaaaatgttatatctaaatgtggatcttgaatcatccccaggttgtaaaacaggaaagttgtgtcgttttgtgagtaataggaaatactaagtatagacaagcttctaagtgtaagccaatgcatacattaagtaaattaaaccaaaaaagattaaccagccatgtttcaggttttggaacatgtaatgtataaatgtaacctactagaaaaatagttctttgccattaaccctcaaaccaaatcatgagacaattttttcagttgcatttggaagaccatgtttgttagctttggcttaccatttgctgaataaataaaaatggcatgtttaatgctaagtagtatttataaccagaccatcaaacaccaagtggaattctg

SEQ ID NO: 62840 - DNA, 2062 bp, Homo sapiens
ataagccactcagctacttgttgctattacccttaatttcagaaatattacacgtggtacttcttgaacgttaatttgctgagaaataagcatgttttgggatgagtactgagttcagtgttccatatttggcagttgataaaaaaatatgggttgctgagtttcacagcataagttatttggcaatggtattatctcagattcagcttttaatgaatatttacaatattaatatcttatttttccttgatttttttttctaagaaaagcccagattaaaacaaaaatggataaagtataagtgagtaactatggcagctcaattgtctaagaacaaagaggcaggcatcagagtctttgattcctgtcctaactcagcaacttagtaactctgtgtccttgagtaaatcccttaacttgtctaagccacaaaatggatcttagtctatgtattggagctatgatttttaaaagttgttttgagcataaaatgaaatgaaggatgtaaaagtgcattataaacttgaagacactatgctgatagagattacacagctccttctaatcaagactttcttggcatagtttattaaatgacataaagctcattatacaaattttctcaatggaataagacagtaacggtcaaatgaaacataaatccatgctaacgactatgaaatcttttggcctagctaaatgtgcagactatataatccctttggtagcatatgtatgagtttgtgacctgaaggctgttgtattgcaagcagatttttataagtcagcaaagacatctgaaatcacatcacaattccagtgttaatgagataactagctgcatcactgctacccttccttggctcttgggtttagggaaaaccttaatcctcaaactaacataattcacaataggttctgatgatgctcaaatgtatataatctttagttccatgaataaattgcatactagagttactcactttcattttgcatttgcagactttgtgttcttacattgaatgatatgttttctaatcaactgattcctttaatgattaattttaggcttaaacataatatttacaaaagcaggaaagtgcaattgaaaactagcaaagactaagacaattagtatcaaccccattttatattgggaattaaaactgttttgaagatgacagcacagccgaagtaagggttttttctccttatcacaaacagtagtaggcattaatttttagaagtagaaaatacctttccttatgcttgggaaataaatggaattttttacaaaataattacaggacttggagtagaaagtgaaaaattaattttgtggtttagagtattaatttgctctaagagttaataaaaggaaatgggaaatggacaaatcagatttgtctagtcaacactgaatagattcctcaaagtattgaatttgaaacaattggcacacatttaaattctaagatctctatagcgagtaaaacttgaagttactttttatctcaccttcctcaaaagtacccttaaccatgcacctggagcaaaggaaaaaccctttctttttattggtcttctttagctatcacagggactatttgggcagtggctatactaatgggaagatgggattataattaggttagttttcgttctttctagacccatgtctttatttgaaagttctttggattcctgtggtcagtgatacagggaaactctaggttcttaacagtttccaattattttctcaagaattccttaggttgcaaaatattttgatgcctttatggataagagatgggctggggttagtgacccagtgcattttttcatacccccaattctccccatatcaaccctttctctacccgactctgcacttctctaattgggtattatgtgacaactaactcttctctgcattgaatatattatattgttacttatccaaaaatagttgccagtaatttttcctagtagttctggaaaattcctcttccttaaagatgcaggaaaacagttttactgaccaagaggtgttttttcaaag

SEQ ID NO: 62841 - DNA, 1022 bp, Homo sapiens
tgatttagttattttctcctttatctcctgaagattttttttttttttggcttgccatatgcatgctattttgcttttcctttgtactttgggtttttgtggtgtattttttgaggagggagatttcttttgcaaataaaggcagcactctgtctctccttttttcaggaaacacctttttttctgtgtgatgcagtcagtttttgtcatttccactttaacgtgaactaagaagtcatccttttcctgtgaacaggaaatttcccagctgttgataaactgtggagccgcctgtgaaaaagggcaagatctcagaattccttctctcgattctacatgttctttattgctttctacatattgctgatcttttcatttctaatgtgtaccatctgattgacgagatggtgacttcctgtttgagagttagctccattctttgtgtatcatacccacggtgatagtactttgtgaggactgtggcaacagtgctgtgctctcctctgatgtaaagggtaagctgggaaatcaagacattgaaaggagtattaatttgaaaataattctatagcattttcttggggaaaaaatgctcaccacctcctctcttttctaaacacaccatttgaggatatcactatttcctttgtattgagccttttatgtatgttgaactatcatttggaatatgatctgctgatgtacctgggcacctctaatcagcatctaagtatctagctcatgattcttttcagtatcacaaatccattctaaagtggaactgtaggaaggatctgtcatattactgttaaattatcattggttgcaaaagttttcccagtgcctacaacactgtcttccttctttccttgactctcatcttttaaaattatagtttataagtgacatttaatttataaatcacttaaaaattacattagatccattgtgaagtgctctcttttcacctccattaccttgggcctgggttaggtgccttgtctgttagctgacacaggatc

SEQ ID NO: 62842 - DNA, 1049 bp, Homo sapiens
aagctacacttggttgctctgttctgactgtgttaagaacacgggtctaggtgcactgattggtttctggtttagcaagcacaccttgacttttgtattatggtgaaagcaaatgcttgttaactgtatagtgccttttaaaaaaattcctgtaggaagatattaatgcttagaaaaatcagtagatttgattaataaatcatctataaaaaacctgaaatatttttcaactttcatttcctagagtgtagtaaaggcagtaactgttaaacgtgaaatcaaataaagtaatttgcacctggaagaaagcctttctaaaattatttctgtagtttctagccacatgattgaaaaatacaataaatgtatattatgttattacttctcatttgcagtttttataaactttaaagcaacttcagaggtgctaacttgggccttctttcttccctccacctcccctttttatttaaagcatcatatcatttattatattggaccagcaggaatgagtttaaagaggttgagaactgtttcagattaataacttggaaatatcccacaggagtcacagtattgcttatcttggattaagttttaagaatccagtcattgagaattatttctataagctgccatatttaaagttggagtgaggaagaaccttacactgatccacataccccaaaattcgtgtcagtgtactttatggggatcttgtagtttgaaggatggcatggtccacaagataaaaagcttcatcatgacagtcaataagtaatgttctgggtttacatagagtttatatttctttcctcaaggttctcagtttttcattttcatgtataaggtatacatcgcttttctaaaacaccaacaatgctagattatttttgctttgatttgctttgtttttttcatattcctttgaatgatttagttattacttctctttgtttaatattttttaaagggataactatttatcctaactttctctatactggaaaaacaccccctttccttcccccatttacaggattgtgcaa

SEQ ID NO: 62843 - DNA, 1088 bp, Homo sapiens
ttgcttatacttgatgcttttaaggatttgagctcatagggtgtagtataatgtagtgccaccttgaccatgaaatttgtttactgaccttagtattaacctagaacattcttatgcctcttttcatggtgatgtggtgtcagattacaatttgactggctttcaagataattggtcttaattatttctaagtcattggttaatgcagtgtaagaacaagcattgtttaaaaaagaatataaatggcttttgagtttcttttcttagcatgcaagtcagattagagtgaaagcaaaagcacatgacacaaaactgtggttcgctaatagattgtaggcttcctgtagcttaaattatacacaccacagtaaactgttacccagtggcaattttgatttcccttttgtattagttgtaatctgtgatacttttatttaaagtaaagccatgtattaaaagtttattaaaacatatattgtctttttttaatctttttcctcttcaccccatacatatatactcattccttttagaccaagctccagggtaacttgccctgtaacctttcaaataggctcctttctctgaatatatctgtagtatatctgtagtatatctattataataacagagtgtgctacaattgtctctccctctcccctgccccaacccactaaattgctagtattttagggtcagagacaatgtctcgttcatttcttacattttttaccatgatacctgttcacttgtagcatgtaatagtaggggaatgaatagttagtagaataaatgtatttaagaaaaaagtagaaaagaaatatatggtgaattgatttaccaactcagaatttaaatataaatttaaaaaatctaaaatcaaagtaggttatgtgatcagtactgctgtaggttgcagagaataaattgatactctacactttagttatgtttgggagcagtatgtatgattctgtaaactgaaatccctctaatatgtacagaagaaatacatttacagactagttttgtttttgttttcgttacaccttctatcatgccactgagtatatagcaaatctatcaac

SEQ ID NO: 62844 - DNA, 1183 bp, Homo sapiens
ccttgctctaaccacattgagtgtggatatcttgctctttaaaacaaagttcattgttagggcagtattgcaacagaattgccacacaaaaaccagcttaagaaatgtacagcacttcaatttttttgtaagtaatggattgtctattgtaatactgattgctcacagcttaaggggaaacacagataagatagatggttaagctttgtgccagctgctagtaacatgcaatattcttctttgggaggagcctctggctttatcactccactaagttttttttcttttagttcacttgtctgcttttttttttctttctctttcttaaacagtttactgaattgttatttttaacgattttggggatgacactgactgttcaaatgaaggcaaatagtattctcccaaatgtgctagttatttaacttgaaaatgcttgaagcagtgttttgtactgaatttattggacccattaatagcataatctggcaatactgtatttcgagacatcgtgacatgaactttgtgtgtaagagtgggttcattgaattaaaaaaaaggcagcttctaaagagccttttatttctgtcataatgatgctttgtcctgttgctgttgggtatttgtcagaagagttggggcaggctgcagcccaaagttctgttccatgcctcatcagttccgtgcttctgtgttctttctagagtttgtgacgtgaatggtgagttgaactataggagaattattgttgttcattgaggtccatgttcagcaattttttttttcgcaactgggggtctgtctgatcttttttccccctcacacactgagtttctctttgtacctgagttttaaatgcctttggagtgtttaattattcactgactgaagtgggcatgtagagagagagaggctgtgctttgtgttatctatactctctggtgtgtggtcatgtgtacactttgggtagacactcatttggtgcaagcaaactgaataactgcctctgttgaaatcaaatctgaatgttgaaaatggctaatttctgtaaggcttgcaggggtgacattgtgtcatcctttttgaactaagacttcttagcatctccttgcttcagcttcctcctttttacttggtagtaattggatttagctgacttctaacttcataaggatgtaagaat

SEQ ID NO: 62845 - DNA, 1292 bp, Homo sapiens
ctaaatagacactatagaactaagctgtgagtctagtctttgtgagcctcagaaaaacaagagtcctacttcaagctggaatttaaaatatagcaagcaatttcagtggaccttttaggcatgtgtgagtgggcacaaaaagctgagtcatgaagtttactcttcctggtgaattaccatgaaagcttgaaagaaaagcactctcattattttaaaatagtaaaaattgttttagattcttatggaaataacaccaacaaaatgttttgtatattaatcatgagcacatacctagaaaccctttaaaatcaagaaattgtaacatgaggcattacctggctttttagagataaaagttaacagtttatttaatgtacagtagcacctgaaatgtgcttaaaattgtgcttaccaaaatctttagttaaataaatttctaagtgcagttcatgttttaaatttttcttatatgaacagatcatatggtctacagtcttatgtatctcattctaatgtagataaagtgaaaagtattgggtaagataaattgagggacttgggacacgtcactctctctctcaggatctgttctacctttctccatatgagaaatgaggtagaataagatttgataatatcttacatccttttaagctctaacatctttaaattctaaggatagtattcctcttttggctctcattaggtaatatcagggaaaacaactcctcttgttggaagagttcttatttatatttacaaagcaatgttgtttctctacaatcctaacaaacgtatgaaagttattctttgttgttttaaagtctgcatttctgttgtttttgataaactttcctccataaattaaatagttaattagtttaatgttttctctttttcctgaatttgatattagacttctcaggtctttttccagattttctcactttttattgagagttcagtttccagcagtggactggagacttgggttgttgtctctttatcttctcattatttccagtttcttcatgttagaaataattttaattcccccccattttttgatatgaattagtttggtgtcataaaatatcaatgtatacatacatttttagaattcttgttcatatcaactaggcctacttttcaaagctaaatcctgttttatcaggaaagagcctagacctctttaaatgcacccacaagcttgcatggcagttaatgtccaacacagttcaaaatgaaataatggggcatatataatctggagaccaggatctagagaactt

SEQ ID NO: 62846 - DNA, 1034 bp, Homo sapiens
ttgagtcaatttagtggtccgtaccttgcatgtagttcctttttgtttggaactcaaagttgtgtggaatgttccatgacattttattataccatttatctgcctgctcattgagcttcttcatctgcccatctcctaatactctttgtctttatgcatcttatttatatgttttgctaagtactgatggcaaagatactaagtgtctttatggtgtgtgggtgtgtgtgtgtatgtatgaaaaatatatagttatgtgaatgtggtctttccctgtatctcaaaatcttattgtactatattcgcctatttttgaacagtggttgaccacaggtaactgaaactgcagttaaggaggggaactactgtattgataaaatgttagtgagtactttttaatatttaatgatgtacttaaaacttgtccctttggtatttaggtcaaataaaccaccattatacaactaccccacttgtacatctatttttctgtgcatgctaggcaaacggaccattaagtctattacaagcactagaattttagttcttcttaatagcctgttcctctcagtggatggtatttataaaatacatccataaacatggcgtgatgggtctgttttctttcttatatttcattgaaggagtaaattttgattatggggcaatctggatgacatggtaatgctaataaacatcattattatgattttataatatgatatttgagcaatgtaactttagaaaagtcactcaacaccactgagtatagtttcctctcatctgtaaaaagtgatcattgaatctagtctgaaatatttcaagagaagctcatataaaatcaatagccttttaggaataagagcctagtgctttgtgggataattaagtttttctccatttgtgcacttagtgccatctgtattactcagtgctgctcaatgccaggttcatttgggttttttctcccatttttcttcatttttatctatttctgcttcaagttttcagatctgtcaatttccatgtcagtt

SEQ ID NO: 62847 - DNA, 1033 bp, Homo sapiens
atcaatgaaaatgacccagaatacattagggagaggaacatgtctcctgatctacgacaagacttcaacatgatggagcagaggaaacgagttactcagatcctgcaaagtcctgtgagttgaattagaaggctgtaatttttctccctctttggaaatgttagtataataaggtagaagttttctcaaactaccctcaggttaaaagaggggtggaggaggagtggtgaccagttgcttccagtctttcaaaggagaaatggacatctaatttgtgtatttgatttgcagagccttaatgacaacctagtattgtgtttggtggtttaaattttgtgtgttttctgggtatagcactttattaaaggaggatacccaattcagactgaatatgtaaagaaaagaaaggcatgactcaagtcataggaaccaataaataagttaggtatatcccatgcacgtattttcttcttcctttgggtaccttgacgctcagagtggcatgagaagacttaaggtttttgaggaagtctgtgatttggcagcctagtattacatatgtctactgcaagcacacgtgactacacactaaattaactaaattaaaagtagattataggccaggctcagtggctcacagtgtaatcccagcactttgggaagccgaggcaggaggctcacttgagcacaggagtttgaaaccagcctaggcagcatagtgaatccttgtctctacaaaaaaatttaaaaattaactgggtgtggtggtgtgcacatgtagtcccatctactcctgggaggctgaggcaggaggatcacttgagcccagaaggtcaagactgctgtgagccgtgatcatgccactgcattccagcctgggcaacagagtgagaccttacctaaaaaaaaaaaaaaaaaaattcaactcaagtggaaaaatcctgtctgcacagcaatagtcagactttgtgaatcatattcaaatgatctgttttcttacaaaatcttagtggaaatgtattaatacatgatg

SEQ ID NO: 62848 - DNA, 1091 bp, Homo sapiens
cagggatttctcattcaagtaatagactgataagactgttttctagctaataacctatgaaatggatatttgctacgttaactgggtcaagattgagatcagattcttcactttctttatatctaggaaaatgaaaagaaactcttaacttagtattaattgagcactgaactacacactcagggagaatctagaaatgtgaaagacacagtttcagtcctcagataatatggtatagtagagcaggaaaatagttaaacaatcacagtcatacactaggtaccctaagtatagtatagggaaagttcacagtgaagtgtagaagagaagaaatacagagatccctcctaacttggatgattaggtgacttcaaggagaaggtagcatttgtaatgtgttgaataaaggaaagaattcattaggaagaagaacagtggaagtcaatacttccattggatgaagtagatcgagcagggctagagaagtgcaagttgtgatcagagaatgctgcaagaacctcataggctaaagcatgaggtagtaatggcagataaagcaaaaaaaattacatagcagcagactatggaaattttgcagtaccaagccattttgacctaagttaggagtcagtacattttctcatcattgcccattttgtttacacaattttttataaaagtgtttgttttggatctgggttcacattttactttgcctaccacttactagctatgtgacattacgaagctcgtttaacttgagcttcagtttccttgttggtaaaatggggaaaatacctcacacggttgtgacaattaaataaaataacataagagcatgcagtacagcacgcagcacgtagtcggcaactgttttttggaaattatatatttattgctaatttgaagtacattatgcttttgtggcaacacttgaagattttaattccttagactgtattttggttttttaaggtcttgaatctgttaccctgatggcattctggtttattcatcttcacaaaatttaacaactaccactacctcctcttctatgctcttctgtatctgagaaagaagacatagtttat

SEQ ID NO: 62849 - DNA, 1049 bp, Homo sapiens
ttagccgggcatggtggtacacgcctgtagtcctagctactctggtggctgaggcaggagaatcgcttgaacctgggaggcagaggttgcagtgagctgagatcgcaccactgcactgcagcctgggcgacagagagagactccgtctcaaaaaaaaaaaaacagaaaaagaaaaaaaacaatctgaatgctactattttatagtaaaatcttctagaaagtgagattcccagatgagtaaagaattactagccaaagtagatgtagataaattaatggatttaaacatttcataattatgtggctttttaactctcttaattttaaataattacagattcataagtatgtagttttgatgctttgtaaaatctctatttctggttatctcaaggtgccaacattgtcacttcaaaatttaaaactaactgctaaaattttgatgtgactttccttaagcacacggacactctagtaggttgagttttctggctttggaacccttagtaagtagattgttaggattatatttaagacttgttaatgaaaacatcttaaacaattgactactagctccctttttctctggaataagagattcttcctagcaggagttctctatcttgagtctttggataagcttcaggcagtccatgagccacctgaaaaatacatgctttattgtttaaggtacacatttagggagggaagggttcagggtcaggaacaagcctgtcacccaaaaagagggtaaggagcctctgctttagagcatccacaacatacagttgaaattttcatgcaaagcaaaataagccaatagttaatgaatttttgtccatgttagatatcatttaggaagaactaatgacatcttgatcatccaaggaacagttttttgtgcctttgtcacaaaagggagttgtcctgattcattaatgtaattatactaaattttctaaatggtgttattgaatttgtttattctaacataaagttgggagctttctctgtttttcatattttgtaaaatatccctctttaatctc

SEQ ID NO: 62850 - DNA, 1023 bp, Homo sapiens
gccttattacattgctaaaacatttcagttttgtaaagtagagcaaaaatgttaagtatgtaaaataacccccaaaaaaccctcccctttcgtagaaaaccatgagctgttttccaagagcttcatctccatggaagtgcctgtcatggtagtaaatggcaaggatgatatgcatgatgttgaagatgagcttgctaagcgagtgagtaggttaagcacaagtacaaccatagaaaacatcgagattactattaagtctccagagaaaatcgaagaagtcctgtcacctgaaggctccccttcaaaatcgccatccaagaaaaagaagaaattccgcactccttcttttctgaaaaagaacaaaaaaaaggagaaagttgaggcctaaataaagtctttttataattattattataacaatgtgacattgcacatctaaataccacatttaagttgatcattaatatgcaatggtagatcagattgggggatgtagcaaactggactttaagaactggaaagaggttttacaaaagaaaaactttcagattcatctctcattttatatgtccagaaatggctttgaattttaagcaattactagttttaattagctctgccctcatgaagtattattataattcaccataaacagctatctgtctgaattacttcaggccttctccataatatctgttagaaagaaattgccagtgagcaagtgagaatttttatttctcaatacctgcttcacttgataatcatattataattttttatcatgattattgactatatttttggagtcccattgtttcagtgggcattaacagaatgctttaaaaacttctaagacaagaatctatagcattagtatacactggcacataattttttaaaaagttttaagaaaagattcatttggaattttattcacagtataaaatttcctcacctgaagtaactttgtttgccaaaaaagttgttttaataaactataatttttgaaaacttcctttttta

SEQ ID NO: 62851 - DNA, 1223 bp, Homo sapiens
tcttaaactgtatttttctcttagtattgctaatgagtaaagaaaagtctcataaggtagccaaatgaaaaagaatgaaagggaaagtgaaaaattaaggggacaaaagatgggatgtgaaaagaagaattctagtttgatggtgactcatattcacgataggatacaaagtgtgatttgttggaaacatgtcccaaatttctaaaattctgcttctctgccaaaagcaatgtctttcttggttgatatttgagttttaaaagggtcaaatctttctaattttttgtatctttagagggcagcactagaagaaatcagcaggtctaatcccaccagtaagaaaactaccacttcttgatttttacagatttaaaaaaatcttttcagtgacctttctttttaatgtaaatacaaatttaaacctaggcttaatataggcgtttcccctttcacccaagtgatgtcacagttcgatgcaaaatcaatgatccagaatgatcgtgggtaaaaataactcaaagtgtttcttaagggtgagttggcatgcaaaaaattacattgattacagtgtgttttggagctggctctgtttgtgtgcatatgataatgcagagttgagccagagcctggaaatgtcattctagatctcactaactactggaatcagtgttttaatctcttggtggaaactttcagttgcttaactctctattggaagatttttttaatgttctacatcatttatgttgtattacaatgtatgtagaaatagtaacctgtgaactatgcttttccataactttttaaaaatatatatatctaaatgaatgcaatgtgcataaatattttttaaacataacagtgaactattgcaccttttgctaatgcctctatttacttgctttggcataaagaatgagccaatgaacctctgtgtcctgtggaaaaatgtataaatgttatctgatattgctcttagatgtaatgctaattaatgttaaatcacaaataaacagtattttaaatatacggacttgtatcatgaggtttccattcacaggtggttacttagcctattcatggtctgttgagttttatacttcagtgaaacttggtaagttattgatgcttctgaataaagaatgtcctgataaatatattttcaaattagttgaaaattatatatatatacaaaacctgtcttttttcagcttatgttagag

SEQ ID NO: 62852 - DNA, 1025 bp, Homo sapiens
gggattttgataaaaacagtcttgtttgtggccactagagggagtaatagatctaacaatccaatgtttccattccttgcactgaacttccctatttagtctgtaggcaccatgtttgttgtgaaatacccagaacttgaaagagaaggcatttcctttgttgtttattctcctcagtagatcgttctcgactttgtttccttagcaggtctcattacagatatcacccacagtggagaacacatagaaagttgtggtgtgctctcagaggctgtgataggatatgacacctcagagttttcatacctgtgagtgacaagacaatgccttcttcaataattgacttttttttttcttttttactaaggagctaaccgataatattttttgttgatgccttctgtgtaccaaacgttaggctaaatgcttttcatatatgacttcatttggccttcccagtatcccaacaaagtagatgatattattcccattttgtagataatgaaactaaggcttgtagaagatgaaaagtaggtggtaggattccacccatagagattcagacttctataattactcatgccatctgtgtgccagaccctgtgtggctgcagtacatttccatggtttttaggaagaggcagttatcttagtttggactgtaagtcaagccacggtgaacttgtattttgatataagtagatttgggatcaaacattgacttttgatttggaagacttttttccctaacaaatcacctcaagaatgaagaaattggtggatacctgagaagcaggaatgacctgtggtgatagcaacctttaggataaagaaccagctcctaaatcttacaccatgacacctggaagacaagttatcatacttttgcttaagatgcagcagagacttgagaagaagccctttttctttttcttttcttcttgatttccattattggaaacagaagaaacattctaaggaaaatgtttttaaaaccagaaaaggtagcttaatctagttacaga

SEQ ID NO: 62853 - DNA, 1065 bp, Homo sapiens
aaggagttgtttggcctataattatgtctttatgtacacagaggctggttaattactgagaaggcgatggatgcgttgccatcgaaacctacccaccttgcattgggatgggatgctcttccctctgtcatggaccattttggctctcttgggttccttagccttgctcttcctgcctcatctattccccactcaccagccttttctgcctaaatccgtcactcgtccaccctctagtttctccttggaccttgccaaaatgtcctagtcagattctttcttactctttgccctgtgatctttgtactcagacttggcaaacaccatgaagagctcttctgtcccctcccttgtcacttgagtcctaattctcagagctttcccagccacagttttcctgggtacctttcccttttggaaaggaatcatctggcagtgagatgaggaactggctcacagctccttctccttgggggcctgactcttgctttcatttgttagaaaggagtggccctgtagaaggcccaagaatagagggttaggaactgtaagacacaagcagaatggtaggaacaaggagaactgtgagactctgcctctcccatggcctaaaagtgctgaccaggcctcctctaaccactgcccataccacccaccaccacccacacactcaccagtgggtatagacatgggcaggggataagtagcctccgccctacagtggagttcactgggtgtcacctgctcctggaggcattatctcagctctcctggactctgccctcctttctcccagaactgtgagtctggcagcctcttcctggttcagcagactcctgggcttctcctgtccaacacccagtacttagagggcttattagactatgagctcatcaagggcaggaagcacaccttgctcctcctagcatccccaggccctggcacctagcacatgcatggcataatactggggcttaggtcacgagtcaaaggcatgaatgcccttccctgcctggtcagagcctcggtgccggccgttcatggcttctcgttccagtggtgaga

SEQ ID NO: 62854 - DNA, 1074 bp, Homo sapiens
ttccgaagatttggagacgagtcagaaatactgatctccaactcccttgggtggtgagaccaatccctgcaagaagatgatagttcagacctgaagagctgagactgcatcctgtgaacagctgtgaccctgagaaacaaataagaaagaaggagactagagtgacttctgctgaaatcgagggctttgatggcaactaatgttcaagctggtcacgtttttgcatggcagcaatcttatgaattcatacattcttcaaatgtacattgaatgtctactatgtgcagatgcttctttctgaaaactctgtaggttgaagtatggtgggggtggagtagggtatttgtctttagtggagttatgtgaagagcattcttaaatcaggccctatttcctctgcatcccaaattatgttccccagattcaacttattttttccagttttaaatatgatctctgctgactggtaaataccagaagaaggcttttttgaggatattgttacggctttcagaatcacggagctcccaaggactgtgtgtcctggaaaggagatccagggaaaggggacagggccttggaagttagagaagttgaattgagccattcctggtttgggagcaaaaaggaggctccattagctaccaaggcaaaacagtagctgctcatccatctctcatctctgatggaaacagtctcccactgacacatccagaaatggggattcatctggagatgcctgggcaaaagtctagaggtgaaactgaggaaaatgaagagggtgctggcgtgcagcagcagcaactaattgtatggcataatatcaataatggctacaatttattgaacactgactatattccaagtatggggctatgcattcattatctcccctgatcttcacaacaaccttctgatggatgcaattttattaccctcttttacggaggagggaactgaggagcagggatgccaggtaatttgcccaaaggatatatagctagtaagtcgcggagctgagttttgaacttaggcctctgattccagagcctgtgctcttaaccatatacacat

SEQ ID NO: 62855 - DNA, 1072 bp, Homo sapiens
tcgagagagaaaatgtctttctaagacttgttcgaagtacacaaaaatattgggcttaaagagactctttagaacagagagagttgaaagtaaaggggaatttttgaggcaagcgaagtcaatgaggtgaatggtaactggtcacaaaatttttgttctaaagcatctgaaatctcaagttcttgggagagaaggattttggaaaggggggataaactctttggtttagaggaggtatcaaaacaccttccagctggtggggtgtcacaggattgatgtccaggcgagggacattaattttctaaccaaaaagagtggaaacattttacctcttttcctgctttcaaaaacctgttactgcaaagacctcggatttgtgggtcaatggatttgggtactatattcttcttaccgtatctttttttcttgctttcttcagagtgtgaacatggctacgcctcttcattcccgtccatgccgagcccccgactgcagcattcaaagcccccacggaggttgagccgggcacagaaacacagcagcgggagcagcaacaccagcactgccaacaggtagcaagctgggaacgcttagaagagggaactggagggaaggagcacatttctcctgtaatcccaagtctgaaggagcagcacttgatgggttcctttaccactaccctggggatttggcccttttaaaataatgaagtctagaaatcataacctggttttgcatggaaggaaaggaatataatctggaaagacaaccaaagaagttcttgctgggattattaagatggctatgccaagttgagagacttggcagcatgtgtccatgcatgcagccacctgctaaaagtaatcgtgggctggctttcaatattctggccaagttttggacagtccaagaagattaaaaaaaaaatcagaaataggtctggcagggtataaagcagaatcaagggtttgttaaaggaataaaaatatttaggtagaattggtagtgagcggatgtggttatttgtttaaggagaaaagggaagaccatgctgtgaaagttttgcctcttt

SEQ ID NO: 62856 - DNA, 1032 bp, Homo sapiens
ggaggcggaggttgcagtgagctgagattgcatcactgcattccagcctgggcaacagagtgataatccaccccccccccctcaaaaaagtaactttataaatttatgctgaaagtagttaactcctaatattataaattcctattcccctttcccccattccttaaaatcttattttcaaagaagtaaaaaggagagaaaataaatgatataatgtgatattacaaatatgttccttgcaaataccagtaattttatcatttgggatccttctgatagttggaagtggcacctataatatataattaaaataaatgcttgattttactgtggtcttggtcacagccttctggcacacttccaaaaatcaacattgctaagatgttactgctgttagagaatgtggctgcaatagctatctggctttttggggagcatcagataagttcaaattccagcttctttactatttggtaccacaggtgaaaaatctcaaggtctgtcatccttaaaactctactaaataagccatgactgcagtgtaacactgatttcttcctaaatatctcttcagtcggccttctttcctgttaccttcattactatcctcctaatctcagctaccatcatctcttacttggacgactgcagtaacttcctacctggtgtccctgcaactacagtttttttttttgtctggttctgttgcccaggctggagtgcagtggcgcgatctcagctcgctgcaagctctgccttctgggttcacgccattctcctgcctcagcctcccgagtagctaggactacaggtgcctgccaccatgcccggctaattttttgtatttttagtagagacagggtttcactgtgttagccaggatggtctcaatctcctgacctcatgaaccgcccggcttggcctcccaaagtgctgggattacaggtgtgacccaccgcacttggccagttcttatgaattacattggccagccttcttttgattccttcagtacgcgttttcttctacctc

SEQ ID NO: 62857 - DNA, 1876 bp, Homo sapiens
cattattggaagggcttggttggacacatacctcagagaagcaaaggggttgtttctgaatgtgctagtgtgtgatacatttaattacttgtttatcgcctgtactgtttggattactttctctgtgtacgtataattaggcatctctctctgtaatatactcctaaaccttgtactgtcctcacagctgactaaatgataaagtagcttcagtcacctatcttttctttcagtttctctttccatcattatggttgttgtttgcttatttccaggctaattcaaagtgttattgagaacctatcaatttgttgtcccatgtagtatagttaataacgttttgggtaacataattttagtcttttaaaaaagtaataaaaatactaacagtagctagcatctattaaatacttattaggagctagatgtttttacatctgtttctctaattctcacagtaacctggccaaggcatgtgtaatactccagttttacagatgaggaaactgtaaaccagcgaggttaaataatttgtctcaaagttacacagcctgtgtgagtgacagagttaatatttagattcatgactttctttctctaacaccatgggtctttatgatctttttgtgttgtttgctggttttgctttggacttcacaactcgacttgtttgcttatcttatcccttccacttggaatggcatctccttaacagtttcagactctactagtagcaaatgtacctattatttaagccttagaccaaatgccacccttctaaagcttttcttacagtgccatttggaagtaaactgtctcttttgagctcccacaatactttgtacctttctttgtatatttattttgccttcagttataattattgctaaacatatcttaatttacccaatggagactgtctttgatttcctgtagtgtaagacagccttgaacactgaaggtactcagtatttgttgacttgacattacaggtaaaaacccatcaaaataggagtaaacactattgatgcttttgtaaaaaaaattggaagaacatggcaacatggtaatgatttgtatatttatgatcatttttgcttctcgttatttgaaaatcttgctaaattttgctggtggtataattaaatgtggcatgcatttcctggtttggtgaaaaggttcataatcttagctatcattttctttaaaaaaagataataaagaaatgtctgtttggcaggcaggaagaacctgctgttttaattttgttcacagcagtgggtcagattatgatcttttggagctagctttgataatagactcaatataatattggaattcaacaattggttattgttgagtatattatctcttgcactgatggctgtcagtgggattgccagactgtttagaataagtttatggctgtttagaataagtttatggcaaatagtctgctcttctctaaatacaatgtttccatttattacttactgtagtattttatatgtgcattgtctttttgttttgtttttagttttcttctcagagagaggcaattaaaccaaaacttgctcaccagtgggggtggggaatcttactattgattatttattcaaattttgaattatattttttcttctaaacgtctttaaataggccttttccctcttctaacttgactgattaacatttaattcaaacaaagattaacaaaattttaaacacttttatggtgataaaggcacactgtggttataatttattgaattttgagctccgagtctctgttaaactaggatttctgactgtgcttttatagtttcttctatctgaattcttgaaacatcataagactctatttacttccctcaaa

SEQ ID NO: 62858 - DNA, 1267 bp, Homo sapiens
gtacaatttggctcctctctctgactcttcttcctcaccctttgcactttagatgacataacaaggaaatacgttaaaactttagatttagggtttgtttcaaacttccttgattacttgatcttgaaaatttaggatttgttttgaacttcctttgattgtcaatctagggtgacttgcaagtaatgggtaattatgctaatgtctcttaacagtcttatataccccaagatgatgttttctgatttgaaatttttggtggaaatggagttcatttgaagtggtatagttcctgacactgacagaggacttataaagataattacaaatcaactgacaagcacttattagacattgtgtgctaggtaatgggaataggataaaagaagtagaagtcctgagccctgctctggaggattatagtctaggtagaagacaaaagatattataagctcctataagcagcatataattaagtgctaagttgtatgtgtttgagatgggagttgaggtaaactcatagcagggggttatcacgggctgaggctaatatgaactgcttagacatgagtggttattcctctgcatggttctctcttggagtttgccgtaattggtttttatcatgttttcagtatgtttaaaagggctttcaggagaaacactacatctgagtctcttttgctcttttaatcattatagttgtcacttactctggggtgaaagtgaacttgcagcttttcagcatggataagatagatataggcctgagagtacatttggagaatgtgatacaaccttcttactaatttatggtcgcttttctggtatgtctctgatgacagctaaaatacagagtctttttcttttctttctttttttttttgagacagagtctcgctcagttgcccaggctggaatgcagtggcatgatcttggctcactgcaacctctgcctcccaggttcaagcagttctcctgcttcagcctcctgagtagctgggattaagggcatgtgccaccatgcccagctaatttttttgtatttttagtagagacggggtttcaccatgctggccaggctagtctcgaactcctgacctcgtgatccgcccacctcggcctcccaaagtgctgggattacaggtgtgagccaccgtgcctggcctaatacagtgtcatttttaatggctgtgttttctatgaaggagtgtctacaatggttctccctctttttgtggtggcaatgttggtgaatgcccaaatg

SEQ ID NO: 62859 - DNA, 1057 bp, Homo sapiens
ctttcctcctatatgaatattccccttaaaatgagctattatacaactcacatcttattagtagggccacttttaaaggtgctttgctattttcattttctgcttctagatgaacagctatattacaaagcattctttaaatgtgctgttttgtgctatgtaagatcaccattttaattagagatcagtaacagtatttcgtcatttccctcttccatcctggacaataatttgatacaataaagcagttacactgggctctgggtgggaatagagctgtgagagttagacttaaacttttgtagaagagaagacttaattcttgcattttgtacataaaattaggtcagtgtcttgtagaacattatcactgcgtctcagatctcacttgccagcacgtaggaagtttgttttggtttcaaaatgtactttaccccatggtggctggcagggtacaatactattgacatcactgtgtttcaaatagaaagttaacaagtagctactgttgtgattgcagattgccttcccagtccctgtgagagaatgctttttcttttggacagcaacacttctcagccccttggtaccattaaatcagccaatgggggctgccagaatagagatgaacaccaacaaaaggccaaagagtagaaaaactgttaataaggcaaaaatctttaatcagtttccaaattgatgtgaaagataattaaaaaatattctctcccatcgatggctaagttttgacagtagtccaggttcagagcctgatctctctagagaggagtatcccttccctctacccagacccctggaaagttgccaaaggaaaataagctattttgtatttagaacaaattgccactgttttctccagtgatgtagccctatttcccagactttgaaacttggaatacagaaagttcttgtgtgaccaaagaagaaatatggtgaatgaatgatcaagtttttctttttaactaaatccttataaacagataagagaggggaagtatgcatagaaactaaatttagcacagaatggatgtcaagt

SEQ ID NO: 62860 - DNA, 1674 bp, Homo sapiens
catgagccaccgtgcctggcctttgtttagctttcttatttcatgaaccgaataagctgaacagcagaatatgatcatacatgttttagtaaataaaactcatgaaccacaatatgcttttgatatatcaggatccatttttaatgtcatttttcattaggaaaacaggcaggcagggttttttggggggataaatttgggttttcagaagattctcaacacattaagttttagagacactttggtatatatgtgtaggaaaagtagctagctgctgtcacgtgcaggagtgtgtgttgggagttgagaaacctggccacaagccactgcagctttgaagaatgtggctcatgagaggactcatagttcattacgtaacattcagcagagcggaaaatataagcactgtctccatcacttgacttgctttccattttgatttagttatctggtaaagtctaggtatcctatagtggaagaatgaaagacaagcaggttccaatgaaggaccatgcttccaaaggcatcagccagtggatcgtttgtggggccaggcgggggttagatctattattgttggacaggggtattagagttttgaaagactacttgaaaaacataatcaaatgatacttggagtttgttccgaaagggtattctttcctctctcttcccacaacagtgtgcgcttcctattatagttgatatacctgtgctttaaaatagcacagctactagtagaggccattttataccaaaatcatttcccttcatgttctgtggtacatcagtttggcagtagaggttacagagtttgaaatcaaaaggagcattggttccttcagggaaaaatgataccaatctaccaaaataaaagccaaacagactctcattgttctttatcccacaaggggcttgccctttttgaaggtgtggttaattttgataggactcttctctctaacagggttagtggctgggaattaccttttcccctgggcaaaacccactttaaaatctcattttaaaacagaactcaaagtgtctttgaaaataaaagtactttgggaactcttcattgtgtaaccccatccctctcagcaaggggactccagttttctcacagggcacttcctgctgcagtacctaattctaactttgttttactataactcatgctaaaataggaaaggtttcagctttacagtttttattagctgttcatgtgtttttaaaaagtatgtgttaaataaaaataaagtaaatgtccaccaaggagctaaatttttaaaaatcagtttccattaagtctagttctataaatgtttcagtaccaggttttttctacttgctgtttgtctaatgttcatcataatattcagaagagcagccttaactttccccaaccttctttcccttcttttactagaggtgcaggaccatgcctttcatgaatcgttattctctatgtcagctcttctctcccttggagacttgaaaaacatcatcatatgatacttgcagtttttttcctcagtgaataaggattttttttttttttttttttttggtggagtctcacactgtcacccaggctggagtgcactggcgcgatctctgctcactgcaacctctgcctcctgggttcaagcgattctcctgcctcagccgaca

SEQ ID NO: 62861 - DNA, 1053 bp, Homo sapiens
gacggactggcgtcaaaggatttaggaaatttgctgcctaaattaagaccaccactgtatatcagacattccccttggcaaaaaatattcctgtctcttcaccttgttcctctgttctccagacatcactgataataagcttgttgtgtaacatttcttatacctcttttcctcatgctgttagtttttgaaggtgcgctatactcgataattaatgttcttcttttttttttttcctttggcagaggagattgaagtggatgttgaaagcacagagttctcccatggagaagtggacaatataagtaccaccagcatcagtgacattgatgaccacagcagcctgccgagtattgggagtgacgagggttactccagtgccagtgtcaaactttcattcacttcatagaacccagcatgacataacagtgcagggcaaaatattcactgggccaattcaatacaaacaatctcttaaattgggttcatgatgcagtctcctctttaaaacaaaacaaaacaaaacaaaactatacttgaacaaaagggtcagaggacctgtatttaagcaaatacttagcaaaaagtggggcagagcctcccaaggagaacaaatattcagaatattcatattggaaaaatcacaatttttaatggcagcagaaaacttgtgtgaaattttcttgatttgagttgattgagaagaggacattggagatgccatcctctttctcttttctagtttgctcatactacattgagtagacacatttaaggatggggttatgaacccttcctgagctttatggtcctaaaagcaaaataaaaactattcgaatgaaaagacaagaaaatcaggtattaatcttggatagctaataatgagctattaaaactcagcctgggacagtttatcatgaagcctgtggatgatcaatcctttattattattttttttttttgaaaaaagctcatttcatgctctgcaaaaggagagactcccatgaagccttttgaaagggatcatcatgcagctcaactttctgttggatt

SEQ ID NO: 62862 - DNA, 1001 bp, Homo sapiens
agcttatccataaaaaaaaatagatgtcttttatagtggaaaaacacatggggaaaaaaatcatctattttgatgcagcatttgataatgataaaacacctcacacctcactctttatagtgcacaaaatgaatgaggtctgggctaggtagaaaaagggtcaatgctatttttgtttttagaatcattaccttttaccagcttttaaccatctgatatctatagtagacacactatcatagttaacatagtaagttcagcacttgtctcattttaatgtaaagatttgcttccattttcctacaggcagtctctctcttcctcacagtcccactgtgcaggtgctattgttactcttacgaatattttcagtaatgttattttcttctaagtgaaatttctagcctgcactttgatgtcatgtgttccctttgtctttcaaactccaaggttcccttgtggccctctcccttaccctgggaaggcctcttggagaccttacccctggctgtttggactttgtatactttaaataatttaactacccttaattacttaaaaaaaaaaaaaagctttatgattttcataacttattgctgattttaatggattgttaatttcagtcctgtagttttattttatgtttagatagggctgggcaaggaaaaagaaaataaagacaaccatatttagcagtgcagttgagttgtgtgttaatgttagactatccctttgtgagtgacactttaacagcattcactgcttctatatatagtgtaccatcttggtcatacattacgcctcaacatatacttgtgctcttcctttgcctccagaagaagtttttccttgattgtgctatgtttcagtggaagaaattctttgaagtagatgtgagtgaaaaactgcatgcctttagaagcccagtatcagaacttgctacgtttcaggtgctagggacttaatgaaaaacaggacaaaacaattcctttttgtggccc

SEQ ID NO: 62863 - DNA, 1050 bp, Homo sapiens
atgagaagcatgatacccacagtattttacagttgaaggtggttaagctctctatattctgaaacaaaatataaaccttgaccttaaaaagctttgttagaaaatttaatgtagagttttccccattaagaaaggagacttgaagctttgaaactgtgacagactgaaatgttaaatattgagttatgggcccctaagtagaaatggttgcatgtaacttaccaaagcttgacgtttgactgttgttaccatttcaaggaaagaacagtcctaacctcccgaaaataaaatgttgagttttagtggtaatcacaggtaacaagtgctattttaattaacatgtagggaggccacagagcatactggaaaacagcaaggactctagagccagactagtgtttgtttattaccatttattacctgtgtattcccatttattacctgtgtattcctctgattcatttttctcagctgtagaatggaaaaatctgtttcagttttaaggattgaattcaaatgtgtaaatagcttaagagtatccggcataagcactatagaagcgtctgctattactctgcagagtggcagtggtgaattatctgatattttttccttaacttgaatagcaatccacattacaatggataacaatacccattgtttatgatttgaggcatccaattataactgtattattgaagtgttatcaaattaccaaggctgtagggtatatttagtattcctagttaaaggtttgaactaatttgtatactagggcatgtttcttaatgggaagggggtgaaggttataataaaagtcacccctaatgcttgtttaaaattaaagaggaatttgtgggcctgggaccaaccttagacttatccaggccaaggtatgttgtttgacgaacaccgcaggtgatcctgatgtgcatccccgtctgagaactgttaactataaaagtttgactttggaaatgaagaaaaattaccttttagcctaatcatgaagactaggcgtcaaaccaaaacaagatgcatcagttactg

SEQ ID NO: 62864 - DNA, 6176 bp, Homo sapiens
gttttaaatgcaacaatgggtgaacagctatgcaagttcttagatcagataagatgcatagtgtggatcttcattagagtaacaatatagtagacaggtagcagaatctgtcggcttgtactgttctcaattttttagccatccctacaccaaacatctttgaatgaagccaataaatgtaagcctgaattagaaaaaaatatttgccacacagaaaggcattgcctttgtgtgttacctttttttcccccttttaaatgaagctgtgctaatgtgcttaacattaaggtatggaacatttaaaatctaacctggtaatttgcttacccagatggggtgagttttacaataattgaataggaagaccactggtttcttttacattgcctgtagtattttagtcgagatatgtataagtaggaacatttttgttactaataaagctgcttaaagtgttttgggattgcttggcagttaatactgctgagtaatgccctataaaacagtacagttgcataaaatatgttacaataagagtatctaattcagtgcctcatacttgactttctcatctttagagagatctattcagctaaaataggcacttagaaataatgcatggtataagctcaagtcttatattttcattagtatttgtggttaagttgaaaggcaactatatgggcttaagtcacagctctgccacttaactggtagacaatactgtatcagtttctacatggggataatcacagtacttgcttaatagtgttatgagctgcaaatgaaatatatgtagagtacttaacgtacagtatgaaggctgtcatcagaaactaagttgacaatgagaattataaaaataatgttgtagtttttgtttttcttttttaggaagttatagaactaaccaaagaccttctgtcaactcaaccttctgagacgcttgcaagttcagacagttttgcttctactcaacctactcattcatggaaagtaggagacaagtgtatggcagtctggagtgaagatggacagtaagtgtagaaaaaaaaactctaactataacatgaaataataaaatacaatggtaagaagtttttattcagttttaactaccctattttaatcttgacttctattaggcagtatgatttatagagccaatttgattcttgggtggttgccattaatacagtttagttttagctttagattaagttttggggagaagaatggctgggattctggaggaaagaaaaacaggacaatgaatgggtgttttctaaaataatctaaattattttctctaattgaaaattgagtgaatggttggtttttctgagaattctgtgaagagcatacactgacatcattcctataagaaatatcttttcgctgggtgtggtggctcatgcctgtaatctcagcactttgggaggctgaggcaggcagatcgcttgaggtcaggagttggagagcagcctgaccaacatggtgaaaccccatctctactaaaaatacaaaaatcagttaggtgtggtggcgtgtgcctgtaatcccagctacttgggagactgaggcatgagaattgtttgaacctgggaggcggaggttgaagtgagctgagattgcactactgcactccagcctgggcgacagtgagactctgtcgcaaaaaagagaaaaaaagaaacctctattctcaaagacattaaatcacgttgagtaggtacatgtaagagacttgcccagcaatattatgattgggatgtccttttttgatagcagataactaacttcaaccactcttttgtattctctttgctgaaacaaccatttgattatagaagtttcattatagacacatgtaataattttatcactacagtataagtcttgtaggctgagtactaaacctttactcacctgcttacagccatgatatctttacaggtgttatgaagcggagattgaggagatagatgaagaaaatggcaccgctgcaatcacctttgctggttatggcaatgctgaagtgactccactgttgaacctcaagcctgtagaagaaggaaggaaggcaaaggaggacagtggcaacaaacccatgtcaaagtaagtgactttgacttttccattttaggtgcaatcttccccatttggatacttgaagtagtctgcagagagaatctatgcataagaaagttgtaatactgttttaccgttgttttgaagattagcaacaaagggtcaacattgtctgtgtaagtgtgcctaagtaaagtgaagataattttgattcccatttaggcattcagtaaatattaagaagataactatgtacaatgaacatcttcccagcatattttataagccaggtactggggctataccacaggagaccacctcaggccttgtcccaactgagtttatatttagagaagaaaactcatcattaatgaagtgctttaatagtacagtgtaaacattacaaaggagctataacaggtactgtaagggaacaagaggtactcagcctccacttttattattagggcagatttctttgagaaaatgacatctaaactgagatttgaaaagagtaagagccaagtacaaagctacaaggcggtatgatgttgatctgggcttgaattctttgttattaatgagcattatgaccttggagaagctgtttaactctgtttcctcatctgtaagataggggcagtacattattgggttgtgaggattcaaacgataagtgttagtaaagcttgtaacagttctttacatgtagtaagagcttagtaaattttttttaaaggggggaggtgagcacgtacaagtaacaaatccctgtggtaaaaacttggggcctggaaggtgggtggtctgagaagagattagagaggtaaagtccagaacataaagagcttgtaagccaccgataacattttaagtagaggggatatgatgtgatcacatttgagctttagaatgatcactgtcagtagggagaggcaactactgctgtgatccaggtataagatgatggcctgaacccagggagttgcaatgggaatggggaactatgcagttttgaaaagtaagaggcagaattaacaatattttggtgaacttctgcatatttgccacaacttagtcttttgatttgtcaagagtttttgaaacttaagttgctacatatttatatttgaatatgcaaaaattatatattaatgtaagcattccaataaaataaaattctagaacaatgtatatatatattttttaatgtctttgtcatctgtgtaaaaagccatagcttcatggtggtaatatggtaccggggagtctagatattgcccctcttaaggatctttcttttcatccttttggtgagaagtcagtgttaactgagcagaaattattgggggttttaggctctgatcctatttagaatcttatttagaatgtttttgaaacccccaggtgttttgttttggtgagaattattagctatgatttccatttgtgctgctgcattcttccaatgtaggtaaaatattttatctgcatcgaatctcttcatacatttttttctaaatgctgcacttgttaactatgtctatttggaagtagttgaaggcttagatacccattaatactgaaactcaacttattcctaaaacaactggtaacagctatacaaaagtaaaatagaaagtcataattaaggctgggcgcagtggctcaagcctgtaatcccaacactttgggaggccaaggcaggcagatcacttgaggccaggagttaaagaccattctggccaacatggtgaaaccctatctctactaaaaatataaaagttagctgggcatggtggcatgtgcctgtagtcccagctacttgggagggtgaggcacaagaatctcttgaacccaggaggtggaggttgctgtgagccaagattgtgccactgtactccaactccagtctgggcaacagaacaagactttgtcgccaaaaaaaaaaaaaaggcatagttgaaatatttaccttatatgggtaaatagattacagttatgtttgaaagcttccaaggatgccattttttaaaaaaacatttcttagtaattctgggtgattggtactgattttaatgatttagtactttttattcatagaccattgtatatgtttattagattttttttttgcactgccggtgtcttcaaggaagtcattcttgtatgataagtcttaacagttgacatttaactttttttcatgcagaaaagaaatgattgcccagcagcgtgaatataaaaagaagaaagctttgaaaaaagctcagagaataaaagaacttgagcaggaaagagaggaccagaaagtgaaatggcaacaattcaacaacagagcctattctaaaaacaaaaaaggccaggttggtaaatctttttacactttgtaaatttgagaaatgcaactgtcattaaaataactttaaaatgaaaagagatggagattttttgtaaagtatgattaactcagattttgtattccgaatccttgttgatgctcaatttaacttattgaaaaatgttagccattgtctctgcaataaaaatattacaaatgagagaatttatatcagaaattacaaaaggtctatgttcttttccttctataaactaatatttgaaaaaatagttgctacttagaggcagtgtgcttaactctatctgctttgttaacatgccttcatgctgggcatcactggtagattttatttaaaagtgcattcagtttcccttgatacacttaccttgtgtgtgttgggtagaaaataactgtagcattcatataggaagttgagaataaggataacctgactttcacccatgtgttactcttcactgccatcaaggtagcccttccattgatggacatggcttctggaaagaagcgcttccttttcataaagatgtttattttgtgacaaaggccaagggacttcacaatttggctatcataacaggccccacagtaaaccacaatacagccagagctttaatcatgctagaatggctagctcacagctgaagttaggatttgcgtttacaaaactaaaattttgacgtatcagaaggcaagtgttatgagtattagtaaatgtaatgatattttccacaacttagaagttacagtaaatggcttccagcatgggaccacttctgtacccattttttaacactaaacaaaggcaatatgtttttcttcttttaaacgttgaaaccagaatatattttaacattacttaaaatttgaaattttttattttttccaacactaatcaggaatgatttctgttttctttcccttaggtaaagaggagtatttttgcttcacctgagagtgtgactggtaaagttggagtaggaacctgtggaattgctgataaacctatgacacaatatcaagatacctctaaatacaatgtcaggcatttgatgcctcaataatcagaaaaactgttggatttcatctctgcagggctttacatttacctttttatccttatatttttctaaaggtaaattatttgttagatgagtaagcaagataccattgtcgtcattggttggcttcagtagaatgaaacgtgaagaaattgcatttgataactgctattcatttaacttttctcattatcagtaccacggttccctcaaagtttgttgaataaagcaacttttgtagatgctgtttcatacagcacttagatgaattattgatcttcctaatatcaggcgcctacttaacctatggtgtgtactttttgtaagttgtaacttgaaattttcagatgctttgaacttgacacatactctagcaattcattggaacaccaaggcaaaaacaccaacctgctaaaagagatcttttcatttttcttattttcagctttaaaacttagctgtcgttcagttaagcttaaagataggttaatttgtaaatggcaaagtttgttttgaggtttttcctcaataacttgtttcccaggcctattaggccatctctaaaattgatctagctgttttatttttatgtactcttagttttatgtaagaaaccttaggatgagctcccttttctaaggtgt

SEQ ID NO: 62865 - DNA, 1078 bp, Homo sapiens
gcttgttatatttggtgaaaagtctgttcagactgattttgtggcttcctcatattaatattttttgaccatcatatggtttctaatttcttgtgttcctctatagaattagatccttatcccagttattaatttgtttgccctttgttttatgacaaaatgctttttttgcatcttttcaatgacttcattttgccagtaaggtttccatgtttatctctttcatgtactgtctttcatagagactaaagttattcagcaggcagcaaaataatctactaaagtcctgcctttcttttttcacttaaaaaagtgggtgtgataaaatccaggctagctagctgactagctccccgggcagtctatgataatcagagatagtcaatttattaggctgttttgctgaataagctggttctaaaggaggcaggggtcaagtcacttgtctcatatattacagtggctctctgcatccccgaaacgccttccttcagtaagcagagtgcttgagtgcaccccatttgacctgctgatatgtagatcacaacacctgatgcttcctggaattgccgattactgtaactgctgcccatctgtcgatgaaggagcagtttcagaactcagacttgagggaggaaaagtaattaatggtatgtaccttcaagaaccccctcatacataaaatagtttttctaatactttggtccatacgcacatgtgaagaatagaaatttagaaggttcttcatagtttgttgggagggttatgtaaaaccatggcaaagttaaaggacattaggagtaaatgctctggattttttctaaaaaagggtcatttcagcacaggcctctgaattcactaatatgcacagcttttcaggacccttttctttgatgaaatatatttctttaacaaaatatatttggaaaacagttctgtcctaaaagaaatagagttctaaatctgaaacctacaagtgcagaattcatgtctgtgcttaagttaaatgatccctaggtggatctggaagtatttaatgatagagatttgtgtgggctcttgagtcaggctgactgga

SEQ ID NO: 62866 - DNA, 1101 bp, Homo sapiens
ctattactattttagggatatcagaactgcaaacaaacttaacggaaatagggtccggatttgggattctggaactgcttatctgggcgtaattaagatgagttgaatactttcaagttctacatttagaataaaattgcagtagtatgttatttttaaacacacacaaactatctgggttaatttcaatatgaacaagacccctcttcgatacgtagaagccaggcctgtgggcttcagggtgccagtcaatacaaaaaagatgttttgggagcagtttctcccactcccaggcccttaagtgagaaataacccagtggtttgccacctgtccatttgatttgctcatatgttgtgagtatacattgaagatgaggcaacagaggcacaccgacctcttattttcttacactctgtaaagtgctttctgtttgccccaaagagagatgccttgactacctttaccaacttaagcagtccttttttaggaaaagaaaacactgggtgccaatgttttgtatattgcttcttgggcagtgggaggaggggtatttgttgaactggttgggttggggaagttgggagtggagttagaaatagcattatcatcaggtctttttaatatttctagaataattcctcattagagtctgagcagaactgccttaccatgtcatgatcatcatagtggaaagtactgtagggggaaaccattgtgataaacactgtagtaagcccctaaaaggcttgcttgcaggggttcagttaataatgacctggaaatcatttttctgtaaagtatcctcttttctataaccatttaaaacagcactgtccagtagaactttctgtgatgatggaaatgttctatatctgctattcagtaccatagccactagccacatttggttggatatttgaaatacagctaggtttacttaggagctgagtttttagtataacttaattagccacacgtgactaccatactggatggcaaggatttagaagtgcaagttttaatacttcagatagtaataacagaatgtttttcctgaccagtcttgatcagagtttcttcccattttattctatcattag

SEQ ID NO: 62867 - DNA, 1059 bp, Homo sapiens
ccatttcattttattgctttttattgtttccctccggcctcttctcccctcctaggtcttttctctagctcagtttggagctcacatcctttccacccttttcacctcctccttcctccgccccaggattatccctgggacccatcctgagctgagcctacagccagccagccacgaaatagaggtgcgcgggggcagggtggtatggagattctgcggcctttgatttgacacctcccggagctaccgccacaggcctgcccatttcacctgccgggaagataactttggcttctggtggtgggtgggtgattgactctcaaaatccaaagcattggttttttctgggttacttcctatgactgctcctgctttgtgtttgagtcctttgtaacctcaaatgacacccggggagacctgacccacatgtagagatgagggtttagccccagcagggccccaaggccgtgccagccctggcgcggacaccttgggatgtaacagtgttggggatcagagctcggtgcagagagccggcgccgagttaggagcctgttttaaagccatgcaacttgagtttcacacagtccgggccaggaagattctggagacagttcccctctctgctagcacctcctgctgactggtcccctgttgatttcctgttggagagttaacagaggtagatggtaatcgtccttcttctaacagcctatcccccaggggatagagggttggccctctggctctgcagaggtttcagcgtgcctcctgatttctttctcttcctaatatggtttttatctcctgtggtttggagaagtttctgcctcagtagtatgaaagaggttccaggagaccctccctggtcccacctctcctccccatgcttctctaagctggccctgctgacagtttagaagttgtcgccacaaagtaggcagctctatagactcacatctcaggaaaactgggttaaaatgttttttaaaagaaggtaacatatacacaggtaaaaatttgaacagcatgaaggccctgtgatgagaagcgggtctt

SEQ ID NO: 62868 - DNA, 1058 bp, Homo sapiens
cttcctcttggtctaaacagaagttcaaaaagggaaagaaatgtagtttcaggggtgtgttgggctgagctccaaaagaaactggataggatcccaggtctggtgtatcagcaatttccaggcactcaggagaggaagagatcttgagtcaaccatccagcctgctccttaaagggcgagcctgttagtgtccattggtggggacccataagtcatcagtggccacgtgaatctggacttggaactctgactcctttccaaagaactttgtaccacctctgctgttttcctggtttctagctggtggggatgctgtgcccagggagtgggtccaactcaggtcaggactagacctgcttggattgcctaaaaacctgtgtcttccccatggagagaagccatgttctgttcattcttcaatctctatgacagtggcagctatgtgacgtgccaggttttaatgcattcattatcccatttacaccttaccaattatccagagaggataggtattatccccagtttagagacaaagggtcatagattaaagaagctatccaagatcacatcaggtagtaagcatggagctctggaacttaaccaagagctccgctgtctgacgcccaagcccaggttgttaaccactgcaccactttgccaccaggaaggctgctctgtacgcatggaagtttgggaggtttcgaggaggtgatgcagatggacattttatctctagaggaagagaggaaagagggaattttttccttcctgtctttacctgaaatacttactttctcatattgatcactattgaaatggagtcagacaaggccttgcatctcatgctacgcaatcagttttgggtttcagcccagctctaccactgactagctctgacttggacaagttattaaatgcatctgagcctcaagttgcccatccgtaaaatgggaataatgttacctacctcacagattttgtgaaattggtatgatgtaggcacatctaaagggttaagcccccagaggccagccatagtagatgctgataaaaatacc

SEQ ID NO: 62869 - DNA, 1028 bp, Homo sapiens
gtggtaaggggaatgactttttcttttggcccttcaaaatcgtaaatgtttttgcgtattgtagcctgcgtagtgccagctacatctaacttcctgtgatgtaattgtttcctcactagcaagagagggaattggaaagactgtattttttgtggatttgatgtgtacgtatctttaacctttcaccccttcccatttttaatagttgtagctggttttctgggggcagggggctgggaggtagaacaggaagggaggcatcctcccctttttgtcatattgagctaaagaatgctaactgatggtggtagctttatagcagcgactcccattgttgagcaagatggaatttgtgaaagccatttatatcctccgtctagtaggcgtcacttagccagggctataattagtggccatgcgctatttattgtgtgtttggtggtgagaaccctgggagctgagccaagcatcctgccctggcacagccagacagggtgcccggagagaccggaaggcctctaccaggatcggggttaggttgttacccttagaatcagacctggagagacaagagttgcttctccaagtcagtctttgagcctgggatgctctccttagaaaaatgtatgtgcccaataaaaatgtgcacaatttcaaggattttccaatgccctcttggaaccatcagtggaacctaggttaagatggcatccccaggaagggactgctccaggtccatcgcctccagaggcagaatctgcaagtatcttgggaactgtaaagcttctgtgtgcttatgtctcttgtgacaatagctgctgtaaactgtaaaggtcctacttggggatagtctttgctgggaccccaaaagctctatcctcaccagtggggattaaagactggcagaagtgtagtgtagggccgtggctcttaggcaggcacaacagtttcatatctaggttactccagtgtttgattcttgtgttttgccattgcccttagattctaatcccaactcactcccacca

SEQ ID NO: 62870 - DNA, 1052 bp, Homo sapiens
tcttccttccagactgtgtcagggaaaagggaggcaaggtcctggtccactgtgaggctgggatctcccgttcacccaccatctgcatggcttaccttatgaagaccaagcagttccgcctgaaggaggccttcgattacatcaagcagaggaggagcatggtctcgcccaactttggcttcatgggccagctcctgcagtacgaatctgagatcctgccctccacgcccaacccccagcctccctcctgccaaggggaggcagcaggctcttcactgataggccatttgcagacactgagccctgacatgcagggtgcctactgcacattccctgcctcggtgctggcaccggtgcctacccactcaacagtctcagagctcagcagaagccctgtggcaacggccacatcctgctaaaactgggatggaggaatcggcccagccccaagagcaactgtgatttttgtttttaagactcatggacatttcatacctgtgcaatactgaagacctcattctgtcatgctgccccagtgagatagtgagtggtcaccaggcttgcaaatgaacttcagacggacctcagggtaggttctcgggactgaaggaaggccaagccattacgggagcacagcatgtgctgactactgtacttccagacccctgccctcttgggactgcccagtccttgcacctcagagttcgccttttcatttcaagcataaggcaataaatacctgcagcaacgtgggagaaagaagttgctggaccaggagaaaaggcagttatgaagccaattcattttgaaggaagcacaatttccaccttattttttgaactttggcagtttcaatgtctgtctctgttgcttcggggcataagctgatcaccgtctagttgggaaagtaaccctacagggtttgtagggacatgatcagcatcctgatttgaaccctgaaatgttgtgtagacaccctcttgggtccaatgaggtagttggttgaagtagcaagatgttggcttttctggattttttttgccatgggttct

SEQ ID NO: 62871 - DNA, 1139 bp, Homo sapiens
cggccttggagacggttttctgttgggtctgtcgggctctgagcactccttctttggaacgtgggttctttcaggctggccggcgtgagtgactgaaagcagcactcggtggtcttggagtcaggagagctggggcccgtcggcctgcttttatagacttgctattgtactgcagcgtttagggttcagttaagctcacacagtgtttttgattttgaaaggtccttaacaggttgacagcataactcctaaaaaaaaataaaacccagcagcattgccttggcaaagattaccgataaaagtacctttttttttttttagcagatttttaatcaccactttccaaaatgaatttttcttatatgaaatttcgagttttctatattgcattaaatgaaaaacaagaaagaaatgcaagagaaaaatgttaattttttttgtggggtgggttctcaaaaatgttttttatttactaggtgattatccagggttttcgaagttacagagatcaaacaattgtagatcccttcagttcaaaacataatgtgattggtaagtgttcttggtttactcggtcatatttatagtctatacagataatgtaaattctgtccatttctatattggcttaaggagacaggaattgtctttgaatattaagttatatttttctgcgtgaaataacttttctgtcttattgcactgatgaattgcttatttttataaacttaaaatgtttggataagacactcataagttatccattttttatctaggtagccttgtatgtgtgtgtaagagtgttttaaagcatttccgctcttctgttcttgttatatatcctagtgaaaatgctgactgttgccttatttcagagacagacaatttttattcacaaagtagatgccaggattccccccccaccccggcagtcagtgtctctaaggacagaccatgtagctagattggaagagcataaactttggagcataacagaatggggttcaaatcccagttataggggggtgggggcctgggggagggatagcattaggagaaatacctaatgtaaatgtcgagttgatgggtgcagcaaaccaacatggcacatgtatacctatgtaacaaacctgcatgtt

SEQ ID NO: 62872 - DNA, 1765 bp, Homo sapiens
gaattgacatgccatagggtggcttaattgtactggggttttgcttacatataagtactttctgatttttttcatcaatcagaaaatctttagaaatgtagaaaaataagaattattagatttctgttttctttaacttgcaccttaaaataagtaccttaatatttcatttgtgtgattttataaatgatctgtaacttactagctagaatgattacattttgtctataaggtccatcaaataccattgttttagctgttatcagttagttgtgttacctctgtgattgcagcattagatttgttaatagtcactgttacaaaggaaaatggttttgtttaactaaaacaaatgaacccaagataacagtactgattaaacatattttaaaaccagacacgttgtaagacataatgtaagaaagaccaaaagtagttaggtactgagatttgccttaaaaatatctggtgaaagcataccactttgattgatgaatgatgttgactattaaaaaatatctcttgtactgatgttgggtatatgcatcaaacatatacgtttttagggatttttttccccctaacctttaacaaaagaaatacatgttatagaacattatggaaaagctaaaaggaagaaaattaagataaactataatccttttactcagagataaccattctttgttttttactgcacaccatgattcttcagagataaccattcttaataataacagtctatacttgtgattagtcctggtttcctagaaaacagcacagacaggattagctgctaaggctttgatgggaggtgcagtttgagggcaagaatgaagagaaaagctggtcatagatttctaaagaagagacaggtggtttgcagtcatgttaaataactcacagactttgtggacccaccataccttagaaaggtcagatgatagaggaatggatttggattctgacaaggatttgtttgcaggcacctgtctttcattggtcaaagttttctacatctggcattgatgcctccaagcttttggattgtggtgctctgggaactaacacccggaagtagtcagggagttatagcctcctttccatgttcacaattcaggagtacctgaatgtactcccaaggtagcttgaatctaccagaggtattaggagactgagcttttccattgattggcagccaaggcctgggttgagaaaggtgaatctggggccacatataaactgtgtttacctcagtacgtttttagtctttgtatacatctttttaatatatatttaaataaaaatgggttcatttttaaataaaaatgggttcatttttaaataaaaaatgggttcatcatataacttactggtaatctgttattctccttcaggataaatcttgaaatatctttattaaatattcagcatcctttaaaattgctatatagtgttccactctagcagtaattcttaaaaggaaattcttaaaatttcagttatttatagatggattgtggtttgaaatatttattcatttaatgataaattgtcatcttaaacttttatttagaaatagtttcaaatttacagaaaaatttccccaataagaactgttcagagactactcataaaccctttacctagattcacctgttgttaacattttccccacttgctgtatcatttccactttttacacacctttttccttaaagttatttacaccatggtcctttacctctgactttaatgtgtactt

SEQ ID NO: 62873 - DNA, 1007 bp, Homo sapiens
tacccttttacgtattgaattgcttatatttgaattttgttagtcaaaaagtaccttaaaattatttatatttttgtggttctgtgagactacacatgataatatagggttgattttaaacatgagaacactttaaggatttaaaatgattattttagaacgttagcaatatatgaatctttaaattgttaaacatatatagttaaaatagaattatatatccattgtaatatgatataagagccaggtagtatatttagctattcctattcattttaaactattgggtaagagcaaacggatcaactgtgaaatatctttaaagaaaaaactattagaagtctgtacaaaaattgaatttatttggtgattatagttgttttattggtttcttttgttcactgtttaatttcagatgttaagatgtattagaaaattggattttaaaaatattgagtatttttaaaaaggtaaacagttttaattttattggtttttatgtaaaataacttgtactttttgaaattttccagtgggcagaaatggatctggaaaaagtaactttttttatggtaggtgttgctttttgaattgtaaatatattaagacctgggtatcttagggtagattattaaaatcattaattttctgaggttatgtattcatgaaacccaagaaatactttatatggggttgcagcttagtgtagagggtttagagtatacagatctgaattctgctttatacccagtggctgattagctgtgtgagagtgggcaaaacacgtagcctctcaaatttttcttttcactttaaaaatggagatgtttggatgtttgccctgtctaccttagatggtttgtaagaatggaatgcaatagtatgtatgaaaatgctttttaaacttgaatgtaatatataaatgttataaatgcatattttaaacgtatgtaaatgcagtagaatagttgatagtattgttttggaaaattgttcatctttcttat

SEQ ID NO: 62874 - DNA, 1966 bp, Homo sapiens
gtgagactgctttaagacattattgatattacatatattttaaaaataaattttccatgctggttaaaaaagcatttgttcaagtttcagattctttgtgaacaagacacaatctttctcataagtgtgttactctgctgtgaaatttagcctaacatattaatgccagataaaagcccaatttttatacagtggtttaggagaaaattataggatttgcctatagatggatatgtcctccatataaatgtcttaaaggagacatgatatatatcataagtgttttattctgctgtgaaatttagcctaacatgttaatgccagataaaggcctaatttttatgtgatggttaggagaaaattataggatttgcctataggtgggtatgtcctccatgtacatttctttaaggatgtgatctgcaaaggcttaagaagcaggtttgctgaggagaaagaagagtttgaggttgcagattaggaactttaagatgcagaaccaaaaattaattgggaacatagagaaacaaccattgcaaactaaacaacatacaagttgtttgttgttttagccatatttgtacttagatagtaaacatcattttccagtatgaaaaacagtagagatgttctgcaacttacagcggggttatgtcctaataaacctatcataaactgaaaataccataagtcaaaaatggacattagcctacagttgagcaaaatgatctaacacaaaagtctgttttataataaagtgttgaatctgtcatataatttattgaatactatgctgaaagtaaaaaacagtgattttatggatactcaaattatggtttctactgaatgtagactgctatcacgttgtcattcagccatttgttgaaccatcgtaagttggggaccacctgtatatttacagtaatgtgagttaggatattttattaagtgggtccttttgtaatgcataagcacgatgattgggttttcgtgttcatgtgagtcatgcctccctcaaaccttgttaggacattggcacattaccaatgtgatgtggaaaaaaatatgagtaatggactaaagtaattttaggatagaaaatcatgaaagactacaataaaacgattaatccttctgatttgaatattgtttattaaagactagaaaatgaaattcctcaacatgtcttaacagtgtttctcacacataggaaattgttttgtttagctcttgtctgtcttttccccttgtttagtttgaatttgtagcccagtaatcagaattgatttcctttagaaaaattctttttaggtttttcagattggcattaaaataattaataacctctttggtacagttcttcattgtatttactacatagtttctataatctggaaggtatctggacttggtaccatagtttttgtgtcatagattggtttaaatgtgacacatgttaaatgtgtatatttctataatagatttaaaactgtagaatgtctcaatttttcttaaaaaacagacttttggtaattatcccatgatttattaggatttctttgcagcattaaaatgagactgtaagagaaaagcctcatggtgtattagatattagcaaataggtagagttaaatgtccccagtcttgcagtctaataaagtggtctgtagaatcatatttaaggatatctaactttgacatgtcttgcatagctcttattttttatttagaatcaaaagctatttggttgagaagttttgttgtcctaatctaacgtctctgctgttttggcaagagggatatatactataactctggggatatccccaaagtatgtatccctcttgccaaaagagcagagacgttagattagtgtgtgtgtgtatatatgaatctagcagaaatttttctccattgaatcagacttgttattatgccctagactttaagaatcctttaaaggata

SEQ ID NO: 62875 - DNA, 1763 bp, Homo sapiens
aatggcaaatttctcacttctttcatttttaggaaggtactggtcctcgtgttatttctgcttttgtggagattatttttgataattcagacaaccggttaccagtaagtaactttttttttaaagtaatgttgagaatttaattggtttagctgattttcttcatactttgaaactttttaagcttttataatttgttataattacagtttatatactgattttatcttaaaatgacaatgaatactctgttaacaaatgggaatgtacaaactgttgtgaaaagtgtcttggttaagagtattgagtatttgtagtattatttttagtgagataattgaaattttaaaataaatacttatgggcaaggactttaaaatgaccttatttaaaaagttttctcctttactattaaattaactgtgggcttttacattttttcttagatcgataaagaggaagtttcacttcgaagagttattggtgccaaaaaggatcagtatttcttagacaagaagatggtcacgtaagcatttttcttttttttaaaaaaactgaatatgtacttaaatagagatggggtattgctgtgttggccaggttggtctcgaactcttggcctcaaatgatccacctcggcttcctaaagtgctaggattacagacatgagccaccacgcccagccagcatttttctttttctcaatacggagtcttgctctgtcgcccaggctggagtgcagtggcgcagtctcggctcactgcaacctccacctcccgggttcaagctattctgctgcctcagccttctgagtagctgggattgcaggcagtcaccaccacacccggctactttttgtattcttagtagagacggggtttcaccatgttggcaggctggtctcgaactcttgaccttgtgatctgcctgccttggcctcccaaagtgctgggattagaggcatgagccactgcgcccagcccgcaattttatgatttccttacaaaagagtaaaaagtattcttttacctgcttcatatatgaggaatatttgcttcatcttcaacaagtcaacatatagaggataaacataagaatcagaaagttctgaggatgatacagatggtttaattactgatctttcctccctaatgctatcaaccaaggggctactctactcattgcttaatggtgctttaaaattatttatcggaaagtaatttcattgtttgtcaacaggaaaaatgatgtgatgaacctccttgaaagcgctggtttttctcgaagcaatccttattatattgttaaacaaggaaaggtaaaacaattgtatgtcctttttaagtagaatttgttttctgagtaattcttgagtgatgaatttggtttattgatttgagtggttaagctgaagcaaaaatggccatattcttttacatggccataaagtaccaaataggtccattgcatgttgagatggaagtatttcagcatattaagtggatcttgttttcctagtgactggtattacttactgaggtgaaagtatgggaagacattattggcttatgaatgttgcaataattaagaatattgtaggaattctataaaaatcacatttgaaaaactttctaaaattaatattttgtgttacctaattatttatcacaattaaaatactgaaaagctaacattaccagaaatctgccattttgccacatgttattttccctaatagggattatgtttttacattttttcag

SEQ ID NO: 62876 - DNA, 1064 bp, Homo sapiens
tagccctattcataaaggagagttatgaccgtaacagttgtatttggattttatttggtaaatttcatttaagtaaaggagacatagatatgtaggcatgcgtactatacaaatgacattagccaaatcataatctgtttaaaacttggcatgtcccaaattcaaaagtctgaaatacagaatgctctacaatctgaaacctttcgagtgtggacatgacattcaaaggaaatgcttgttggaacattttggatttcaaatttttggatttgggttgctcatctggtaagtataaatgcaaatattccaaaacttgaaaaaatctaaaatctgtaacacttctggtttctaaccattttgcataagggatacccaaccttcatgtgtattaaaaacctttcaacgtggagttcttcttcttaaacggaggctacagctatgtaatgattatttttctaaaaattttagatcaaccagatggcaacagcaccagattctcagagattaaagctattaagagaagtagctggtactagagtgtatgacgaacgaaaggaagaaagcatctccttaatgaaagaaacaggtaaaataaatgtgattctgccttatttttttgttgcaaattactgtttttgtgacagagtggctccatgatgggaatatagtaggtgtttagtatatgacagcattagataatgctgttattaataaaaattgagaatccataacaccaatgatgttagtagcttttaaaaatattgtggaaacgcacactgactttttttttttttttttttgagatggagtcttgctctgtcacccaggctggagtgcagtggcgcgatctctgcttattgcaacctctgcctcccgggttcaagtgattctcctgcctcagcctccctgagtagctgggattacaggtgcccaccaccatactcagttaatttttgtatttttagtagagacagggtttcaccatgttgtccaggctgatctcgaactcctgacttcagatgatccacctgccttggcctctcaaagtgctgggattactcatg

SEQ ID NO: 62877 - DNA, 1867 bp, Homo sapiens
ctcactccattgcacaggctggagtgcagtggtgagatcacagctcactgcagccttgatctctcaagctcaagtgatcctcccacctcagcctcctatttttgttattttttgaagagatggaatctcagtatgttgcccaggctggttttgaactcctgggttcaaggagtcctcccacctgggcctcccaaagtgctgagtttacaggcatgagcaaccatgtccagccatcgtatgtttttgaccatagtaaacccttttgtaccagaattatggaatgattacacaagggagagttagaggaattgaatattgaaaggacagagtattactaaacattaagtgaaagagaattaatggtgtcacaattctgctattgtacttctaattgccttattttctgtttaatacttttgaataggatatcgaacgccaagttagagaattgaaaacaaaaatttcagctatgaaagaagaaaaagaacagcttagtgctgaaagacaagagcagattaagcagaggactaagttggagcttaaagccaaggatttacaagatgaactagcaggcaatagtgaacaaagggtaagttaaaatgctaaaaatgaaagatgtgaatgttcaggtgagtagcaactgtagaagacagccctttctgtgactggtgtgtgttggaatttttttttaagctttgctacgttagcataatttgtactcaagtaacaacttggtactgtccctttgtttcttacattaaaaaagagtttcatgttacaggtgggttttctcatgaagtttttttcctgagaaaacatttatgctagacctaaattatgcaaaaaatttaaagcagtttgcatttttactttgtttacagaaacgtttattaaaagagaggcagaagctgcttgaaaaaatagaagaaaagcagaaagaactggcagaaacagaacccaaattcaacagtgtgaaagagaaagaagaacgaggaattgctaggtctgagaactttcaccaacactttaactttctacatcatattatgtaaaactaggttgtccgaggagctcaattatatagtagctgctttttacacttaattctttttgtatctttttgaaaaatggctttatgtttctgtgtgcagttgacattattggttgcaattaaacttggttattattctccttttcatcccatttgcttctattttgtgtagattggctcaagctacccaggaaagaacggatctttatgcaaagcagggtcgaggaagccagtttacatcaaaagaagaaagggataagtggattaaaaaggaactcaagtctttagatcaggctattaatgacaagaaaagacagattgctgctatacataaggatttggaagacactgaagcaaataaagagaaaaatctggagcagtataatgtaagaacttctatagctgctttgtaaaaatctttcagaagagataaatgtgtttagttttatctacttcaagttttctttttaaataagtctacatgttgctcttaaaatatatgacagatacttatttagaaaaggcctgcacagtttaatatacatatagttcttttttaaagaatattcatgtcattgagcctttatgtagattaagtatattaaaatgtatgtatgtatttttaatttttttgagatagggtcttgttctgtcacccaatctggagtgcagtggtacaaacacaactcactgcagcctccaccttccaggctcagcgatcctccatccttagcctcctaactgggaccacaggcatgtatcaccaggcccagcaaaatttttatttatttttttgtagagacgaggtcttgccat

SEQ ID NO: 62878 - DNA, 2795 bp, Homo sapiens
acgcctgtaatctcagcactttgggaggccgagacgggcggatcatgaggtcaggagatcgagaccatcctggctaacacggtgaaactccgtctctactaaaaatacaaaaaacaaaaaaaacaaactgaaattggatttttcaacagcatcattgaggtataattcacatacagtaaattgtacatatttagtgtacatcatttttcctagtcaggaaagtggcaaaaataaagtatataatttgatgagttttgacatacgtatacatctgtaaaacaccacacagttaagacaccacacaccacagttaagacaataaacacgtttattacccaaaagcgttttccatacccctttgtaattcctccctcaccttttgtccgcctcccccatccatctgcaaccactgatctgctttctatcagtgtagattagtttcatgaaattgaattttaaatttatttttatttccatagaaactggaccaggatcttaatgaagtcaaagctcgagtagaagaactggacagaaaatattacgaagtaaaaaataagaaagatgaactacaaagtgaaagaaagttagtatagactaaaatgtgcattaatgttttcagtaatgttcgttactagctgttatgtggtctttaagttacaagttaaccggtcaggcttgttttctgtattttgattctaaactgtatactgttaatgcatcctcatatgtgtttaaaattaaagacagtctactttttatttattagctacttgtggagagaagagaatgcagaacagcaagcacttgctgctaaaagagaagatcttgaaaagaagcaacaacttcttagagcagcaacaggaaaggtgggcaggttcttttcatcacctctgtttacactgagtcattgagttaatcgttatgtaataattttttacctttcaaggtgtaggtcatgggttccaagtgataaataggagtccaaattatcttctaaatatgaaatgatagagattaaatagttttattactacacatactattaatagcacttttgatgttcagataaagagcccatttttaacactactgttatggaacagagcctatcatataaggtgttacatgtagttggcatattgtgaggaggtgatgtgtttgttggagaggatgtttagtttaatcactggtatatttttaaaatgtatggtgttgtgggctcattccttaccaggagtgccattgatgatattattttaatatttttcatttctgacaacttacaggccattttaaatggaatagacagcataaacaaagtgctagaccacttccgtcgaaaaggaataaaccagcatgttcaaaatggctatcatggtattgtaatgaataactttgaatgtgaaccagctttctacacatgcgtggaagtcactgctggaaacaggttaaagcttttgcttgatatttagcatttttagaagagggaataagaatagcttaaacaacttttgtagtttttgtacaacatatcttccattatctttttatatctcggttccttaactttctaattaaagaagtagatgctaagtatttgttcctaattatagaagctagaactttcctcttttgggagtttctccctccccgccattggaatttttaaagtagtcttattttccaaaattatttggattatataggaaaaaactgtttgatgcttaagtgtttataacattttaaaagtgcacacctttagtcccagctatgcaggaggctgaggtgggaggattgataagtttgggcaacatagggagaccctgagtaccaataaagatttgtcttactctgtttatatttaggttattttatcacattgttgattcagatgaagtcagcacgaagattttaatggagtttaataaaatgaatcttcctggagaggttacttttctgcctcttaacaagttagatgtcagggatacagcctatcctgaaaccaatgtgagtcattgtgtgataaggtgtatttctcttttataatgttattttttatcacataatctaacacatgctagtgcccaggcactatacactgggattcagtggtgtatgagataaaaatatctgtcttcccatggaccttagtgctgagtgggttttggggagggagacagaagtcacagctatgattggtgtggtgatgcacgcctgtaatcccagctacttgggaggctgaagtgggaggatcatttaaaaagaagagaaaaaagctaagatatgaaacaaatcattgcaaatgtgcagtgttaaaagcgtaagtacaggatactttgagagcatatctgggagtgacataattaaggttagggagttggagaaagattcccaaggaactgtcatgtatagtttaaaagtgtcttgacgtacttaggattaaatgaaaaaaatggctagtaaggtgatagacttcggaagcataacattgcttttgttggtaacaaaagtgcactttaggtggattaaaaatattcttcagacaccattcttagaacagtgtaattgctttgaggtacttgacttcagaatgttgatggtagcatcaactgttttaccatcctctgaagttaaagctgaaaccccatgagaatgatcaataatttaagtggaacattaagaatcttgtaagctatcaaagggtctgactttttctgctatcacatctacaaattgtctttgaagtttgggtaagaaaaattgagtctcaaaaacatgatgtatgaatggaacga

SEQ ID NO: 62879 - DNA, 1640 bp, Homo sapiens
aaaaccctgtctctactaaaaatacaaaaaattagctggacatggtagtaggcacctgtaatcccaggtacttgggaggctgaagcgggaaaatcgcttgaactggggaggcagaggttgcagtgagccaagatcatgccactgtacttcatcctggcaacagagcaagactccatctcaaaaaaaaaaaaaaattttatagaactgggaagtgcaaggaagtgattagcacagtcatggcagtggtcgtttctcgcaggtaaccactgtaggtaactgctttgtgattaggaaaggagcacacccatgacttctggggtgtcagcagtgctctgtttcttgtggttatgttggtgttctattaatttacactgaatacttaactacatttttctatatatgggatatattttcataattttaaaaaccctgttctaacagtttaggagagaggaaatgaaattttatctgacaaaatattttcctatctaatttagatatataaaatatgtaaaattaaaacattttgaggaagtactatttatatttagcccttttatgtgagagatactatcgtaagttttgcatatattaactcatttagtcttcacaactttataaggaaggtatgtattgtctacgattttgtagataaagtaactattatctgaggaagttaagcaacttgtccacagtacacatctgataaatggtgaaacgagtgtttgaatttgggcagtctagcttcagaaccactaaactctttagcactattaggctctactattgaaaaccttgattacaagagcaaaattaccaggatattctagtggaatgagtcttctaactacttcagggaaaacgccaatcgttttgaaatataatggtgtttatggtttatttgtatttcataaagatgtaatttcataattctaagttcttagttaactgtgttgtgatctctctgttgacaaaatttcatttttaggatgctattcctatgatcagcaaactgaggtacaatcccagatttgacaaagctttcaaacatgtgtttggaaagactcttatttgtcgtagcatggaagtttcaacccagctggcccgtgctttcactatggactgtattactttggaaggtttgtaatactaattcttagctttaaacagataaattctaacaaatcatttaaaacatataatctggctgggcgcagtggctcatgcctgtaatcccagcactttgggaggctgaggcgggtggatcacctgaagtcaggagttcaagaccagcctggctaacgaggcgaaaccctgtctccattaaaaatacaaagattagctgggtgtggtggtgtgcacctgtagtcccagctactcaggaggctggggcaggagaattgcttgaacctgggaggcagtggttgcagtgagccgagatcacgccactgcactccagcttgggtgacagagcgagactctgtctcaaaaaacaaagagacatataatctgtataatatgtcagttgagctgtatgcatgtctgattaatatatcttacagtattttggagacattctggttttgagagtattcgaaaaattcatcctttgcctttggccgggcatggtggctcacatc

SEQ ID NO: 62880 - DNA, 1098 bp, Homo sapiens
actggaggttcttttttttttttttttttttttaaagactgcaaattttggctgggcacagtggcttgactctgtaatcctagatacttaagaggctaaagcatgaggatcacttgagggcaggagttcgagaaccgcctgggcacatagcaagacctggtctctacaaaaaaggtgtggtggtgcacacctgtagtcctagccactcaggaggctgaagcaggaggatcacttgaatccaggagtttgaggttgcagtgagctatgaccgcaccactgcactccagcctgagcaacaagagcaagaccctgtctcaaaaaaaaaaaaaaaaaaaatctagcattgaaaagcaaaattttttcagggtggtttaaattactttcaattctcattatctacttaaagcctgtaggttagtttttttgttataagtcaatttatcattgaataaaaaagttgtacagacctattacatatgttttgtttataggtgaccaagtcagccatcggggtgctctaactgggggttattatgacacaaggaagtctcgacttgaattgcaaaaagatgttagaaaagcagaagaagaactaggtgaacttgaagcaaagctcaatgaaaacctgcgcagaaatattgaaaatatctttttgttttgtgcatagtgatagatattgtgggggaagaactgtgttttggttgccatatataatcttttgttttttcacatattaaaaatttcttgtgttttaagttcaagagcttatgtttgtttagcttttgaagactaaaagctattttaatgattctttgcttaagtgttaagtagctaataccatgaagtcacttggaagaaaagaacccatagaacacaaaaataaaggttgtatcaggcaaagaaagaggaaactgagaaggatcagtttgtgaattgtacaagtaaaaccttggtagtttttttttttttcccttcttccctgttgaatttatgtaagcaagagatactgttttaaggaagagagtgggggcggcatcagtaatgttacatattgcttagaagtcaaatatataaggactggcattttattgtacttgt

SEQ ID NO: 62881 - DNA, 3568 bp, Homo sapiens
ggattgcaggcgtgtgcctccacacccagctaatttttgtattttcagtatagacgggtttcaccatgttggccaggctcgtctcgaactcctgacctcgtgatccacccaccttggcctcccaaagtgctggggttacaggcgtgagccactgcgcccggcaactttttgttcttataatatgcctgaagatttttgtatagtttaatcatggaatatgatctgccccaccctgccccacctatactattacatcatatttttcttgttgctagagtcctaattaccaaattaataggcacctaatatttgagttgatatgtctatatatttagctcaatcaaatatagattgttttaaaattttcactataagtaatacagtggctaataccttactaataaatggataatgtcatatagcaacgtagcttacagagtttggaggcaagcttgcatgctatggagtctaccagagagtcattgaaagcagaactgggaactgatttgctttctcaactgagtttggaagatcagaagagagtagatgcactgaatgatgagattcgtcaacttcagcaggtaagtagacagctgactggaaaaagaattcgttagtaattggctattgtgaaaagggcctttcttgctaactagggcaatatgaaagaaaagaactgagaaaatattaaaatgaggcttggacttttaatatacataggagtaaataagattttgtttttctaaaccaatctagctaggttaggattatacaagaaattttcatttccttaaaatttagttaattagcattacttattagttgtaagtattgctatgagtttgagcttgttagccttaccatatttatcttactgcctttacatatttaatgttttgatcaagcattttaattgatttttaaaactgcatagatgtaaactaccaacaccgattctaaaaaatgaaaagcatttaaagaaactgtttttgacagcatgcgttataaaaagggccagccacaaaaatttaacattatgaattgataagagaaaaatgaagaaagtatagggcttttttgaagaatataacatattaaacttcatttcagctcacatgagcacaagtactagagaggacagcaaatgagcaccattcctgtgtgtgaaatgtacatgcttatatagacaactttttcttaattctaggaaaacagacagttgctaaatgaaagaattaaattagaaggtattattactcgagtagagacttatctcaatgagaatctgagaaaacgcttggaccaagtagaacaggtgtgtatgtgtttttttttttttttttaagggctccttggtggccatgacctattgcaagtggttatatcagaggctctgattgaaagcatgggctttggggacagaaagcttagtgtcttgtgggccttgggttggaattctgccacctagtgtgtgattttggacaagtcactatttctaagcctcagtttcttgtgtgaattaagcattatcatacttgttttatataattgctatcctgacacattctaagtactttgttaatattttttcagtggtggttagatgcttagaaattttctagtaattgtgtcttttttttcttccctttaatggatacttctaagtatttgtaattatatgatgtatttatatttttttgttttcttgaatgtttattcagacaatagccatagaaaatgttggcagtcataacatttgaaactaatggaatttgtattttttgttacaggaacttaatgagctgagagagacagaagggggtactgttctcacagccacaacatcagaacttgaagccatcaataaaagagtaaaagacactatggcacgatcagaaggtgaatttttatgtagtaaaattttgtttatatgcatgttttataaaattgtttactacagaatgaaatgtccaaataggcagaagcatatgctaatgattttttgttttccattataaacaatgtatagcaaatggaatttaggaagttgactataaatagtaacttttgttttactgaaatgtttatgacaattttgagaccataaatgattcattttgttgataaaatatgaaatacctgacgaaagtttctcatcacttagttgttagaaaataactatagtttataagcattaacattgaataatgaaaattatatatttgagtgactcatatatacttctaattttgtactgacttaacatggttcataaattttcacagaaaattttaaacacaaaacctaaaacctattttggtaggtttgatcataaaaatctatactcaacatataacactggctttataggtattatagcctaattttgtttccccccatcttagatttggacaattccattgataaaacagaagctggaattaaggagcttcagaagagtatggagcgctggaaaaatatggaaaaagaacatatggatgctataaatcatgatactaaagaactggaaaagatgacaaatcggcaaggcatgctattgaagaagaaagaagagtgtatgaagaaaattcgagaacttggatcacttccccaggaagcatttgaaaagtaccagacactgagcctcaaacaggttggttttaaatttgaagtcttgttacaaattgctcagtatataaatttatttatatgaatacatattttctctttatagttgtttcgaaaacttgagcagtgcaacacagaattaaagaagtacagccatgttaacaaaaaggctttggatcagtttgtaaatttctccgagcagaaagaaaagttaataaagcgtcaagaagagttagataggggttacaaatcaatcatggaactgatgaatgtacttgaacttcggaaatatgaagctattcagttaactttcaaacaggtatgtttcgctttgtagttaaaacatacacacagaggacaaaagcttccagctcttttcagtttgtaaagattttaaagctgttttcctcattaccaggtgaatctaatacatgtgaacaaacctagcatataggtttacagtaacttgaatgttttacacagcccttagaaggatctagtctgttatccttgttcttaagattaaaaaataattggttgcttttaaatattttacttaagtgttatatataattctaagcaaaatttatatttcaatctgcttttgttttaaggtatctaagaacttcagtgaagtattccagaagttagtacctggtggcaaagctactttggtgatgaagaaaggagatgtggagggcagtcagtctcaagatgaaggagaagggagtggtgagagtgagaggggttctggctcacaaagcagtgtcccatcagttgaccagtttactggagttggaattagggtaaaatacctttatattccattttcctcagagcattaccataatagaatttatagtatcttttgcaaatctgattggtgcattatatgcaagttacttttgaaagatggtggtgattctgccctttaggatat

SEQ ID NO: 62882 - DNA, 1148 bp, Homo sapiens
accactgtaaataaaggttttataagtcagtgcttcagaattattttccttcatatgtaaaatataggtgataggccgggcgcaatggctcatgcctgtaatcccagcactttgggaggccaaggcaggtagataaccaggtcaggagtttgagaccaacgtggccagtatggtgaaacccccgtctctactaaaaatacaaaaattagctgggcatgctggcgtgcacctgtcgtcccagctacttgggagtctgaggcagaataattgcttgaacctgggaggcggaggtagcagtgagccaagatggtgccactgcactccagcctgggcaacagagcaagactccatctcaaaaaaaaaaaaaaaaaaaaaaactaaaaattaaaaaatgtagttaaatgtagttgataggctgtatatatttaccctatacaatgtaaacactgatgtaattaacagatttttgtttttaacatttattcttcaggttagtcatattgatgtgatcacagcagagatggccaaagactttgtagaagatgataccacacatggttaattggaaaatactacctactggtttgggagatgtatatagtaatatgattctcatacccaggaactgtaaatttaaacctaaatatttggccaatagttttcagacttaaagcatcatagtccttttatatttgtctttgtattttataagatactctgtaatgtcatgtttgtactgatagtttaagaatttaatttcctgtacaactttttgtaaaatgttctgctcctattttaaatgttttgaaacatgctaaatattctttcctaattattttatcacttatactaccttttttatagcttcaattaaataatcggttttatgactaatatagtgttttatgtggcttttcatttgtcatagtctcttccagtgagaacactaatcagattggatgtaaggcctcattttaacttaatcacctctttaaaagacctgtctccaaatacagttaaatttgaggtattgagggttaggacttcaacatgtgagtttgggaagggaagcacaaaatcagcccctaccatggtatatttatcattgatacattactatcaactaagctcaagattttattcagatt

SEQ ID NO: 62883 - DNA, 1468 bp, Homo sapiens
cgggaccgcccctcccttgagctctctcgccgcgatcccgggcgggtctcgccccgcatggtgctggcagcagccatgagccaggacgcggaccccagcggtccggagcagccggacagagttgcctgcagtgtgcctggtgcccgggcgtccccggcaccctccggcccgcgagggatgcagcagccgccgccgccgccccagccaccgcccccgccccaagccggcctaccccagatcatccaaaagtaagaagggagaagggaacagggaccacgggtgcgcctggggacacgccccgagagccccctttgtggcttcatttcccgtccctgctgaacttcgctcgccccccttgggtttgaagttttctcgtaccccctctgggcagagtcggtgtccttctggctgtttgttaggctggaaagaggggagccaagttctttagggaaaattattttgtttttccttatctcctttctcttctcttcaggaatggtactagatattttgaactaaaatagctcagattggggggaaatggcccagcgactgtatttcatctttctggtcccaagaggacgctggaatggagagtcgtgcgtgagtgtgtgcgcgcgcgtgagggtgtgtaagtaaaatgccaaaaattaaaccacccttcatggtgcccctgaaaccaaccagtggaaagggaggtgacagtttgtaaacaacatgttttactttgccctgaaagtgtagacacttttcaagaaggccttttcgaagagtttagctacgcaaccgttttccattaatgttaccatcttgtgactcgggtgacctgtgcgacttgggtcgtgaattctcaggtcggccttcccaatgcttgagaaggttgggggtggttaataagccccgagaggctctttcagcccgtttgaggaacatacaagtaaaaacagtgatgctttgtattgtttgttcttttgagatttcgtgtgaccgtttaaggcctagaatgttggtttatttgaaggatctctgctctcctaagggtttacccagtttgtaatgaagtcttcaaaactagtttaataagtgtaggaaagtgaatgatgcgcacctctgcgaaactgacaacactaaataaatacacgcaagtacagcaaaatttacccttatggaacacagcagaggttttctgctgctccgctgatgctttgagtcctgtaaatttaataaaacttagtaacagaaagaaccagtgatgggtgtaaatggaagtaaatagcagttaagtatttattgttttgaagactgatttatctaatagaaagaattgtgaaaattcaagtttaacattagaaaacgctggtatcatatttcagaacaaaatggttccctatgttgactggtggaatactgagtctccacttgtgacaactttttgctttaattggatattttatataactttcaacta

SEQ ID NO: 62884 - DNA, 1178 bp, Homo sapiens
taaagtttacttagtgaaaaatccaatttggccaattattaatttggaaacatctgatgtgcttcgtacggagccagtgtcttgcggcttgaaatcaggctgcatatgaagttaattgaaattgcttcggtattgtaattaccctgcacttttctattacttacttttaagtagaagaaaactgggaactttatattcacagaaaagtctttgtagaagggcgtctgattatgaaatactgccaggttgaaaataaatatcattttatggaaatggatcatttaaagtatattttatttgcctcacataataaataatttaccctctaaattcatcccccattttgaaaatcccatctttggaatatctaattttaaaagaaaagactcagcttttcaaagatggccccttctacttgaagggcaggatggagacctcaagaagcgcctcatggctttgcttgctttacattggtgacggatcagtgttcagggaccaggtcccagggctgtgaatgtgcccataggatttgatgtttgcgcactgacgtttcagtctttctttacaaggatgatttggagcttgtgctctccttagtacccactgaaattccgctggaaccagatataatgtcgcaaacgctttgtaggtccatcttcaatgcgccgaaatttgagcaggttattttgaaactgcatttgcataagtccatctgagcaaacatttttatggagttatgaggtgtggtttgcatcagccatctttgagaaaatatagtggagctactgtgctcggctgcaaaacaagttgtctgcctgttgatttggggaattttgtgagctacagctttggatgaaattctcctctggtggaacacatattaaatattattagagaacctctattttttctagttattttagtgaggtcgttatgtaactggtaagaggagaagttttgattgctttcaaaatgatggcgacatcaatcttcttcatgttgcatagtgcgtttgaagattacaaacatttttccacttactgtctatgtttactgatttttattagtaatggcttttattttagatcaaagtcaatgactttggaaaaaccatagtaacaattataataaaaatcagttcctgttcacgttatatttggtgtttagagaactgccgt

SEQ ID NO: 62885 - DNA, 1096 bp, Homo sapiens
atttggatcagtgacataattttaaaagtcagaaaaataaacactaatgtcagtgaacaggaaaaggttttatactgttcttcaatctctaaaaatgtttttggtataagaataattttttggaatgttaaagtaagtactttaacatttactttaacaaactgaaagtagcactttcagcttgggagacagagataataattttcatgtgtctgaattggattgtgttaaacacaggccaacaggagtgtgtttggtgacatcgatggtttcagagtcagagaatgtaaacataggacccacaaacgttttacaggagcacggctgtggctactgcagggactcctgaaccgtgacgcacagtcagttggccgcagagaccagcctggagctcgccctaaaacctctttgcagccttgcagatgtcatagttgtcccaaagctgggcctcatgcttccgtgtagcctcactgaatcaggagaccgagtgtttccagagccaggatgtgggcgctgtggggccagtgctgcatcctcctgcgctggcaatagcagagttgtggagaaactttatttggtatttgaaatgatcaatattttaaccttctgcataaaaagagagagaagtctgtgattaaatcttgatttaaagtcttcaaatatgtacatacatgaggatgaacataagcatatttatttcaacactgtctagaaaagtgaaaattagaaaccacttaaatgtttctcagttggaaacataaaccatgtgtaggtataaggtcatgtactactcagccattagaatgatgctgctattttgcattgattgatatggaaggagaaccatataatattaactaaaaaaattacaaacagcatgtatgcaaagatctcatgtttgtttttgaaaagatgtgtatgagtgtgtgctggtgcctgccagccttaaaaaacatctgaagaacaaatgtaaagaacattaacagtagttctaactctgggtggggcaattagactggtttgtctttttttcttcctttttaatatggtctatttttttaaaattcagtgagcatgtattacttttacaataaaa

SEQ ID NO: 62886 - DNA, 1035 bp, Homo sapiens
ctcctctcaccccatcctgctcacccacccacacgggacttttatgggagtggcagtagactgggtctctcctgggcatctcatgctctgttccttcctgccaaacagaagccaaccatcacattttcttctctgctcttctttgttcaaggttactctttttccccagatccttaatagaggaaaaacccagtacctaccttcctttcatacccagaaacgtcctcttaacaccttcaagctgtggtttaaagatgaaccttttgagatgtaaaagcataactaatatttaaaggaaacaaaacacattttacttcttactcccaagccagttataggaatgcccattattatttctgccaccccaattcccactctgcttcaaatttgtttcaaccaaggatataatttggactgtatttttaaaaagtaaaccttgctttgcggggactatatttgcattcttgcttgcccttgagtgtgctctctcttgctttttcttttcctgaactatttgaaagtaatttgcataactataattttgttatcatagctcaggaaattagtcttatttaatttttttctaataaacactaggtttttaactttcatttgtcagataatctctcatatagctgatttttttttttttgcatttgtttataatgtctttctctttttttgagacagggtctcactctgtcactgaggctggagtacagggtgcaatcacagctcactgcagccttgacctccctggctcaagcaatctcccacctcaaccttccaagtagctggtactgtagacgtgcaccaccacgctctcctaatttttgtattttttgtagagatggggtttcaccatgttgcccaggttggtctcgaactcctggacttgagcaatcctcctgcctcagcctcccaaagtgctgggattacaggcatgagccactgcaccagccatttcttctttttaatctaccaagtatacccacctctttctactttccaatactgaagattacaggctagttg

SEQ ID NO: 62887 - DNA, 1014 bp, Homo sapiens
aaggttcagactgcatggaaggcctttccagatctgccccactcagccctccagctccagaacttcctgtcctctcttggctgccctctttccctctcctcaactagaacattctgaattctgcttagacctcacctcttccagggagctttccccaaccctaagcaggaaggagggctgagtgaccctcttcctgtaattgtctgtggctcccatagtagcatttgtccgtgctctcctcttgcttgtctcccataaagaccatgcaaagtccttgcagtcaaggccactgccactcacctttgctatcctcatcacctagcagagcccctggcacatagtgtgttgaatatctgggaatgaggaacttaactgcaactgaactttcaatctaactgacttggtgatgagaaatactagtcaggatgctctcatgggtgagacctgatgtgacgccaaagcttggttttctccagcttatgttttatttggactgcctgtctgaaagggctagacagacatttatgttcagagaggccatataagaagaatataaatgcggaaagtcataaacttcagctctgctctgggctccactctcaagccactgtgtgaccagaggtagcacttagcttcttagagtccacatgggttaaagggggaccagggtatggggcttgttcaaacagtcaatgagatgacaggtgaacatgccttggtaggaaagcagtactgaatacatgtgtcctcatgtaagccagctttttgtctcatgctgtcatctccagccagaggccagattgtgtgcaggcaatttccaggctgaatttctgagagatttgatccaaataggataaatggtggaaatgaccactaggaacactccttaaaacctgcttgcatcaatgctttcaatgatacatttctgcatctcaaaaaaaagtttctaagccctaagctagcatctgcctatttcaagcaatttctgttcttttttttcttttcttttctttc

SEQ ID NO: 62888 - DNA, 1033 bp, Homo sapiens
tatctgtagattaaaaaggacttaaaatacttatcagcaaaatgtagtatataattcttgtttgggtcctagctcaaaacaaatctaactgtaacatgtatacatgcatgcatatacatatatatgataatctatgatatatatgataactaagatattatatttgaatagtgaggttaaagaattatttattcatgtattatttatttgattatgtgaacattaaaaagaatattatttattagttacttatttatagctgtggtaatggtattttgattatgttaaaatacagaagttggctgggtgttgtggctcatggtcgtccagcactttgggaggccaagatgggcagatcacttgaatccaggggttcgagaccagcctggacaacatggtgaaactgtctctacaaataatacaaaaaattagcccagtgtgatggcacaaagaaagaaagagagagagagagagagagaggggaaggaaggaaggaaggaaagaaagaaagcagttatactctagggttgtatactaaagtatagattaaatatgatatgtctgggattagcttcaaaataatgaaggggggtgcaaaataaacaagattggccatagattgataatttttgaagctgggtggtgagtacatggaaatcattatattattctctctacctttgtataatttgaaagtttccgtaataaaaagttaaacagaacaagacatcagctcagccacttggccagttctgttttcagatgtccttaaatttaatattgggctgtggagccgacagacccttcttaaaaatcacctgggggctgggtgcagtggctcatgcctgtaatctcagcactttgggaggctgaggcaggacgattgcctgaggccaatagtttgagactagcctgggcaatatagccagaccccatgtctacagaaagtttttaaaaaattagctggctgtggtggtacatgcctgtagccccagctactcaggagactgaggtaggaggatcatttgagccc

SEQ ID NO: 62889 - DNA, 1049 bp, Homo sapiens
atagaccgcattcctcccactgtggccttattgggccctttctgttgccaccatcctgggctttggattgagagagatctgggttaggtagcacagcctgttacttaggatgtgtgtggtcttactgttctgtgccacagttgtttcaaccaacctcatttggctgttgtgaggatgacatgagattgtccatatgatgcttaccacagtgcctggcaagaggtgaggtctctgatgttcatttagaaaagaagactgcagtgcattcaccaagatcctaagaatcccaaggctgggccggagcttatgtgtttggacatccctgtgacgtgggtacccccactgaaccccatgatattctccagcactttcttggggaccttgggccaccttgcctaagtttgggatgatcatttagcctgaatgaggaggctcagtgctctaaggatggcattttttctacctggctccattttattttgtcatgtggcttgatgggcatggacagtggggaagatcctgcctcggtgggtgaatgaaaggtaagtagctagatgactagaagccagcttgaactttgccagctttgagattggaaggaaaaggtgaaattgcctgctcttcctgaagcaagcaccacattttctctcctttctaccttgtttgcctcttacagccagaacccagcccccttttcatcactaatctcgtaacacacagggcttcatcctggcagtgtcgatcttttcattagccctttaagaatgactggcaaatgcacttgtttgagtcatttgatcacctgggaagtgtctgggagccatgccttggagtgcctcactgatcacaaagccatccagtgtggcctttgattcctgggcccctggtgtcctgctcactttaccccccatgcatgtgacctgcccactttctggggcttgggtgtgagtgagtggtgcagggaagctaagccagagggagccctgatttacgaactgtccggatttaactgaggctacagcacttttattaatagaacatgctgcatt

SEQ ID NO: 62890 - DNA, 1032 bp, Homo sapiens
ttttcatgatggcattggcgctgccaaagaaagtcactttcccatgccaggagaaaagaccatctctcctgtggctgcctcgaagcccccaggcctagaaacgtctccaatcaggaaacagaagcctccagtggatcatcttcagggatcgctggagaaccacgtgggcatgtacacatacctcctcactgagctgacttacccaaagttattattcacctactgatggacaatgatggttctagtttttctgtcttatcaatactatagtaatggctttcttcatgcatgtcattttggaatattttctcagaatgggattattatttctaagcgtatgaatatttttattgcttttgatatattagccacattgctttacaataaagttgtacctgtttaaaaagttagcagtaacataggaggatattggtctcacaataactaagcggaaccactctgcccagctttgaattccagcttgacacttggcatttaccagctgtgtgaacttctgcaaagtatttaacctacctgtgcctcagttactgcctctttaaagtgggagtgacacagtacccacctcataggtctattattgggaatgagtatttgtatattgctcagaacagtgtctaccaaagtattatgcattgtgcgctcgtgaaacaaacacctctccagctcaagattttttttaaaaaactaatttaatagaagtaaaatgacactgtttaagatatatatatatatgtatatatatcgacatgcttattaaccgtatttacaagaaacactccctttaaatctctttattggtaaagatatcttttaaaatgttaatttacagaagagatccattctggtgtgattattgatattatgtaggaattctttttcagcttttacagagttgctatccctttagggtggagtctcatcaccaaaatatcacctgggacccgaggtgctgaggctcataatcagccacttagctctgaagacttcaaattcaccccagagggacaaact

SEQ ID NO: 62891 - DNA, 1096 bp, Homo sapiens
atgagcagacttgaattacataacctgtagctgcacatttttgtcgtgaccacgcaagctcaataatgtctcccaagtcttgtagatcactttgaagctcactggattaatggtgttgaatctgtttaatccaaataatttgaattgcatcaggaaacctgcatattaacaagctggtaataagtgcaggcgttaagattgatcactgcttaagtcttcaagatcacatacaaggtctggtgtttttgaggctgtcgatgtactatattttttagattctttcttgatttcattctgcactcttgacatttaaaataatttaaatcaataacttcagaattctcccaccggaggatatgcctatttgatgtgattgtgtgtctgtgtgtgtgcacacactagctctgtattattgcctatggaggacatagaaatatatcatatactgtcctcaaggagcttgcaaccaagttgtggggataaggcaaacaaagtcaaaatatctaatacacgttccaaggcaggatgcaattctgtatccatggtacattgctgattgctgatgatgctctaaatgctgactctaaatggtggactgcaatttgtctggaagaagaacaatggatcatctgtgtttgggggagacttcatggaggtgggatttgggggagccttgaagaagtgagcaagttttggataggtggaagtgaacttactggctatacccggaaaagagcaggatgggaataaaggaaaagagagcctgttttggtgaataagtttaatattgaattgtgatagtcaaaaaaataggtaggatgatgggctaggtttgggaggaggctccaaagttaagaagcgaggcttatccttgagatcatggcctttaccacaaccagcaccatcatcattatgagcagctgtgtcttgcattcttataatgtggttctgaggactttacatgtagtatcttatttaatccccaaacaaccttatggaacagataacaattgttatgtccactttatagcagaggaactgggatataaagaagtcaaccaacttccagcgggtaaggtatgtgggcaagcagggg

SEQ ID NO: 62892 - DNA, 1027 bp, Homo sapiens
ggtcttgcctgagccagtgtcactcacagtggaggtccctggaccagcagcatcagcatctacttaggaatgcaaattctcaggccctgttccagagccaatcagtctccttagtgggcccaggaatctgtttttaacaaagcctctggtgattctgatgcctgcggaagcgtgagccacactgggctagagtttctttggccagggaagtgatttaagaattgtacgcatccttatttcctctcctcagtaggaagtcaccatagctggttgcaagagaatcgcattttaaatctttagatgtacatgtccccaaccctactcccccaggacttcttacccaggactcagctagtcccctggcttttttttctctccagatctcatgtttccagattctgtgctcagtcacttcttgggaaatacagatggggttgggagggaggcatcctcccctttgctgattgctggaggggattgagctgtcacgtcagacctctgctgaatgcccactgtgtgcaatgcctgcaccacagtgagcagtgcacagtcctcatccccaggacctcagaaactccaagggtggcagaccttggaagtgatgaaggtggggatgaagtggcactcactgggctggatctaggagcacccagatgggccaagcgcaaccgtgggctggggtggagtaggagggcttcctggaggaagtactgcctgggccatggctgatagggcaagtgagtggcagcagggtaaagagagggagagccaaagggaatttgaggctgaaggagcagcacagcttaaagcacactctggagagggtttcgtccaactctgggggaccttttttgctttttatgttactagatatagtaaagtctgcaactcttacttttacagcttgatgaattctcaaatgtgtgctcatccctgttaccaccacacagaccaaaagactggagatttccagcctcccaaaagggagcccatccacagctccctgccaccaaaggcaacccccatt

SEQ ID NO: 62893 - DNA, 1087 bp, Homo sapiens
ggctgttccccactgctcactcctagccagctgcacttttgttacttgcctggcccacttgggcttggcccatgagttttcaatccctgcctttaaatatggttttgtttcttagtttggggcctcctgcatgactgagggtgcttagtaatttccttggttcactcttcagtgtgtattgagcactaactatgagccaggcccatgccaagagctgggatacagaggtgtgcccaggcagagggattgaggtattgtttgttgtttgccatgcaggcagccagaaatgtggcacagtcctacctgcatgagttcacttctcaccacctccttggatgccacccatgctggttgtttcctggcccctgagcccaccttgtttcatgatcatcacacatccactgtcactatcccttcatttcctccctgtctggtcctcatccttccctcaagcttttgctcaagtctcacctcttccaagaagtcttcactgaccagccctttctcttgtgatgcctccctcccctgattttatcagcgtattccccacaccacaatcccatcaattctcaattatttattccctcacattgaagaaacaggggccttgtttctttttttttttcttttttttttttgagactgagtctcactctgtcgcccgggctggagtgcagtggtgcgatgtcggctcactgcaagctccacctcccggcttcacgccattctcctgcctcagcctcccgagtagctgggactacaggcgcccaccaacacgcccggctaatttttttgtatttttagtagagacggggttttactgtgttagccaggatagtctcgatctcctgacctcatgatccgcccacctcggcctcccaaagtgctgggattacaggcgtgagccaccgcgcccggcccttgtttcttatattagttatcacaggccctatgggcaaagacttcccctatacttcccagcattgctccagcatgccctgcacagttctgagcttatggcagatacccaggacacacaggaggtgggctgggaagggcaggggagcaccggaaaaagaggctgtga

SEQ ID NO: 62894 - DNA, 1035 bp, Homo sapiens
tgggtggctgagaaagactccgtctcaaaaaaacaaaacaaagcaaacaaacaaacaaaaacctctctttgcttctgccttatctgggaggggaaattttcagactcattgcaaaggaaatgtcatttaaatgtgaaaactgatgcacagagctgagtcattttgggatacctgtgtgagccgggggttccattttcctggtgacccttctcaactccgttcccagtggttctttctcaaaattacagattgtgaagaatttttttttttcctcctagtttcttccagcctggagttcacagtggggcttacttctcacctggtcagccaaagcttaactgaaaatctccaagagttcctgtctttagaaacccataaagtccggtcctactccctggtactgattctcctttttttctgaatggtactcgcatcagcctggaccacggggaacatgctgttcccatcatttaccccgtgtatgagccggagatttcactgttagtgttaagttacagtgccttgctggttgggagcttgccttttgaaaagttcaggtccagccctcctttgccttatcttgggaaatgactttctgctaaaataatttcggtttgtacatatgcatgtccatgcacacaccccagctccacaccatccagtgggaaagggagtcagggatttcatggtagctgtcattttgatgaatgtccctgtgtccacccacagaggccgtgacattcctgcctttcccacttgataatctgaaaatctcccaagcctgattgccttgctataggcctgcaacctggaatgctgcataggttctgagtttcaatccccagggtccgcactggccaggatctgtaagagcctgtgggcttgatgctgataaggcagagagctaacgggggattatcagagagggagagtgccagacaaggtgcattcctctggggatagagcagcaggactttgggagctgggacaattgtgtgaagcaggacgtgattgcgtggtcttgtttcagccagc

SEQ ID NO: 62895 - DNA, 1075 bp, Homo sapiens
ctccccaatgtgcccacctcttctttctgttttccagcctctgctgggcaaaagtgggaagttgctctcaagtgttaaacgtgttcactctcaccaagtggaagattttacattagaattcaatcattctgtttacttcctttaaagtcgagagcgtatcagctgagtgtggtggctcacacctgtaatcccaacattttgctaggcctaggtgggaggatcacctgagggcaggagttcaaaagtgagacccccccatctctaccaaacaaacaaacaaacaaacaaatttgctgagtgagatggtacacacctgtagtcccagctagtctggaggctgaggcaggaagattacttgagcccaggagtttggggctgtaatgggctcggatggcgaccgtgcactgcagcccggggcgacacaatgaggccctgtctctaaaaaatacataaatgaagttgaaagcatgtgaagtttatgattggctttgtgatcggaaggatgtgtcatgctttcccctgggtgttgggaaccttctgaaagaactgctgtcggaattcagggtcttctgtgcctgtccacccactagccctcatgggcgtaatgcagagatctcagaagggagagctctggatccagactgcttatgttggaatcatcttccacccacttactcactgtgtgccctttggacagttatttaaccactctgcacctcagtttcttcatctgtaaaatggaaattatggtacataccacatatgattgttagaaggagtcaatgagttaacctttaagtacttaaaatggtatctggcaattagtgagcaccatgtaagtgtttgcttaataaatattaagagtttggggtttggggtgggttttttttcttgtttttttttttgtttttttttttggttggcttaatacctttctaactgaaatttttgttgagataattgtagattcagatgcacttgtaggaaataatttaggccaggtatggtggctcatgcctgcaataaagcctcactttgggaggccaaggcgggtggatcacctgaggtcaggagt

SEQ ID NO: 62896 - DNA, 1178 bp, Homo sapiens
tgagtttttttcattgtttgtttggtttttgcataaagaaatgtttgatatcacatttgtcttgtccgtgtttcttgtgacaggccccagcactagtgtggcaatcctcaactgcaggcttctgaggacagaactgtgtgctgcctgcttcactctctctccaagctccttttgcaatgcaaaataaggtgtttaataaatgatgaggctggtgaaggtggtctgcagtgacagccttcatatttaattcactacaccctcattctttcctattctttagaagtactgttgggaccttcaaatctcataaatattctactgccctcctccccctcctcctccctcctctccagaaaaattccatctgtgcaaatcccattttgttccaagggtgataatcttcagggaaacttatggaatgtgatgggtttactggagttcctgggtgacaggcccccaagaacccccttcagttctgcagagcttactgtagagatgacatcaatgtcccctggccatctggaatgaactgagtgtgaggtggagagagtgtgggctttgaagtgtctcccacctgatttgaatcccacccctgccgttgactggttgtgcgacattgggtctcagttcagatcttgttcacttgtgttctgtagtggatcctggcatctgttgctccatctgcctgccacagtttcccatccctcttcctctggttttgattccttgaggggaattcctcatccacctcacatggtcctactgtggctatcagtcatggaatcacaaagggatcttcctcactcactggagtgggcaggtgacccaaagcgctccattgcactggccccactcactgtgcgagggaggagcctcattctcaagcaaccccagttagcatttctcctgggactagtgcatggagagaaacaatcccttttgcacatgggctgcctagaaagaatgtgagtctggggcttcgggcatctgttctgtttgacatgtggcaatatcctttgagaatgaagaaaaacagacaagcagcctgagagctagggcgggggacagaggcttggccacatggcttccacccttgcatgcagtgggcctggagtcagcaccacccctgacttcccaaggacagaagccagcacttcccctttttgtttcagcaactt

SEQ ID NO: 62897 - DNA, 1052 bp, Homo sapiens
ctccagagctggttcatggtgtctcaattcagttcatccccgtccccaaccctgatatttcttctagtgcagaatcagtgaccccttccctgccctcacccctggcgggggatgtgtaatgttgagaaggaggatgaggtgaaaccacacggtatagagccgggtgtatggctgggaggattgacgatgtggcttccaaatacctacccaaacgggtgtcttttggaggacgacactgcctctggataaatgatctctgggtacacagaggaggcatgcagtgatttgtggttactatgaatagaattgcccatgcagggctagctccttggggttctgtaccctgattgaggtcatggttaatcaggggtgcattctctttcataatccctggggatcttgcctggcatttttgtttagctggagaaatattggcttcgctctggccacaaatttcccacactggcgtggctcggcgctttctggctgccttggagatcctgatgcctgtgactttgcagaatgcccaggaactgctcgctcagctactttcactctcgctctaaagataatcgcctctaaagcaaggtaatggacatgttttatccccagcaattcggtttgcccttctggggtgcttctcaaaagaacagcctcagagatgctgacacgtgacttcagctaaccagcttgtgtgggtgtgatgtttaatcatgcctgtctttttcttatcttttcattatacctgcgaatgtctgttagccacatccattagatgcatttcttctcttttttttgtaaaaatcaaatcaacccctcccttccattggatgaggagataattatcatcattcactgaaggtcgacattctgtcttgaattatttgtctttgggcaagagcttgaaagaagcattgtaattccaacatatcttcttgattaaatctggtttttagaatgtcatagagtgtgataagagggtctcatttgtgtcccaggagaaactgattcgtgcttccttggatgagatgttgagcaaaaggatggtgaga

SEQ ID NO: 62898 - DNA, 1341 bp, Homo sapiens
gagaatatctttatgacctgagaggttaaaaagaattccttagaaaggatccaaaaaacacaactcagaagtgaaaaaaatgataaatttgactaggttaaagtattatgatttataggtgtataatataagattatggcctagaagtatacacataggtgttgcctctggacacagagtgaggggagagaatgggacaggggacatcagctttatccatcatgtgaaaaatgataaaaatgttaacattggttaatcctggttggtggggacacaagggcttgttacacttagaaatatttccatgtttaaaaaatttttaagacaacacaaagcaactaccaacctcagcatgaaaggtggaaactatcgttgtatagggggaaattgccaaacccaaaatcctgattgatcttatcactgccatcagcaagctgcgtccatgggtgaggaccttcctctcaggggctgtgtgctctggaaaacaagagggttggactgattactagcttaggtcctcctcccttgccagcgctcacattttctcttctctctgtggggcaggttacaactgctagaggagcagagaaggaagaacgcgtggggaagagcatcgtcacaagcattaagttctatccaagcatggggaaattgttttcattgcattcaattcttacttacccgacctcttaattcatagatgctgcctgatttcttttaagctctagaccttgctgttttccttgacagggtgaaactgggtgttctgtaatgaaatgtgtgctccctgacaagtggcagagattctgaattttctgggactgactaggagcatcatgctgctgacatcagtgtacctgcttaattgggcttcattattggtctgaaatcatgaggcctttcaggagccaagaaatacacctgggtatggtggggtgatgaaggaagggtgcgatgggtctctaaggaggtaccagtgttttaagcaaggtggtcatttgtgggctggtaatttgaaaatgggagttgtggaattctgctttacctgcagacctgctgaccacttctgcctgagttttctcatctgcgaagtggggcagactagagtgacgtagggcatgctttcctttttgccagcagagagagggctttgaaggtaagaggaaggtagtgtggttttccactggggctacatacttatagctatcactgctgtcaatctaagcagggagtataaccaatgtctccatcatcttaagtaatttgtgtgtgcacagattcttcagaccttacaggatgtctctgtaaaacctgtctgggtgctagatgacaagaaagtct

SEQ ID NO: 62899 - DNA, 1050 bp, Homo sapiens
accatatgtcctgctttagaggagtccacacgcccatacaaaatccagtaataggatgagatatatccaaagtttaaggcaggacatatggttcactctctgtgaggtggcctctttgagaagatgacagtagcactgggacgtgagtttgagactcagtcacatgaagatatgaagcgacactgcccagcagaaccctccacctgccgccgatgatatgtgctgtctagcatgataatcgctagtcacatgtggctgttgagcccttgaaatgtggctaacgcaactgaggagctgtgttttaaatttaatattaataatttaaatttaaatagaaaaatgtggcaaatagctatcctattgaacagtgcagatgaggggaaggacgtttcaggtagggagggcagcttgtgagaaggtactgaggatatgtcaccctgtggatccaacatgagatccctgactggaagctctggtcagtttttaaagagcaaatctggaaaatttaatgatgtttcctgcttctgttttatgggcctctggagaacctacaaaggaataacagttaaccagacaggagttaaaatccctgctcaacaaagaacctatttcctttcctaggaaggactcattccacattggctgactcacaactcttgactggtttcctctgctaatggctgtggccagcctttgtctgtgcaggatgtagccttttcggcgctgagcttgttcgttctgggaacgaatcctgcctttgttctggacttgcatcttctggtaacaagaggctggaacccctaccatggctccttcaaggtgtctctttgtattccacatacaactcctccatcatcctagggggctcagacctcatcttttctggcatagcttttctattttcctccattgcaaagatagagtagtcagccctggttttaaagagaaatcgctgtttagagagaatttcaccttgaattgccactttatgttgaaaggattaagaaagaaaaggaaagaagaaataagagaaaaagaaaaggccccagg

SEQ ID NO: 62900 - DNA, 1095 bp, Homo sapiens
aggctcatgtgaccagcaagatgtcacagaggttataatgataaaaccagacaaatgctgactctccccttccactgggtctgtagaaaaggcctccaaacatctgagttcatcttggcagatgctgtcagggtgcagaagaatgtggataccaggtgtggctggcctcttcatcttgctccatgggtggccaaggccagagaagtccctgtcacctgcaacgcagcctcagaacctcccaagcggcttgtggggtagggagagggggaggtgagaggggcttactaaagaggaggatcacagcaaggaagagacccctcagatcctcgcagagaggctgcagggcttagtggttacaaatgaggcttccagagctaggctgcctaggttcaaatcccaccacctccatttaccagctatgtggcctcatataaggtactaagcttctctaggcctcagtttcccaactgtacaataaggataataatagtatccacctcatggggttgtctagaggactaaatgagctaatacaaaacaaaaatgctaagaacatattgagtactatataaatgttggctgttgtttttattatcatcctacaatgactggggctctctgtcccctcctagctcccaaaatgttagctctctgtcccctcctagctcctcgcagagagctgtcccctaggtctctgtcccctcctagctcctagcaaaatgtttcctgcgttgcttctcaccaggctcaagccagataaactccccatctctaggtgttcggaggaagtggcactcagagcttcgaggaattaattagaatcaacacacaaatcatcagatagcttgtgcttgcccactggtacgtaatttaaaagtacatccatgggaacctcaaaacatctctaaggtggagcaagtgtgaccctgggtattactagacagatttgtgtaaggggaacactgataccaagactcggacaaaatcctatggccagcagacagagccagccttagacagcatgggtttccccccgactcttcacagccaaaatgggttaaaagcgctcgttactcaagaacagccatggttact

SEQ ID NO: 62901 - DNA, 1028 bp, Homo sapiens
cttgagttgtcctttcagtctggaggagacaatgagagaggcactggccctcatgcctgttcactaggcaactggataggccaggagcaggataggcctggaactgccttgggtgtctgctccattgtccaagcacacattagcacaggccaaccacagcaaagtcacatggggcagaaacgtgcctcgctaagagaccaggcagagcacctagcctcagccgtccttgtgataagctcagaggaccagccactctaccctgcttgaaagctcagctgtgtctgcatctttaagtgaacactcacactaatgggaggcaaagattctgcttcttaatagcactcctcctttcgtttctgcagaagggttcagtcctcactagccaggctcagactcaaagtctcctagctgatggagagtccatttgcactttaggaagatgaggagctgctctgggagctgcctgaatccttgctcccctttgggaaagtgcttgacctctggacattgcagagtgggaggtcggaaagaggcacttgggcttcaacaattcagggctgaaccataaaaggaaattcttattgactgtaattgttttcagctcaaatgagacaaatgagggcttttcatggtagaattacccaagtattagcccttgttaggggtgacatcttagactttccccctgtattaccttagcagagtcggccccacatcaaatgtaattagatgtagaagttcagtttaacatagaaaattgtgattatgcaaatggagactatgctattagaatgtgtttcaggttcggaaaattatatccttctcttccacattgggttggcttatggttactaattcttgaccctcccagagattccaggctgattaaggtttgcacaaaacagacagacacacttcctccctccaggagctttgattagggccaaatgttggcttccaaactgtgttccttagaggtgcctttgagactgccaggtgggggtcgtgccagggtgccggaccccaag

SEQ ID NO: 62902 - DNA, 1037 bp, Homo sapiens
gtttatcacagttttgttttgttttgtttttgagacggagtcttgctctgtcaccaggctggagcgcagtggtgcaattttggctcactgcaatctccacctcccaggttcaagcaattctccttccccacctcccgagtagctgggactacaggcacacaccaccatgcctggctactttttttttttttttttttgtattttaatagagacagggtttcgccatattggccaggatggtctcaatatcctgaccttatgatctgcccgcctcagcctcccaaagtgctgggattacaagcgtgaaccaccgtgcctggccagtttatcacagttttatattttattcccctaattgcgcatggagattgagcactttttcatctgtttgttggctgttccatctggatcttctctgatgggctgtttcttttcaggtcatctgcccatgcttttcttttgcattgtgtcttcttattggtttgcaggagttctcttaactggagcacgtagtctatttggatttcttgtaattaatgctgtattagtgtttgaatctaccctcttattttgtgctttctactgttccatttaatagggattttcccgttcactttagctcattccacattgacttagggtccattttgtctaagacccacaggccttaatccaccttcaaggttgaagttagaagacaaaggcttagtggatgtttctggctaggactggcattctgacaagtctccatatgtagatgggcactgtgtcaaccagcttccagagtcctgaatctgctttgcttgcatcattgcctctgaaattcctttactaacagttctccttcaggcagaacctggcttttttttttttttttttcctaataaaagtatattgcttctttcagacaagtaagcatcccaccccattctatatccaaccaaagttcctggtctcctggattcttccctgggggctggaattgaatttctacactaagttcccagtagagctttggtctccaaatgagatgttgt

SEQ ID NO: 62903 - DNA, 1050 bp, Homo sapiens
ccctgagcatagctcccttccaagagaaggcaagctggaaccgagccaaatcagcccagttcttcttcctagttcccaggagcagaatgagtaaaggcacagcgagtggccagtgctgtgcttaggagaagtcctctgcacggaagccagaagggaggaaaaggctttctcctgaaccactctgtgtggttctgtagagttgggagttaagagtgtacacagttacatgcacagtatatctaagacagagactgtgtgtctgtgtgtgggtggggtgggatgggaggtgtgaagattctaaatcctgctccttggctccctcacagatatggcccagaaaggccgcggtctcgtagtccggtgagccggtcactctccccgaggtcccacactcccagcttcacctcctgcagctcttcccacagccctccgggcccctcccgggctgactggggcaatggccgggactcctgggagcactctccctatgccaggagggaggaagagcgagacccggctccctggagggacaacggagatgacaagagggacaggatggacccctgggcacatgatcgcaaacaccacccccggcaactggacaaggctgagttggacgagcgaccagaaggagggaggccccaccgggagaagtacccgagatctgggtctcccaacctgccccactctgtgtccagctacaaaagccgtgaagacggctactaccggaaagagcccaaagccaagtgggacaagtatctgaagcagcagcaggatgcccccgggaggtccaggaggaaagacgaggccaggctgcgggaaagcagacacccccatccggatgactcaggcaaggaagatgggctggggccaaaggtcactagggcccctgagggcgccaaggccaagcagaatgagaaaaataaaaccaagagaactgatagagaccaagaaggagctgatgatagaaaagaaaacacaatggcagagaatgaggtaatgatcaatttcttccccaggtaaggcgaggcaggccctgaaggagaataa

SEQ ID NO: 62904 - DNA, 1044 bp, Homo sapiens
agcaagaaaatacagtgaagaggctggacacagtggctcacgcctgtaattccagcactttgggaggctgaggcaggcagatcgcttgaggtcaggagttcgagaccagcctggccaacatggtgaaaccctgtctctactaaaaatacaaaaaaaaaaaaaaaattagccaggtgtggtggcaggcacctgtaatcccagttacttgggaggctgaggcagcagaattgcttgaacccaggaggcggagattgcggtgagccgagatcatgccattgcactccagcctgggcaacaagagcaaaactccatctcaaaaaaaaaaaaaaaaccaaaacgacaatatggtgaggatgtgatcatttttgcattttggaatgatcattcttgattgccttgggaagaatagattttgggggaaggtacagagcagaagtgggagaccagtttcgaagtggttcggtagcccgggccctgtggtggcagagccctgcttgcaacagttggcgtttcagtctcagtctgtgagctgctgtgggcagctgggggcacccgttgcacccatctgttccacttaagctgctgctctctcctggaagtgatcccacagcaaagggaagctctgaaaggttgtttcctttgcctgcagggtggaagagcaggggtctgcttggtggagggctttcagcccggctagcaagactgtccctgcctctcccaactcgaactgaagggggtccctttactgtgttgatctgggagtgtggctgcaggaactgcttgggaagggtaaggattattcattttgacaagagagggccatggataggtgattcagggagataaaaataaagtcacctgttggtagaagctataatagctaaaaaggtatttgtagttgctttatactcaggctagtgcagtagacttcagcaaagctttcagtggaatcttccacagcaaacactggaaacaaaggactttaggatttgaaccatgtatccctgtccagtaataactggtgaaaccagtcagccctgagct

SEQ ID NO: 62905 - DNA, 1016 bp, Homo sapiens
atgttttctgagaagcaaactcagggcagacttctctgcatttacaggagcccagatggacttggataactaaaattagactgggttatcagcaaaaggagatcaggaggagcctcgtgcctgcacagcagagggccacccaggctgttatttctgtgatgggggcaagagtaggggatacaagaaaggagtggaaggggaaggaacagaggatccttaaagggtacagctgttccccttcttactacctcagacccattttttgctagggtctgacagtgatacaagacttgtttcaggatattctctcactccattggaggtgacgttttgtgcctatgcccggcactgtgacatcatgaaagagagagtttaaaataggctaagccccgtcttctctgccaagtggaacttaagatccatcagggggtttggggggagggagagagagtagcctttaagattctcactgtgaaaataattagggatttgctttacagaaagcctgtagcacaccagaggttgaagtgagagtcaggggcagaaaatacagaggaaaggcttaaaaatgaacatttcaacccagggccctgtgggtggcatgagctgttaggtaactgggaggcttgggattttttccatgtcaagctgacctgagctgttttttacctgcacggatctgagtttccatggaaaccccgccgtgaaatgccttcttgttgctagagaaaccgtgaggcccaggctctgtctagagaaggcaagaataaaggaggagtgaaatcttcacctcactccaatcaagccccttttattttgcggtataggtctcaacatgtgccagtgttagaggctcattaactgacccagtgtttggggttcatatttaataacagcttgacaagcttggggagagaatggcattgcctgttttgctagcctcggtggacgtcagcacaatttttgcccgtcagtaattcctctgcctgcagagatggaatgatactgagatggga

SEQ ID NO: 62906 - DNA, 1069 bp, Homo sapiens
gctttatattttcttgtttgggccaattaagggttgttaaataaattggaaaaaatcctactactttaaagagcgtaaaaacgtggaacatgtcttatctaaactcttaaaacgtgtttgttgctgtcaaatatgacttgagttcctgatcgggttatcattgcctaaagacacaggactattttttttattaagataactttgtttttatcttaataaaagagatgatagtcatttcctgacagttttgtctgacggaatgccttctgtataatagtttaaaataattatttttagtgtttggaaaacagcatttaaaagtttgaacagcagaagtctgttttaagaagcttctgttaacccttgaaaagaatcttcctgtgggatattaaaattttggattgaacttgtgcaaacagtactggatttggaaggtctggattctcatcctggctgttccactaagcagctgtctgtccttggacatatcacctaccctctctgaatctgtttagttgtgtgtaaggtggaatacctacccgaaggtttttctgtaaggtacattaaataatacatgtacaattctttttgaattgtaaagggctttatgaacatcaattataatcatttcgcttattaggttctgcagaaagtattctctcaaaagttatactttcatcaagaatgaaaaagactttgtaatggaactctaaaaaactgaaacacgtatcatatgacattattcctttcctatatgtatttcatgcatggaattaaaacagaatgtagccttttcagccatgaaggatgctgagtgtttagatttgcaaaccatttttgttcatatatttatatgaatctctacatatttttaagatttttttttcatatctaaagttggcgggagttatagtgaaaagtgattataaagattcacatatattaatttattcttaacagaattagagaatgatctcaccattttcttaagttcccaagcaatatgatagcatattagtctgaggattataccatagtaagaagcctataattttaacataaggtccat

SEQ ID NO: 62907 - DNA, 1086 bp, Homo sapiens
ggacttttatgatttgtctgatactgtgaggtttgatatctttggatttgtaggatttgaatataagacaaatatttgttcagtgcataccatctggaggaatttgtaataggtgattcttgcccttttgaagcccagtcaagtgaaagaaatgatatgtaaacagattattaaaatacgtgaaacgttctgttatagaggaaaagtttccatgagtcctatgagggcagggactgttgaaatcttgttaatctacctagcataagatcaattgtatactatgtatctgttaactgagtactgtttggaaagcataaaatagagagtaatagtagagatgattctctgctgtctgaaggatgttgaggagttcgccagttaagatagttttccaggaaagaggagtattgtgtttgagggtagtggattagttgttaaagtgcggtcaaggaagatgaaatgcagtcagtgagaagagattactaacaaggacaccagttacgtggctgtgaaaatagttttggcactctcttagtagtatatcatgatttaaagattctaagaaaactttcattaaagaggagggcactctaactgaattagaacttagcttctagagtcagactgcctttattccactttcagtttggctactccagctgtgtgccctctctcctttgagtatgataggtgtgataatttaatactcaaagggctatttgagtattaaataagataatataactaaagaggctattataatgcctgatacattagtcaataagtattagctgcagctattatatttctaaaaggaaattttaaatttaccccagaatcttaaaccaataatcccatttaaaaacagttgtttaagatctcattttaaacttgatacaaaagtgtgaagtgaatttttatttcaagagaagtctttgaagaaaagtagaatataaatagcttatgataatctaaaatgaatttttccacaaattctcataaaacaatatttatagtaataatagattgtaaggcaggttagttaactcctaataccaatctcagcaatattatgtagtttaatga

SEQ ID NO: 62908 - DNA, 2286 bp, Homo sapiens
ctgtagtcccagccactcgggaggctgagggagaagaatcacttgaacctgggaggtggaggttgcagtgaactgagatcgtgccactgcactccagcctgggcgacagagcgagactctgtctcaaaaaaaaaaaaaaaaaaaaaaaatttgatcatatgctatgtattcaggcagtgtgcaaggtgttagggattcattagtgagcaaaacagatgtggcccccactctggcacttaacttgaaggttaagatgtgggagtgtatgccaggcataacaggtactacataggtttttttttaaaaaaaaattccagcatcttttaggtactgactgtgtacttcagctaatcttcatcatttatgtatttagaaattgtgacctataaaagttatttaactttttttatagctcttttttttttcctttttacagttggtgggccagtttattgctagagctgttggagatggaattttatgtaatacctatattgatagttacaaaggaactgtagattgtgtgcaggctaggtaagtaaatcacttttcctacttagaatttcaaaataggggaaaattctacaggatcctattgaaatgacacttgtgttaatcagacactctgtacatctgtttgtcacttctctatattctccactgttaaaatggagagactattggcatgatataccaggaagaggacagtactataatggaaaagttctggagtttagctaaatcattaattaccttcatgtcaagccactcttctttgggcctcagtttctttatttatgaaacaaaaccattggacagatctttaagttctgttttcaggttctagcattgtgtaatagtttaatattctaataagatggataaccttaagaagagaggcctgatttatagttttattttgtatttatctactgtagaaatcttagtcagaaagtatctttttcactcttgtgatttagtataattaatatgatatttggtataactaaatgtgatatttgggagttatgctatttgatttttcttaacttcttggagacttggactcagccatgtcttagttttcctcaggtctatatattaacttaattttctagggctacttcacatcatagtggaatggtgtccctgggtaggaaggcatggatctaggtgaaagttaattatatgtgaagtgtttcttctcagtgtagatcagttattttgtaatgtgttttgatttttcttgaatgagaaatgaaatagagcatgagaatattaacatgaggatcaacttctttttgctcctttttgttttgaaaaagtgttttgaattttattttgcttttatgttatgtgaaagatttagggcatataggattttgtcagctttatccctaatttagtaaactttaggtatgtccagctatcaaacttaaatttttttctttctctgtagagctgctctggataaggctaccgtgcttctgagtatgtctaaaggtggaaagcgtaaagatagtgtgtggggctctggaggtgggcagcaatctgtcaatcaccttgttaaagaggtaatgattgggtattgtttttaacttaatttatatgtattcctctgagtgaaataaattgtggctactagctggtatttttatggacaaaaattaagttcggtcttacagctgcaattggaaaatgaaataatttttttaatatgtggctttataaccttttattataaattatatgattaaaaaatgagtctgttaaaatggctttcatgaataattataagcaagccatctatgaacttcaaaggaatgcctgaaatctttttcttatagtattatttaataattttcaaatgctgttgaaatgagattttctgtgttttagctattcaataaatacgcttttatatgagcaatttaaaactagatagtcttaaataatgagttatgaattatgagcactagagcagatcagagtgttagatttttgtgaggacattcactacccatatgcatgttttaaaagaaaattgattgtaatcccagcactttgagaggctgaggcgggtggattgcttgaggccaggagtttgagaccagcctggtcaacatggtgaaaccccgtttctactaaaaatacataataattagccaggcatggtggtgcgcacctgtaatcccagctactcgggaggctgaggcaccagtattgcttgaacccaggaggaggaggttgcagtgagctgagatcacaccactgcactccagcatg

SEQ ID NO: 62909 - DNA, 1034 bp, Homo sapiens
agtagggagtcttttccaaaggaattagaggcatgctttttttttttaatggaaaaccctttaaaagctaacacgtaacgaaaaaataccaagtttttaatttttttatatattgactatagtcagaatttgtatctgttttcatgtctttttttttcttcattacaggggcagaaagcgttttgtaagcgaaggagatggaggtcgtcttaaaccagagagctactgaatataagaactcttgcagtcttagatgttataaaaatatatatctgaattgtaagagttgttagcacaagttttttttttttttttttttaagcacttgttttgggtacaaggcatttctgacattttataaacctacatttaaggggaatttttaaaggaaatgttttttcttttttttttgtttttcgagggggcaaggagggacagaaaagtaacctcttcttaagtggaatattctaataagctaccttttgtaagtgccatgtttattatctaatcattccaagttttgcattgatgtctgactgccactcctttctttcaaggacagtgttttttgtagtaaaatcactggtttatacaaagctttatttagggggtaaagttaagctgctaaaaccccatgttggctgctgctgttgagatactgtgctttgggagtaaaaaaagaaagttatttctttgtcttaaagaatttttaaaaaattagtcatgagacttattcatctttccagggaacatactgattggtcttaaaagactagacagttaagtaaaaggtggctggaacatctatttttctacaaaactggaaaaatgaacctggttctagaagaatgtacaccaaaataaaacatgtgaagcagtattgattctttattgggagtacatttttttaggtctcttaaactttaatttcacacagtaaattttgaatctcataaggaagcatatttgaacctagtcaatttaatcttagtgttcccttgaaaactttttttccctacaaaattttaagtgaa

SEQ ID NO: 62910 - DNA, 1640 bp, Homo sapiens
caaattagccgggcttggtggcgggcgcctgtagtcccagctactcgggaggctgaggcaggagaatggcatgaacccgggaggcggagcttgcagtgagccaagatcgcgccactgctctccagcctgggcgacagagcaagactccgtctcaaaaaaaaaaaaaaaggcatgaaaatacgttacactagaataaagtgggttggaaatagaggtccaggaagaaaaaaagatgatataaaacttctaacttaaaaatgatcttctttttattaatggatgatggtagctatcaaattgctgttatgtttagattatattggatatgtttttaaaagactgaggtaacagttatttttaaatatgctggaaattatatcctttataatttaaatttatgataagaaatttaaacatcagtgtatgaagtgatacctagttttccaaaatctctttgggagtatgcaagtagaaaatttgaggaccactaataatacattctccaagttcagaaggacacttcagtgatctagtctggtctcacacccattatttaatttggttatccaactaaatcacaccagggatttttttttttggaggggtggggggaggacggagtctcggtctgtcgcccaggctggagtgcagtggcacgatctcggctcactgcaagctccgcctcccaggttcacgccattctcctgcctcagcctccggagtagctgggactacaggcgcccaccactacgccctgctaattttttgtatttttaatacagacggggtttcaccatgttagccaggatgatctcgatctcctgactttgtgatccgtccgcctggcctcccaaagtgctgggattacaggtgtgagccaccgcgcccagcccccacaccagggatttttaacttgccaaatgtatgtgattgatttgaaggcaataatccatcctagacctgcgttttaactctcactcctaaaacagagtaaaatatttcatgacaaagatttggttttccttcaagtttttcagcattaattttagacatccagctcaaatagctacaacaggtttgcgtaccttgtcatgattttggaatgcactgttcatcaaaactattatctctgggagaaattacaaactttagaatctgtgtaagaaaaggaaacagcagattcttctccatttacctaaaccaaggccttcaaaaaatgatgaattgacactgtattctgtgagcattataagtttggttctattaatgtaagaataatttcattttctgtaatttaatgttttctcttaaggtatgccttgacaatctgcatcattttttaatttggcatagtattccgttctatggatgttccatgatttatttaacctttgatctgctggtgaacatttagtcagcttcatctattgctgaacattttgctattcaacacaatgctttaatgaacactcttatttttacacatttgtgttctttagaaccaattactatgagtcaaaattgtgcatatttagttttagtagatacagtactgcaaaatattcctctaaaaaagcttaacaacagtgctaatttccctataccgtccctacctgtggatactatcagacttttaactt

SEQ ID NO: 62911 - DNA, 1082 bp, Homo sapiens
tcaaacaacttttctctttccttgcacactgttgaaatagctaactaaatatctcaggtgctgagcaaatactttttttaaaaggttaatagctaacatttttaggaccactgtctactactgaattttgaaataggaagggttattagaaaaagacattttgcatgagtaggatgtatcattactaacttaatagtagtgtctgctactggattttcccagagccagtggcatcatccaagttcacccaagaattcccattcttaggcctaggtacatttcagaagctagacaccacacattttattcacatgagcttgaattaattagctaaattgaacacgttgcaacatttttctaccagcagatgccagatagcaaagcagaatagaatctgctgtagtctccgacatatgacatatgatgtcatatgttacttggcatctccagataaacattatcaatccaaattaagcattctgctagcatgtgggcagttgagtaagagtgagtattactactttatgtttgctgaaaaatgcattctttctgggctccccttttcacctttttctcatatttacattcagaaatctagtatgtttttgaaaattcatctgtcagttaaccacaagtcttggataagacaaaagataaaaattttgttattctaccattctcaccaccccctctcagaacccccacactaggcaggttgaatttactttaagggacccaacttaataaatattcatagaagaaaaatactctttacataaagtatcctttacagtccatggccatgattgctcctgactactccttcagttcccagagattgtatttttgcatctcaatgcccattaatgataaaattagacagcttggcatatgttttactgtagttgcaaagtcagatgcctacaatggatgggcaagtaaggtaagaggaaacaataggtggtaggaaggactggagaattccagagcatgtgcttacctaagtgaagcatcacttcccagccctagccaaattttgccatgttgaaatgtgggcttgacgttgccagatttgtcaagtg

SEQ ID NO: 62912 - DNA, 1028 bp, Homo sapiens
atatccattgtttttgtaccatccccctccccccatgcctaggtggaagagtaatgactccaaagcattaacttgcctttctctttatttcttttctttctttttcttttcttccttcctttctttaagcaggcagtttgtgttattgtggaattatggatttacaaacaggtggaataaataccgattcgggagctagaaagaagatgctttgtgtgtgtgtttaagcccttacagttggcagtttgatttttcttgtctgttgctttgtatcgtaatgggggtgatgagaataaaagaggaagcactgttttgcaacctacccaaagaaatattttcgaagtctctggggatgctgaagcaaaattaggttgcagatgtggactgtatagtatttgcctccagcgtgataactaccagcagtgtctaggcttacacctgtgccatttcgtatacttttcttagataccgagtgcgtctagtttctactcaagagggactactatatcaaaagctttttgttacggttttcagaatcctaaggtacatttgtgtaaccaagtgtttttgtaactaaatgcagcaacaccactgaaaaatagttttaattttaaagacctcaatttattagtgtacttactaatctttaccctcatcctccatgctgtggactgtagaactgttactgtgtacttgaagagacttagctattgcatccaatttgtaacattcagtaaggttatatttataatttgaatttatcaagtgttgatgttttgctgtgtgacagtgaaaagaattttaggaataaagtatgcaaatgaccattcgccacatatggaacttagactgagtatgataagccttttgtctttatttggacataaagtatattgtaaactttttatgtaattataaatacacatttgaaaaatagacaaaaataaacacaaaactgaataaaagttttgtctaaggtttgtaactttcaaatgtctgaaatttaatataaagccaacatataaaac

SEQ ID NO: 62913 - DNA, 1042 bp, Homo sapiens
cttctgatgtgggaatcttattttgagattttctttatctgcttgaactgctataataaaataccatagactgggcggcttaagcaacagtatatatatttcttacagttccgaaggctagaaagtccgagattgaggtgccagccgtttctgttcagggcgaatgaagagtctcttacaggtcttcctgctgtatcttcagttggcagaaagtgagagagcaagttctctggtctcctcttacaagggcattaatcccattatgaaaaccccacccttgtgacctcatctaaacctaagtacctcccaaaggtcccatcttcaaataccatcacattggaggttatagcttcagcataagaatttgggaaggacacagttcaggacatagcaggattatattcacaagatagtagttaatacataccagttgggaattgtagggttgtgtttaatgtgttaaattacaaaaataaagtatccctttatgtatattaaaacatataagagctgcctttcaatatcttgagtaacttctgatgggagaaattccttattatccttaaattgagtatggctgcttattatgtttcttttgatcttatatgaggaagattttagctttgtgatattttttaaaatgtaatacagagataatgagattatatttttaaaacccaaattataaaagttctatttaataaaccaaactgtcagaatggtagataaatagttgaacatagaggtcttttaaagtctcagaaatggaccatataaatgtaagaaacgccagttgttttataatcatggcaacttactaaatactgactgatactcaaatataagataccttgagaccacacactcctagtcttgttattgagagcgcatttatttttgttttttttctgacagtttccgatagtttaaatagagtgagtaatggaaaggatttataatgagatagacttagtgaagaaatatgtggctttatatgtacaaaaaagtagtagttaaatttaattaacagtttttagtttaa

SEQ ID NO: 62914 - DNA, 1332 bp, Homo sapiens
atatataagaaaaatattgtacattttatatgttatgtaaatgcttaggcacaatgatattagaaaaaaatgaagaatttattatacattttatgtttcagtatttaagtgttcaggcacaataccagaaagcaatgaagagcaaaagtttgtacatatgtcctcatgaatgtgattgttagaagtgcaaactgatatagacgtgttatatttttgactcggataccaagatcagtatgagtatcagtgatcatcagaaataacaaataactcttaaagaatagtgcaaaaatattgcagtttttgtgtaaaatggaattaggtgctcaaaattataaacaggtatttcacctagttatatatctggtaggtatttgaaggttgtacagtatgcaaggatagttctcatctccagacctggcccattaaatgccagtagcatttctctaaacattgagacaacctaaagtgaacctacaaaattccaaaatactgtagctaaaaatagttagattgtacctttatcatgtttagcatggactgttgcagtggcttccaaattcggctctacatagaatcacctggaaaactctttaaacatacagcttactgttccctaccacagatatttattttgttagcattcttggattaggggttaggatttctaagctcgccagatgattcttgctgaaaatgtctggcaatgattgaacattagggaattcttgctgaaaatgtctggcactgattaaacacgaaattattactgctttttaaattttctgccttccttctgaagtcctgactgtttacagtcattctaaacattgtcaggtaaattttgttaaaatatgactgtaatcatagcctcttctccttcaggaatcctttattggctttttatatttactcttggcagcccctaagagtacactgctggaacattagagttgaaagaatcatgatgtctgcatgataaagtccaaattactaaatttgaataaccagcgtttccaaatttggcagcctacattttttacttcttgtgtccaatttgcataaaaatatagttcctgaaaggaatgatttaaaacctgacactgacttatgacagggcttgggaaactatggcctgatggccaaatccagtttgaggtctgtttttggtaaagttttattgaaacacagccactcttactcatttgcatattgtctacttttatgctaaactgacagaattgagtacctgcagcagaaagcaatctgtcttgcaaagcctcaatatttaaaatctggccctttacagaaaaagtttgctcacccttgact

SEQ ID NO: 62915 - DNA, 1077 bp, Homo sapiens
gagggactgcaatttgttactgtataaataaagttctgttaattgagtcaactctttgattgatgatggcaatatgtgtatagatctcttggataagtccaaacgcattgaattctcttcccggcatttgttgagctctttaatcacctctgcattgctggatttttttctagtcccaggtgctgggtttggccgtttgatcgtattgtcaactgaaaatgccacccctggttgggcagcactggagtccttctttccatctttggcatctttccctttggtcttaggttctttttctttgctctctttcccaaaacctccagaggcttttgcctccttttctctttccttggctgatggtactttgggatctttttctttagagtctttttcttttcctaaactactactcatggtgactcaagcctggacaaaaactacatgaactccttttattttccagtaattgaattcaaagatgaagagacaaagatcctacacaatcaaaaaagtactggcttgaagaagtaatcagcatggagtaacatccatctgttacatgttggatctaaaagcactatgcccatttctgatcattcattccaactggtaaaatagtgctggtcaatcaatgattcattagagttcctgaaatataatatagacagtattaaattactttagataatttatattaaataggctctgaaaaacaatcttattagagtttgccattttcctatgatttcattctcaaatatttatgaacatcctttataggtaaaaatccatttaaaactacacagcttaataaggctggctctaccttcaagaaacttgcaatctaataggaagatgtatgaatgtaagttactttactagaaaattttataagacctaaaaagtggaagaaaccacaacaataagcttaatatttattaagtgctttctatgtactagcattattctgaggaattcacatgtattaatataacacatacaacagccctatgagatacattgttatccccattttatacaaagaaacactaaagcacagaaatatttttaagtaac

SEQ ID NO: 62916 - DNA, 1732 bp, Homo sapiens
tgctttagtgtttctttgtataaaatggggataacaatgtatctcatagggctgttgtatgtgttatattaatacatgtgaattcctcagaataatgctagtacatagaaagcacttaataaatattaagcttattgttgtggtttcttccactttttaggtcttataaaattttctagtaaagtaacttacattcatacatcttcctattagattgcaagtttcttgaaggtagagccagccttattaagctgtgtagttttaaatggatttttacctataaaggatgttcataaatatttgagaatgaaatcataggaaaatggcaaactctaataagattgtttttcagagcctatttaatataaattatctaaagtaatttaatactgtctatattatatttcaggaactctaatgaatcattgattgaccagcactattttaccagttggaatgaatgatcagaaatgggcatagtgcttttagatccaacatgtaacagatggatgttactccatgctgattacttcttcaagccagtacttttttgattgtgtaggatctttgtctcttcatctttgaattcaattactggaaaataaaaggagttcatgtagtttttgtccaggcttgagtcaccatgagtagtagtttaggaaaagaaaaagactctaaagaaaaagatcccaaagtaccatcagccaaggaaagagaaaaggaggcaaaagcctctggaggttttgggaaagagagcaaagaaaaagaacctaagaccaaagggaaagatgccaaagatggaaagaaggactccagtgctgcccaaccaggggtggcattttcagttgacaatacgatcaaacggccaaacccagcacctgggactagaaaaaaatccagcaatgcagaggtgattaaagagctcaacaaatgccgggaagagaattcaatgcgtttggacttatccaagagatctatacacatattgccatcatcaatcaaagagttgactcaattaacagaactttatttatacagtaacaaattgcagtccctcccagcagaggtgggatgtttagtaaatctcatgacactggctctaagtgaaaattcacttaccagtttgcctgactctcttgataacttgaagaagctgcggatgcttgatttacggcataataaactgagagaaattccttcagtggtgtataggctggattctctcaccactctttaccttcgctttaatcgtataactactgtggaaaaggacatcaaaaacttgtcaaaactcagcatgcttagcattcgagagaacaaaattaaacaactacctgctgaaattggtaagaggccttggattattattatttgtagtatttgttatgctaaataattttgagtgctttctcatatcaaaaaatgcctgatacttgcctaaaaacagcttatttctaaattacaacttttttatggtttactttattccattttcagcactgttaatagtacatggcttgaaattgtttcatagacttaaaaagtgagttagaaaatagatgtaattagatctttcccacacaaacctaatctttaactttcattggagaataagtaaatttaaagaagaaaagatgtttgcctaattttcaagttgttgctgtgtttaaagtatctgttgatacaattttattagatatatgaaaactacattttctcattctctgacttt

SEQ ID NO: 62917 - DNA, 1038 bp, Homo sapiens
gaaacatttggaatatagtaatccattgacatcagttttgaaaaattgataaaggtattgcctctgtgggccctttttataagatttgtaaaaattgtcataagaagttgattatgaagctttttaaaggatgttttctttttgtattaaaggcaatttattctgagaaaaataaagattatatttttgttgctttcagcattggtcttataatgagtgataaactttctgatttttaggttttgcagcttttcaaagatatgatattctgtgggtgttttaatattttgtttagctttgaaaaaagatgtggtttaaattttaggtatgacttgttacatttaactcttaactagacaatccaaatattaattaaattttggtttaatttaatgtgtttagaaaatttatgataggttttctcaagtaatatactgtagagtatgacttactcacgagatattaaaatattcccaggaatttctgggtgaaaatgttccattccatgtcttcagataggaatgtggttgttgaatgacttgttttagtgtcatatttagtcaaaatttgacctgcatgttatggctcattgtggaatagaattataggcaattggagaaataaatgctgaatttctacatagaaatataaaagttacttcctgtctttgttcttgttgttttgtgtatgtgttacactcagtcctaaaagtctagctttaattcacaagtctctaaggactttttccatagcaatgctatcaaattacctaggaattaagaatatacatatatgttcttgagcatatagatagcatttttactaaaaagtgaatgtatcttttaaaattggcatattttaagtaattatgtggcttatatttgtggctacctaatcttttgacctttattcctaaattgtaattttaaaaacagccattgaatttgttaatgggctccttcccatcattagtgacattactgaagtttgtgtttttgtaattgctgtacttctgtaaaaatggtaatatcataaatg

SEQ ID NO: 62918 - DNA, 1051 bp, Homo sapiens
cactttttcttctctcttgatagtaggcctgttgttcactcacttacttccactgccattgaggtagtatagaccttcacactatttctcgtgggctaattgcagtagcttcaacctaggctctgtgttttttatttgtctttctcaagtccatccattcaaacctagagaaaacagactttttagaacagtactctgattatcatggtttgcttcaaaactttaaattgtgctttattatctggtcaaaatggtctagattccttaggttgatatttaagaccctagatttctcactttgttcccctcctctccttattgcttattttccctcccaatcccctgggtctcagttcaaatatgcttttttttttcaccccaacttcccccaacagtcagttccaacttcctttccttatgtgttttcttgttgttgtttacagcagttatcacattctgacactttatttccttattttatgattccccactccatgcacactacagtgtaagtttcatgtggatggaaacttgctttgtttcctgcactgctgaatctttcatgtagatggaaacttgtttcatttcctgcactgttgaatctctagtaggtgcacagtaagtttttctttcatgaatgagtcagtgaaatgggtcaccaccttaaagataaagaactttgtgaatggccatgaagatccaaaagaatggctctttaatggtgaaattttataagcaagcagtgaaggacctatttggagcagagactctctagcctccctcaaatcacattatagtctttttacgaattgtaagtttcatgaatacaaacatttagtatattgtagtctgtttcttcagtgcccagtattgtgtctggaaaaagagaatgtacatatcaataattttttgtctgaatgaatgaattaatgcagtaagtgttcctaccaagctcccagctgtggcttctactcctggtgactctgcatcacatttctctccagttctggggcagaggtttgtccttagatctcaaaaggatgtaagaaaa

SEQ ID NO: 62919 - DNA, 1037 bp, Homo sapiens
ttacaggccttagccaccgtgcttggtccagtcatgaatattttagaggcatgattactaaatcatttgaggcctgtgatgatgttatctttctccagaagagtttttgtctgcctctgttgggtacctagtagagaggggatcacttcaatcaattcgtgttcaaggcttgagatgtgtgtggtcccccaagtgattaaaagttttgctgcaggctaactggatgactattttatttccagttcacccttactggtagggtgcagctctagagggtcccagttgaggttgatgactagagtccccacccttggcaggccctagattttgactcttgctggaaaaataacttagccttttagctgcatcttccagttagggctgtgttcttaggacagaattatctccattgttttgcttgtatctgggttcccagcttgtttctgttctggtgcttagtcattacgttgttaactctctgattttggttttggaagatgtttttatttatttatttttttattgggagaatttatttgaattacctaccattacttgaaacaaagcagttgttagggaatttcttagcagggttgagtagattgtcttaggttatacaggacaattatttacagaaaagcaagctgagacatggatgtaataaatagccgttagaatctatgtttccctgatttttggcccatgacactatcgtattactatttgtagtggaaagagattacatattctagttaactggtttatggtttagatgtccctctgaaaggcaagattgtctccaacacataatgaattattctattaatatccaaaataaatattctactaaatgtcctgtataaaataagagaatcagatttctggttcaagataataaggaccaagcacaattatttcatgcttttttttctctttaaaatctattgaaatggccaagatgaacaaggagatgtgaccttaggagaaaaaaaacataggatatttaaactgcatgtttaaaacatgatgaggctgat

SEQ ID NO: 62920 - DNA, 1018 bp, Homo sapiens
aagattatgatcatttaaattagtcttactcgaaagttatactaaattaaactaaagttgctggttatatttgctgaaattgaaagaatctaattttaattcatagccatttgatttcaccatattttaaaaatctgacagcgtaagagaaagcaagctgtcaaagtggagcacagaacaatttgtagacaaagttaagcacttgaaagctaaatgccagtgattggcagtgatcagcctacgtttatatacaggagctcagcaacaatgattttatttcttagtcaagatggctcaacattaaagcaagcttgtgttgatttctaggttgcagtttagtttgtggttaaaaccactcattgagaggggttagagctgaaaccactgcagagggtgaatcacaataaatgccagacttctgatgttttcttctggcgtaaaagagttttgatatttcatccttaatttttttaaccttttttatttagctgagagtaatggactttggcaaaatgtggatgactctttgaatttgccagtggtctcaagtgatagggcctttgcaaatgtgagatttcttcatcagaacagcctattctcatagattacattgttagaaattcaaccccttccgccccagcaaaaagcaaaaaatttagatccaagaaaggtggaggtaccttttaatttaaattactactggttttggtactagataatgtcatgtagcaatttggctacattatttttattttgtaatttttaaattctaggaacctactctggttttaaaagtgagaaacttaagagttatttggttttggatgagaaatttcaagaatctggttctatttactaggcttttgagttgacaaacatttagaatttggttcccctactaacctttgttaccacagaaagttttttagttttcagtgagaataaaaaacatttaaaatattgtatttatctaccatgatactgtaaagggttattgaatgaggcatgtcagttgatg

SEQ ID NO: 62921 - DNA, 1164 bp, Homo sapiens
ctcaggtgatccgcttgcctcgacctcccaaagtgctgggattacaggtgtgagccaccatgcctggcctaacgcagtgatagcaatagtgaatattctcgttcgtatttctaacctctaaattttctggggctttggaaagtcactcaatttttttttttctcctgaggaattgacacgtctcaccagagtgtcatcagaaagacactgatgaagtcactaagtgaagcatccttagttaatttacaaagctttttaaagactaaattaacttgtctttgctaagtggtagttttttattgttgcttttgtactccactttgtgccggttggaatctcacttaattagacccagtaaactcttggcccagtttccaaacactattgtacaaaagtgatgtattagtaaatgagtatagcatacctatggaatagttctaattggaagaattgaagtggtggttacatttttctgcgttatagttgacaacttatggcatagaattatgagtatttttttattatcaatgactgattcttatcttgaaaatgtaaaggctaaaaattagctccaattactcattatgtgtaacttcactcacttgatactttcagcaagaaggaaagatgcagatgattgatgaccaaataaggatcatgaggcataaggagtgccctcttaaggtgtcaaggcttaacttatgctatagactaatgtatgttttctgtaagtattgtagtaatattgcatctaagaaagtaagttgatcatatgacagctttttgaacaatgattaaagcaaaaggagagaaatggacatcaagaggttgtgaaggctgaaaggactcaaaatacttatctccaaaaagttaagtgttgacacaggcttccacttctgtaatttctaacactggaaataactgtttaatttaaaagtaaaggctacatttgacattttaacctggcccatccaagtatctcatagcaacagttgtgatttgaagtcaaaaaagaaattaatcagccacaacaaaatagtatattggatgaaattcttgtcttgttagctttttttgtatcaaaattaacttatttttaacgtatattgtttgcagaattgaatttgagttgaaccatatatgatagcagatgtcattatattc

SEQ ID NO: 62922 - DNA, 1026 bp, Homo sapiens
agcaaaatgcagtgcacttgaagaattaaatttagagaacaataacatttctactttaccagaggtaagaagtggattagagaaaacaagatttgaaatgagtctgcaagataattcaaggaaagctagtaaatctttatagcagggtaaataatttggtgattgagattgtttaaataatgagtatgctgtgaatgtaccaccaccgctgaagtaactccaaacaagaaagaatgggtatatgaacctattaagttttatgattattatttttttaatgtaaagaaaaagggaaaaactaggaagaaagtaagtgtgctgtattctactttagcaccatgtaaatctttctcatttcattttgggaactgacagtaaaggtattaaggaaaaactatatggctggttttaaaattcagctaccccacccagttcagttataaaaagaaagatgataagtgatacagaatgcactatcatcaaaattaatattagcagcaattctcctgtgactcaaattattaccttgtttatgcaataatattaaggcctatttagtatagaacaatcgccagaatctttttttttttttaacacatttttaggttttgttgattctattagaaaaatattttcacttattttgcttagggattaattgggtaagatataatactttttttttttttttttgaggcagagtttagctcttgttgcccaggctggagtgcaatggcgcgatcttggctcggctgcaacctctgcctcctgggttcaagcgattctcctgcctcaccctcccaagtagctgggataaaaggcactaccacgcccggttaattttgtatttttagtagagatgggggtttcaccatgttggccaggctggtctcgagctcctgacctccagtggtccaccctcctcggcctcccaaagtgctgaaattacaggcgtgagccaccacagccagccaatataatactcttcttttaaagttgtctttatcaacattattagtcttttac

SEQ ID NO: 62923 - DNA, 1074 bp, Homo sapiens
ttccagttttccttgctttgaatttaaatagagaaaggacttaaaatttaagcacttacttcctactaggtattgttaacttatttatgtattttatcgcttttagtcttcactatggcccataaaatattattatttaaaaaatgatacactaggttcggaaaaataacttgccaaagtcacaagctatttaaagatagagtcaggattcaaaacagtttatagcctgtacaggatttctcagatgttaatgagcatgcagatcacctgggaatcttgttaaaatgcatattatgattcagtgggagtggggcccaagagtctgcatttctcacgagctcccaggggatgctgatattgctcttccttggcccagactttgaatagcaagagcctattatatataattgattattgattatatacggtcgtatattattttctaattatttcttacctatgtacttctataaatagagcttaatcttctttaccgcagagattctttggtaatacctgaatattttaatactttggttaaatggtgagaggctaaagtagggcaagatggggttatgtgctaagtaaatacttgtttaatgggtacatatatgccctcagaaattttaccatatagaaaagcggtgtattatacagtatcaggaagcataatcatctactgaatttaatagttcctaaaaggaatctttatgttaatcttaataatttagagagaggtatatgactaagactaggtaggattggtcacacagccagtggcagagacagggctcagacctgggactgtctgacactaaagtttctgcaatgtagaagtttcaaattagtcacccatgaggcacctctcacacacagacatgttttccttactccatacagtgttttaaataaattgaagccaaagaataaaaattgggaaaattttctgtttcctcctataaaatctggaagtctacattggttccacatttctgcaaggcaccaaactgctagaactgtgtagtgactgtccctgtagagaagtgtcacagactgccccaaccagtctctgtc

SEQ ID NO: 62924 - DNA, 1055 bp, Homo sapiens
accttgtctcgcaaaaattttttaaaaattagctggcctgtggtaccagctacatggaaggctagggcaggaggatggcttgagcctgggagttcaaggctgcagtgagttatgatggcaccactgcactccagcctaggcaagagagcaagaccctgttccccatccccccaaaaaaggaaatatgaatgtctataaaagtatagttgtagggatatgtattgcagagctatctatttcataggtaccaacttattaatagagatttaattttgttaagtagtttatctttagtggaatactgtggagccattaaaaatcatattttggtctaaaagaacactacgtactagttgaaatattctcattttatcaagtggaagaaagttaaagcatgtaaaaaatctcttcccacccagaatttttgaaagctgtttttaatatgcttaattgtatattaaatatctttatatttatacgtatagctggtttttgccaaaatgtttagagatcagaattatttatgggtgaacgttagtttccttttgcttacccactctacagtgatcgagtttcacctttgtaatgaaattcattgcaaaaggagaaaacaaatggaaaattatcaagttcagtgatttaatttgtactggacaaactttaggcccaaggaaggtaactgaattggccacatagctgatagtattcttcctgtcatgatgaaccatttgaacatagttgtggttctttaaactataatcttaaatgtacaatttttaaatttcatccacacttgctcataaatatggtgtgtatcttttatgatgattctttggaagtatatgataagtaaactaatggaaattcaagatactcatacagttttaacaattgtaaaatttcttgttaatcagtctggttatatgagatttaacagtggtaatggtgttgattctgaacattcattttgtagtaataggcttaaaacacaatggttcaggtgttcattagtttatgcatttgcatgtaagtaacagtagtaaatttttaaaaat

SEQ ID NO: 62925 - DNA, 1050 bp, Homo sapiens
tgatttaatttgctgtctttttaagactgtttttcctcccctactttactgctcagcaccttaagaattcctgagctcattctggtttccttatgggctgtcattagatgcgtcttcttctattgttttcatatctttatttgagcatttatattttattcagtgatttctgcatattgtgaaattgtaaaaacatcatatttatcataggatctttgaaatctccagtgtttctctgtatactgtgtttttctatttccattataatcacataaggaacaaacttccagtttaactcccaaataaaagcctcattactgtataaaaaactttggaggcttagagttttctgttgctgattttttttctttctatatttaaatatcaaaaaggggaataagattttgtttaattaagaattctctttccgaagtgacaggtatatatagaactttgtttttgtgattctaccttggatgcttctttttgtctttgccaggacaatcagttaacatcacttcccttggattttggaacttggaccagtatggtagaattgaatttagccactaatcagctcacaaagatccctgaggatgtgtctggtctcgtttctcttgaggttagtataaatgagcaattagagaacttcagaaccttccatacgtatctcatttaaaaatttcaaatttaaataagcaatttctatttgggtgaatgtcataattagaaatgttagaactcacttaaacatacaaccctaataggataatgaagtgttgacttaggtagtctagattcagtgcttttgaatttctcttgcctactacaagttggtgtctttgagtgccataaagtattaatatctctaaaagaaaagttctgtaaaagcatcttttagaacaatttttttctttattctgtttaaaaactacaccattgtctaccaaaataattatcgattctcagactgtcatttagaatgctttatcatactttttcatcctaattaccgacctgctattttatttactcattgattattgtctt

SEQ ID NO: 62926 - DNA, 1576 bp, Homo sapiens
agtttcttacctgtaaaataaagatgataataggaagttctcacaaggttgttctgaagcttaaataatatcttacatgtaaacaaattgattacatactagctattatttctgttattttctaataaatgccactgtgaaatattctgaattttgaaatttaaaaattggaaacacatgaggcaaatttacacctatatttctagtatatttattcacctgatctcatttaattgcttgagacattttcctagagaatacaagtatcctaagaaaaaatttttaaaggtctacataagtcagtttttggcttactgccatatatgtgataactcttagtgaaaggttcatattaagtaacaaatattttgcacataagaaatttattaatttgagaaaatgttacatctacaacagaaaagtggttatagacattgaatatataataagctcacctttggagttttaaaatatatataagtaaatgttatatatgtgccaaactatcccaaacagaatctctggagatggggcatatgtattttcaaaaacctctccaagcttgaagacctaccataaaggaggaggttctaatttagtttgtatgaagtgtgacctggacatataggagtttaaaaagtcttccaagttgatttgaatatgcagcaaaatttgagatccatggttgtagagttttaaagctaagaaaggagaataaaaggaaatgtgtgttcagtatatgtaatgaccagaacagcatcatgcccagttgaacttttaaaatagcaactaatttttaaaaaaaaattgattttttttttaaacaggtacactggagaacctagaagaactgtatttgaatgacaaccccaacctgcatagccttccctttgagctggcactctgcagcaagctttcaatcatgagtattgagaactgtccactcagtcaccttccacctcagattgttgctggggggccttctttcatcattcagttcttaaagatgcagggtccatatcgtgccatggtctgatataaatctgctggtcccacacactgttcaaaaatagactgccattaatgtttcttatctatatctgtatctatttatgtagatattggtatatggcagatttataaaaattgcattatgtgtttctgctaatagaggaatcatagccatttagaattttttttaaattctgtacaaaaggcttatataagttttctttgctgaatttgatggatgtttttctgttgtgtaatctgatatgccagtttgcttaaaacatttgccaacacattatgaagttattaaatttaagggacagaggtagtatagttagatatactttctcttaggaaaaataatgggcaaaaatttttgttgcaacttttcatatatattttccccttaccaattgttttatccttatagtattgtaggccctgaaagtagaatttttctttaacttattttgagatttgagatttaaattttatgtattgtttacagtcagagtaaatcactggatttcttttgtttgttttgatttgctctgttttattcagt

SEQ ID NO: 62927 - DNA, 1129 bp, Homo sapiens
gatgtgactttattagacaaacccccactcccgccaggggtagacacacgagtatctgctttaggaagatttctgcaacacggcagggtgcaattcaaactctgggttctcctttcctgagcttagaaaccaatttgttcggagataggagaaggctctgttggcagaagacctaagagacgggaggaggcgcctggcgtcagcgggtcgcttctcagccgtgaccacgagcggccagcaggtgtcagtgcgtcctcgctttgccctggcgctcggctcctggacccctccccacctcggtctaagggggcgcggtccagaccccgggtcttgcgtttcccgcagacagcatcgcggctgggaggacacgtagccgcttcttccctaagcggaggtctgaactccggcttgtaccacttccccgtgggtgctgtccattccgccccaggggttccatccgaagccgcgccttcctccctctccaggacccctttctccccagcctccaggagcacctgcggaccgcgtcggctctggcccggagctgggctgctccagacgtaactcacaccggaggttacttccctcgatttgggcggggattcccttccatttttttcttcccttttctcccaagatccagcttcttgggggcactcacgggtgcccgttgcgttctgctccgtcggcccggagctgcatggccaactcccagcaggggccgctcctcccctaccccccacccccgggctccctctttaagtctctagctcaaggtacccgcctctccaaagggctcgtcccgcctgagggcaacgctccccgaggtccagcgctaggcgcgggcgctagactggcggaggggtggtgcgaggggcgggggagggtcggcttcccacgtgggggctgacgccggctgctcagcaacgcttgcttgatcctggggctataaaacgagtccaccgtgagcgcagcggagcagcagcagctccagctcggtgcagaagcccagcagccggcgtgccgccgcccggccactccagcgccttcttccccgccttgcgctcctgccccaactcgcgctgtcgtcggaccccggcccatccagcagcgctcggcgcccaccagg

SEQ ID NO: 62928 - DNA, 1862 bp, Homo sapiens
tagctttgaggaaaaaccatgacttttaacaaatttttatgggttatatgcctaaacccttatgccacatagtggtaaataattatgaaaaatggtctgttcataattggtaggtgccttttgtgagcagggagcataattattggtttattatggtaattatggtgattttttaaatatcatgtaatgttaaaacgttttctaacagtttactgttgcttatctccaagatattatggaattaagaatttttccagatgagtgttacatagattctttgaatttagtataaaagtactgagaattaagtttgtacttccataagcttggattttaaacactgatagtatctcatgagtaatgtgtgttttgggagagggagggatgctgattgatatttcacattgtatgaaataccatgtttgaaactcatagcaataatgctatgctgttgtgatccctctcaagttctgcatttaaaatatattttttctttataggaattgatgtataccatgaagtcattgtcagttgtagtagctctgatgttgaatgagatatcatgttttagcattccattttactgactagggtagaagaacacttttcttggctacatttggaggatacccagggagtcttgggtgttccttatctggggaagcaaacatttcactagtctctttttttcatcctttaaattgtaaattaaggattactcaagctcaccattattcaagattgggactcgcttcccagtcgacactctgccctgcctgtcattgctgcaaagagctgctgctttgccaacctaagcaaagaaaatacggcttctcttgcattattttcccttttggttggtttgttttctagaagtacgttcagatgctttggggaatgcaatgtatgatttgctagctctctcaccacttaactcactgtgaggataaatatgcatgctttttgtaattaactggtgctttgaaaatcttttttaagggagaaaaatctcaaccaaagttatgctcatccagacaagctgacctttgagttaatttcagcacaactcattcttcagtgcctcatgactgaaaacaaaaaacaaaaaaacgaaagcatcttcacaatgaagcttccagatagcaccgttttgctaaaagatacattctcattgttttccaacagtgatggcttccacataaggttaaacaaactaggtgcttgtaaataatttattacagtttactctatcgcatttctgtaacatgaaatgcatgcccttcttcaggggaagactgtggtcaagttaaaaaaaaaaaacaatattaaacaacatgaaactgcagtctgtttttgaaaatgagaatgtcctaagtgattcagaagagaggagggaagttgtgcactctgaaaatgcatgaaaaacaaaggcaaaaactagtgggaaatgtgtagaactgttaactgagatggcttcgagtcttccttctggaatctgttaaatttcacaaagtcatgagggtaaatggagaaaatatttctgggattacaatgaatgtaagcccaaattgtggaattgccagtaacctggatggggaaaagcatttcccatagcactccatgtaatatgagtgctctgtgagatgttcatcagtgttttatagaaatggtgttgctgggaaaccaagtttgcacctggaaacttacaatgcactttagcgcagtaagggcttggcatccggtagtgaaaaactgtctaacccagcattgcccaaactattttgacaccaggacctttttctcctttgggatacttatgaacctctcactaatgtcctgtggagaacattttgggaaacact

SEQ ID NO: 62929 - DNA, 1048 bp, Homo sapiens
aggtagagacacgtccattaatgagtccagaaatgcaacagatgaatccctacgaaggaggttgattgcaaatctggctgagcatattctattcagtaagtagaataccagactctttaattctacaatttagattcatcatggtatggtgcaaactatacagattttggaatctgctgaggttagtttccacttctattaattcacaggtggtgataggtaagttattagaaagaaggtgataccgtgaggatttgagataattggagttaaacatcttatacagtgtctggtaattagtaggtgttcatgtggtagttgttgtactttttaaaaatagttattattaaaatgatttgttgcctctgttgctcattaatgtgttttatttgaactacttgaactaatttgtggtacaacgtctagatttatagttgcatgtccatttctcctttgaccccatgagtttttgtaatgcagcaaatatgagtggccttgtataaagctttgccttagccgtggagaatacaaaatgaataattaatggttctgaactcaatgagcttatgttcttgtcagtgggatggttatacacaaataattaaagtgaacctagagaggagaggagtgtgagttcactgcaggaccagtcttctttaagttccaagctgtacaattgtgtactgttgtggaggctgctttaaaatcccaaggcagcacagtggttctttggtgctcagcctagttgtgatttctttcttgctgctctctgggccaggaccctgatgatactctccgcaccccctgccaatgctactggggaggtcttcctccctcaccttgctcctcccattctggaggcccctattcctgcttgactttgggtcagaggattctttctcaagcacatttgattatgtctctatcctgcttaaaatctggatacaaaaaataataccttattgttaaaaagtttgaaaataaagatgaaatagacagcaaaaacccattacccaaataaccagtggtgttgctgtgtagtctctaa

SEQ ID NO: 62930 - DNA, 1020 bp, Homo sapiens
caaaatgggccagaaaacaaagtaaccatggcaaactaggtctttagtattgtcagaacaggcacactccacataggaggagatgttttgttctgtgaaatgtcaagctgctatataacaagatttgtctacgtcaaacacagatgaaagtcccagcaacattgacttggcatgtcatcttttaaatcaaaagagacatggtttaagtcaaaagattgaggaagctatttcaacagcaaaaagatactgccttccttgaatgagattacctgaaggctggatttgaagagcctaggagagttgggcaaactggacagaagtttgaattgagagaccaaggcttgagttttgcaaataacatgcatttttccgttgtctctgctgtacatgaggtagagtcaaatagaacaaactgagctgacgctgacctttatttttttttttaaagacccacagggaatttctccaatatgacctggccgcatggctcccttcctgaagacagacctggctgtggattttataatgagctctgtgaaactcagtctgcttttacgggtaagtatggctgtttggagaacgtagcagggaaagactttctatagtagggtctctgtatggcaggcagcactattgacattttgggccaggtaatttttgtgtatggggaggctggcatttcaagccatgcatccctgtatattataagatgtttagcggcacccctggcctctacccacagatgcctatagcagccctctagtcggaatgagaaatgtctccagacatggccaaatatcccctaggaggcaacatcacctttttcccctgtggagaatcactgctctaagggaaactggctcctgagatttgagtctcaggaacttcacctctagggaggttgaaagagtctggggaggggagtgtgccccagtggttaggagcccagccctggaattagatggatcatgcctggagaaccaccctaaggagaacacacagtaaatgttttgtaaacac

SEQ ID NO: 62931 - DNA, 1047 bp, Homo sapiens
ctaatttttgtattttcagtagagatggggtttcgccatgttggccaggctggtttctaactcctgacttcaggtgatccacccacctcagactcccagagttctgggattacaggtgtgagtcactgcgcccggccttaactttattttttaagactctgcctctgatatagaatactaatcacctacacattggagctatagattcaattctacctttcagaccaccaaaaaaaggctgatatctcagaaggtaccaagccccggtggtagagtccctttccagtgcttattccctgagggtctccggtggtagagtccctttccagtgcttattccctgagggtctccggtggtagagtccctttccagtgcttattccctgagggtctccagtggtagagtccctttccagtgcttactccctgagggtctttgagattcaccttaggaccctcagggagtgggcattgggaaggaagtacttaggaattaagcagcacctgagacttaacctgtggccttacttcctaaaatacactcagctccattcatctgtctctcccaccccattggtctcattcatcagtcttacccaacataaaattgagggcaaacccccagcccacctcaggggagctatgctggatgctcagacccacaaaaagaggtctctgttttggttcaccttccccaagagagtcgagagaaggaaagtgagccccatgcatgccccacatccttccttcccgttgctcctcctgacacagggtctgaaggcatgaccgagaccaggagggagacagcatgatgtgcccgtggaactcagccggcccttgattctaagtcgcttaaagaaagtcgggggtcaggatgcccccttggcctctgtcacaccctcacaagacccccttgctgaataacaccccctcgatggtccccttaccctgcgagggggccgcatctctcagtgcttctagtgaatgggggcttcccggctctgagttcttcctgccacacgagtccctgtccttcttccctcgctcg

SEQ ID NO: 62932 - DNA, 1108 bp, Homo sapiens
tcagccttacttaaaataagtttgggaacatccatttacaagaataaatggcatctcagcttttaaagctaagtcaaggaagtagtggtattaggctgaagaacacactaagtggcttagaagccctcacgtctaagccagaaggaggttgttataagtagacaagtagaagggcaggaaaatgtatagagaggatctagtcaaactgctaagaggaattcaggtcttgccaaaaggaattattcagaaagagagttactaggaattcggaggcaagtaagtggacttctagactaagagatgggaaaaaaaggaaggaaagcagggaagagatacccactctgattaaagagatataaaaatgaatgaggaggctgtgtacagaaaacattagtacttttgcttccaattgaaacagctgcatgaaagccttagaagtaacgtctcagactaactttccctgaagcatggctttgtcagagtggaagccacttgctcccccagggtgtgtgtcttgggtggtctaacattgagatcatttgtactaacattaatcactaatgatagctaccatttattaaatgcttactccatgccaggcacattaactcatcttcccagctattatcatttgtattgtactaagaattatgaaggactgagacagcttggttaagctcactcagcaagtggtagagctgatgaatgtctaagaaagtatactgggggctgggcacagtggctcatgcctgtaatcccagcagtttgggaggcagaggttggcagatcacttgagctcaagagttcaagaccagcctgggcaacatggcaaaactccatctctataaaaaatataaaaaaattagctatgggtggtggcatgagcctgtagtcccagctatttgggagactgaggtggaagaatggcttgagcccaggaggtggaggttgcagtgagcttagatcgtgccactgcactccagcctgggcaacagagccagaccctgaagaaagaaagacagaaggagagagagagagagagagagaaagaaagagaaggtgggaggaaggaaagaaggaaagaaagaaagaaaaggaaagaaagaaa

SEQ ID NO: 62933 - DNA, 1041 bp, Homo sapiens
cctttatgcaagagacaggaacccaggtactctgctctatcagacacctacaaaaaagagagatggggtgagagagagagagaagaggtcaagaccaaaaactgaccaatatcgtatcctgtagttcagaatactatgttagaaagaatctgtctaaaaacatggactcaacttacctgtttgtaagatagccatctgtagggctggtttggttttctatatcccaagcagggcccattgtctaaaaacataatattaaaagaaaatcaactccagttgcaaattctctggaccaaggaagctaaaaggagattaagaaggggcaagacacaaagggtaagtccaacaaggatttgagcttctattatatgtccaggaaattcaaagtcagaaagcactgagtcctcaaaaatgaagagtcctataaactatagttgaaacatttaggaaatgctacacaaaacaggagtggttcagtgttgaatatgtaacctccatgataatgtagacattcagagaaagccatccatatggggttagcccacaaaacatgaccaagtgaaagcctacaagtaaacacaaacagcctgtattgaacaatcttggattgaacttccctacaataaaaactatgctcataaagatataaaaaagttaaaatatgaatcatcaatctcatcacccaaataccattattaacactgatatattatcccatggcccttttgcatagtttgacagttatgttcattccccatgtatagaatgaatataatactttgataccttgcttcctctcccaatctgacctaagtattttcatgtcattatctcttctctgtagtggtttcaatggccagtcgatgaagggttctattatagttgactttatttcatcgtgggtatttagattgttttcaagcttgacactttaaattacgctaaatattttcaaattgatccttttaaatttagaccatttccttagaatagagcccctaaaatataataagggaagggaataggggctcagaacagtca

SEQ ID NO: 62934 - DNA, 1047 bp, Homo sapiens
ggctatcttacaaacaggtaagttgagtccatgtttttagacagattctttctaacatagtattctgaactacaggatacgatattggtcagtttttggtcttgacctcttctctctctctctcaccccatctctcttttttgtaggtgtctgatagagcagagtacctgggttcctgtctcttgcataaaggttataaatcatcaccagaccagtttgtcggcatctttgctcagaataggccagaggtaactatgttgaagttaactaaaggaaatgagtcagggttaagtttaaaaacttcaaatgctattccccgtccagcattccaacacttgttaatgccttaccaaagctattgttaaaattttctaatgcttattctacttgaaagagttaccactcagaacctatttaatttctggttaagtgtctggcactctcacctaggtgtttggacttctcttttttctcagcctatcatgtgttttttgaagtcagtctgattgttacatgaggaaaataaggaagctaggagggaccgccaaataagatcttgaagatattgtggaaagtatgtattagtattagaactgaaacttgcaatttgtaattgaactagtaaattcagccattcattgctactgagtctggccatagctatctttccacagtgagttggaagcagattttagacagtaagatgacagaatcaagcttatctccaagttttggttaagtcattaggcacattatccccagaggaagtctttttatgcttcaaacgctccctagaaatgcagcatatgatacatataacatacaaaatctgtgttaactgtctgtgttatcagcaaggcttccagtcgacagaagccattagtagttaagttttgggggagttaagttctatgtggatcttgttgaaagttcacaaactgtaagtcccatttctaatgctaatacaaatataaaaatattcaccaacatttttaggtgaatctgcatactccattcttgtcacagtcagcctcaatagaaaaaggt

SEQ ID NO: 62935 - DNA, 1058 bp, Homo sapiens
agaaacaaaaatgtcattaagaaaatgataaggaagagaaaatgtatatactattcattaggtggaagtggatcattataaaggtcttcatctgagtcatctttaccttgagtgggttgaggaggagggagaagagaggttggtcttgctgtctcagacctggcagaggtggaagaggtagaggagatggaaagagaggcaggaaatataggcaccctcaatgtaacttttattgaaaaaaaaaatccacaagcagacccttacagttcaaacccatgtgttcaaggagcaactgtatattagtctgctagaactgccataatctaatacacagaccatgtggcttaaacaacagaaatttattttctcacagttctggagtctaggaatccaaggtcagagtgtcagcaggtttagcttctcccgaggcctctctccttgacttgtagacagccactttttcattttgtcttcacacggccttttctctgtgcacatgtatccctcatgaccgttcttcttcatagaaggaagggattaggaccccacacttaaaacttcatttaaccttaattacttatttaaaagccctatctcatatactgtcacattggggattagggtttcaacatgaatttgggttgggccggaggaggggtgacagggagacaggattcagtccataacatctacattgatatttaaggcccatcactagcagattcctacctacctttccagttttatttcctgtagtcttcaagcttgctaatgtgtatccacacaatgatgttatgctgtctgtattagttcgttatcacactgttacgaagaaatacctgagactgggtaatttataaaggaaagaggtttaattgactcacagttctgcagtgctggggaggcctcaagaaacttacaatcatggcggaagggaaagcaaacatgtccttcttcacatggtggcaggaaagaaaagaatgagagcaaagggggtggaaagccccttatgaaatcagatcacatgagaactcactcactgtcacgagaacaatgta

SEQ ID NO: 62936 - DNA, 1009 bp, Homo sapiens
tatacaataactatctctgaaaaataaaaaatgtacaacaacaacaacatatgaacaaaaaccataacaaccaccaaatctactaattgcgtagcatggtaagaaactgctggaattgttatcagttctgctagaacactgcctgccctgtcaccagagcccatttagcatctgctgagagtcctaagagtgaaaggaagagttaaaatcttggaggtggttggggaggtgggggagggttccaaagcatgtgaagaatggccatgcattacttcctcacggatcccagcccgaggaatcatcacatactatattgcctgggttcaaatagcttcaacggctccctgaagcaatcagacactctaagaattgggtgagaaatatacaagatgaggttgagacatcttgtgccagaaaccaaggaagctatcagaggctacaggggtattgtcaaaaggacacatgagcaacttgatgaggtttcccaactgccacgatggggcagttagaagatcaagaagaaagactaacaatttgggaggctgaggtagggtgatcacttgaggtcaggagttcgagaccagcctggccaatatggtgaaaccccatctctactaaaaaatattaaaaaattagctgggtgtggtagtgcacgcctataatcccagctctcaggaggctgaggcaagagaatcacttgaacccaggaggcggaggttgcagtgagctgagatcgtgccattgcactccagcctgggtgacagagtgggactctgtctcaaaaaaaaaaaaaaaaaaaaagaatcactgaaattaaaaaaaaatctgaaaattatgaattcctaaaaatacaaagagaaaatctcattggctacttttgaagattgctgaggcacaaatccattcttctgaagattgataaataaaaagaatcaaatattcaccaggttttatggaagaatctcagctaatgaatgcaagaggaagacagaattacagaaatcaccat

SEQ ID NO: 62937 - DNA, 1021 bp, Homo sapiens
gattacaggcatgagccaccgccccctccaagttcaaggttttaagacactaagtggtctcgaacccttagagaccttgctttcctcgtgtcttgaccatagcacgtggccagctcacactttatcttgagtaagtctaaaagctcttctttggtttcccaggtgtatgaagcttatggtcaaacagaatgcacaggtggctgtacatttacattacctggggactggacatcaggtaagtcctccatctgctgggcaggaggtgccatggttgggagaaaggttctaactgaactaggactttggagtttagataacttcagttctctggactaatgtggcaaatgcaaaattcaagttttgggtccaggcctgcctatcttggctagtctgcattggtgccaggtgatttttcagtcttcctcttctagagtcaattcataaatatcttagaaatgtgcctggaattatcaccatgcaagagtttctcagctaattcagcacggtatgttctaggtcacgttggggtgcccctggcttgcaattacgtgaagctggaagatgtggctgacatgaactactttacagtgaataatgaaggagaggtgggtaggtcatgccctgtggtcagacagtcatggtggggaggtttatatcagaaagagcaaataattgtaagcaaacttggatttggcccctttgagattgttagcaaagaattaagcattctgaacttcactttcctatcccctatagtggagacttagatctggtgctcttcacagtgtagtggaagccatcaaatgatttaaggggagcaggtgtttcataaactgcccacgctgggaggagcagcctttgctattgtcaccgccttgtatgtctgctgtgcaggtctgcatcaagggtacaaacgtgttcaaaggatacctgaaggaccctgagaagacacaggaagccctggacagtgatggctggcttcacacaggagacattggtcgctggctcccggtaggtatat

SEQ ID NO: 62938 - DNA, 1052 bp, Homo sapiens
gttaggagctgtctttaaccacattagtccctattcgggatcatcaaatttgggaaatacctgttcctagcttgttatgaacatttaaaaatcttatttttttccccttcaaactgtgcttataatagatagcaaagtggggaataaaagtctaactacaagcttattaatttgaagtaataggacttactgctttcagtaatgtcactgtcatccatcagactatttcacctcaatttcattttctccctcaggtgtttcaagaataaggggttggttccctagaaaatgtgtggaaaagtgtccctgtgatgctgaaacagatcaagccccagagggggagaagaaaaatagatagctgctgttaaaacaaaattatcctttaagtctgcttaattacttgaaaattgtacatattactaaagaattatgcaatgagcctactctggttaagatgttcttttcctcaaaggtgccctagtgccatgatttaaatatttttattaccattttgaaatggagaagccattctgcatatgcctttgaattcctgcccctctttaccacctcttcctccccctcaaaggaaaaacatttcatccaagtaagttaacggcattttctgtaggattttcttatgcactgcacactctggacctcacctgcagatacagttccccccttgccaggagcatctgcatgtggtacttctcttttccctcagttgatatttcttatatgatattctagatactatagaactcaatttgtcagattcagtataacctcagattttgttacctgtcttttaaaaatgcagattttgtcaaatcaaataaagatcaatggatgttgggtataatcagtttttacttaaagcatttttctttttgctgactaaaaaggttcatcttagttccttatggaaaaactgctctgctgccctgtggacaactggcatcttaaaacgtggcttaagacatgacacacttgcttcaagatattaaccctattaatgggatattgcggtcatagtgatggcagcggatggc

SEQ ID NO: 62939 - DNA, 1053 bp, Homo sapiens
cttttatgacttctttttttgttttctggcgacggagtctcgctctgttgcccaggctggagtgcagtggcacaatcttggctcgctgcaacctccacttcctgggttcaagtgattctcctgccttagcctcccaagtagctgggattacaaggtgtatgccaccatgcccagctaagttttgtatttttagtagagacaggctttcaccatgttggccaggctggtctcaaactcctcacctcaagtaatccacccgccttggcctcccaaagtgctgggattacaggcgtgagccactgcacctggcggacttctttttatctacttctccagcctaatttcctacccttctctaccctgtctcacacttgatactaaattactcatagtttgtacatcttatgcttctgtatccttgcacatgttgttccctctgcctagaatgctcttccctctctttttgcctgatttcttgcttctcaagacttagttaaggtattgtttctcccaaggacccttcctggatactccctagacttggctaagtactttttgtttcctttgttcccttttcccatagcatctaccacaccccttcatcaccttttaacacacaatattgatagaatcctaacttcattgagtgtttctgttaggcaaagacatgtcttagtcattttataaattctcttatatttaccagtttttctttgtaaatagcctagaactcttttctttgaaattcagtccattttgaagactctgaagctgtgtttataaaaaagaaaatgaaattattctttactttctggggaggatggatttatataacttaatagattcatatgcattatagcttaataattattttagtaaatagttaactttaatatcactcaacaaataattgcaacattttccataaaacattgtcccctgataatcaaatatttcaaagtatcatttctaataagcataataaatatattgacattagattaacatttttttgtttgtttttgtggatgaccaaggctgcttataaaccgc

SEQ ID NO: 62940 - DNA, 1317 bp, Homo sapiens
ttatcgtctactagcctgggaccaaattctttgaaaaattttccccaatgcctctaatttagaatcatattagaaataaactaagatcctataatataaaagcctatatatgtggaatcagtcatatctaggaaaatcaaataatagaataaagactgaatacattcattatttttaaggcaagtgaaatattgaggttgactgaaatgagtcactgttacttctcataaatagattaatcgtaaatttaaagttagttaaaaatagtgataaaagattttaatagcaaattataagtaagcactgattaaatggattatatcaatgttttattaaaccttgctctgaaaatagtacttatgacataaagtttgattaacatactagattcagatttgattatggatgggtgtaatcattgttacggagaggtaccgtggtgcagtagttaagaacaaggactttggagtcagacggatgacatggtaattgtggtacttaacctctgttatccttggtatctttgtctatggaatggagtaataaaagctatctcagagaattatgaatatgataatcttaaaggaaccaaggtcgcattattaaattttactatcatttaatttccagatgaaaataattctcagaaacaaaacttctattgagtcatggattgaagagaaggtaaattttaataattgtttcttcaatattaaaaaagtatattaataaaggactggtaaagtcctgaatattaataaagtctgttattagaccggattaacgaaaagtgcctaaaagtgaaaacatggctgccaaatggctaccgtaagtcatttgcatgccacataaaaggtgaatataggaaacatttttgttcattctgtaactcccacagaaaggtgcttctcatacaccctgagtggtcgcagaggcctaagccacacgtcaaaccatctgtttgttgtctcttagactagaggagaaagcagcccatttggaaaggagcttccaccctaccaaactgccatcaggtttttctcagtgttttagacattcaatgaagctcctaacattttgcttgtcacagacctcacaatgtccaatacttcatactgtccattgtgattctagcatgaaacacaaatctgactaccctgctctgtgtttaaaacttctcagagcctcaccattcctgtggcaggggttgaaacccaaatacctgcagggtctgggcagataacgtccatgaaggggagcaagcctgtataccaaagaattgcctggcagaccaagctgattgttgccacaggggaa

SEQ ID NO: 62941 - DNA, 1947 bp, Homo sapiens
ggaagttacatgtgtctatttgagcccattaaccccactggaggtctataagggatttgttgagtctctattgtaggtcacttgggtcactgcacttacaaactagaagaaaaccaggaaccatgctcatttctttataatgagcattataaagagaccctctttcagtgggtctcctgacttctttaaacaaatacttgtagctgacatcttttcctcagaagctgttagaaagcctgccctttcctgtgctgtttagaatttaaaaggagtcacttaattgtttaaaagctcataaagatttttctttctgttccatgaagtataattctctcgtagctcatggacatgctggattcctatttgcttgatcttttgaagaccaaagttatttaaagtagacaggattttctgcctcatgttttatgtaaatttttcttgttagatgtgtgatgaagatggaccatcactgtccttggatcaacaactgttgtggttaccaaaatcatgcttcgttcacactgtttctccttttagcaccactgggttgtatccatgctgctttcatttttgtgatgactatgtacacacagctttatcatcgggtaagtgaaaatgaaaatgttttgttataaaatcatccatgcaagattaaatggtagttatcaacatttaagaggttccttttggaaatatgctttctgtgatttagttggggaaatagaactttgttttactggtatatgggttcctttttagaaagcattaaaacttaaattttaagatgaggaaagagtatttgttctgaaaacttacatgctgtagttgaaggtgataaatattttagtactgtatatgtaatttgttagacttcaaacttaatagttatggaaagaatagaagaaaaaaagacaacactagtgcttcctactttcatcccattcatgtggcaagttgtagttctttgttcatttctgattctagtgccctggaaggtggctcatggagcagatgcataccataaaatataaacagattaaaccagcaagagatcaagttgatttatgggcaagtagtcatgagataaagttcaagggacacaaacctccctaaacaggccttgaaagtaaacgagagacacacctgatgggactgccaaactggagagtctgtcctttggggaggggacagcccatatttgatctgctagcttgtggtgtttggaaattctagcccagaaaaatctgaaaatctggatttttatgtgaaatctcttgatttttaaatgttggcacctaattctgaatgttgaaacattatgcaggccaggcagcacacatctgtggccatatttggcctgcattttatcagttcttcatcaccatttgtaaaacatgagggaagaaacaactgaatcctaggcagcacttgtcactgtggaagaatactgcgatgtagaatagcaagagaagagaaaagacatagttctggtttagattagtgtctagtgttgtttatgtatgttaatgttggtaaggtctccttgacactttctgaggaaacaacaacaacaaaaagtaacatttgagaaaactaagaatgatatcctgcacatcggtccgagctcattactatattaattaaaaatagctggcccagctcagtggctcacgcctgtaatcctagcactttgggaggctgaggcggtgtgggtcacaaggtcaggagttcaagaccagcctggccaatctggtgacacctgtctctactaaaaatataaaaaataagccgggtgtgatggcacatgcctgtagtcccagctactcgggaggctgaggcaggagaattgcttgaacctgggaggtggaggttgcagtgagtcgagatcgtgccactgcactccagcctgggcgacagagtgagactccgtctcaaataaataaataa

SEQ ID NO: 62942 - DNA, 1050 bp, Homo sapiens
cagtttgcatgccattcaaacttgtaccatattttggataagtcaaaagtagttctttttgacatttgacaagatatgcatcccaaagtgtagtgcacttgtgagatgctgttgtgtaggtgtttattgtagttaacaagtatggtatgcaataaaggttttgttttgttttgttttaactgaactttcccattttgttttctttaggttgggtttcagaccaagacactggattctcctagttaagataaagagctttgggtgcctgacagtgaaaatggtgtaatctgcgttaacagttcacagcttgaaggcatgacaattaaagaacacacatggacttgtggcacatggaaatgtgcgcacagaaaaaggaaatctataattcttttaaagtaggaaggcattcttccttgccaaaatgggtacattctgttcggttatcaagtttgaaaatctacaagaattaaagagactgtgtcactggggtcccatcatagcccttggtgttatagcaatatgttctaccatggccatgattgactctgtgttgtggtattggcccttacatacaactggaggaagtgtgaatttcatcatgttgataaattggactgtcatgattctttataattacttcaatgccatgtttgtcggtccgggctttgtccctctggggtggaaaccggtaagaaagattctgtaagacaatgaactttaatgataatcgtatatttggtttttgccttatctactaaccaataataccaaacacagcctactgtttgtcctcacagagactaagtatattactctaatcactgatcatttaggctcggagactttatttcatatctgtttgaacacattgatccaaaatagcattttccaaagcaattttattgaatatttgctctgcattaaaaaaaagatggaggtggggtggaggtgggataggttcatggtcaaaagtttaggaaacatcacatgtcatacacagtgaggtttggctgtagtaccttttttcatgtaatacattaacatccctta

SEQ ID NO: 62943 - DNA, 1033 bp, Homo sapiens
tacttctctcatggggttgttaggtagattaaatttatataacatatttaaagtcacttttggtgttgttagttgctgtattagcattagtatttttcataccccccacccccatttcttgtttctcatccttcttggggatttattgtataacccagtttcatgtaaaacttggtacaagataatttttcacacttaaaaatttcacatctcccatctggaaatgtttttgtttttgtgtttccttttgtgttttagcacatcttattttctatgctagactgtcaactatgtgaaggtgggagctgtgtctgatttccttggcgtttacttattaggggctcaggaaaataagtgaatgagcaggtgaatataaatatgatcttttgtaactatggtttgtacaatgttgattcggggactatctttctctacagattagagtagttagttacagaaaagggttttacatttttgtttagttttgttagggaaattgaaccatcatctggctgctagacttgtccctaccctagctccaggatataaagtgtagaaaggtggatgtgctcattaatctgcggattggtgggcacttcacttgcccacttgtcctggtactagcaataatttctcccggacctaagttgtcattcctctttccctttccctacttcccccaaaacttatgtgtttataagtaattttcttcccttatttctttgtttttcttcccctcacctattttctgttaatagggatatttgcttgaagccaggatctctgaacttataccccactcatctcctgaagtccccagttagttctggaggagatggatgatgtcttaaagaggtttatgagtccaagtaagggaacaagaggagagaaccaaggtagtatataccaccaagctctgctgcctcagagatttttgtgtcgaaagtggctgatggcctcatctcttcatgatacatcacctcgcctcttctcttcagttctgcttttctccactgccggagatcgtcttgat

SEQ ID NO: 62944 - DNA, 1488 bp, Homo sapiens
atcgcccaggctggagtgcagtggcacgatctcggctcactgcaacctctacctccccagttcaagcaattctcctgtctcagcctcccgagtagctgggactacaggcacccgccaccacacccagctaatgtttgtatttttagtagagacgggatttcaccttgttggtcaggctagtctcaaactcctgacctcaggtgatctacctgcctcggcctcccgaagtgctgggattacaggggtgagccactgcgcctggcctggtttttattttttaatggcaactacaagtaagccacttctgctatcttgtatagtgcttgctgtatcttcttcatcacttgcaatcatcgttactagagttaattttaatctagcaattatcaagtaagagacactgttctaagtacattataagaattgcctcatttagttttcacagctgctctgtgaaaaagacactattttgtaagtgagaaaactaaggcacagagacattaagaaacctgttccagattccaggactaataagtagtagagcctatgatgtcaacgtaagagtctggcttcaaagcctatgcctaaaccattatagtatttctgcattgctgctgattaaactcttctgtgttgtatccaaagtgttatctgatagcaggttgttaaaaaaaaaaaaagcgccttgctgtgatttcattaagctatatgtaatttagcatattactgtatccatttaatgccatataaatgtggttataaagtatcgggagttaggatgaaggtaaagatcacatgttggttggtatgtgattttcctaattacaaaacacctgccagaataaatatcaccaaataaggcttggctgatgtttcatggattacccatgggaaataatagcttactttatcttcccatagttgtggaggttaatggtcagaagacaagacccggttggattgaatgatgggctattccaagtatattgaaatcaaattattaataacgtttgggttaatgtgtatcttttattttgttttattttatttttgagatggagtcttgctctctcacctagactggaaggagtgcagtggtgcaatctcagctcactgcaacctctgcctcccaggttcaagctattctcctgcctcagccttctgagtagctgggattacaggtgcccaccaccacgcccagctaatttggtatttttggtagagatggggtttcgccatgttgcccaagctgttctcaaactcctgacctcaagtgatccacccaccttggcctcccaaagtgttgggatgatgggcgtgagccacggcgcctggccaaatgtatatgttttaacaaagcatgtacttgagcacagtgtgtgtcacttggcaagtactcagaattgttgaactaaagaaaaattaagtgtaaaagtagtttcagtgttatttgatcattcagcaccctgaacctggtgcctcaactac

SEQ ID NO: 62945 - DNA, 1151 bp, Homo sapiens
aggtggatcacatcaataactctgatgccttttagactgggctcctattaattaaaaaaaattaaaactcattatgggcccaaattgataaaataaatatatatgcctaagtatgtgccctgtactagggtaacattttctccaactgctttgtgaaaggctagtttttctcagtaaaaatatgaaatatagtgagaaaattggattaagaacttgacaactcaaatttatactgagaaaattctacctgaagttaaagtttcaatataaatgatgaaagcaaaataacatgtttataaagattgttttagcttgcttacctcatttttaatggaactcttttctgaagatttttcttatgggttctagaaaaacaaagggtatgaatttgctagggctgtgacaacaaagtaccacagactgggtggcttaaacaacagaaatttgttttctcacaattctggaaactgaagttggagttcaaggtgttggcaggtgtggttccttttgaggcctctctccttgatctttagatggcttctccccatgtcttcatatgtcttccctcttcacgtttccatgtccctatttcctcatataagacatcagtcgtattgaattaaggcccacacgaatgacatcattgtaatgtaatcacctctttgaagaccctatctctggacagtcacattctcagtatgggaatcaagacttcagcatatgaatttagaagagacacaattcagttcataatgtttaggtcagttttaatcttttattcttaatttttttttcagaaattaaattatttctgtggcttataagtcagctaacccaacctttagtcttttttgtttctcaaagagtacaatactgggcaaagtcctttaggtatttggaaattgtatacttggataagtgttcctttctgggctatattttctattataaagaaaaatggaaccaacaactatgaaactaaaaatttattctctaggccagggatgtccaattttttagcttacctgggccacattggaagaagaattgtcttgggctacacataaaatatcctaacactgatgatagctgatgagctaaaaaaaaaaatagcaaaaaacctcataatattttaggaaagtttattaatt

SEQ ID NO: 62946 - DNA, 1007 bp, Homo sapiens
tccaatattctgcaaatatatggccagaaactgtgttatcaagactagtggaatctccgtttaatttccctgggaaaagtactgcatagtttaaaagacaaaccttttccttggctttccctttgagtcactctcatttttcatgtatggtatactattacttggaaagaaaagtagctaattgatttttaaatgaaatgccttttatgaacgtacttgctagtcactctcctggtagaatatcaaacattaaagaagaaacagtgatgctgtggtagtgatgttgctgaagggaacagaggccttaaggtgatggctcagtatggtagtgatgtccacatgttcattgtcctcttaaggcttacttacgttctagaattcttgaaactcacaatttaataccacaaactgaactagaagatttcatactttggccctagggttacaaaagtatttgaataaagtgtgtcaattttgtgctttgccaaactgaagtaaggtagcaatttgaaatgacacatcatgattccagtgtctcatttcttttttcataagtcttcagttgctttcataccattcttattggctttacccagttccacatttgtgagatgtggaacaaaatttaaaatgggttaggcacttttgacttagcatatagcttttaggtgagtttagctggtggtggtaaagactgagccagatctgatctctagggtgaagatttttaaactgtgtaatagtggttgagttttgctatgtcaactattttaagctttcttatacaagaagttaaattgggactagaatagattttgccagagacttttctgatgatttcaagtcctcataaacctagcagagaatggaccatgtgtacaaatagtctcattttttgcttatattgttttgtttgactttgtgtcctttagttcccaaaactggatgaactatgttttaggagtaaaaacaaataacaactgtgcagtcaaattgtgcttttggct

SEQ ID NO: 62947 - DNA, 1032 bp, Homo sapiens
agctttttcttccatatgggttgcagtgccattttattttatttttatttttctccttgaatctttaatgttattgttttaaataaaaaatttaaagttggcaaaatccagtattttacatttattctgtatcaaactattttaaaagttaatttcctttcagtgtaaagttaggtgttagttggggaaaacagagaagccgcgactgaataatgtttctgcttaggtggcaaaatgagtactttaaattttcaattaagcttaacaagaaaacaaatcctcagtctttgatagcatacggactgtctctttggcctaccttaagccaatgccaatggaatgtcttcatatgaagttttgttttcaaatttgcagtctaactgctttggaaataggtatattaactccctggtaagaagggaaatatggttataaaagtcttgtatatgtatgttgtttctgcatttagtaggagacactatatatgtccattttttttcttcaccctgtgaagtcttgtaaggctgattttaacttaattttgtacaagaattgtcaagaaattgctagtaatctgtaatcagagaaaaagaagtaaggatgtgatggataaataggattctgttatggccagcatcttcattgatcttagcagaattgctctttgcctccccagtgtctgtattttctcttggcagtgagccgagtgaatttggaacagaaagaaagagagagaaaatctgcttggttccaaatgatgatagctgtgcattggtgtggggaaaataacgtacaacttgatagtacaattactagaggatttcttgtatcttgtttagggggaaaattgaagttccttttgtggctagattggaaaatttctagcttaacataacccgtaacttatgatatcagtttgaatgatcatcatatcaagggatagaatttttaattaggaaattacttttaaaaactatttctgaatagtagtcaggaagacttagaaaaaaatactatcctgtgtcttaaaca

SEQ ID NO: 62948 - DNA, 1035 bp, Homo sapiens
catacttccaatttaatttaaacatgttccttattgcttcatcctgcattctccaatgtttgtactatcaggtactaaaccttatattgccttttagtttactttgtttaattagtgttgttgctccaactacattatatgctattttagagcaggaactgtgatatagcatgctatgtaagagcatataaattctaagtaaatatttctgaatgaatagatgaataaggttatcaaatctaatattctagaaaaattgaaataattgtccaactagctattctctgtattaagtgaagagtaccaagtcgaactatcattataatgcagagctttcctaagtctgactaaaatgcctctgttattcttggttaagatagaggattttgctatccatatcagccagaaccagacccaaaggtattatttaataatattattgagctgatcagtggcttgagcaagaattagaaacctatattatttgattctgtattcagcgttacttccagtgtaccactttgtcttctataatttgcacttcttgtagtggtctgactttttaaaagtcatgcaggactctggcttcctctaatttctctggtcttcatttctttttggttcaatatttgtggaatattatgtttggaggaatgggtaaccaatactctaggaatgtctatgtattttgggtcccaagagctaagtataccatgaaaggaagcactgttggggaatgcaagcctcagtagtcctagaaactacagtattatatcttatgtattaacaaagttttttttaattaaaggaaaaaaagatgatagtaaactctttgatgtcatccttttattttattctcgtgttttggaactttggcctcttagctcgcagtttcctcatctgtacaatgaagtgcttagactagaccagtagttcttaaactcaagcaacatcagaatcactgggagtgcttgttaatacacaggttgctgggtctaccctggagtttctgattctgaaggcccaggtggggcc

SEQ ID NO: 62949 - DNA, 1037 bp, Homo sapiens
ttccaagggttatcatatttagatgaacaattttcttagaaatgctgttgcttcaagtggtaggtgctctattcaggtagcctgtcactttaataaatgtcttccctcctaagtgtctctacctaaattattctattttcaccactgggactgaaatgttttccagtagagttttatctaaacagaaagggggcgggagggttggtaccatcaatcattcatctgctagatgtcagcaaaggcttaaatgaagaaataaccaggctttgggaaaagttgccttatctagtctgtatcctgtacaaatatttcaacattaggtaaggggagatatggcatttaataagtatatataaggaaaaattagagtatttaacttctttttacattgtattgcttgcaatactatgatagatatcatacctctgaaacttttttgctaaagtcacacgtgacccctgtttctgaggtctttctccagcttttatcttacttgtcatctatgtagaacttgattccctccctccttcttgaaactagcttccttgattccatactctcttggtctctccctgggtctctgttctgaatctccattggattctctttttctgctttcatcttaatgtttgcattttcatgtcattgttgttttgacttgtcatctctttattttctctggttaattttatgtatgcccatggctttcaccaatgtctatagattaacgacttcaaaattatatctctagcctagactttcacattgcattctccaccattttttcaattgtccatttcacatgtcccagtcctacagacattaaactacagtcttccaacttgaattcattaaacttattatcttttctccaaaacctgttcttcttcctgcatttcttcttcccgcatttattatgctggttaacgcatatgttggttattctaattaatgtgccatctacacagttacccatatgagaaaccttgaagacatttcatacttgtttctttgccttaccctcacccccactacgt

SEQ ID NO: 62950 - DNA, 1009 bp, Homo sapiens
atagtatttgctatctattatactataatctgtaacagggatgttgtttgtgtgattaaggactctactcacccacccccaaaaaagagagaagaatgactgagctgattatgtttgtttttggaaagatgtcacctcctccactatttggatgttatcagcttgagttcagacatgtgaacacgttcagatttgacttgggatttcagcttccctgattgaaatgtgagaatagctaaaggaaaaaaaaaatagcacatcaaacataaaagggtgatgtgataaaggggctttactcataatagattaaataatgtgaggatgagagaaaaaatattttcttctgtttttaaagtgagatttagattgctcatacctcttgaaaatgagtgaatcataattttatttcctatctactgcaaaaaacactatcttttttgcaaaaaagtgaatgcgtagttcccatgtcagttctttaaacagctatagatctttccctcatttgaaactactgcctaatgcagaggaaatagaaaggaagggggtgtgcctgtctaactcagactcctttatcgtaatggatgttgtagttctatgatagggatcccttttttttcaaacgtgttcacttctcttaatggacattttatatgcctaaaacatttgccttgcgtacatataagtatgatttttatgcctaaagaaaactgttccacaaaaatagattgagttcatattttctgaatttttcaaattatattcctgtcaccttaaagtgattatgcagagatttcccctggacttgtataaatcaaacttacaaattctgaaagtgcttggagaacctgaagtttacatgtaaggaactgtcacttcaataaatagagtatgataaattatagtcatgagaatatgtactgttagattattacttgtgtgaagttttccatctaaaatttgattgaggtgtaaaagttcaaagagaccacactgaacgttttggatattt

SEQ ID NO: 62951 - DNA, 2016 bp, Homo sapiens
ttttttcagcccacaaaggaacagattacctcttgtatcaaattctgcattgggggaaaaaaaatctttgtttcagaaaagatgttgattatcataactcaacatggtggcattgcacactctcatgttgcctatgatggagctagtaactcgagaaaatacgaaatcacgacttacagtccagtctacgcattgttaattttcagaaataggccatcttttgtttacttgaatgaataactcccggcctaagcaaagaaaaaaaaaaaaaagaaaaaagataaagatgaaaaaccctcccattacctagcttggctacaaatccgatgtagagcttgaatgcagccatgcagcacaaacaagatagaacgttttttgtttggaacctattgaaaaaacaaatgggtagcatttttaaacactcattgattatggcagggtggcatgccccaaatggtctctattgctgaagagtagttttaaactttggccctttaagtatcatagtcaaccaaagaatagtgcccccagaaagaaaagatcgctggccgatcaattcccagatcgtctctttctgagaattaatgtttgcctttttctcccatgatgttgggatagcaaagagaaagattccgatatatgataggccaggtattttagcttaaaattttgcttcttctggggaagaattataacttttcatgtgaaatgaaaagatgatttacttgtatgtaactggatggttgctgagtgtgttaattaaaaataaagaaagcttcttattttgaaacgatgataataaaggtttcattttcactgaatgtactgtgagacattacatgataacttatgtaccctttttataaagattcttaacagtttttaaaatcttattctttggtactcaaaatacttttcatataacaaatgaaataacagaataagctggaatgcatactgccttccttgaattcgggacaaaaacagcgttaagcattgagatatccgggctatagtaaacatgatacttacagagacttatagtgaacaattcaggcacatttctcccaaagcaatagtttaatttattgacctgcatatgtcaagtgttataacagatgttacagatatttggatgtttaaaaattatcagtcgtagacctgaattgctgaggatgcaaatttcagacctagaatgtggtttagtctgttacaacataggtttcagtttctagtcattgcagaaactgtggtcgtcatctcacttatacagtgatatttgtagtttagaataatgtcaaacacacacacacccacacgtacacacaatgagccagatatatggttatatattttagttcctaaagagttaaacagcttgttttatctgttatatttaaggtaaatagaaaaatgttctaaataagagaattaaaatgttatcataggataatttactaagaagtaaggagtgattttttatttgactttagtgaaaacaaaactgcaatataaatgaagtaagagctcattgccagtttacaatatgaagaaaattgaaaactgaagaaatcattcaaaaattaaaatgaaaacatgccacatgattgtggtagcctcttaagcaaaataaaaatgtagaaattgactcttacatacacagaagttcatatgatcgtgaatttttgatactatgatctaaataagtattatctctcctggcatactttattttctattaaaataacattacttccaaatgcagtcttattactagagtgggtacaagtataacattaactaacataatagtttgttgttttaaatacttactggaaccaaagcatgagctattaatcattttcatttgtaggtaaaatctgaaatcagttgtcaagattccaaatagggaaacatcctgaaaacttgtatatacaaaacctcttcaatggtacattcttagaagagaggaacagtaaacttgttttctttctttataatatagacttctatgaa

SEQ ID NO: 62952 - DNA, 1021 bp, Homo sapiens
tgaccagataccaaaactgatttgagaagggaagatattaacgtatgcagatacatgtatgcatgtacacacacacgcacacacacacagatacatacatttatatatttctaagtatctaggtatatatatatatatatatatatatatctgtatcagtttttatccattcatagccatgattagattataaatctgtttggcaacctgaatagatctaatgtatgatcattatggttacaaaaaaaatcaacaacaaccatctcaatggaggaaagaaagtttagaagctgaggatttgaagaaaatcctctaatttccccatcagataaatataaaagaggtatatataattactgtaaatttagttcacagtctaaagcactgtgtgttaaaatatcaacatcaatctacatagtgccatatatttaggaacaaatgcacaatattgtacatctatgtaaatggagaaacatgtgtctcttgtttcttagtgttgcctccagttgtctgaaaagtagaagtgctgtttagtattctgtcttagtagcatatgctgttctatatagcatcttgctgcacatccaaaattatggatcattttcttacaaataaagttcctgttttaaaatttctatctgcaagaatcaaaggagcaaatggatctttgaaatgattgcattttataaaaaataaatacaaatagggaacgtagatctatgcaagtatctcatatatccatctctgctgaaacagcaaagatccagttgggtatggtcttcgtacttttctcagtattttgaagtaagattcattgtggccacatacaacacgagtctccttttaaaaacacgaagtggatggtccatacgtgattgctggaaatctgtctatggtagtggttcctataatggaaaatttgctaaaaattaactgtaatgggttgcgaacccccccaccccatgttagggcatacgaaggcattttttttttaaggcaaaaaaaagaacattgtagacgg

SEQ ID NO: 62953 - DNA, 1069 bp, Homo sapiens
ctataaaagaaagttaatgtagaaaatagaatggagtagagtagaatagaatgcacattatagggtcttcttaataaataatgaaatccatcttctaaaattcttgaatcatttttgacatcttattttgtcatataggcagtcattgtctcttctggaactcagcagagggacacatgtccataatgtgcttggtttgagaaaaggcacatgattattcctaagtgctgttcacaccctgatatgcacggagtttaataccagtcaggtttctttgatggatcctttcttatttgagaatattgatgaagctacaagttaattgacagaacactacactggttgcatgaaccattggcttgatccagtgtggcattgcttttaagttcttgtcctagaatctgtgaataaaaagcagctctttttttttgttgttgttactattaatagtcagatatgacttttagctatggacatatccattttgtttgaggtcagggacttaatactcaaaattctgggtcatctgccctttattctgaaatgatgattcttcttttctctgaagtaaatatcccagaattacaataggcacaaaactaatgggagctgtattattaacaaagaaacaggctgaaagagaaattgtacaagggcagaaatgcaaggctcactctctgcttttaatacgtaaacaggtagcttaagaccctcccaactgtcccaccggtactgtagatgggcccccgtgcacctggcagtgcatctctggaactgtgagagtttgtctacactcagcagcctcacatccttgaatcacgatctgtaccacttgatgaccttgctcccccatccctcaccagcaagccttacaagttgtcaccccttctctcagtagtcactgcaggccacctcgccctgacttcccaggtggccactgatctctccacgacagggagctaacattctgtgagccttcctgccacgaagaagaggtgctcgagccttcacccagggccctgcgtgtcctgatgactgaacatatgtagaaataacacaatgtttattg

SEQ ID NO: 62954 - DNA, 2019 bp, Homo sapiens
taatgttcaatactctgtgcagatctgttgatgattaggacctgttcatttgaaaccaacaaaccaaccaaccaacaaacaaaatctgtcctaagaaggctacacaaatttaagagatgcacgagtttttctcactagtgttagcataagacttttacagacatccaaatttttcatgtaggtgagtcaaagggattgactggagtgactttgttactgtaaaaagagaccttttaaaaaaaaaaaaaccattgactctaaaaggtaagcatgaagatggaccaagtatcttattgcctcactgatactgcctgccagctgtgaattttcttactacaatgaatcccctcatttttattgctgtgtgcaaggtacagtgtttcatttttcttcctacttgggcttcctgtagaatgcacaccccatatagttctttaaattcatactgttgtgagaacaagtacgtctttctcttctctcttttgttaactgtaaaccttgtggagcaacagttctttcgtgccctctgtaagttgctggcctctgctcaaattaaacactgtaagattatcagcaggttacaaaggtgtagtgtatctctctcttctgcatttttgtataaggttgtcttgatctgaaaaatgctaacaaattcaaatgaactaatcgtctcacatccaccccttgtaaattgggactttgtgtcttctacataaaaagtagggagaacacacgtgcaatttctgttctcctttgaggatttaaaaaaagttactcatataaaatgcacagaaattattttttcatccaagtgccaagtcaggtcacctctctttcacctgcagtgaagcaaaatggaatgtgcctggagctttgctacgagacagactcaggttcaaatcttggtcctgccacttaataactgtaagaccttagacaagttccttagcctttctgagtcttagttttcaaatgtataaaaatccttgcagatcttctatatggaggttgtcctgagagataaatgtgataaactatataaaacatccaacacagtggtgatccataaatgttagtttccatttgtactaatttgcatagtaacgctagctgctgtaacaaataaaccccagtcgccccagtggcttgattcagtgacgtttatttctcactcttgaaactgtgtaatgcaagtgtccaagtgggcagacagccctttcaggtagttattcagaaatctaggcttcagctgtcttttggctctgccctgccctggggctttggtgtcctttacctttagccagcagctaggcaaagaaagtggagaaggtatacccacttttgaagctccgcattaattctacctgtgttccactgtcaagaacagttgaatggtgctacttagatgcagggggactgggaagtacagttccaactgaatgaccactttctaatacaactttatactaagaaagagggagaacaatataggtgggttggagggcagtttatctatctctgcaaagtatttatttcttgcctacttcactgcctcatacatcatcagttaagaccctagctattaacagtacaatgggcagaagtgaaaggatagatgacttacaggccaggtcagtggttgtgatcttctagtttttgtggcaaatgagactttatttctctcttttccatattaatagatacattaaggagtccgatatcatctgctttcttttctactagacatttatctttattcacttttcaaatttatattccttaggtctgtaacaaaaaataattctgctgtgtgtgtttttatctaagtggtgacaatagttgtaagtctgcaaatgtatatatgtcatttctaaagcatatgctaaaagtacacttacactgcagactgtcacagcccagaggaacttaaggaaacttaacataatgcaagttctggatggaatcctggaacagaaaaaggacattgtgcaaaaaccaaggacatatgaataaagttat

SEQ ID NO: 62955 - DNA, 1168 bp, Homo sapiens
agtgtattatgataataatagaaatggtaacataagaataatgagattatagattttttccctattctgaattttctaacatgttactatttaattttacaattaaaaaagaattttctctatatttaaagtgcctaaaatctattcttgaaaaattatttcacatcatagtttttcaaatatatatgcatacacacacaacatacacagagatacagagtgcgagtggggagagattccatatgtcaatatcatgaagaagccaaatgctggtaaaacataatttttacttacgtttgtttctccttatttaactgcctgaattatgtagtagtaggatttatgtctaaggttcaatatctctggaaattctacagtaacagactttaaaaactctttctatgtatgcttttaacttccttggcctattcctttggattattctggcttcataatggtgatttcctggtttctctaaacacagttgtacccatttcagcaatatttatatgtgaaagaaagtggaaattagaatccagatttgttgacccttgagatcttatattgaccttagtaggtgttaactttttagatcaataaagagctgttattgacctcaaagaaaagtcaatatctgcttgttaatttgcagcttagaaatgttatacattttgttcttcattattaccctacttatttcagccttttaaaaaaatgtctctactgtttccgctagagatcatcatgtctagatcaacattttagttttggtgtttaaggagataatcattggacatggtggtcatttatcagtgctccattttagtttcttataaaattgcaactgtctgagattcatactatacagaaaagtgaaatatatttaattgtacttgatttactgttgttattaatgtttgagaaacaattttaagtaatctatagctcatggcaagaatattctgacatgtatatatgagaaatgaaaaggaagttaaattggaaacaagtggtctgaaaagagattaataatgttttgcttttctgtgtataaatggaaataatctgtgtagattgaggtttcgcatacacttttcatgtggataaacatttaaagcttttaggtaaggacttcttatgtgagtctgaatcgtagaagcctatgatt

SEQ ID NO: 62956 - DNA, 1059 bp, Homo sapiens
tagaaatgtcattttggaatgtgtttaaaattgcctcattttatgcaggtgattataatacttaaggtatattgcagtttgaaaacagcattactgaataattttaaggaccatttatatatggtgggaggaacaaattatatatatatattcacacttggacaattgttatcatttcaaaacatttctccactactggagatttttctgtaaagcttgctttctccagtgagcccatctttctctttagataactgcatatgaaaggtgggatcaaaatgcccactgtgtattttactctcaccctggcatgtgtaaaggaggacttcttctccagggctccaccatgtagatgaagaagcacctggtgttttaataactttatttacacctcaactcttgaatttaacctttacatagcaattagaaacagataagaacaaagatattgttcttgaatgaggtagaaaaggcgtggtttgaaagggcttcctacaagtaaaattgaagaagaaaatacgcatgcacgtgtgtctgtagccacccacccctcaactcctgttcatgtgtgtttcctggacttgcattcttcattcccccaaaatcaaggcacatttagtgaatgtctagtctgagcaagtcagtgtctctaagtaccagaatggtggagacagagaaatcacagtgtatggcagtgtcaggactgggcttcatcccaaggaagtgaaaatccagtagtatttacagtagaaattattaaaagaatctgtttcctaatgggcagaggatcctgtcgtcctttaatttttttaaaaaaaagtcatgccctttaataaataatcatgtaaaagggaaaaacctctgattttagaagttactttttatttctttacagggagctgggaaaagacagcttattgattcagtgtgcataaatacttatcatagacttactgtgtagccattactttaggcaattcatccagctaaatagcctctaatgctatcatgaatgaagactatagaggtttatcaagatgaaaatagcccattaagaat

SEQ ID NO: 62957 - DNA, 1090 bp, Homo sapiens
taccatcctctccaaataattcatttaaaggaataggaaaaaaatgtgtaaattgacctaagcaatattaatgatgattgactgcaagtttttctttctttaagtgatttcagattttggatgaacatataacacatgttggttatactgatgtgcactgattccgttgtaaagagcagagatacttctaaattttgcccaagtacagattggcaacattgctccatttaattgtttcatacataataatgaatgctttactttgtatatctggaaaataaacctgactaataaatataggctgtcaaagtataattctgtagggcttcagcttgagacctcatcatctcgtcagtattgagaaaaaggtagagcgatggtgtagggggaaaacctggccttttgttctttacatctgaagtttgctcactgcaggcctccttcccacttcaaatgcaacaacagaaaggaggccttcctcttcttccctcaccctacatgcaccccccagtgctgccatcccgcacagccacgtttccacagtggattatctctttatcagctattcttcccttcactccatccattttccactaaccaatcaggcagccctcttaggaaagactggtgcttacttcaataaaatgttaattctgtacacacagagccacacagccattctagatgttgcttgtaacagaaaagcattcatgtaccccagacatggagaatacctgtattgggtgtcttatgagaaaaaattgggggaaataaagttatgatgggtagtagttactgaaatggaaaaggtattctattctttatagtgctgaccagccagagtggccacacacgtgtgtggggatgtacccatggttacctaaaaacatgcatcctgcttttaaggcatctgagatagtaaaagctagtttgtcacttgtagttctaactgacccagacaggagtaattgcagtgctgactctggtccattgagtgtatgatcttgaaaggccttctgactctagaaagattagggtgagcgatgtttagtaatgggtgtactttaacatataaagattttctattcag

SEQ ID NO: 62958 - DNA, 1066 bp, Homo sapiens
agttaagactgcaaacaaagactataacccacatagtactaagttcaacttgcagaccaccttcatccttgatggactttgtatgcaaaacaaagaattttgtgaatttttttagagtcattcattcatcatataaaaaaaatttttaagtagcctttcagtgctgtaaccttatcgcatacttggcaatagaccaaatgttcttcccataggtcctctcagtagacttgttttccagtcctgatgtttcattgactgtgtttacattgaccattcgacttgcgagcctaaacaaagagacattaacacgcttgaggaaatgcaaacagaaaatagtgtcattgacaattgttgaaggccaacaatgaaagactgtctctaatggtcttaatttattaacgtcaaattagcaccaatatatttttacacaattaagttgagaaagtactgaagtagaaactactggcaaatttaattttaatttgttccatggggttattcttaaggtatacatatctctgttttaaagcagaatgattccttgatgtggactggctattctacatgagaatatctgtgagtagtttttggacaaaaacatttcttttcatggcaaggtatagcatattacttcagttctcaaatttaatattttagctttgtaaattgacagtgcatttaaatatggtttttaaacattagacatcataaagtttattttaaaaacctaaggtgattaaaatatctactaaaatgttgaaaattgtaaaatctcagtagttaatgaagtatgagtggaaaaatttcaatttcaccctgaaaatagtttttttttttttttaattgacaaatctgaccttgagggagagaaaaaataaatgcaaccacaacttgcatggaatgaaaaaagcttttggaattaaatcatttggcagtgactgaaaaataaacatcggagtggcttttgttttaattttgttcagcgcgttgttgatttctttataacaaaagcaatagaaagaaaagatgaagtaatagtgaaccaaacagaaataattttccgtgt

SEQ ID NO: 62959 - DNA, 1020 bp, Homo sapiens
aataggaacctagaagaacctgtgctttgaaactttacatgcctatctgcaaagtctgtttttctctagagaaatgtcttttctatgcaaagtgtgcattcagtaccaccaattccctgcattttggtgctcagaccctcaaagacataattaaggggatttcttctttaaaagcctactgtgtggcatctcatacaattatatggcccttgctttttgttggtcttttttcaaatataacatgcagtgttgccaggaacaccatcatattaaaatataaaattaccttttgtgaaaaatggagtcagggcatacatctgggaatccaacaaactctaaactggctgtgtacaaaatttttttttttaagtttggaaactgatagctgcctgaaggttgcatatttaaagtcattttccctgcttccttcattttccccctgtggcaaagcaaagcagcacttcttatggggaaaaaaaaattgaaagaaagaaaagaaaacctaatattggcattctagtagtaaaataatggtaaagattgagcctggattttgtaatactttggatattggaatatcctaatttccagttggaaaaattagtatcaaatgtattttagatgaaaagttcagtgaatgctgacccatattttgagatataaacaaaaaacaattaaaagatagctattttaatgaaggaaaatataatatttaaataaagtgtttagacttcaaagtagagtgttgctcacgtaatagccagaatacctctgtgcatacatctcggaagaggctaaaatgccagatgtatttttgtgctaattttctcaccagcttctggagccagtagaggaattcagcacataatatctcatagaaggtatccctctcagcattttcccacgttcctccttctgattcattgctgaaagcagagataagagagttaacaaataactagactaataataaccataataacaaacatttattgagtggttactgtgtgcctggcacca

SEQ ID NO: 62960 - DNA, 1055 bp, Homo sapiens
aactttggaaagaattagcatattgacatagagtacataaacagtattccaaaactgtaatatagcattctagcataaaaagtgttgggtgtttcggacagacagaagctgaatcagaaatcaacattatctagccttaaagattgcagttacttctgataaaaccacttgggcttcctcagaggtcaaggatgtgcctgcaaacccatgtgctcatcagactgttggagtcaagtcctctgtttgtatacagtgtataaatggtaatatgggtaaacactgccctctcaaaccacataattacgtcgattgctgaaaaaacccagaaatgtaccaaaatatcacagggaagctatttctaacacgactttgctctttatggctaagtggcataaagagtggctttttttttttccttctaaattatgtgttcttgtttcaagcattgagatgatgcaaaacagatttttgtggcaacattctttttcgcagccaaaaaagcattcaaggaagctctgtactcctccttggttgctatttattctggaccttttgtattatccgtgtaaactcatttcattttaaaataagaactaaccttctttgggttgtttttcagcactgctaatagtgccaataaaatagctaattatggtgcgaagtgggcgtttttaaatgattcgttaaaactgagaaggaataagtgaacattacaggtgcaaaagagaacctttttccttagttttcctgcaatcctctgtataaagcctattttcaacagagacccactagtttttcaactggataaaataaaggataattttgacattgcatgtgacctgtaatctcaaaagcaagtaatactttctcagtcttccttatctctttttgtcctctcttcatcctttcctcttctttctttgttcctgctgcctctctgtgtaccccgctgcctcctctagccgatctccttagaaacaattgtggttaacaaagtcggaagtcaaaacagttactctcatagccatggtaaaaaagaccaaagtaaacaaatt

SEQ ID NO: 62961 - DNA, 1054 bp, Homo sapiens
tgctcaaaaaaaataaaagcagttttatctagcttcgttcttcagagtaacatgagactagcacttgaagatccaagaccattctgagtcagttttcttgcagtaaactcttgggcaccttgatttttggctgtcttcagcttaacccctttcacttgtaagtctctaattatctaaagcgtatggttgtgttttcacttatgcaggtagtttatgtaccatttattgaaagacctcttcctttccttctgaaccattgttttccttctgttcagtctccaaatgtacctttctctcctctttagcctttgactgacatttctgtgaagcattttgtgatgtgcatttagaacactacgtaaaaataaactgcattgtgttatttaaatatttagaggcctttgtagccttgcaggctatttttaaaatgacctttaaaaccatttgcaaagaagacaaaagtaatggggggaaagcataaccttttaatgtttccttcattagtggcgttccctaccttggatgcattgccttgctttgatagttcataatgtaggatacatcaaagacccaaataatggagaacaatggggaccaatttttttaaagctgattttgcattattgctgctgccattaggtgtcagatggaaaagatccctttcttttaaataagctggactcatgattgattttctacgtgtggtagacccccttggtaatgctggtgtgtaaagaaagacctgctatgcattcatatgtgaattgggcttatccggtttcctacgactttgcttttgtacagcaagtttatttttgagaggagagagtcaatctgcgttatatctgactcaataataacaagaaaccaagttgcagtaagagtctgctctattccttccttcattcagtcaatcctccgttcaccatttctccaaaacataccagtccgtctttgactgtattttgagggtctggacccagaacaggaagagtcaaccttccagaaacttctctgataaagaaaaatgagagacagaggtccagggccactg

SEQ ID NO: 62962 - DNA, 1078 bp, Homo sapiens
taaatattgaagttcaataaaaactggttggcatatctgctatgcctaaacaattttgctaatattaagaaggttctcggctaaaattctgactcatcaattatttactttttttttttttaatttaaatgactatttctatggggaatcttttgtaaatgtgtctggtctaattaatttggtgccaaccaggcaccaatgccttgtcgactctctttatttactgtggtatgcagtcacttttcttagttgttccgtgcctcatcctaggaagtaggtttgtcctgtttgctttcataagcatgactggccagtaaaacccttgacctttaaattaatgggtaatacgaattcatctcattccatcatgaaacaaagattctctgtatcagatattactatttattagtaagacaaggggatgggggatgccatgtgctctgaggtatcactattagttaatgagaatggtccacattttatccttcttaggagtaatttttctgaagggcattgggaaattaaataaacacatctgaaattggatttagattttgatagagcagaatgattacaactagggtcccttagtagcctggggttattcaaatacagataaagacaatacatttccataaattctgaagaaaacatgtggctggagtatgagccatatttttctgagtgctggggttgatggccattaaaaatgagaagaactgaaacatgcaggcattagttcctcacatgacagttgctctaaatcaccatttatagaatgcactttttaatgtgagcatttctaaagttaacatgagcaatagaaatgtcaaaagtgaaaattaaatcattaattctaacatattcctttcctaattaagaataattacagcaggggctagattttattcaccctttgacctcaaccttgcttgctcagtgcctgggacttactgtttattgagcgaatgaaaaaattttttttatcaaatcttttgcttaggcaggtccacaaatggcagggggcatacccgggatattgctgaaaatgagcaattgatatgcaagagttagacaa

SEQ ID NO: 62963 - DNA, 1161 bp, Homo sapiens
ttagttaaagaagggaattacaggtaaccctcatttgtacctgtgccatgcgtggtcttgagtcttaagaagcaatttttctttaggccttgtgagggtacaagagcatcaggcatctggcattatcaaatgttgaagtacttcttcacaacgtgttgtttactcatgcccttgtcacctaaggtggcgcttttatttttttaagaatagaatgagaccttactacacttgagggggagaaagtgtagacagcagcggttaatatttggttcactcttttgtggcttaccataagtttatgggaaaaagaaagagaccgcccatggcttcatcatgcctggtggttggctcaccaacttagtctcttataagaaattatctttaaaaggggattctccaaaaaaataaaagaagaagctttgaagggggtttgttttctgtacctagataactatacattatccaagagagctcctgtatattttaatggacaggtagacactgagacagttgggcatcttgaaggacttgtggagattttatgggcctggtcagttgtgaagtcaggttagattttatgggcctggtgagtttgtgaaatcaggttaatccaagaggctattgtcagatactggtcacaaggcacagttatgaaagaaattacaacactgaaaatcttgtgagatctgtgacagcaaggctctcagcagaaagcaaggtcagtttcacagatgagaatagggacacaaaatgtgccgttatttttttttcttttttcataagcacaccaccagcataggaaagtagcttttaaatagaatcatattgatggatcaatccaaggaaagggatggagtacacagataatggaattcagatttcccaaatatgtggcaaatggatcattgttgaaattattagctgaaaaaaaacctaaaaatccataagtatctaacatttgtattggcaatgggttaaggatttccaataagactgtggcagtccatgatattgactttctggaagatatatattagcattaaatgtgaagttattgaacatcttaaaggaaaaattatttgcaagaataaactgtcacagtagtttagcaagggcaaggtttttctgagatactatagatggagagatttccatctggaa

SEQ ID NO: 62964 - DNA, 1062 bp, Homo sapiens
gacataattgaaagggtgtccagcatggagaacatggctgtccatgtggttcgggaaggtctcgacccctgggttgtatttttaactttgaaattgttcagcaacaatctggttctcccagggcttttaaaactctcctctaaagtatttctggcaacagtctggaaatcctggtgacaggtaaaagcacactatgtttttaagcctggtaagtaactttgtgtaatattaacagtgtgtgttgttcctttcacttaattattattggactttagtagaatttgcatcttattgttggaccgtaaatctctttggggtattattgttactgatcattgaagctatttgatccaacaagcatttattctttatttatgtgcaatacattgtactaggcactgtggatctatgaagaggaaagacacactgcctgctctggagggatgtacacagtttagcggaaagaatggctctgggaaaggcttgcttatgagtctgacagctacaacagaggtggaaactacttataggcctataagagaggaagaaacagattcaagtggggagaactggtaggacttgtggcgggggccagtttttaactagaaattttgaactggctgggcgcggtggctcacgtctgtaatcccaaaactttgggaggccgaggcgggtggatgacctgaagtcaggagttcgagaccagcctgaccaacaaggtgaaaccccgtctctactaaaatacaaaaataagctgggcatggtggtgggcgcctgtaatctcagctacttgggaggctgaggcaggagaatcgcttgaacccaggaggcagaggttgcagtgaactgagatcatgccattgcactccagcctgggcaataagaccgaaactccatctcaaaaaaaaaaaaagaaaagaaaagaaaaaagaaattttgaaccatggccaagagataggagaattcagagatacttagcaaaagtgagtgtccagaggcatgaagtgccttagaattggtgttaggtgagcaatgcggcattccagaccgggactattggca

SEQ ID NO: 62965 - DNA, 1381 bp, Homo sapiens
tatttaagaactgacatggggtgactagatgttttaacatttaagagctctagaacaggctgaaaacactaacatccaagtgtttacctatgaattgatattggaatacaagaaactaacttacattgaaaaggtatatacagaatatggaaatttttataaaaaacaaaagccagcttagtctaatagtttgtttttgcttttaaaagaaaagtttgtttgaaatcttcattgactctcagctgctggttccagaaactacacatattcccaatatggcttatgccagttttctgctttgaagactaaaaaatagaccagaagacaaaatatgatttcatgattctgtgcctcccttgtgacagtagaaaagtaatttaactcctttgtgcagcttttcttcaccagtaaattaggaataatcatgtcttccaccttctgttggggactttgaagagtaatgattcaagggccatttggagttaaaatagaaatatgaaattatttttctttacccaaagacttaagttcatggaatatgagaatatctcttaaatcatttttatttttaaatgcccatttaaaaattcagcattttaaatctatttactttgtgtttatattgcaaaaatagaacacagatgctaaagatgtcatattaggacatctttaatagcaatatctatcaatgccattaaaatattatctatctatgaagcataaagtcccactgttctaagagtaaaacatgggtgtttaaaaaatatgcagaaactacccaatttatcagaaacaatcgcagtcagtttttgaatctgactaaaatcttattttgcccatagcttgcctcctctcccactcctcctgctcccacctctcatggaggaagagtggaccagctcacatggggatcaggcattccacagcctggaggtgggtaaggaggatctcaacaatctgggaaaaaaaacaaacaacaacaacaacaaaaaaaaaccccactagcttctatagataaatattgatgtggatcaggttgttgtactttgtaagtaatttatgtgcctttattaactgctgaaatgatatagacttgtaccatataaaagggttccaatgttgattcccaatagaaaaatacagctaaagcattttaatattggcctatcatttggcagctgttgaattaggcagttgttttatttaaagtgaatcagtattcttttgtgtataagagaggagtagccctgagggtagtcgaatgcaaaatacagggctcagtccagaaacagatcttggcgtcattcattgtctgggctccagaaagacgttgatggatgctgtggtttagtatccaaattactctatttatatctcagtt

SEQ ID NO: 62966 - DNA, 1089 bp, Homo sapiens
ttgcttttacaaaccacatttggccccatatcaatccgttgtgtagaccacatcaagtttccagtccacagcccaactcctgcacttgcgcttgtctttgaacacaaatgggccgcagaaagaggaactgttgggctttgtgagtgaccggaaacagggtaccattgagcagaaattgaactgatcgcaccgtgttaagtcaggaagattctcaacccagaccactctttgagcaccaagttaacatgtattgcatttaaaatgtaataaatgcagtattcataaacttatatgtgtcttgtgccttttgtgtcagcagggtttctgtaggcctctatttacatcaaataaacttcaaatattccagaatgtagaccgcatctggttcatttttgaagtgtccctctaggaacatttctaaaatagtagattgttccaatttttttcctaatgagaaaaatccatgtgttctgtgattattaataataatggcttcaaataaattattgactggttgcaatggaatgcactttcgagcagctgaggaactccgcacaaaatgtctgagttgtattcctctgatccccccctctccatcagttctatgggttatcagccaacccaagcacagttgctgacgggttagtaagagaaagatgggacagatgtgaaggattcatggttcaaaattatagtaacatttaataaaaatttaaaagcagttgctgattcttctgtttttgatttatgaatttgggggcttaaaaaatgttgtattcatagcattcagtatatcagcacatatatacgtatacactcatagtatacagggtagtgtgtgtgtgtgtgtgtgtatgtgcatgctaaatgattaccatttgtgaggcattgtatggagggaaatgaatgagactgattccctgctatggggaagtttgttacagtctaatggggagacaggcatgaccccagttagtcattctttaataactaggccgagcatagggagaagaccaaaacaccaagccttggggtctgtgccataatagtggtacagataatgaattgagtccagaggagggaaaaatg

SEQ ID NO: 62967 - DNA, 1837 bp, Homo sapiens
aaaaccttagtcatgacagagaaaagatacagcgagcacgtgaaagagtaagtacaattgatacagttttttcacatattcagtaaatgaagacataaatgaaaggcattgggacataaacaatagcaattaggtagatatatgtgtgtaaggtgaaagagggtataaggtctgtggaaaggaaaaggaagagggtgagatggagcaaatagcagctgactctatgtccccattccagaatgttcccaggtaggtattttatttacttcttatagaggagaaggtcactgagggagattttggagtatgttcatcttttagagtgaaaactatagaattattggtggtcatctttcctcacttcattttatttttgtttatatgtttttaggactttgcacattcataagctggagatgaattaccaaatgtatatgaaactttttcagcctgtgctttgcttttatgtccagttctagtatccagcttaaagctcccaagattacctctcacgtgtcattctccaaatttaagaattttccaagtttgtgtagctgtcagaatgtatttatttttgtgtatttgaacatttttattgtttggattttctatcatgaaataaattgtcgcttgccatgcactttagaaataatctaattgcatgaacttctgttttgttttgtttcttcttgtagcttcgggaaacagatgctaatttgggaaaaagctccaggattctgacagggatgttgcgaaggtaagagcaaggtagggacatatctttctctctgtgtgtttttttaaaatactatgttttcattcaattgcaatggggcatattacatgcttttgagcttctgctcttagtaccctgtgcaggacccatttgaaataacagagcactgatgttaactcttgtttggacagggacacatactaacacagattagagagaaggcttgagctaggggggtaacctcaagctatggaaaaaattagggttagacatgaagtattttttcatagcctgaggaaggccccatgggcagcagcaggctgattttattttctatttcgatggccttcttcttatggagggaatgcagacctaccattttcaggagcacatttgccattagctttgctctctgttgccttgttttcatttctttaagtgacgctgtttggggaaacatttccgttttatgtatatacttaaagatgatttataaaacgtcaagattatctgaataatatgtgctaagaaacaaatgttcatgttttatatgtgtaactctaccttgattgatggaaaatatgctaaatagtatgagaaaatagatgaatgaatgtaggtaatgttcttataagtacattcagcacgaaattatttcacattcagaatctaccacataaaaatatcatctagcacgactgtcagtttggaactgtggatagaaaagtgaacgagaaacattgagaatggcctctggaatggcttaactggaatttttaagaaggaaatctttatagttgatactatagagacaaccatctaaaaataactaaagtcttgtctgatcacatatccatatacaatagtttgctaaaagtatgtttgccgtgttacagacttattgcataagaaccaatcaaatgtctagtggtttggtcttcaaggctgataacattttctaagcagcctgaccagtagcaagcctaaagttcctgggacatttccagccaaggctagtataatgtgacatttcccctcatttccttgaacccgactcccaactcagaatcataagccatcaaattctgtgattaagagtac

SEQ ID NO: 62968 - DNA, 1648 bp, Homo sapiens
tgcatttatatttttacttctctatctctttttcttttctctgttctctcattcctctttctcagcacattttacttactggtgataaactcgggccctgacctgaaattagtgtagcaaaatctcaatgtctaaactgttcttcagcttttaatcaagtgcttattctttcagaataaagtgattgaatttcctatagattctttggacttaacagatttaggatctgagctagaataatgctacaaagagaatttttaaaaatcttggttctttttgtgtgcataagtttatttctgtacagttgactcattgcctttgtcctacgacctcttcaaggccagcatgggtaacgtttttaccaaaccaaagaatagctttggagttgcttatatgtttctctttaataacatgcttgtgcctttaaacatagatttttgctctagtgtcagacacttgaatgcaacaccttatctgtcaatgataactctaccagctgcattctttgagccttaagtgcatatgtgaccctcaatcatgtattgtacatcttatctgattttatccttaacagttctgtgaaggaggcatcactatcccccttttacaggtgaggcaaactgtgcttagtgaagttaagtaaactatccagattcacatattgtagaaaggaacagaattaggatgtgaacttagtttgctcttttgacacactacacaaggttcccaaaggccagtttgtgaatcagaaccagttttcactagtggtaaaatgagaagagtaagaacaaacagttgagtttttgttatgccaacttttattgtgagacactattatagttccatttcttctgtgaaataattggtggcagtaaataatttccttaaactaggttcattgttacagtaaatagaaaaataaatacttgtaagtattaaacattggcaatcatatgtcagtcctcccactgtcccatgcccccctctcatttcactgaccaggaaattcaaaatccatactatgctatgccttttaataaccaaaaaaactgctacttatgcactctctgataggtaggtagcagccacagtcctagacatttgttatacgttatcttctttcactttctatgataactctataagatggatactgttactcccattttaagaaataagggaaccacgggtaaatatcatcagggtctacataagtcatctgcctccaggggctggttttcctactgtaccaactatttgtccttctatgaagacccagtttcctcacagatggtcagacagcccttctgggtgtgcagacagttgttcctgaaagcaatgaacaaaccctaccagattccaccattgagggtgggctgaaggcgctcagctgcagctactgtatgccacaggagtcccaagtgagtgtgttcttaaggagtcctttcgaattgttgtattgctaagcatagactgtgtggcattaaccagaaccgagaaataacaacaccgtgcagcagaagaatctataatctcccttacctccggaatttgacaagtgtcattgttaggaaattttatttctatatctaactttgtcatctgagtcttatccttgctggagcaaacagttccagtcttgtttaat

SEQ ID NO: 62969 - DNA, 1062 bp, Homo sapiens
tacgaaaacaaacagcaccttagtttcctgtgcaattatagtttacctaggaaaaagctattccactgcccacctatcttccaatggcttaatgattttgtgatgaggggaaaaaaaaaaaaacacctgtcaaccatttaattcccaaatcagttaaagatgtccgaatcaggtcccccaatgctttcctgaaaccacactccctgtctcaagccatagggcagtggttcctatcctggagtgggcttcatggagtcttgaatctctgaagttttctaaaaatgtatgtgcatatgtgtgtatatgcatctttctggggcttttccattacatttccttaaaaggttcaaaagagtctacaaccaactccaaaaaaaagttgagaaaatgagatattgttaaagaactgtgtccagtttcgtagctaaataccatttaattactttgatactctggcttacttaaaatgcattgacctacaaggaacacttattttgaatttgtccacaaagttcaacaagacactgaaaactcaaggatgccatccttgggaaatcagatcatttgtcaaaagtacgtccttaaagacaatcagaacaattacatttatatgggaccttatggtttgtaagacacagtcacatatattatttttttaagttattcttcgtaagaactctgaattcatattgtcattattatcttgtggtatagatagttgagacctacagaagttgagtcttgcccaagttcatgccacaaagatagagcagaacttggaccagaaccctggttttagccacagaaatcatgttcttagcagcattctggcggtaacaccatcagcctcttcttcaacatcaaatgtttaatgtctactgggtaaaagggcatatggagattcccttaagaatccaatgttagtcactggagattcaacaaattcaaaactctactcctaggtagcttaatatctaattgggagcttttgttgtgacattttaagaaacaacaatacatagtaacttgtgctacatagtaagtgagagatcattgctctag

SEQ ID NO: 62970 - DNA, 2643 bp, Homo sapiens
ggccgtaatatttttagatcctacccttcttaggaatctatagatgtggaaccattgtcttctggcatttcgtgtttcagaatagcagaaaaatagaccaatttatgatactctggagtgacatgttgtaggttttctttgtttagttttggttttttaaatctttggaattgaacagagtctagatatttctatatatgatgactttcactcattttgcatggatcacagaactttaaatctgcaaattcaagtcttccctctacctaccagaagcggttttttaaaaatcatgtcttggattattgcttccatttcaaattttctggtgtcaggatcatccatgattctcacactagacctctgtatctcttatgtttgtcatgttttaaaaataatttttttctcttctttttcttctcatttatctccaacaccattaactcccctctctagcattgtttctagtctgtgctgctggttatgtgagtattaatgctgctgttgcattactggtttccttgaaatcttttctttatcctattgcctcatctcttatctccttgaagtctcgctggttcttaccttaccgttttctgccctggctttataaagctttaccttcttactgtttttattaaggacaccaaagtattttcaaaaacattttttggtttctttagttcataagtttcagaatcgcattctttctcagaatctttaggatgttgttgtttttttccccccttgttctgtagtattgatttttcccatcaacctcatgttattttgagttttttatttagttacttttcaaaacgacttcttgaatctgcaaatggagagctgcttgatatgctcgcctctgtcccaattccctttgtctgtggactgtctttattggaaagaaatgagacttcttccttctcccactccttgactctgttgggaaaaatgtccaccccttatgtgtacaactgtcatatccttcccaagcttaccctgccaccaccacaaaaaaacacactatttatgaagaccacagttcccagaattcagtgcatgatgccataccttctctatagctacctaatactgatttattgttttcctgggaactctggtttccttactgcatatggaacagaaacaagatggggaatgtggagaaaaggaaaagaagacagcagtccaaatacctcctgagttacgatacttataagagagattgcatcttgatttctggttgttacaaaccatgcactttctatctagtagaagactatgtggcaggtgaaccacttctttcatttttcagcacagttcattttttgtagcagtagaaaatcctaggctctggcagtttgtgatgtaagttttggtggtgtaaattttcatcatcttctattttcttcattcaaatgtaatggacactttgataggggcagcattaggatccatggagaggcaccattgtaaactggaagctgagtgatttttaaaattgccctagataagggggccatacaaactatttctatagccctacccttgggcctgtctgcctgggtggtcctgttttaactgttggtatttaattattgatgatttactgacacaaggcatggaagccttagggaaaatgaattccgacgtgctagtttctttagatgaatcttctttgaggtttaagtgtccttctaagtggtatagtgaggcaggatttcgggggccatttcaaatactgcctcgcaaagtcagccacggtgtaagtgcctactatatgctctggacagaatgaaccttattaaagggcctagttctttcatagttttcatgtaacccattgatgtctttcttttcacacgttatttcctcttgaacatcactggtttcgtggtgtttttctaaggcttctgaaaggtactacaaactatgtatatagacaggattgaactccaccagaaggtggaatttttctttaggggcactgtgccatcaaaactgagctggtgcccaaatgcctccctttagagcttgctgccttgatcatgcagctgagctgtcttctcagatgctctgtgggcaccgctgtaacctgttccctcagctctgctgagtgtggcataatcagattccttgctgagaatcggtgaatggaggggtagaggggagccagggctagatcctggaggactttaggaagctgcagatcagatcagagagcctggataggcaaggatgaaatcaaacttcaccacatcaacaaaacaggcctaggcatactacaacttttttttttttttttttttttttttttttttgagacggagttttgctctgtctcccaggccggagtgcagtggcgcgatctcagctcactgcaagctccacctcccgggttcacgccattctcctgcctcagcctcccgagtagctgggactataggctcccaccaccacgcccggctaattttttgtatttttagtagagatggggtttcaccttgttagccaggatggtctcgatctcctgacctcgtgatctgcccgcctcggcctcccaaagtgcagggattacaggtgtgagccactgcgcccggcaactttttttttaagcaacaattttgctttaataggact

SEQ ID NO: 62971 - DNA, 1011 bp, Homo sapiens
ctgtagagttggatgtttgttggtatgcatatgcagctgtgttgccttgctccaccaccacacatcaagatatagaacagttccctcactccagaagtttcctcctacccctttgcattcaaatctctttccccaccctgccacagagagccactgatctgcttcctgacattagagttttgccttttctaaaatttcatgtaaatggaattatacagtgtgtcatcttttgtatatgacttctttcatttgcatagagcttttgaaattaatccatgtagttgcatatgtcagtatttcattccttttaattgctgagtaatattccagagtgggggtatactacaatttatctattcaccagtagatgaatgtgtaagttgcttccagtttggggctattttaaataacgctgctgtgaatatttgtgtatatatctttttgcagacataggttttcgtttctcttggtaaatacttaggagtaggattgatgggtcatatggtaagtatatgtttaattttataagaacctatccgattgttcccaaagacactgaaccattttgcagtcccataaacatggatgagagttccggttgctctccatcattgctcttaaagcatccaaacactcagaacccattaaagggccacatggcctccagctcaccccagttcctatttgacctattttcctcatttacattacccacctgtaacctgtaggtttgtgacctgtgccattgagcaactttatgctccatagcatatagcagggtgtgacagttaagagcagggtctatggagattctcggttggaatctccatcttgccatttataagctgtcactttggacttctctctgaattcgcttcttcatcggtaaaatgctaaaaacaccttatttattagctggctagttgtaaaaatgaaaaatatagagcatgtgaagcatccatcacaggactgggcctgtagaaaatgtacaatagatggtacctgttagta

SEQ ID NO: 62972 - DNA, 1014 bp, Homo sapiens
accctagagtgtagattaaaataactaatgcacatatatgtctccctatctgtgcagaaatgctttaaagttaattacagacggtataacagttgatttctggggttccatccaaacttaagattctacaattctacaaatgaagggtcctagtaaatgtacttgtttctcctcattcttctgtctgctctttctggaagcctctgaattccccaggccatgtcagtgtctttcccctccctgcaccttcatggaagcacacacttctttcatggcatcttacttcaggcccagaaacatgcactgaggattccagcctttgtaaaatggcatctcttttgatttacccacactgacctaccttatttcccagatgtcaatgatttgagtagtaccatcactgtttttattgtggggaggtggggagggcatacctacctgcctaacacctatattatttttcctttaaattggcacaatttcttcttctttagctttatcgcacagagtattgcccatggttttaatgtgctagctatgcattttttcacacgttaaaatagatgcataactaaatacctgaaataaaatgttaaaagtaagtaatcatctgcgtgttgcctaaaatcagctctcgtttctccagtggtctgcacacatcacagtgggaaccactgctgcactggccttggcgggttccttgcccatctccccaccagacagtgagtccctggaggacagggacgagctttcatctctgcctcaccgtgtcagtaaatctggtgccttgtgcataatatgcattcaataaatgtttgatgaatgaatgtctctctcacgagcacaagtgaaataccacagcaaacacaaatatctgctattttctctcactttgattcccaacctctgataaactcttaagcactcaaacatagaatcaaaacataaataagtaccaaacatgtgtaagtgaagtgcagcccatttttctacctcttaaaacttttttcttaa

SEQ ID NO: 62973 - DNA, 1010 bp, Homo sapiens
tgaaaccccgtctctactaaaaatacaaaaattagccaggcatggtggcaggcatctgtaatcccagctactcaggaggctgaggcaggagaatcacttgaacctggggggcaaaggttgcaataagctgagatcacaccacttcactccagcccgggtgacagagtgagactctgtctcctaaataaataaataaataaatagcaaatgttccaaagtaaaccagttgactgaaaggtataaattcatcttccatttgttggatgccctttaaattatgtgggaaatggaacacatgaaattttttttgagctttgtctttctattaatttccaaaagtgaaaagttcaagtttagagaaacatttatcttaccatagtacctaccttgaactttgctgcatagtatatactgtttttatttctgatcgaagcatttgcatttaattacttaaagcatttaaaaagttcaatatttctaatttgagggttaattctactagcattagtaagaaacattgggtataaggaaaagggcatatgtatttacataaataaaaagcatctaattaagccttcaaatgacatttttttttaagggtaaggtataaagattaaaaaaaaaggcttggtttatttgcattgattttgctttttcccataattgctgaggttattatgttcataaaaagggaagcagtgctaataacttcaggaggcaattgctcagtgtcagcctgggacattgtgactgttctctagcttactttaaatacacatatttgcttttgcaaatatggcgccagttgattatggatagttccttcttacactggaatctctgggaggctcattccaggaaaggtacaaagctcaaggcagtggaaatgcacgttgcagatgcactgcgtgcccagtggacaagcactgtcctcagcttgcccacacccaagcagccctggagtggacacacccagggctgtgaaatcaagaaaacttacaccttcagga

SEQ ID NO: 62974 - DNA, 1028 bp, Homo sapiens
ttaggggggctcttcattctgttttgtcctgaaaacagaattgctcatacaaatatctggcaacatccaaacacaggtgcagatttggaatgtataaagcctcgtgttggtttctttgtattttcactgcatttccctatgttgaggctcaagatcaaatgattgtattttaatgtagtatttgccaaatttccaaacctctaagcacgaaatcctcagccttcatttcttcatttgcttggaaatctaggtagcactgagccaaaagcagaagttatgaagtgagattatacttgattaggaacaaaaaaagtcctacattcagaaatgcagatgtgcacagcagtcctaggggaatgttggtatttgatctctgagtcttaaaggttcatgttcccaaggttaagaaatgcagagagccaacttttattagtaactaatgctgaaattactctggagattctagaagtattacattacaaatcactcagctttagaaatcctacatctagtgagttacaaatatcactgtatgagagaaaggggcagtaagtgaagggtgtcattcataaacttaatttctactcttgcagcatgatcatgggtatactgtgtgagagttttcatttcagtgagaaaggaaaagggaacatacgaagtccatgagtcaggaccccaactgaaagaagcaggaagcaaaggcctccttgtgtaggtggactttgggtagggctgtggggtgcagcagtccaacctgggctgcaatatcttcctccttttctaatactatctaacttcgtgacctggggcaagttccttatttattgagcaagccttccattttggtgaaagctaaagcctgggtattcataaaatgatatccttcaacaaacatggcacctacagccttctatgaaaaagatacagatagcagacatttcacttcaaggggagaaccttaatagcaccaaattcagtattaaaaccaggattcgtttaaagcattactatgtcacatagtgccctga

SEQ ID NO: 62975 - DNA, 1054 bp, Homo sapiens
catgatgtgcaccgtgttcatggttctcttagaattgtcatcagcgttgcaggttataagttatatggataaaattaaaaccaaaacttacccatcacatttgagcccaaatatttcctcttttaagttgtacccctaactttgaaatcagggttaaaccacaggcttattttttcttatagtcattttttttaatatttgggttcaatcatacctggtaatttggtatgtaacgatggggtaggcttgagaatattcaagaacaaattgcaccatgttattcagttctccctaatcttacaaaatatgaaaaaccacaaattactgaattttaatacttcctgaatcttccagcaaaaaggaggaagatagcacctaaatgaataatctaaacactgaaaaagggatgggaggagagagagaatcccaagcattaaaccatattggcctaccaattattatgattgttttcaaaatcacagttttacagaaaaaaaattgtttttatggtgccaggtttgtggagtcctctttgttaaaaccttagtaaatgaagttatgaaactgagactagtttattctggaagcttcttagttgggggataagacagctggatgaactgggaggacagtaaacggtggaggtggaaaccttcttgttcataaaaatactgtttttcatatgttaaaaaaaaaactttatctcacgcttttcatcaagagctgtaatcagtgagcctgtgtacttccttttccctgccagatagttgttcctggctggaagacattttatgatatttatttgatgacacacacctgctgagtggatgaaaagcaactgttcctggggatgacctacttcaagggcgcagtcagcttctgaggccttcagcaggttatcctgaaatcattttagttcaccttgatatcacctgttgaacatatctaagactggtgtattcgcagacttgttgtaggcacagttgctaaccccagggaagagatttcggagtcagtaactactttgtcagtgtattgagactgggaagacacg

SEQ ID NO: 62976 - DNA, 1048 bp, Homo sapiens
ggctcaccgcaacctccgcgtcccaggttcaagcgattctcctgcctcagctttccgagtagttgggattacaggcatgcgccaccacaccctgctagttttgtatttttagtagagacggggtttctccatgttggtcaggctggtctcaaactcccaacctcaggtgatctgcccgtctcagcctcccaaagtgctgcgattacaggcgtgagccacgacacccagcccaattgtagaacatttttatcaccgcaaaaagaaatctggtatccattaatagtcactcccactttcctgccagcccctgacatccactagtatacttcctgtctctatagatttgcctattctagatatttcttataaatggaatcatactatatgtggtattttgcgtctggcttctttcacttagcataatgtttcaaatcttcttattgacaaataatattccattgtatggatacataaattttatttgtccatttatcaattgatgaacatttgggttgtttctactttttgaatattatgaacaatgctgtcatggacatttatgtacaagtttttgtgtgaacatacactttcatttctccttgctgcctacttaggagtagaattgctgggtcatgtggtaactttgcatagcttttgaaaaactgccaaactattttctaaagtggctgcactgtttcccagtcccaccagcaatgaataagtgttccaatttcttcacctcttcaccagcacttgcttttgtgcatcttttatattatagtttttcaagtagcagtgaggaactatctcatggtggctttggtttgcatttccctaatgtctagatgttgaacattttttcatgtgcttattggccatttgtatttcttctttggagaaatgtctgattctattgagtttttaaaaattcttttgcctcacctcaggcatgtggttagcagaaccattagaaacaaatatatcttcctaaagggagggattttcaaacaaatgtatacgttgaagatgttctttttaccatggtagt

SEQ ID NO: 62977 - DNA, 1121 bp, Homo sapiens
ctgtctttaaacgttctttaatctattacagatcgccctcctgtttttattacatttatttgttgaagaaattgtcctgtaaaaatttttgtcctgtagattatcgtcctgtaaaaatgttcattttatgtatttgaatattgcatctccatggtgccatttaacatgtttatatttcctctgtactttctgtaaattaatacttagatcaaatgacttaatgagatgcaaattcaactgtatcacatcaggaggcacataacatctgtttgcattacatttattgagatcaagattgatcagtgggttcaggtgtggtcagcctttcatccattatgaagttctctatcaacctgttaacataatagttttagcaaccactgatgatcactgccaacattcattagggattacaacatggtaatgttcacttctgtcattcagtttgcatttactagctattattctatcatatagaaaagcttactatcatcaactatttggttactctgaaatacagttcatatcagaaaagcagcataaatgcctctgtttattaaatagttttcagattattgaatggcaccagcaacctgcaaaagtgatcaatgatgcttgcttgtttgttttgagcatcaatataaacccttggacttttatctattttataggtgtccatccattactctttgatcggtgagatccccttcaagttgcctcttttgccttttaacatgattccactagtcttttctgtcaggataagatgccataggctcctggcccaaacctggaagcaactatttttacaaggaatcctgattcctttccttaggaaatagtatataaagacttcagtctagacaccaagggtagatttcccctgaaatggttatgtttatgttggagtggtaacgcagtcttccttggtatctcatcgtcctgctgtccgtaggcatctggttccacctggatgctccctccccacacagtcttataatggccagtgctccctgtgattccacctccttctccaaccagatcctgctgcttctctcaatgccttcatcctctccttctaaatcagataccccagctcatctctgggcttctaagacacc

SEQ ID NO: 62978 - DNA, 1050 bp, Homo sapiens
ttccatctccttggctttttaactctctcctcttttctctctttccctttccacttttcttgtcagcagtttattcaaccaccgtataataaatccagtaagtgatcataaaaataccaatcccaattgcaaaaatggcagcacagcctcagcttggaaaaaaaatttggaaaaacaaactgaaatcatcaaagactaaagaccagatactaaaaagatgggatttgctgtgagatatattttataataaaaattctgctataaagaagcatctttttatttttttccttgatagtctgaatagtttatacctgatgccaagaaattatatataattagtctgggtaatatataatttccatttgattatatatattaaagtgattaaggaacttcagtttttcactagtaaatatctgccttctttgttgcattctgggtctgtaatgactgtttatatcaagggtagcactcgttcagaactgaagggagcaaaagttggaatgctttcaccaagcttggttgcctgatgtctatgaatctgggagataacatgaagttagctacattttgggaaaaactgaagggagatttcagtccaatttcttgaaaccaccatgtagttttgcatgacttcccgtgaataaactccataaggccaggcccggtggctcacgtctgtaatcccaagactttgggaggccaaggcaggtggatcacctgaggtcaggagttaagaccagcctgcccaacatggcgaaaccccatctctactaaaaatacaaaaaaattagccaggcatggtggcaggcacctgtaatcccagctactcaggaggctgaggcaggagaatcgcttgaacctggaaggtggaggttgcagtgagccgagatcgtgccactacactccagcctgggcaacaagagtgaaactccatctcaaaaaaaaaaaaaaaactgcataaaacagcatacatgagaaggcatattttaggaagattactcagttaagtatatgacatcaccaatatttttaatattgcatagaatg

SEQ ID NO: 62979 - DNA, 1005 bp, Homo sapiens
gcttatccctaatactctgcagagtcatccctcatttattttttaatgaaatttgacaaaatatgtacactaagtctcctgtagaatggccataatttgtgcttaggaatgcataattttatcaggatctctgtaattagatattgtgcaatagaataaaaagcaaatactgtgtgtcccatggcaacctcggcctttagtatctcactatctttgagataacaaaggtttccacagacacacgtaccacatgggatttttaagtagacatccaggaagagaacgaaagttcccctgttggttttcccctatttttaagtgtgagtgtatgaatgtgtgttttgttctcttccttttatattgcctcctggatttgggttgttttcctttatctgtccggactgtaaatgtggatatgaaggttcatagtcctgtagaataacgtcagtgcttgagctagtgtttggtgtgaagtacctatcttttgaagggagagaaaagaattacgactgtggtaagatttaagaggacagaattaagattatgtaagggttgaagaaaggtttgctgggaatgtggtgtgtgttttagcagagaccccaatgacctgccagggcacgtagagagagcaggctacttgagggcagggagtagaccaccgccatttctgtgacctcacatctggcatggccaggcacacagtaggtactcaataattaactccctgctgtttccctaatcatgtagaggaaagcaacaatgttcagtaattaactgtttaaaaaaaaaaaaaaaaaaaaaagccctgcaagctgcatctttgcttctagaccaagagacagctgcccacatctcatggggatgcagttaggacataatttaaaatatcatccatttcttctaaaatgtgtagtttctttggaggcaattgtagccacttttgtaaataggaccaataaaggggataaaattgtccatcactccactgaaataaggaaatagagc

SEQ ID NO: 62980 - DNA, 1043 bp, Homo sapiens
gaaactatggattgttttctgtattgaactatcacactacagtattagtgtttggggaagaaagaattctgctgcctggttggtgttctgctatttactaccttaaaattcatcccattggggttacagtggcttggcagtctcttttgggtatagtgtagacttatttttggtacttcagctcacttacatggacttgttttttaccaatgccctttttttttgtatgatagaggtctataatttgtggactccgaagctacattttacaaatcaataagaaagacatgaagcctgaaaaacggttttttttccctgatttgtatgtgtatcttacataaaatttcttctaaattaaattagatttaattatacattggaaaaaaattacctttaaaaggatcagagtttataaaatagatgtagccctgaggcaatggtgttatatgaacattctacctgtaacatatacagatttgcgatgttatcagctattagactcaacaacttatttttgaaaaaataatcctttgccaggtttatacacataagagaaacagccaagaaactttactcttttaaatataataataataataataataatacaacctggagtttcataatcagaaagaacagatgtccccaagacacttttgtcaactctagaaagggattaagtttgtcttttattttttgtttttttcccaaaattactatcctcagagagggagaaagtatgcaaatcctagaaagagtttattctccttaaaaagagagaattttccctccagggttattgtttgctcttgagacaaaacctgtaattactattatctgatagtggatagcatggcgtgcgctatttgcaaagaattttttccatcattgttttcattggccattcggagatataatttggtgatgaaaattagctattttcccctggtaagggaaaagagactatgcaagagcaaaaatagacttttttccccagacttctgttctgcccacccagagttgaagtcgccaggagcagagta

SEQ ID NO: 62981 - DNA, 1538 bp, Homo sapiens
ctgttcagtgctcccaggaagtttcttcttaactgctgcttttctatctacaaaagtaaaagttcattgtagaaattctggaaaattctgaaaaccacaaagaaaaagttcacgacacagtaattctcacctgtacacacagtgtactgttaaaactttgatgatataaagctgttaatattttttaagcattcacactaattctgcagataccaagagctgcaagaaatcacctaacatggaagaactgaggctttcaaacctcattcttaaggacaaaggccacatcgtctctgtctttatgccctggcagctggccaggcacccagcatgcaggggggcacagagtgtctgcagcatccacaaacttggggtttccgaggaaagggaaggcaacaaactagaatcggtctaggaaagaggaaaagaattagtacttctctcaaatggagactataaaatatattcctcaatgatgacatttttctgaaaatgtcaaaaatgtgttcataagatgatttggggactggggctcaaaggtttccaaggctgttcagaagataggtttgcttagctgggcgcggtggctcatgcctgtaatcccagcactttgggaggctaaggtaggcaggagttgaggccaggagttcaaaaccagcatggccaacagggcgaaaccctgtctatactaaaagtacaaaaattagccgggcatggtggcacacgcctgtaatcccagctacctcaggaggctgaggcacgagaatcattggaactcaggcggtggaggttgcagcgagccgagattgtgccactgcactccagcctgggtgacagagcgagactgtctcaaaaaaaaaagaaagaaagaaagaaagaaaagtatgcttcaaattctgtgacatatctgccacccatagcagaaagatgcccgcttgggaaagcagaccccagcagatgctctttgggaagaggccattatctgccagggtgggggccacactatccaccttcagtacttgattcctggtggagagtgggttaatgaagaatagtggagaagtaggagtgcttggtatccaggtccttataacttaccagggtctgcacgtggaccaaatgtccctgcacggagcagcgcccataaacagattacagaacagccattcgttaatcccaaaacagttttctgtcagttaattagaaaattcatcttattttgcctccaggccctgtagccttattgcatttgcacatatttcaaaatgtttcaagtactgaccagataacattaatgaatatattagataggcaaacgcttttaaacaaaaaataataaacatacttgtgtgtatatatataaaaaatgttaatttcgtctggagccaaacaggtaattttcccctcagcattttttcagtcagctaagacaggttggcctaggagtgcagtcagcctgtctgcagtctctggcttgacttgcataccagggtcagaaacagacagcgagatgatctgattggcccaagtccagagca

SEQ ID NO: 62982 - DNA, 1108 bp, Homo sapiens
cacgtagctgagattacaggcgcccgccaccacacccagctaatttttgtatttttggtagaggcaggatttcaccattttggccaggctggttttgaacttctggcctcaagtgatctgcccacctcggcctcccaaagtgctgagattacaggcatgagccacctcacctggtgtgtttttccttttaagcattacatttatgtttaatttattgaaaaatatttattgagcaccaattacatgctaaacactgctaggtgctggggaaatattggtgagcaaaagggacacagtttctgcccttagtatagtgggggaaacagacattaatcaaataatcgcacaaatttgaaagtaattgtgatgactgttatgaaggagagcttcatggtgcagtggaactagatgataagtaagtggttctcaaactttagcaggcaccagaatcccctggagggattgttaaaacaaagcccagatgtctgggccctaccccagagtttctgtgtctaacctatctctctgtgatgctaacgacgccagtccagagaccacacctggagaagctgtggtctagagattttaccttgacaggagtccaaggcaggttgatgaaaaagtgagacatgagctgaggtatgaaggcattacctagatgcttctgtcacagaaaagagcttatgcaagagccctgtggtggaagtgggcagaggacaagagacagaattaggccagtgtgtctggagaagcaagagaaaggagagagtggtatgaggtcagggccagacctataggtgtagtagcacgtgctaaggaatgttaaggccttttgacaaggttaagcataaaaggagacattaggcaataaagaaggcgttccgtggaaagaaacacaagtcaaagtttaaaactgactacaagcaatgcaacaagtgtggaaattatacataaataaggttaagttcaacagatggtagccagtactttcaaagataaaaataattattatggagttactttaaatttttgtttataaactttgctaaattcagttaagagctgtgtataaacttaagttccaatataattttagatttgttagtta

SEQ ID NO: 62983 - DNA, 1013 bp, Homo sapiens
tacgtctcagtcttttcaaaatgctgatcagattatgctttcagttgttaattggtgctgtttagcacatatttcatcatcagtctcactgactcaaaagcctgtgatgcactcttgttccttgcctcgcctggctctgttacaggcatctgcagtaattgtcgcacactcggtgaagtggaagcacagggctggggctgaggctgccttttgccgtggctgtgttaaggaagccagtgttatttgatataaagtgctgcggacagaccaggagtaagcggattatttcagacagcgttaggaggtaaccggaggaagattagctcgacatgaggcagatatcataagcaaattagaaaacctccccaattagtacaagaaacccagatttgtgctgtttgtgatcctttgctgaaaggcaaagtgtcgatgttatgggctctggccttgattcaagttgaaatgttggcatttcctatcagtgcatgttagcatctgaggctgtatactggcctaataaatgaagtaaattcccgttctcctgcactgctaagtattccccattccaaggttctatacattgggtaatgttttacttggccctggaataatctctagggcatattataatgtttctatactgggaatattcaacatgactccaatgtaccacacttaatctctcttttgtttgtttgtcttgtggaacatgtatcatgctgaagtcataaaaatgaagtgtgcaaaatgccagatgctacaaacgcaattagatacttaaaaatagcttccttggtggcactgcttgaactctgaactgggccttgtttttacaaacagggtggcgcttttctgctatgctcctgattgtgtgctccgataggaggcacggctctgcttctaaggccatcaggcaaaccatcagattgttctagaatcagactaggtgctgatgttttacgacatcattgcagttgcaggcatgaggtttttctctccaggtgcactgtgta

SEQ ID NO: 62984 - DNA, 1018 bp, Homo sapiens
gtttgtttgttttctcacctttttagtgcctgtgtatgaacctgtcttggtcccaaaaggaattagagcatttacctaaatatatgcaacacaataagattgaatatttacaaaagaagtaacggggaggctagtacacaaactgtggaatcgcctatacatttgtaagaggtggcccacagatttctctctgagcgttctggcagctgacttggagagggcaattgtttcagctacgtgagtcagtatctgtgagatagaaactcagccttttcccctgctctgatgagagagaacactttgtcgtgggacctcttcgcagggacacacactgtgcaggttagtaaacaccaggctccaaagcttccttccagggagcacagtgagccctgcagggcgctctgaccatcctcctttcctcaggctggcggtgttaggtcagtgcggctgtgaaccaaagcaatgctgtgcaggtgggaccctcagggggctctgctgctccagggtcgacttcagagcctccagcaggagaggtggaccccagttcactaggctcctcagccaacactgtctctcagttgggctttcaacacgtcttccacaggagagaatttcaggttgttccctttgctgaggacctggagtggaaacaccttattattggtacttaggggccatcgtgttgtctagtaactaattagggggtcagatatcaccctcatctgtgaaaattaaggccagggagcttgaagggagtgtccccaaagaatgacagagtgaaaggtcgctgtctctttgcaagacacaggctgccttttgacttagtctgtatgaagatccctcctaattcatgggtgattttcctactcattgctgccaaatacaggacctgagagagtgatcaaaggccacactactccttggcaactagttttctttatcttcatcaaatccacaaatacggttcttggtgcccatcctcaagggtgctgggttctcatatgtttactgccatttt

SEQ ID NO: 62985 - DNA, 1046 bp, Homo sapiens
tgacatatgtcactggctgctttacactacgagaacaaagttgagtagttgtgacagactgcgtagtccccaaagcctaaaatgtttagttatgggttaaattgcagcctctcaccttaatttatatgtcgaagtactaacctctggtacctcagaatatgactttatttggaaataatgtctttgcaaatgcaattagttaagatgaggtacgggaatagggtgggctcctaaaccaatgtgaccggtgtccttattaaaaggagaaacttgaacacaggcactcacacagagataccaccttgtgaaaacaaaggcagagatgagggaatgcatctacaagctaagggaccccaaagatagctgacaacccaccagaagctgggagagaggcatggatcagactctctcactgctctctcagggaaccaaccctgccgacaccttgaccttggacttctggcctccagaactgggagacaataactttctgttgttgaagccgcccagtctgtgggactttgttatgccggccctagcacactaatatactgactatctggccctctgcagacagagcgtgctgattcctgttgagctaagtattaagaaaaatttagaaacagggcgaagcgactccagtcctcactcaggacctaatctagatatgccagggctcagggagtggatgtggctcctcagttccttgctggagaaagtgctcatctccctgcccatcaaaactcatccccactgtgtcccagtccctcaggtctctcggatgactgactacacctaaattgatgttagccagtgggggctactaatggctgatgatggcttggtagattggcccagagatagcatctagttttcttccctttttttttattattttatttttgagacggagtctcactctgtcacccagggtggagtgcagtggcaagatcttggctcactgcaacttccacctcccgggttcaagcgattctcctgcctcagactcccgaggagctgggactacaggcacacgccaccacacc

SEQ ID NO: 62986 - DNA, 1108 bp, Homo sapiens
tcattcctccttgcaatccccatgactgcattagcaaaggagccccgctgaggctgagtagggctgacacttgcctgcaggtgggcaggtccccatcagcactggccctacttccaggactggcctaggagaggccagggataggaatggggactgtttagatcggggccgacttggaggattttttcctcctgcttattaaatgttaaaggtttgacttggcaggcaatcaggagcccaaaatatcataaaagggaaaaaagttgccgagtggctaagaggtgcaccacgggagtgtcactgggcccgccggcgaggtgaattgctaagcagagagcagtgaacggggaggaaatggagcagcagacattttcaaaggcttctctccccttcttctcctctctctgtcccccatgcggaaaggggaaaatagaagtagaatccagattggggcgcgtggctgatttggtcctcctcccgcaccatcctcccccagacagcagagaaactttgatgtctgggtgcatggcattcagggacagaggagcctgggcatcccagcaaatgcagccgcatgttccgcctctggacggcctctctgaactcctttgtgaggggagatgaagcccacagagctggaaagagcagcgttttgaaatgaggaagtgtggatcggcattccttgagctcagtgctagccaccttggcgatggggtgagccaaccaggagctcagatttataaaacttttgagctttgtgggccctagggggccactgtggcctacctgctgattttcagatggggaaatgggggctcagagaggggacaagatttgcttaatggcacctagcaaattggtaacaggtccaggagtagattccatgccttcagcctctggtgagacgtctttcctctgcaccaggaagtggaacttcaaacagcaccaggggttggaacttttgtttcaaatcctctctgcctcatccccacccactgcccagcaactcaaggctgggtctttcgccccctcaggctcagaagggctgtggcccagccacagagccagggggcctcctcagtagtattggccttcacactcttggtgc

SEQ ID NO: 62987 - DNA, 1021 bp, Homo sapiens
aggagttcgagaccagcctggccaacatggtgaaaccttatctcctctaaaaatactaaaattagctagacatggtggcacctgcctacaatcccagctacacaggaggctaaggcagtagaatcacttgaacttgggaggcagcggttgcagtgagccgagatcatgccactgtactccagcctgggccacagagcaagactccatctcaaaaaaaaaaaaaaaaaaaaaggaagtcctgctatttgtgctggcaggctgaagacccagaaaagccagtgctacagtttcagtccaagtctgaaggtctgagaattaggagagccaatggtttaagtcccagaccaggaagactgatgtctcaacaaaaagagtcaggcagagactgaattcaaccttcttgctcatttttgttctggtcacgtcctcaatggattggatgaggtccacccactttggggagtggaatctgctttcctgggtccaccagttcaaatgctcatctcttctgcaaacacccttgcaggcacatccagaggtaatgtttaaccagatatctgggcatcctgagcccagtcaagttgacacatagaatagccatcagagctgtcttgtgtaggtaggaaaggtaagaaagggagggacttttagaagagggccagttcaaacccaacccctttctgaccacaggagaggtaagccatgaagaatgaagcatgatgctggccctttgtgatctctgggggtgtgttgtggaaggagtagacaccaaagatcacaaagtgtcattttgtactgacaaagattactattattattattattattatttatttattcattgtttttgagatggagtctggctctgttgcccaggctggagtgcagtggcacaatctcagctcactgcaacctccacctcccaagttcaagtgattatcttgcttcagcctcccaagtagctgggattacaggcacccactaccatacctggctaatttttgtatttttagtagagacg

SEQ ID NO: 62988 - DNA, 1034 bp, Homo sapiens
atgctctgtgtagatcttggcagttaacagaaccctttgatttttaagtaagagtgagtcctgcgtgtgcagagaaggctccaataggctggggacggtacctttaggttcatgccttcccccagcgctggatcggaaggattggactgaaactttaaacattttgagcaatacctagaatatgtataatttataagccacacaccgttggctgtcaaataggcgattgatctgactcggatcttgttaattatcttccacatacattacgccttaacagatcttcagtatactgtgtatcaatattaataagattataaaacactattgataattaggaacagaaagagaccaggcctttgattctggctgttacaaatgcccctgcctctctccagattagaaagcggcccctttccatttaataatatcagatgagaacatctatgtcctaaagtgggttattaggagacagctaagatttgcaccaggatgcaaggggctatttgaaaatgaatatgagagcagcgctgatgtgcgagagatttgtgtttcttatccacaggaggcctgatggggtgggtggggcttaagagggagctgtgcccactttgatcagccaaattcctcattttctttgtccaggcaaatcagatcaatttggttttgcaggatattcaccaggctggcattttatcttgatttcctcaattggatgaaaggtgcccctttgggaagacagagaaaggggctggtgagatgcaaggcggatttcaagcctgtctcattttggatggcattttattttctatttttcctctttggaaaagcctcgtctttcatgtttttgttgggttcacaaactcattaacatcaaacaggcagatctgccactaactaggaaaacgcaagcaatttcgcatataaatagaaagccttgaagctcggggctggggccaggccttcttcctgggggtctctcacctggctgaggagggggcagaggaggaggaggaggaggggagggagcaaaa

SEQ ID NO: 62989 - DNA, 1067 bp, Homo sapiens
ccctcgcccagaatcccgggctcgcacacactccgcgcaggccgctccccctgcacactcctccctccgtctccccccggcttccccgcccctctcttcctccttctttccctcctccctctcccggcgcccgaaaggatcattgttagccgcccccgccccgcccaccccggctgtttatttatgcacacgtcactgggccggccccgccctccggcatctcattaaggcagtgtgttcctctcgccctgtcaataatctccgctcccagactactccgttcctccggatttcgatccccctttttctatctgtcaatcagcgccgcctttgaactgaaaagctctcagtctaacttcaactcactcaaatccgagcggcacgagcacctcctgtatcttcggcttccccccccctttgctctttatatctgacttcttgttgttgttggtgttttttttttttttaccccccttttttatttattatttttttgcacattgatcggatccttgggaacgagagaaaaaagaaacccaaactcacgcgtgcagaagatctccccccccttcccctcccctcctccctcttttcccctccccaggagaaaaagacccccaagcagaaaaaagttcaccttggactcgtctttttcttgcaatattttttgggggggcaaaactttttgggggtgattttttttggcttttcttcctccttcatttttcttccaaaattgctgctggtgggtgaaaaaaaaatgccgcagctgaacggcggtggaggggatgacctaggcgccaacgacgaactgatttccttcaaagacgagggcgaacaggaggagaagagctccgaaaactcctcggcagagagggatttagctgatgtcaaatcgtctctagtcaatgaatcagaaacgaatcaaaacagctcctccgattccgaggtaggaaaagcccctcgggctggtggggttttttatctgtttcctgggcttggcaaatgttgctgaaaggggagaaatcggggctgggggcggcggcggggcccggcgggcggcgtgt

SEQ ID NO: 62990 - DNA, 1022 bp, Homo sapiens
tgcaggggccgcgctctgggcttgcagctgtaggggaagcacagttcgcttactttgtatttttcttgggagcttgtggggcatcttaaacgggaccgttcggctcagaatcgcagtgttcgcctaccaataaaccggaccaagcaacattccaaagaatccctgagaatttctgcctctcctcccctcccccttccgatggaaacctccctggtattattttaaaatccacttaaccatctgaatattgagctttgatggcgggcttgctagctttcttgactctttttaaactcgctgtctgatactggcaatcttgccatcccttctcaaacttgagcagttgtgttgtcttgtaattagcaaacagggaaattgctaaaggcaaataaatgatttcccggtgagaaaaggaaggctcccaatgatcggtcccttttgtgggcattataggaatagacggcgtctagttattttaattgtggacatagcgggtggcctggtgctgtgacatcagattgagtctcagaacacatttctgaactcagtaggcagttttagtacttacatgtcaaacaccagcagacatctttgtgtacactgccccttcgtccttcctccctgttacctgggttagattatgtgctccaaaattaaagttatttatttaggctggtcagcagagcagtggaaatgaggatggtaggctgttgtgtgtcattcctgacgtcttcaatcagaaggccagcttgcaatccagatttgatacagctgcgggaggaatggaggaatgcataggcaagatagcgggcttcccatactcttctgaaatccttagtgttttatagggtgtgtttttaatggcaaggtgtaaagacaaatttcgctgtatgctttattattttccctttgctccttggtggcggtgatttttgctacattttctgttacttatggtgtacctgtaagcagctgcatcctttaaaaagcaaactctctggaaccctgatttctgctttttt

SEQ ID NO: 62991 - DNA, 2014 bp, Homo sapiens
tctgtgtctgattgagaaagagttttttgaggaaaacaatcctcgttcttgctaggagttcttcaccttgattttaattttactgatagggatttcatttagagtcattgctggaagttggtcagctttctgtttcttagcaagctgtgaaaaagttaccggaaggtttccaggggcttgcagatcaagaatgctgttctgtttgccgtgctggatcgctgcagttctgcacgccattgaaaaaaatatttgctttagaaaactagcattttaatagttgcaccagaggctgtgcttttaaagattacagtagaagtctttccaggtttcgaatgcctccttacatcccacgaggtgcccctggctgtgtgcaaaaagtgcctagatttctcggtggagaaatcctggtgcaacttctcttacacacgtgcagtgggtaaactagaaggtatctaagaggattttacattttgtcagatgtttcacaacaggcccccctgaatcacattaaaaatgcactgtagagaaaggacagctgcaaatttttgtgtggacgcgtgtttctggaccatgactaaaactccgaggacctttcccccagctgtctggaagttatgtggaagttggtttattggcagttaagtatgagacaacctggatttagcaaatgctctctcctgcacaggaagtagatgacattatattgggggaagggaggagatttcaggcaaggagtgatttacctttttttttttttttttttttttaaatgctggagttgccaaataaataagcactttccagggaagtaagtgtaagctttttagtcttggtgagtggcattagataatatctttgactgcatttataattcttttgaggtgacacattttaaagtttggaaaaggaggctgaaccaaattcttgagggtcttattttcaaaggggtgtgtgatgtgggcatctgagtttcttctgggagtgaatattggcaactatgtaagtaaatcttcaactctgacttataattgagcacatttgtgaaggaaatggttaattttacaaccaaaggcaaactcgcacctcgacaggtctgctgaaagaaatgtgccccagtctttttgctggcaagcgcaccaccaggtcataaatccacaggctttatttacagcccataacacttatgaatgttaagatatttgacgccacgttggccttataatattcaaggtccgcagacattggcagtagctcagatttctctcactaattataagcaatgagatggggggaggtggtggtatcctaatgcaaatgctgccctcccttctccgctgacccccacctctacaatcttgagtttactgagacagacgccaccactcctttggcagctgacttgtacgtttcctctaggctattgttatacacatttataaagagcactttcaggaatggaaattcagtgggggctctgcacagatgcctttttcaaaagcaaagttgctctaggtgtttgcatcttttcccttttcttttctccctttttcctttctttctcttttcttaattccccccaacacccccaccttttttttttttttttttttttttttgagattacattgcctatattgtgcattttccccaggaatacttaaagaaacctggtatgggagacggctctttaatttatatgatgttcccctgagtggaagggaaaatgtacacattacatagtacactagttaaactagttaacgtgagagtttttaaaaaagtgagatgaggtgaagagagttgactaaaagaatataataggtgaggggaaaaaaaatccaggtttacactggggatgggagggctgcttatttgtgaaaaatgtactggtatctgcgggaggaggcacagaaaagtagccagaggagacagaataaatgcctaagaaagataagaaaagtataatacaagagaacaaagatttgggtttgggggaattgaaattggagattgg

SEQ ID NO: 62992 - DNA, 1050 bp, Homo sapiens
aatggcatgcagaaacttactagccctcagggatagatatgaatccctaaacagctcattacaaagaaggggctgtgggatctttgaacgggttatcagccgaggtgttctttgcttttcccaagataggttttttctccttaggcacatctgatttcgggctagtaattcgacctgttatattttattctttttgtcatgcagtagccccaaccaggtcggtctacggaggaaggaatggccaggagtggcatcagccctgaaggagttaaaattgctccctaaagtttggcatcatgaaaataaatttgaggcctggtaggcattagcagggcacagcacatttacagagcttaattagtacgcactgtaattgttcatggtctgccagaagaagtaatgttcaggaaaagtggagtccctctcttgcagtcttcagcttgaaaccgataaatcacttgcatatttgtgtagtgattcaaatggagctaagacctctcccatcccaacatgtggtaaattgtaaagtcaatgaattgcagatgtaggctacagtgagattctctaagaaaatgcagaatgaatgggaaagagtgacgctataaatatttactgagaagataactagattccttcgtgctgggccaattatgatgtactaaaatatattagtaaaatgcttaaaaaattgagaggatttgtgtgggtctttgggtgggttggtttgttttggaaagtgaaataaaaggcactatgttgttgtcgtgtcagttttattaagcctgaatcacaatggcatacccagggaaggacacatgaaacccacattaatgcaaattaattcgttatgagttgcagcactgcgactgctaagtggagtaatgatggggcatcattttaagagttttagtgtagcaacttttaatgaaaaatgctgtgttaggaacatgtctcagcacttcagcccacgtgtttttctatatgctagaaatatgttttgtacaagagcaggaaacttgattcactttattttttcccccagacagttta

SEQ ID NO: 62993 - DNA, 2728 bp, Homo sapiens
tcaaaagttcttatgtgattttttccacttttatttattttttaaaactgtgtggactgaattgtttttcttccagggagcaagatacaaattatctggatctgaaactcgcagcctaaattacactttgtgctagtaacacagacgtgttctggtagtagtaatagcacaggagtagtaacggtagtttattataatactacagatccatttttggaaatgcagttgatttgcctgttgcaaggaggggaaatggacatcaatttcacagggtcatctgattcctcattagtagttcctatttggcaaattaaaatgcattttcagataattgttgagatccttcagtgattattgtattgtttataaagtaaatcagcagatggtgtttgttttcccaattgatgggatcccaagattagcaagtattacttgggaagatgagaattgggtgaacaatcttgctcttcctatttcgggatacctgcttcattgatgggtggtctctaggacttcagagggaaaggctgaggatagacttagaccttggggagggtctgagccaatcagtgacttacattcactcagttgccatctaataggtggtcctcccttagaaaattggcggctttctggcagtgtttggccctctctttggggaagtgtggattactagagtgcaggcgacagagatggcctgggatggacagcttagtcatcatgaaagaatgtgtaaggcatcgggtggcccctgaattctgtctgacacatttgttttcccagaaatagaattgcattggagagttggggcccagttattagaaatatggggatggggtgcttgtacttgttgcagtcttgtggcttctcataatcttttctctcctaatccttcctcttgcctacatgttgcaattctgatgactttttgcagcgcacagttcatttttcttcagcatcccgctcagcacactggcttcctttatgtcttaatgggcatccgtctttccttttcatgtcattgattctcactcgtggcccccatcttccctgtatgcttattgaataggtgcttaaaaaacaaaaacaaaaacaaaaacaaaaaaactttaccttagattgttatgatcatcttatccatagcaacaaatgaaagtacacaggtcttgattgaatgccaaggctgcagttcaatctaggaaggtttgtctgctattcataaactgcttaagatgttttcttgtagtttgtgacataagcagaacgctttgatttggtttctttctacagctccattttcagtccggcagcacacattactctgcgtacaaaacgattgaacaccagattgcagttcaggtaggaaacgcaagagattctgaagcttgaattgtctatatgtaggtctcttgtgtgttttattctccgccccttcccccaactgagataatgatgatgatgatgatgatgatgatggtggtggtggtggtggtgatggtggtggtggtggtgatggtggtggtggtgatggtggtggtggtggtggtgggggggggttgaatcactgggggagaaggggagcaaaggagagagaagcaggagaaatgctgctgaaatgatttagagatatggaaagaaagagaaggctgtgcttattgttaagagtttcttgaccgggcataatgggcacacagaccccagcttgactactgtttttctttgcttagggagggatcttgaattgggagtaaaacggggtggcacaatgtgaatgggaaggcttaaggggagaggtgggagaggaggccgtgcaacagccagagggttgtttctggtggatcaaaatcatgttaagtggtgctaagaatatctctttggacctgatcatcctgaaatgttgatttctcttggacctgtctatgtatgacactaaatgtgctggaagggaaaggcgacagatcccagcttctgatgagtgtcctgtttcctgctcacgtagtacttccattctcttaaatccgaaggctaaacaaatcatggactaatatagactcggagctgaactgatgccagcagaatgcagtagaggagggagagcagactaatacgattttcgtctgtctgcctggccttgctgggatggatgtacctcatggtgtaactaatggtaccaaaacttcttgagtgttctggcttaaccctttgaagggattctcttgaaaccgtttgctgtagtgttgaggtctagctggagagccttctttttttgtgagttgatgttggtttgttagatcatttgtgttattccatgacttcttttctgggcaagagcccttgcagataacttgtctgtgtgtgtgtatatgtgtgtgtgtgtgtgtgtgtgtgtgtgtgtgtgtgtgtgtgtgtgtggtcttaggtagctgcagccacaatgcatctttgtagctctgtcatctcagttctgcatcttccttgataagacttccagatagctgtttgccccaggtaaacggaattattccgccagtgaaaagcatgagtcagcagacatttttatttggtgcattcctagtgtttctgtactcattttcaggccacagcaacttattttaaaaatatttgaggctgggtgaggtggctcatgcctgtaatcccagcactttgggaggctgaggcgggcggatcacttgaggtcaggagttcgagaccagcctggccaacatgg

SEQ ID NO: 62994 - DNA, 1031 bp, Homo sapiens
cctattcctgttggttgctgtttgcatttctcttatgtcactgaaaattttttgctgggtccttgttacatttgactagaatataagcacttctgaagggctaagattgtgtcttactcagagattgtgttttactcatatttatatccctgtagcaccatgcactaatttcctgggacatcgtaggtgtacaactaggggtgtgaatgtgtttgaatatctaattgtgggcagaaaggaaacagtatataagtgagattggggtaggtgtatattagaggtaacaaagtgtgcttttagaatttttaaataacagccccttttataatatgaaagaccaaaaataatttgtttttgtgctcagccaggtagtttgagatgagtgttcgaccactttgtcaacttggtgttcttttccacgtatcttagattttgattccagctctccatcagtgcgtgaatttgcactgctgtcttagagactatggcatcatccaaacagtggtaactatggttggactggtgtctatttctatgaccatcttctgattttcagaatgcttagaggttagttggcttttaaaagcaatattaccttttttttttttttttaaatgtcaggcagcattacctgtcagatcataatattttcatacactttgacaattgtcattcattcctgcaggggacttcaaaacaaattttaaacaagatgttttcctaattgtggatggatgagcctgcacagacagattcattcttttctctttccaaacctcgtgcctcccagatttttgaggttgagatgaagcaccagaataaatagctttggttgcaaaccagaaatcttccaaggcttgaaaatggatgtgtgtgatagtagcccattctaggggtactggaagattcttctcactagggctttggtgaggctgccctgtagggaagaagtcttgtgtcaacagtttttaagttgattcagtaagcattgttgatgattgaaattgaagaattgtgaagacaattcatct

SEQ ID NO: 62995 - DNA, 1653 bp, Homo sapiens
agtgccatgggcagccgctacttcacttgaaagctttggagtttctatattcaaatcaaagtcacccagaagcaaagatgaaggggacagtgtgatcttcaaagacgagggagtaaagaagtagtggggaatattttcctgggtaattctgcacccccgctcccacctttacagaaacactaagagccttagccacttcctctttcttggtggttatgtgggtactcaggctctggtcaagtcattggctgtttatggagcaggagacagatgacttgggaaagcaacatgaaaatgtcttgggttggttttgagcttgcatggggggagtgagtcagtagatgtttctcgggttctctctcttcctctcttgcctttcctcctttctttgagcttgtttcgctctgagagtacaggcttggcacccacttacccaagaactgattagttcctaaaagaagcagtgagttgattgcttacagagatgatgtaagctttgctctggggtacatcaacttggatttctcatgctttatcttataaagcctaaattaacagctggtttggtttgagttctctgggatctgactaagggattagagtccattctcaagtgagtcaatctagtttaatttatttcaggtctatcaaaaaagatcaatcaaagctcttttgaaagtaaagctataatcggtctgcacacttataagtcactgttgttgcacttggtgtttctctctggtggaaaaatgctcaggctgtggttaagaggatgtattagagcattttctgtgtacctccctttcttgcagcctccacacctccctgggaagattttgaggaagtgtcatgtttgagaaccccacttaagtgggagctgcactcacctccgtctcctttttctctgggcatactggatccctgttttggaagtttctagttcagtataattttaatacctggacctgaacaagtccagcctgttttatgtcactgtttttgctcctgggctttttcttgcagatattggtgggtgaagacatgcattgaattctttccagaatgtctgctgtgaagaattactcatgtcatttgcaaggcttaagctgaagcattcgctgctatggtcgatctaggcttttgtgggcactggaaacgacaacccgagttgttcatttcttttgtttctattttaaaaatacttaccgagcatcttctggtagctaagaactattcgagatacacttgatgtgccaagagaaacatcaagataaaggaggtagttaagagcttgactgtagagttagacctgtctttgaatcctagctttgctactttgtgactttatatgacctgcagcaaataaatctcagtttccttgtctgtaaaataggcatagtaaaactgtctccctccaaggattgttgtgataatgaaatgaaatgatactgtatcttttgctttttaaataagccacttctggggagcttccaggaagcagaagttttttttttttttttttcccccaaatgcattcaaaataaacaaatctccttttactaccataacggtgtatgtgaatgtcctggcggatgctctcaagagcgtcaacaatgtgggaaagagaagcaaacaccaggttcttctcaggtg

SEQ ID NO: 62996 - DNA, 1898 bp, Homo sapiens
tttatctttcttccacttgactaaatgagaatagtgtgggtcactctctacctgcctcccatctgtggttccttttggagataggccgagtgggccactcaccctttaattttctcttagtttcctttctgtacaccagtttgaaccttagtattatcactaatgcaaatatgagcctaggctcaatttttccagttatgaaatggggctggcattattccgtgatgtgcatgttaagagaggggaaagctcacatttttgaggtcctcttgtggttctatcttgtgtaggaactcacgctttgtttattcagcaatcattcctccagaaataaccttaatagcaacaagaaaaaagaataggtgttttttgagctctatctgccagtttctctatatatggacattatatattgcaacataacactcacaatgcctttaaacatcatccccgttatacagataagaaaacagaatttcaaagaaggtaggggacttgcccagggatacatagctagcaagtggcagcgctggattgagtctgggccttgtctgaggctcgggtcctgtcatgctctgcggttgctatgttgacatgcaaagggagaggcagctgctgggagtctaggtgggtttctctttgagaatgctaacgtgaaccctcaaggtgaatcagaatccttttgcaagtgaataatcagatgtaggttcctgtgtctccctgtaaaatgaaagcctcttttttccaaggtccagtatagacctgaagctgggttactctggaatttccctctctggctggagtgactgaggccttgcacgtgacattggtgaggactcgcagcctcaggtctggcttcccttagcaacccccctttcctgtctctgcctctggagttcaccattaaaaaaaaaaaaagaaaaaaagccaaaacactttataaagttacatgctgggtttcttctatgtcctagaaactgtcttaattcatcttcccctttactcttatatgagcaggaagaaaaaaaaattgctagtcaatgctaataattatggcatgtaatgtaattggaagtgtttcactgacatgctcatgagagtttgcggcttcatcttcaggctgggatgtagcactagacttgccttgagtgtctgcacaagcctttgatgcaggtagaccatattataaataggcgcgttgctatggtgaggatggcagtccttgcttgctgtgggtaaccttttctaccttctcggacactgttttaaaacacagcagcgtgatagcatttcatttaatttggaccaaggtggggtagatgaaatgttgagatttagatctaaaatgttgttgtggtgtttcagggggttctggctcacctagtactatggaagattttgcagattgggcttcctcatgatttatttagaaatagattttctaatagatggggtgaggggagggtggtgggcagaaggctgggctttcttctcttccccctcctcctttcattgagcgcttctgcgaatgtgttggctttgatgccccaggagctcatacagtgaaatggaagttcaggttggcacgttgcagaaatgattattcctggtagtacgtttcccattactgttaataatataaagacaattgcctgcctctcaggactcctgcacgtggctacagtcatttcttcatggaattagacacatagcagtggggaccaggagtgttttattagtgattgtcctcctgcaagtttccagggtatctcagcttagacacatgaattattttttcctgttgcttggagggtatacttttaattatattcattcaataacagagcagttcaggtttgtaaaatattttttctcccccaaccttttccccagcatac

SEQ ID NO: 62997 - DNA, 1063 bp, Homo sapiens
tgagtattactcccttgagtattgccattgagtttagtcctgtgagtattgctgctactgcgccttggcaatggttttcaaactttgcaacacatcagaatcacttgggaaacctttaaaattctaacgcccaggtcacatcccattccaactagatcagaacatctggggaatgcgagccatgcaccagtagttataaaacctgcccaggtgattccaaagtgtgggaacctttgagaagcactgctttaggggttggaatagtcctggctgaattttaatcagggaagactgactgctccgtttatgaaacgtaggagagtggagcagggttgagaaaccatcgggatagtgttcttactttgttacgtgagcaatatttgttgagtctctgtggtgggttctaggggttcagaggacagcagtgtgctgctaggatggtggtctgaactagtggaaaggcactcaaaggaagaaagacagaattctaagaggagaggaattttaggaaggagatacccaggacttttgaattacaggtaatttgatcagaacccaaaactgaaatgtctctgctctgtgatgaaagggtttgctggcattgagtaaggagctgcaggaaggcctttaacttgtctccaggtctcttaacagctttgtcatttacatacaagcacctgcctggctaaaccattcatttctgtagcttccttctggatctgtctagggaatatttgctttgcatattttggggttatcttaagtgtttgaaggaaccaaaatatttttcttaaaaataacactcaaatgtagttcacatgattaattttgactgatttgtgagaatcagtaagtgctgactgactgaggcgccccacacatccggcttccttctgttactctacgcgtgttgctgaaacttaacgaacccatgtggggtcttctcgcctggtgcagtccggcccagtattcatactgaggtttgcagtgggagaaaggaaggtatttatttgtaggtcaccaagcagggcaaatccagcagctcacgcttaagacctgacct

SEQ ID NO: 62998 - DNA, 1028 bp, Homo sapiens
cctgtctcgcatttgctgtctatgtagactcactaaagcaagttaattcattgctctttgaccgccaagtctttcgttgtcttttgttgttgtggaatgggggaaagaaatacagaatggggaggagaacctaattagaaaaatcaagccttgagagctcccagccatggagaaagaaagggattttttagaagttgtgattttaatatctgctgcaatctgatgattcatggatttaaaataacccttccaggtcaccaggaccctgttacttgctggctttgtacctctcaaaggtcatttgttggcttcgtctcttaacaatttccatggtagacctaaaatttctggctgtgaaatcccctgtgtagtgggaagaagaaatagcaaatcttagctgccttggacctgatataattatttgtcttcatttacatggtttatccttcaaggttgaataaatgatgtgggagctagtcaaggggctttaggtatgtgatttcatgcctacttttttttaggtagagaaactgaggtcacagggtactagagaatggactctaagattcaggtttctgaattgcctgtggttttgttgactcaactgctcttctgttgttttttagccacatgccttgaaacagtcctctttcccatgtttcttcatcagcaccattaacccaaggtatactgtcctctcttatctttcacaaggtcttggagttcccatgcctttgtaagcatccctccccgagattcagcaccaaccaaaatcacatttggaaaaattgcttgtttcccaagaagctttggaggatatgattttgtatagaacgggttcacaggttttctgttcattcttctatggtggagtgtgtgtgtatgtgactctgtcttctctccattcctctttttttttttttttttttgagatggaatttcgcttttgtggcccaggcttgagtgcaatggcgtgatctcggctcactgcaacctccacctcctgggttcaagcgattctcctgtct

SEQ ID NO: 62999 - DNA, 1029 bp, Homo sapiens
aattcctgctgcttaatgtctccaggaaggaaaaaaattttcctctaggctgtaatagtacctaatttcctttttcttctctttatttatttattttccctattaataagcaccaattgtagaagatgaaggaagctgggaaacccatcacttttggagaaggttaatagcttcctttagaaaatcctgacataatacttatttccccaaaaggcacttcatcagcctgaatgccagttaagattcaaggaatgggcttggatttgtgtgtacccagcggttctgtggcatcaagttgcactgggaaggagagtttggggctgtcactgtggagtccctgcaagtcagcaggaccagggctgtcttcctgcaccatctggatttggttagctctctctgggcagtggggccgagtctcatttcctccaacaataatgttatataggcaatgatcctgggctgccctaacataattgaaaattatgtgtattgtaggcttggagtgctgaaatgtgggctcataaaaatatgtggtgcaggtagcctatggagattggatgtggcacacaatgaagcttttatgtaaagtaagaattataagtctccatgttaatattgtattatgagtatgacagttcttgggtgggtcctcagggcaggtctgtcaccttcaacaaagcccgagtttcctaattctacagagctggtatttggatgtaatcaaatcggttttgcaggtggccaaagatgaaaacttgtccaccaatccagctctccccactgagggatagcatgggatgtagatgggtttgactccatttggcatttttgttcacgggtttttatgagatggagaggtgagtgttggtgggtgtccattttggttggcctcaaggaaatgactctattgagtggttttgaccaatgcagctcatatagttatgtggtaagtgagaatgggaagaagttgggatgagatggggcagtttagattcccagagccctctggcctgggttacagatggagac

SEQ ID NO: 63000 - DNA, 1046 bp, Homo sapiens
catactccccaacaaattcatggacttcttaacaactcagagacattagccacaagttccaagacacccccaccccccagcctccccagtcctattttcgcattcatataactaaactctttttctttcttggtggagttttgaaatttatatttttaattctttgctcccttttttcctcttacaaaatgagtgccaagcagctaagttgtgctgagtggtagagtttgagtcagtcttggctggtaagctgtggggttaggagccgctccctggataccacctctggtgtctttgctatacaaagactttcatttagcctcctttgtatccagcaaaaaaagattcagtacccaaaatggtggtattttggtatagtatgtatcttacaaaacggcaaaagacttcaaaagttcctacaattttatcttgggggtttccttttgaagtcgatgtagaattttaccttggggtggattttttgtacttcttggtctggtgtgttttgttgtgtaatgagcatggaggtgtgggataagaaagcagactgaatcccgaggaacaaagcctgccagactgtggtggtgtacttttcttgttgttattgcttaaatgctgcaagagagtggaaaactcttacgaaataatgcacgatgggtagaacttcagagaaaatctctgccgtctaccctgtgcattttcgaggaagctcagagggcatgctgaacctttgctttttgtttctgaagagttcaggggaacctacccataattaattttttaaaacactacctagagagcaccctcttggttattaaacacatgcgctgtttcgatgggatgtttgacctggattgtggatgcttgctgggacgtggcatgtgttgggaggctctgtgctgcctgctgagcaccagcaaagccacagtggcccctacctctgtgggaggccctgtgccaggtgccctcaaagagtagggggcccatgagggtatgaccagggggacctgatttcggctgagaagttggcggggattacaggcctg

SEQ ID NO: 63001 - DNA, 1025 bp, Homo sapiens
tagatggagatgcttcactgagtggggagtattggaggaggagcaggtttggggtggaagcgttgtccttttagagagattgtatttgccattgattgattcattcattgtttctgcaaatatttagtgtgggaaaaagcatgctagacaccaagagagagtggagtcaatgaagaacgataacagcaacaaagactgtagcgcttcctatgcgaggcttgttccagttgcttcagaggctgtgttacccctgttctagagaggaggaactaggcccagggaggtggggatttgcccagtcgtgggagtcaggatgtgaaacaaggcaccctggctccagagcacaccgtcctctcaaccactgcagagaagctgggaaagagacaaataagtgggtgcttagagcacaatgtgtgtggtgtgccaagagcagctgggagccctgggacccccagggaaccccagccccacctgggcatggtgggcatggctggaggaggcctgctggctttgctggagagtgggacatgcatcaaggtggccagagactgggcttctgggtgtcgtgctgtgactgctgcaaagggctcattgacatatggtggggagggccagcgtattttctgcgggcaggacatttgggggatatggggtgtgaccctgtactatctaaaatcttttacttctggattatctccactttctctactgcatatatactttgtttttatttattttattcatttatctatgactcagccagactctctaaaagagttgacttgtgtttcctagcagccactgagtcagaactttcccatttcgcagtcagggctgtggtcagggtgtctgtgttgtctaaggatataaagcaagccttcgggcactaccaaaacattattttataaggagaactatgagtacctaataggaagaaccaggcaatcaggttatcttttggtgaggaagaagtggtagatgggatcattggtgctttgaagggagtgggtggtgtagactccaaa

SEQ ID NO: 63002 - DNA, 1034 bp, Homo sapiens
ccccaggacaaaaggtagaaaagaacaaagtgttaaaaaatttcttgatacatagccacagattattttcctgaaagttctcaacatttataactacgagcagtatgtaagagagttatggttggaatgattttaatgtctctggggaatttaacaacaaaaaaactttaggcttctttggagagagacatgcccttaactccaccccgccctagaacagagacccagcccatccaagtcagcctccccaggtcctccaccttcaaaacaggcaaacgaaatcatttcttgaataattggtaggcttcaaggtcagatgtttattttagataattcacagcataaatttatatgttttaggtaccttagcccctgaatatactcagttcatttaggactattttagaggtcttgagtttactcttataacctcacatttttttgtgaatttttagttctattatctttgttttcatggcatattattgggcaaagatactatttattcgatgctatgtgtgagctgggtcaggattatgaccctgagttatgtttctgggaaaatgtacccacttgtcaaagatgccgttggctcctgtgattaaggtcagcccacaatgaatgtggggagggctggcagcctctcaaatcagctcttgaccatttctcaagctggggcctgttgtgcttgggggaagagtctttggcagctcagctcggggctagcgtttcctgacatttgtttcgctgaatgttaacaaggttactggaaaaaagggttctctcctaaaataggtttagggaagcactgggatatgcgaagtgaatgagtttctttagggcaggatcttgactctgcagggggcttggaggccttccctagagtggggcttcctaacactgcagagctcttcccaggacgaggggcaagattgggacctactttggaaggttgtttttgtttcggcacctgctctgtttacgaagcgtgggagcctgttttaaattaatgtgcgcctacttagagctacact

SEQ ID NO: 63003 - DNA, 1027 bp, Homo sapiens
ctctctctcctcccacaatggtgcttcgttaattaagcagaaaacccatctctggttagggactggagttgatttcgtttggaatgagtgtgacttcatcatgacctgaaagtgttcagaaccatcttggttagcacaagggcgtggacgtgtgtctactttctacctgatgggatagcatgtttaatttggggttatgacactgaatggtttgccagtaacttgctaatccaaccttatacattccagctcacagtggagcgtgtctaattgccacagcagcatttatgtggaacgtggttgcacaaaagctccagaaagtcaggctgagggctcctatctctcctcaatcttggtttacgatgtctgtttctgaggaatcctgggatggggccactggctctttaagagagagcccgatttggaaatctaggacttgattgttgattatgggcaatagatacattttaagaatgatgttgtaggctgtatgaagtcatttgatgattgttttgttaatggcttgcaggtcagattttcatctttttaaattaattatcatagaaggagaaaacaactggatttcagaattgtcccttgaggtgtactggaaactaaggcgtgagggactcataggggtctggcttggaaagtgtattgctatgtccagtttacacataaggatgtgcaaatccagcaggttagctgagctgcccaggaatatccaggcaagaatgaccatattctgataattactcaggcctctgcctcatctccgctgcccccccgccccctgactctcttctgagtgccagattcagcctccatttgaatgccaaatagacaggaaattagcatgcccagaatccacgtctttagtgcactctctccccagctccaaacctgttactgcttgtgttcaacatctcagtaaagctcaacaacatcgacccattacttaggcctcaaaccttgggtggcatcgtcgattgctcttttctttcataccccacattcaacccatcag

SEQ ID NO: 63004 - DNA, 1044 bp, Homo sapiens
tagtctttctaggccagattatttagtttttgccatctaggtaaaattcggtccaattaagcgtccattaagtgttttaatataagctggagaaggagttgaacctggaggtcagggctctgtggtctattacagtccccctggggtctctagcccaagggagactccagggtcttaataaatgactgggggtttcattttgaggcctttactaccaaagactgaataatacattgggcatgatggttttgtcctaaacattaacagccacaaaaggtagagagtgtgtctgtttatagatacacatgtatcatgaataattagttggggactgtgcatcaggtctctcattttacattcgaggaagcaatgcacggaatgaattctggacctgcgaactctgaatttcaattctctgtctcctacttttactggagtgcttgcaaacagtacagtgtttttgttgtgaagttataccgtgcctgtaatctctctgcgggtggccctcctaagccctacttcaagaaatagctctaagctcatgacacccgccccacccgatgcctacatatgtcttatatccttggagtagtgtttggggttgcaaatttgactttagggagacatactctctgatgataggctaatgcttatatttactgataaacttcctttttgacggtcatgggcttcgggggccacccaaccaaactgtgtggctgcttttatgttgggccaaaagacaggctccttgtgtcctcccagtttcttaaacaatgaagtcatggcattttacagtgctggtgaatggattgagattgtggtggccctggaatgtggcactgctctggctggagggaagatgagagtgagggatggagaggagaggagagcgggagatgggaacctggtggacacaggagggagtgtgagttctgagggccaaaggaaacttgacaccggatgggacattaatctgattctgttatctgaggctgtcaccagtcctccctgtcctcctggcatgcttctgttgaaaccccc

SEQ ID NO: 63005 - DNA, 1018 bp, Homo sapiens
tgagtgacattatttcatacaaaattctcatctctggaggcctttgtatttttaggggttttgtttttcaaatgctttttacctctttctatacttgttcatttttaaatgtttcctggcagagcaattagtattttctggcttactaggtgctattcgattgcattagcgtttgaatattacccagctagttgtggagtggggcagtaagctcataaagaagcaagataatggaatacacaaatattactacgactttatgggtggcataccttgattcttgatccacgtggctgtgttcagatctggttagcacacattgacatcaggggctgagccaccagtgagagtcaaacccagcagccctgtcagtctaccttctctcttgacttgatccagcctcataacttcactttccgcaggagaaacacacctcttgaggtcctctgtcacaaataggcagtgtttctggagaaagccaggaggcagattttagtgctgttcagcatctgtggtctctactttctggatctggtgcattatggagaccatgaaatgacatgaaatagctcagtgctgccagtggcggtgacagggacactagaggtgaaggagggcccttggggcaattccagcaggtgggtggtggctgaaggtccttgtcttctttctgcagagactggccacctgcttcattctttcaagaagcaccaaatccctacttcagtactttgcccactcgtcatgtcaggagcatgaaactcacgaggccttcatttacttttatcctgtaacaccttcaatttttcccacatcctcccttgattcgtggatggacaactatggaggccaatctggctgaggtgaggactgcttgagtctaaattcctctctcctcaaacccaattcaaactggcctgagcaaaatgaatgtattgatccataactgaaaagtccagaatgatcaggcatcaggcatggttgcatccaggggcccatgtattagaaccatctcctt

SEQ ID NO: 63006 - DNA, 1033 bp, Homo sapiens
tcattgtcccttctctttctttccatgtaattcagccagattcgaaccctttagatcccttcctctagggaattaaggttggtagaccagctgagtaaatgtgactcagaaagtcaatatccacctgggcagggatgagtcatttctttctagttagctattcatgtacattttaaagctcgccacacaaagtcattacattgaggctattaacatgtttaatagtgacaataatagggtgtgacccatggcatataaccgcattcagataagaagaaagagttttcttttttcttcttcctgtaattgctcagtcaataccattttcacggaaatacttgcaaacaaacttttaaaaagttcattgtccaaagccttccctgattccttgtttccttcctcttcaggggttctataaacttttcctgatcagtggccggggattagcgagatggtgcactctgtcctgattttgtggttgacctacccttttgctggtgttgagcctgtttttattgcattttttggggtgtgtgtgcgcgtgcacgcgcatgtgtgttttttcaggagggggcacattattgctgctacttgcttattaacctctcaatctagaaatttcagggaagaagagacttccgctaaatttgccaagctagacacataaacagggagttagccattttggtgagaggaaatgaaacttttcttgggtttattagaccacatcctatgtggcttattttatgtctgatttctaaaaagcatgtcatcacggtcaaagttttatttttgcttgttagtcatttgaaacaaatatagatattgcttcatttcctgggtactgtatttttcagtacgtggtatgtatggaaaatttgggtttacacaatgaagtgcactagaagggaagtatttgctaatttagaactctctacattataactttggattagcaagcattcggctaactaaacattttcatttatctcctacccctgattatataaagaagcagatgagacaaccaaag

SEQ ID NO: 63007 - DNA, 1455 bp, Homo sapiens
aatcccagcactttgggaggccgaggcagatggatcacaaggtcaggagttcgagaccatcctggccaatgtggtgaaacccccgtctctactaaaaatacaaaaattagccaggcatggtggcgggagcctgtagtcccagctactcaggaggctgaggcaggagaatcgcttgaacctgggaggcagtggttgcagtgagctgagatcgcgccactgcactccagcctgggcaacaaagtgagactctgtctcaaaacaaaacaaaaaacaaaaaaaatgtattttaaaatatattatgatcattgactttttcttttggtctcctgttctacgaattgtaatataaattcgtattattgccaccacgtaggacacagaacagctccatcgccctgtacatgtcctgttgctgcctttgtgtagtcactggagatgtgggttttatttttattattttctccatttgatagatagtgccgacttgattcacttcatccattccagggccaatttttcactgttgattgtcaggggctctgctctgctgtttctccagccctctccagtgaaagagatgtaactgcagtgccatagttgtcagcttgttagttattggcaagtcttggttggattttctattcttcattgtgggctgtccttgcctgtacacctagcatgctctggaaccctttgtggatttatgagaattcaagctaattccaacagtggccaaagaaaaaaatagccagggaaatatgttattgctaaccatataggcctcagagtgaaaacggcttttggagtattctgctttgaattatttattttagtctttctcagatgtcaggacagatttttaagatttgggcataatgtttaaaatgaagatggtatgtctgtagattttattgacccaacttggtccccccaggctgtcctcacctgccccacgacttagatgaaaccaggaatggcaagaggagagcatccaagccgcctgcaccagccctcagtgcatccccacccaggctctggaacaagctgctacatgcacgggaagaccagagctgccgtcttcctggctgttgttcagagcttatgctttcttagggaaaagtacaatgtagggctatgtgtgtggtggggatcttctgtgtgtgcttgtcctccccctgggaaatgatgagaggtgacccccgagctcccagctcagtgtcacactcgagtgaacagtagatgatgcttctgccgtgcgttttgctggggaaggtaacagccatcgcacacatgtaaattcttgtgtaatccaattcctgtctttgtaattacttggagacttgccatcgcagccaattgagaagtgggagcagtgaccctgggcagaaagcagaaattggagaggaggggaggggcggggaggtggcatccagaacacagttgtagctctcctgg

SEQ ID NO: 63008 - DNA, 1083 bp, Homo sapiens
catagatttttgttttgttttgttttgtgtgtgtggttttgttttttaaataattagaaacagttctacaattgttaccacccacagtaaaaaattgcttggatcccgcgaagtaagaaagaaaaaaaaataggccatttggtagaatgattaacagggggctttaaagaggaaagtctgctttggagggtgagctttggatgtacagatgctgggaccctcgtgtttttcaagtcccccatttgcctgcattgagaatcaaatgtgaatggtggttgccagtgataggaggggttacaatgcgtgagatggctctgggaggaaactcacattttttcgtacttattaatggtatgtcttttgtgcgagtgggtgtgagtactgagagcatcaagtgtatatttgcacagtgtgtggtccttgctgctgtgttccactccccatgatggtgggctacactaggaggagaagcaagccttagcacagcttgacagtttccattatatggacagagtcactgaggcaggagcaagccaggcctttttccaggtcaagggagctgggtcagtgtagctgggactcttggtttcttagcactgtgctctgactatcaaagctacgcccccacttttgtgggaataaaatcggtgcccttgcatataagttgttcgcttcactcccagccccctcctgagaattaggatgggccaggatctgagttcagtgcctttggtccagtaagatgtgctattcattggcgatccttcccccatagtttcaagactgtaagtggtcacatgggcaaagagatgatttcctaatcctcgtgggagcttgaaggatttgcctttgttaaaggaggaacatcacgctggaggggtgtctgtctatgtgtcccacttaaaccacactgcttttgacttctcctctgtgatgattcccaggcagcctcctcttgccatcctgacttgtttaaatttatgggttgttggcaagcaattttttgatgctattcttctcatagccagaggccaagatcccttgtggagcagtgcctgaatttaatagatgtcatctggacac

SEQ ID NO: 63009 - DNA, 1090 bp, Homo sapiens
aatgttcctaacacactgctttcttgaaagaaaatcattaatcttctcaaatgcaagtgtaaagttgatccattttagctttcttgtccataaattgttgattattggttttgaaggaaaacgcagtatgagtgtggtttgaattttaacactgaaatcatagatgtacaacatgttcattgcagtcaaatcacaagcagagagaacccatttgaaacaatatttaaaacattcctgtcggggcattatttaatgggaatgataagtttcagattttaggttttagaaagttgaggttggctgtacatcaaatctacgatttaactgctttgaaagaacgcctttgcttgtcttcagggggaaacaaataacttaggggacatcagttcattctctaacagtctttcatccctaagtataacaaattgtttcttttattaatgtggtactcgcactatggaagcagttctttggggaaaataatcaggaagatatgctttgcttctcctagatgctacaacctgaaatatgttgctaccttccttgaagggattttctctctctctctctctctctctctctctctctctctctctctctctctctctctctctctctctctccctctctctctctctctctctctcttctccccccaacaaatatagctaacgtaatagaaattacagaacaggatacaatgagatttctttcccttctctcacagcacgttttggttggctaggagaaggcaaggtattggaatatgattatccctatttaaggaaaaaaagaatgatataatttgtcatcttaccagttctcggcattctttgtggtgcgcgcttagtcaatgccgggaaacggcggtctgacagctaatagatatctctgccctcaattgtttagacattttttgtcttttgtgacattgaagaaaagacaaggaagggaatggaagcaactaaaaaatgtcaaaagatcaaaaaatcaatgggccgcaggaatgcaatctgtttaccggggtgtagctgctgtttctgctccgccacaagtccgaggcggttgtctggggcaggcaccgaagttg

SEQ ID NO: 63010 - DNA, 1047 bp, Homo sapiens
tcgacgttatcaggcgctgtcattcgttccttcctattttcgggctgctaattgatgtttttgatgtcagcaagaaaattgaagaaaatgtcatgtgtgaaccagtgcggaagttaataagattgacttcgttgacagaatttacaatgagagcagagaccgcataatgggaccgctgcgaattcgtgtgctctctttggagtcaaaattgacacctcacgctaggccagtggtcgataggagagatggaacatttgggaaagttcctaatctcatttttccccccttaccttttggtctccgatggtgatttagtttcaccggcagctgtttatccagggggctattgctgcggaccacgccaggcccttagttcagactcctggtgccaccaacaatgcttattttttatgctgttttgagtttgaaagcaaaagagtcttaaaaaggttagattaagatgtgtcttaaggaaagatatactaatatcggtcagggtcattgcagatgcttaggttatgtgcaataaagccgaaacacaaatccctccctgaataaagaaaccatgttggcactaagatcagtccttgaacataacagaaggttataacttgcaagcaaaaaataataaagttcttggccacatgtctccacccccaaaagaaacattttagccatggtgtcccttaaggtgtttttttttttaaaaaaacttatcgaaggtttcaatataatagactaattttccagttatgtggcaaagtttattggatttgtgtgtataattatggattggattagttgagtttggttcagtgcatctgattatcttctggcctttagggaaatgcgctaaaaccctaatatgtccactacccccaagcggtctctttttgaaggcgccgcacaaaatgtggtctctaccagcgcttggcctccaaggatcttcagtgagagacattattcttggaatatccaattaattccacgggcagtgatcagttagcgcttcttcttcctttctcgccatttgaaatgctaacacaa

SEQ ID NO: 63011 - DNA, 1048 bp, Homo sapiens
taagaaatcgccgtatatatctatgtatgcatatatgtataatatagttataagtgatataactctgcaggacatagatatagatgttgagatgatttgggtgaattcaaatatgttggttatgccaggtaagctgcaaatttttaagcttaattccttttaattagtcttctgcctatgttgtagagaaagttctgtgttttaatgatctcgtaaaacgttttctgctactgggctgattgcgcagttcgttaagcttctgttagtttaatttctgataaaacttccatttcaactttgcggcaccctaaatgagaccatcttggctccgaaggagtctagcgggcactctttccgaatggcgatttgggatctgctgcatgtatcagaggctttcgttgagttgtgttgtttcctgtgtgtttatgacagaaagatgtcatcgttaaaggaaacttaagagtttctgtaaatgtaatggttcatcctgaataaagtgagagagacagtgcttggaatctggggaataagggtggaaagagctgagctgatgaaggtgtttcttgtcaaatttgtataggaattatttactgtgctgtctttcctgagccgctacagtaaaagtgaagacatggaaaattatcccagatgggacgaatcgctcgttctctgttctttttttaaaaagaaaagatttcagaaaaaaaaaaaagtcgtctttttctttagaacagtatgaataaaatctggacagctgtcgaaaaagatatgccgtctgcatttttttttaatttctagccaccaccataactaaatagcttgaatagtacctcttttcttttttttccccttcatacataatgatctctacttcattaaaagcgtattaatctggttcccagtctcttgggagacaccttaagatgatgatattgtgggttttttccccccgaattgtttaaaaaaaaattctagcagatttggtccctgtcagtcagaaataattgtgttcttaatcttgtccctgatggatgactcggagttcagc

SEQ ID NO: 63012 - DNA, 1062 bp, Homo sapiens
attttccaggttcgaatgttcctctattcctccatcccaacacctccagcccacccaccacctctcaccccccagcccttccatcctccttttgaggatagagaaaaggtctttaagaagagctgagcttggtcctctagacccttcatgtttggcagtctgtttggtgtgttaccagctgggtggttatagtatagaaagggccaccccaagaaaggccaaggacttgaagtgatcgagttagttctaggtatttgcatgtgtgtgagagaatttggatgaaaactgactgcacgtttctcctctccctgcttgctctgttcagtcatttcccagcaagaagaattttaatgcctgtgtgaatccatgagaaactatgagtcggcaaaatttcacagacggcagggagaatcatctctcttcctcttcttgctgtctaaatggatttgattccagagagggagagggagagaaataaaagccagctattgataatttacaatacaaataagcagcacccttcctaggaggctctcagggattggagacgctctaactctgcagcctgcgggggtaggttctgcagcagcccggccagaggatgcaggctgtgtactgcggctggcagggtgggctttgcttttctgcatctcacaggcagatctcttttctcttaccaccttgtttctccaagtaaaactcgaaccctgtgaaaccttctgtcttttatttattatttccaacaggcagtgctgtagctatcgatagaagtcttgtccagggaaacaatccaccattagctgggagcaaggccttagacagaaaggagcaacattcaactaaggaagaccccggccacggtgatgcatgggtcctggctagctgcgaggggagaggggcacgggccagggtaaaatgctctgaggaagcccacccatttggggccacgggaggaagtcatgactgctgtttttattctgtgtatatataagaggtttgcaggatgcaaaagcaagtgttggcctgctgggttgggatgggactgtccatgcaggcctaggc

SEQ ID NO: 63013 - DNA, 1019 bp, Homo sapiens
cgtgcctcctggaggtggggccttggggtaggaggtccccacaacatgtggaaacgcagtaggcatgggagattgaagtctccacttctgactcacctgctaatgggaaaagtgcagactcttgggctccataatggggtaggggttgagaaggtattttaaaagccaggcttagtggggaaataaaaactaaagcagacccacccagagagctgtcttacaactatctattattttcacatggactggggggagtatgggatgggcagagttgagtgcatcttagaaaatccaggtgagaggctgtggccaagggaacccacgggcccggtgctctgaagccctgggctgctggaaccggcttgacggtgtctttctctgttctcctccccacagtctaacaaagtgccagtggtgcagcaccctcaccatgtccaccccctcacgcctcttatcacgtacagcaatgaacacttcacgccgggaaacccacctccacacttaccagccgacgtagaccccaaaacaggtaggctgtgggctacggagccaaggtagagtgctggtcctggggttctgggggaacctttgaggcctccacaggaaccccaggggtggagcagtaggggactttgggggaacggtggtgggggggcccctgttgcttttctgggtgttgaaaaggaagctctttggggtggttgaggcctggtgtggcagtggttttccactccctttggagaagttcatttgcagtgttaaagatctctttatggcttccagtacccctgaaggggctgtcttgggaacctggctatgagtcctcagtatgtttcaggagtggcttttaactctaagagcctcaggcagacatggatgcaggaatcatattgaaggcatttcttgggttcctcctcagcttcctgggaagatgagacagcatggctttccaagcctcggctccctcactggctaagaggctccagtcactacttgacaatgacttgttggtatagcct

SEQ ID NO: 63014 - DNA, 1017 bp, Homo sapiens
tttttcccataacagttgtttaagcagtgatgacagtgatttagagttgaactaactgtgcaaattgaatatgcagtatttctttaaaagagactggttaaaaaaaaaaatggaaggaattcagtaataaacctccttaatctaatggcatttttttcattgctcccactaagttttctcacgcaagcatgcatccgcagtatgattattttttcctttgcttttttttattttagttttttctttcttttgcttttctgctcataatttgcaagtccactagcattttactgactgtgcctgcttaaatgctgctatgagcttctaactaactcctaacagctcattcacacagcctgtttacctttatcttttcctctcttaataattaatgaaaatagatttaaaaaaaagacgaacgttccaaaagctgcaatatcccagtaccacaacccttttctttctttatttctttctattttgtttcgttttgttctgtttttatttgtaatttttttctttttttaaactattgtattctgagaagaaaaaagcatgttacaaacttaattccctccttcgctttattttcttctttaagaaaaaaaattgagagaaaaaagggaaagcagaactaaaagaggaaaaatatttaagagttattccatgtctaacttccctttgtcagctcgaaccaaatctgagagacagtccttaaagaagggatactgcagctttatttgcaacagctaatttcaaaagttgaataagaatgtgacttttacttttttttttttaattaaagaaagttaaaaaacgaaagtcaatattttgcaattagtaaccaggtcattgatttattcccttttttatttttatttttttcttatttgtatctttctcttccccccccccccccctctttctctctctctctctctccctttctcccacgttctcctcctctgctcgcttctctcttgaactcattcagacctgagcgctcctaagaaatgc

SEQ ID NO: 63015 - DNA, 1051 bp, Homo sapiens
ttagctgacattgttttacagtgctgaaaaagaagcgtggcattgaacggcatgcaccagctaaagggctgcaagcagtgagtcatgcagtctcagactgcagcgtccctaggcctgcagaattaacaaaatatatgtgtgtatatatgtagcattggttccaaaaggaatcagaacagcccagaagtgtccaaattaagcacccatgttccacctgcaggtctccatccagcctgcattctcagggaaagtgtaggtacttccttcttggtggagggataccgactagctcctgtctcatttcctttctttaatgaccacctttggttaaatgtgttgtttctttgttctgatacaagcagtctttgaatttggaatattacaatggtaggtatttcaacaccctaaacacgcttccctgtttgtagtgcctccctcgtcacgtgtccctccccttcatgactttgccatgtgctccgtgtttagacgttagatcagatgtgcatcccattacgtgcatgcccacgagtctcctgtgtctcttccccccttctctgatgccaatacgagagatcggtgaagtgcctcgtgttgaccccagcacacattagaggagagagggcctgagagtattccctgagagggagccacacagacagccctctgcctgtggaatgagggatttgggggcgagttgaacacccggcaggagaggaactccccaggcattctgtgagatggtagtgttcacagcgctgacagatgtccctttgacacagtcctggggtcttctctgcacaacagaaaggagttttgtgacaaagttgatggaggaggttaggtatttaattaggactagccagggagggcagggactctgttaagcagtgaatttgtcaaaattttacttgtaccaggtgggaagataactagctgtggaagcctgttctgagatgccctgccatggccaatgactggttaaccacaagggtcactaaaagagagggtttctcatgatctgtagaaatgtacaactgacactattgtgtgc

SEQ ID NO: 63016 - DNA, 1037 bp, Homo sapiens
gatgaagcctaggttgggggtgctaagagtatgggttaccttcccccttttactcaacttttccttttaacgtggctatggccacccctggcttaatgctaaaactcataggacaaaatgtacttaaaaaaaaaaaaaaaggaaaaaaagaaaagcagttgccaaccgaggcattttctgactcgtcagaaatgtgtgtgcgtgccagctgccctgtgctcagccaccttaggagacccattgctctgtcgccatagtcttcatgtcccgtgttccagatacccctctcattcctatgatctggaaacttccacgtcatgagggtgggaggggtgaggaaggtaccagaatgctcctagccaatcagggcttctagcttgccacacaaggtttctagtttcatttgacatttgtggacattttaacaagattctgttttgagcccaccaagttgcttttcccatcttttcactctgccctaatatagcatggaatgctgcttggtgctgttcccttgtcttcctggttgttctccctgcttctttctttctccctttcctttcctctctctgtttttctctgttgctttctcagttttgcttatgccctccccctccccacctcctttccttctcccatttttaaaatgcatggacatcttagttttttgagcatgttttgatctgcaggctaaggtggtttaaaactctgagaggcttaattatttatcttggtttctgggatggaagcagaacccatagtctatttactctctcccagggagaaaaaggaaccttgccaaattgagggtgagagggggtggtgcttgctcccctagagttccttctgacccagaaggaacagacagaccctgaggccactagcccccatgaatctcagcctctgggaggcagggaggactgagcatgctcccttacacccctcccctccttccctgccttcctgccatcttgctgagtccaaaccccaagcacagaggggcatgatcagacagctctggggcacagactgagagg

SEQ ID NO: 63017 - DNA, 1161 bp, Homo sapiens
aagggcaccatgaatgcagtgccgttactttttttttttttttctgtgtgaaacaactcttattgtgatgttacttgttattgtttaaatgtacagaaacaaagggtaaaaatgtgttaatataccttgttccatggtgttgttcttttggggggaggggacgctactcaacacttaatagaatcacaacgctgttgggccagtagtatttattgctttagagattgcttgtcgtacctgtatgtcgtccctttttaaatatgttttcctttttcttgaaactgtataaagtttttttcccccttagcataagcatcttatatataacaactcatttgtacaaggtttttaagtttatatataaaatgtgtatatatatttttgtttcccctttttgacttttttttttctgtatgaaacccagatgtcaccaaatggacattaatagttgcattaaggatcagtagcattaacaaaagttgctttaaaagccattatgtaaaacaagacttgaaaatgagtgagggaattttagcgacactgtctgagcagcagtgggaaccatcttcgtttcccctttgaactcccagtgggatgccctaccctgcgcccttaggacccggactgaccgtgtacaaaactttacgtgccaaaattctcagtgaatttagctttctccctctttttgatgctgtaatttttgttcatcatgttttgctgtgatgttacataggtagatttgtatgtagttttaatgtcacctataacaaaatgtgtttggtagcagattgtccagaaagcattttaaatgaagaggtataaacccttaagggccaaaattctgtatattagattactcttaaacgaaaaaccagctgccgcttttatgtacacatattacatacgagtaggcagcagactttaaaaataaaaaaaacctaggcatgttgatgttgcaaaatgctgtataaagctgaaacctgttcattcagtgccattgtagttgacatgaagcgattgtaaaactgtctccgatttttctctggtttattaaaatgctaactataacattttttgtgaatactttgaatgtttcctaacagttgtgatgttactgttccgttttatgctcttattccaagttcatttttaatggtttgg

SEQ ID NO: 63018 - DNA, 1031 bp, Homo sapiens
cttatatgtgctcaaaataatataaagctgtgtgtatattttaaggtaacatacacatttttgtcaagatagttgcaaaaaatgtaataatatttcactcttccgaaccctttttgagtatctgacttcagcaagttgtctacaagtgaaagaaacgggaatcatttaataatcattttgtaagtcagtttaagaacagactaatacacaggactccagctcagcaaagccttttgatgtacttcccagaaattattaaaataaatggtgtgttgtaaatactgacatttcaaagtcgtttctttaaatgtacccagtggaatctacatccatagtgattttataaccacctttatccattaaaagaatacatgaacagctctcctgtaacagctagaacttttatgtcttttttcccttcaaacttggttttttcattctcttttcctccacattttcttctgatgtaatagatttagttgcttgaaagtcttattgatcacaccacatcatatacctatgtaacatatacatgtatgcatatgtgtatccatataaattttaagacagttttctagatatcatgagtattaaaagaaagttctcctagactaagttactgtttcagctttaatgaattcacaattgatctgaaaaataaatgttaatatatcattaatattattaaattgtcattcatcaaaataattattaaatagaaattgcattgaagtttcaacttataatggaatgaaggggctcttaataagttagtttctaaagaaatggacaaataatacttattgctggaataagaaagaatttgatattacctctttttcctatttttcatttttagagataagatgcactgagaaatcatgaataaatacatgagatggtaggagttttgttacagtcatgtcacttaattctttgaattccttctgagttctggaccaaaaaatgacaacttgattaggtctttccttaattatgttggaagaattggcaattatctaacttacaaa

SEQ ID NO: 63019 - DNA, 1054 bp, Homo sapiens
aggcacagttctaggtatcaggacacagcagtgaacagcacgtacatttctgttcccaactgcatagaatgatgtctgctttgatatttaggcttgccgagggaccgagcttgatgatggcatccaggccgactcggggcccatcaatgacacagatgctaatcctcgatacaagatcccagtggaagctgacttcctcttcgcctattccacggttccaggtatcatgtccattgtctgccaagcatacttcagtccattccatcatcaaaacacagatttggggactgtattcgtttcctcttgctgcagtaatacattactacaaacacagtggcttaaaatacacaaatgtattatcttgcagttctggaggtcagaattccaaaataggttggcagggctacgttccttttggaggctcaagggaaaatccatttcccagcctttacgtggcatgttagaaccacctgcattccttggctgtggccccttccttcatcttcaaagccagcaactttgcatctctctgacccttctgtcgtttaccgtgctctctttctgaccacagctgagaaaggacacctgtgattagatggaacccacctggatgctccaggatcatctccccatgtcagtccgatacccttaaccacatctgcaaagtcctttcttccacataaggtttcatgttcataggttccagggttagggcgtggacatctttgggcaccattattctgcctaccacagaaatgcattcacttttctctccaggaaagctgaattctctcatttgttattattattattgttttagtagttataaggacaaacatttctgtagtactttgcaatatagagtatctttcatgtgttttttctcatatacaataataccgtaagtatttaggaaaggtgttattcctgtcctgattttacaggtaaaataaaagaatttttagtttggatgaatctaagtgatatgcctaaggtcaggtagagatttcagtgcacagtagagctgtgagtcagccaaggttcctttacacgg

SEQ ID NO: 63020 - DNA, 1208 bp, Homo sapiens
ttaatttcaggaaaatgtattgattcaacagggaagaaactttctggtgctgtcttttgttctctgaattttcagagactttttttataatgttattcatttggtgactgtgtaactttctcttaagattaattttctctttgtatgtctgttaccttgttaatagacttaatacatgcaacagaagtgacttctggagaaagctcatggctgtgtccactgcaattggtggtaacagtggtagagtcatgtttgcacttggcaaaaagaatcccaatgtttgacaaaacacagccaaggggatatttactgctctttattgcagaatgtgggtattgagtgtgatttgaatgatttttcattggcttagggcagattttcatgcaaaagttctcatatgagttagaggagaaaaagcttaatgattctgatatgtatccatcaggatccagtctggaaaacagaaaccattctaggtgtttcaacagagggagtttaatacaggaaattgacttacatagatgataaaagagaagccaaacagcaagaagctgttaccacacccagggctatgaggataatgggaagaggtttggtttcctgtgtccagtagtgggatcatccagaggagctggaaccatggtgggggctgcctagtgggagttaggaccaccaatggattgtggaaaatggagccatgacaagaacaaagccactgactgagatggagtgagctgagacagataagagaataccttggtctcacctatcctgccctcacatcttccaccagcaccttactgcccaggcctatctggaagccacctcaccaaggaccttggaagagcaagggacagtgaggcaggagaagaacaagaaatggatgtaagcctggcccataatgtgaacataagtaatcactaatgctcaacaatttatccattcaatcatttattcattgggttgtcagatagtctatgtatgtgtaaaacaatctgttttggctttatgtgcaaaatctgttatagctttaaaatatatctggaactttttagattattccaagccttattttgagtaaatatttgttacttttagttctataagtgaggaagagtttatggcaaagatttttggcactttgttttcaagatggtgttatcttttgaattcttgataaatgactgtttttttctgcctaatagtaa

SEQ ID NO: 63021 - DNA, 1033 bp, Homo sapiens
gtttgcctcatgtggtagcctgaggataggccatccagggacccagcctccttcagtccttcatctgtaaggtcccaggtggctccaccacctctgtgttccaaacagcaagacggaggaagaaggagaagggcagttcttgataaggacacaactcagcaatttcccatctcttctgctcacatctttttggccagaccttagtcacataagcacacctagctgcaagagaaacttgaaatgtaatttctattctgggcagctacatgccgagcgaaaattctcttactgtggaagaggaggagaacactatccggaaccaactgattttctgccaaaagaacattttacacagaggaaagattgaaggcaaaggccccgaggaaagaaagtacttgacttgttaaagagaaaaaactgcccctggaggcattgcagatgtggctgctgtgtcacatttgtgtcattaggtagcagcgattagagaggctatgtctatgctcagcgttctgtcccatgaacatttgaatgtttaatagtctgactctcctgttttgtggacttggcatctgttttccttcaccggtatctgggagagtgggtgggccttatgagtgggctttctgaccctcgcgctgggctgggctggccactaggggtctgaagggacagtgggaaggtagagggtgccttcaccaggagcagccttcattagtgagttttaagagcctgtgagaggatggatcaggtctggtgtgtgctggttcatgctgcacaccgtgtcaggatcacgaaggaaaggactggggaagggtttgctggtgtctcagttaatagcaataacggcagccactattgtgttcttgattctgtgccaagcattcttgttatttaaaaaaagagagagagagaagtccaggtcactgaacagaggttaaagaaggggagagtgggaggatcttaaatcaggtagcagataggactgaacaatgcagagattttaaaaccaggctaaggaatttccatgagagag

SEQ ID NO: 63022 - DNA, 1053 bp, Homo sapiens
gtggaactttctagtgagaggtcacagcgtcaaaaaaagagatgtagaaagtcaaattcactgcaggaaggagcgtgtcagaagagatcagatcaccttattaatacagaatctgaagcagtcaatttaagtaaagtcaaagtcttcacaaaatcagctcatggtgggctgcaaaggggcaacaagaaaatcccagagtcatctaatgtaggaggatcaagaaaaaagacatgtccattctataagaaaatacctggtaagttgaaatgtcaatactcgatatatcaacaaagacaacgtttttgaactttgtgtttattgcccattgtgtgtgtgtgtgtgtatgagacaattttttgtatgtgtttcctttgcttttgtgatacttcatgagcctctaacgtagatatggtttttgcctatttgattttttttgctccattcaattcatcaagtttctattaaacatgccctctatgtaagtgactatactagttaggtggatattacgggctatagaaagattagtaagagaggaatagggattcagcttaatatgaaaggaggaaaggcatctctgtaaataactataataaaaggcagcctctaagtgcttgtgagaaatacaaagtactaaatagtttcaaagatgggaaatgtcacaggttttacatatcatagtaaatgccaaaaattttaaaaccgtattagaacttagtttctctgccctttcatatactttggttgctgccaaaatatacttggttgctgaaagatttttaaagtgctttattgatgttctagatctataatttgttcaatgtatttatgtaaagaatagcatttatatacttcataacatcagtggtgtttttaataattattttgattaattttctgtacttcatttatttatttaaagacagagtctcgctctgtcgcctaggctggagtgcagtggcgcgatctcagctcactgcaagctccacctcccgagttcatgccattctcctgcctcagcctcccaagtagctgggactacaggcacccgcc

SEQ ID NO: 63023 - DNA, 1031 bp, Homo sapiens
aggtagttatatagtaagtacactgttataaacaagcaggccatcaactgggatttggggaatgttttttattttctagtcttgtttgtatttacagggagtgtattttattcccatgagatttgacctctgtgactcataactaaaaaaacatataataaaatattcaggctttgtgtttaacacagtatgattttctcctggacccgattattgaggacagaatgctagaaatgactgttttcttggtttctttagcagtaaactataatcaggaagtcataaacataactttatttgaaaaactgtatgctttgttcatttcttagaagacttacatgtttataggagacagtgcagtgtaatggatagattcacagagacctggaattagatccttgttatttccattttgttggttgtgtgattttgagcaagttacttgacctcaaagccttatatttctcacttgcaaaactgaactattatttacctttcaggattattatttgtattgaaagtaatatatgtaaaattcttaattcacagaaaagcttactaaatgttagcagctttttattgtattcattgtaattattgttattgtaaaataaattttattaagcctggtaagtatctagcacggtgactaagatgtagtcattctttctataccccctgatctaagccactcttgactatttacagaaaagtcacagaagacagattaataaatattttgcaagtaggatatgaaatatacattaattagtctgaagttttgtatgatcacttgatctggtatataattaatattttaacaaaatggataattaagaggtcactgtaccctgaaacctcattagtttggactaattggcccaaatactagtttgatctgcagatttttttttctagaattttgttatgattgagtaacaacagttattgttgttaatcattagctgttactgtttacttcttcctcccaagtttggctttcagttgctaaaagctattctaaatacctg

SEQ ID NO: 63024 - DNA, 1105 bp, Homo sapiens
taatattgaatgacatgaactgcagtggaatgcaaaatataacagatactctttctttgaccctgcttcattaaaaaatgatttattacagctaatgtttttcaaagcacactaggaaatccatttttatggtattacaaattctaaagatgtaggagattatacttattggctttagaagtttgaaaaattaatcaaattttttttgtctactttctaaaaaaagaacatgggagtaaatgaaattaattaaaagtatcatttaattaggttcaagtgaattgaagcactaatcttggagtggataaaaaaaagagatagggtcaccgatcctgtgttagtaaagatgagaatagactatatacgtgtgaaagtaaaggatattctgaaacttaactttaaaggggaagtgatagagaaatcttcagtgcaactgaaacttcagatgcttttgaattgtaatacattgtatgttaaaattaccagtcaaatgatttatcaagaactcaaatatttctactagctaaatcctgttattaaaaatttatctgtatggatttaagaaatatggatatcttatctcctaggttttagatgccagtgtttcttgttcaagacatcacgtttattgaacatgttgttatgtgcagggtactctgctaactgctgaggaaatatgtaacaaaattgaataaaaaacattatggaacctaaggaaaggaataagtcactttgcctagaaacattggaaaagatttctcagagaaggagacaattgagctagaacttgaaaaataagcaggagtgcagctgaaaatgaaagtggggcagaagggacactcctggctgaggaagcttcaggtaaacaagcatggaatcacagaggagtaggattcttgctccaagaacaggtaaataatttagtgtggcaagattgtaagagttcatggtaaaagtaaaaggagacaaaggtaggttaggttaggagcacattgtgaaatgcattgtatagcgttcttaatagtttagacttttccttctgtgaggatacagagattgaagtttgtttttgatttgtttttttagtagacggatgacatttgtg

SEQ ID NO: 63025 - DNA, 1012 bp, Homo sapiens
actttagatccaaagatacaaacaggttaaaattgaaaggatggaaaaggatattgtatgcaaattgtaactaaaagagagctgggatggctatgctagtatcagacaaaatggactttagatctaaaaaggttacaagagacaaagaaggacattatatactaataaaaagcccaagctgagcacagatttcacctgtaatcccagctactcaggaggctgaggcaggaagatcacttgaggccaggagttggagaccagcctgagtaacatagcaagacctcatttattaaaaaataaattaatacatagatgatatgattataatgataaaatgattataaacaggcacttaataacagacaaaatatatgaacaaaaattgacagaattgaggggagaaatagacaattctacaatagtagttggagaattatacccaatatatacaggacactctccccaacaagataacactacccaacaacaacaggattgcgtatgggacattttccaggatagaccattagttatgccacaagttaatttcaatagattttttttaaagataaatattaaagtatcttttctgatcacagatgaagttagaaaacaataaccaaaggaaaattggaaaattcacaaatttgtggaaatcaaacagcacactcttaaataaccagtggaccaaagaagaaaacacataggtaattattagaaaatacttagagacgaatgaaaacacaatgtaacaaaacttatggcacatggtgaaaacagggctaaggaagaaatttatggttataaatgcttatattaaaaaacaagaaataacttaaatctaaggtgtaatatcttagaattttacaccttaagaatctagaaaaagaaaaacacagtaaacccaaagctaaccgaaggaaggaaataaagattcaagcagggagaaacaaaatagataatagaaaagatcaatttgggtacaaccaaccaaaagttggttctctaaaag

SEQ ID NO: 63026 - DNA, 1043 bp, Homo sapiens
agtcttctttcagtggagtcaacccaaggtgctcttaatttcctcagccatgtgttgtgacagcacatttgggatgttgccaaccagagaagcttagaaataaccaaggcttttattgggggctggtcatgtaggcagcttctgcctgctgtcatgtttcaaaagttcagattctcagaaggaaagcaggtattcagtataagctgtattgtttgtacaaacattttaggcaaagtgagccactcatcagttctaggaatggtgaaaaccctcccgaaatctaagctcccagaagccaggcaagagccaatcttgtttgcacaccttttaaaggatagcagtcagggctactatgttaactctttctgcacacactttatattttctttattcagtagtttgtctatttattctatgttcttaaataaagtactatgaaaacattgccaatttatggcacattttcagatgtttagtgtggacaacagcctgatatcagtgtttgattggctttcaaatttgcttctcatttatttcccaatttagtgttcagcgattttgatcctttcatttttatgtttccattgttcttagtataaaaacgaaaattttccctctccagcatcttttccacacccttctcatccttcctcaaggctgttctagcctccctggctttccttcagttcctaagtatcattgttcctcttgctttaacaccttgacacagtgttccctctgcctggaatcatcgtctcatcctttttgtctagtgaagccatggttgtcttctggatctcagaatgtctccattacaggtttttgtttttgtttttgtttttgtttttttagcatctttcgaaatgcctcaaatagtctcaatccttgcatttaactaggtttttacattgcctgtgattaaactacacgttctactatagtatatacaattgtaattgagtgcatttagaagtatacgtctctcaataagacttttgaagctttaaaaatatgtattttaaaaagtggttttattactaata

SEQ ID NO: 63027 - DNA, 1148 bp, Homo sapiens
gaacaaatatctaaaattagaatccaagaaaactttctggaaagaaaagaaaccttgaatctacatattgaaagggcctaccaggtaccgggggtgattgacccagaacagtccaagaagtatcctagtaaaattattatactttaaacattgaaaaacaaagaacgtaacttacaaagacatgtaagttagactggccatgcttttcacaaataacgtacaaagcaaggcaacagtagagtgacatttcaggaatcttaatgagtgtaaaccataaaccaaagagattatatccaaccatttgtccttcaagaatcaatcaaggttaaagaaaaacagtttgaatgtcccaaaactcagagaatactgtgcacatgtgccctttctggtgaatctactatagggagagctagagaaccatgggtgagtagggaaactgctaatggatggatggagattttatacatgtagagctaacaccaaaactaagatgtagagttttggtatattagtcatagtttgatcagagaagcacaactgggtataataatgagagaactaatagagaattcattataggtagttgaccttatgttattgtggagctacatggctaactagtatatgtgaggctgttgcttttgtgtgctcctgcaacctacctaagtttactaacttttcacagtcttcaagcagaggtgtgtgtgcgtatgttcttgtgctttggtttggaattaaagttgtaattactggcaaattatatctcctgatggcaggtcaggcagttgagaaggaaagatggatataaagtagcagagaacaagggcaaaccagaaagaacgtgcaaacatgaactagaacttgcaaggataaactgaaacccatgtaagctttagtttagatgatgaagtggagcaaaacactcatctggcccagaaattagagacgcggaaggaggagatctacaacccttatattcttattgctttcatttgccttgcatatctttttctacccctttacttttagtctttctgattcacattttcttagatgtatcttttatgtaaagaacttatccaaatctttttcttttaataatgagttaagcccattggtacttattcatatgactggtaatgtacaag

SEQ ID NO: 63028 - DNA, 1002 bp, Homo sapiens
tcatgtgtgtttttatgtagtaatcaagattgttatgagatttaaatttgttagttttttatgtgtgttaaaatgcagttgaagatcccagcgtagttctacttttcgtttttttttaatctatggacttttaatatttgtgatccaaaacctaatgtgtagatgatgatattcaaacttaaatatttaataatgtttaacatataattttttcctttcagatggtcttcttattattggtgttcactcggctaagtttccaaatgaaaaagtcctggataacattaagagtgctgttcttcgatacaacatcacccaccctatggttaatgatgcagatgccagcctttggcaagaactagaagtttcctgctggccaactctagtcatacttggacctcgtggaaacatgttgttttctttgattggagagggacacaaagataaattatttttatatacttcaattgctttaaagtattacaaagacagggggcagatcagagataataaaattggaataaaactctataaagattctttgccaccttcaccattgctatttcctggcaaagtaacagtagaccaagttactgatagattggtaatagcagacactggacatcatagaattttggtcgtttggaagaatggacaaattcaatatagcattggaggtaaaacttgcttctgattacgatagataacgtgttttacagtaaaaaaatagttcaaggtaaatataaaagttgaaatgtctaaatgaaaactaattatagaaaagtgatatacattgacttaatttcctaataaaaattttttgttaattaatatgatgtctgaattaacctcttctcactccctcataaaacaaacaaaaacactgaaaaagctccaggtcaaaaagaggaaatagttcagcttttaggtatatttgtatattctatctttttttttttttttaaactgctgtacttactgtttcttatgaaaacatacgtt

SEQ ID NO: 63029 - DNA, 1070 bp, Homo sapiens
ggatggctggttggcttgctcactattggattagtgcttggcacatgtaagttttaatgtgtgtcaattactagctgagcacaactgaaatatgtgcatttaatttttagaaacatgtattttgctacattgtgttttaaaatttcattttaaaatttttgtttagttaagatgaggtcaatgccagatctgctggaggcatgatgggagatggggataagaggggaaaagtagaggaatggacaggtgggatatgaaagggactgattatgtgcatttgaataagaagttcattctataattgattggccttttttcataataaaactttgtactgcacatacactctaaatgttctattgactattgaaaatctttacacagcaaaagacaaaagcaaaagtaacattcattgcataaaaccatcctttgaatttctatagattgacctagaagctgagaaggtgagcactgtagctggtattggaattcaaggtacagataaagaaggtggagcaaaaggagaacaacaacccattagttccccttgggatgtagtttttggaacatcaggtatgtgaacttttgatattaaatgtaaaggtaaattttacttcatgtaagatttaaaaatattcttgaggtggtcatttggattccattactagttattttattttatacttttatacctatgcctcagagtttgttaattgtgtaaaaacaaagctagcagtaatatagatatatatatactagagtatgtattatatatattacatattttatctataagatagactatgtgttactctaaagaattatatattagatgcaccctccaattaatgtagttctgaatttcttatactgaaaggattatagtatcagaacttcaaaaggttattcatgaacagtaatcagtaataataaaaataaatttattcataaataaggaacttatagtgtcattatatactctagtttgaaaaagaaatcaaagaggcagctgcttttgctttagatttaaaaaatttatattaaagtatgataacttctttaaactttta

SEQ ID NO: 63030 - DNA, 1068 bp, Homo sapiens
tgcctgaagaacttcttatgacacaggtctgctggcagtgatttttcttgcctttattctggtctgaaaaagtatctagctttcatttttgaaagttatttttattgcgtatgtgaatctggattaacatttttttcttttactattttaaagatattactccattgtcttttgacttacatagttttccacaagacacctgttttaatattatctcttgttctttatatgtaaagtgtatttttttctctggttgctttcaagattttatctttggttttcagcagtttgatatatctaagaattatcctgcttggagttcttgaatctgtggtttgatgttcattattgtcaagaaattctcactcattatctcttcagatatttttttctgcccctttctgtctttctctttctgggacttcagttactcatgttagatttcttcttaatattatattcaataactcttgcatattgtgttctttttattcattcttcttattttttctttttgtactagtaatttctaccaatttatcttcagtcattaattctttcttcagctgtgtctagtcaactgatgagcctgttgtattagtccattctcatactgctataaagatactacctgagactaggtagtttataaagaaaggaggtttaattaactcacagttccacatggctggggaggcctcaggaaacttgaaatcacagcagaagatgaggaggaaacaaggcacatcttacttagcaggcagccaagagagagtaccaagggggaagtgccagacagttactaagcaaccagatctcgtaagaactcattcactatcatgagaacagcaagagggaaactacccccatgatccaatcactttccaccaggtccctccctcgacttgtggggattacaattcagattacaattcgagatgagatttgggtgggaacacggccaaaccatatcatttgtagaaggaatttttcatctctaatattatgcctttttaatatagcatttgtatttcttacagattcatctctgctgaaattccttatcta

SEQ ID NO: 63031 - DNA, 1688 bp, Homo sapiens
cttctctgtgacctcactgtacctggtgtatagttacatcactgcactaagttttcctgccccaacccgctgccccttcctctttctctctcttctctccttttgattgtttttatttttagccatttcctcctactagtctcttaaaggaaaggatcctctcccattcatttttctgtcccttgtacctagcacagtatttggtacctaagaggagctcagtaacggtttgaggataaatgaataaaagccgttaaccggaaaggctgtcacgtagccatggaaaatgatcattgcaagttaccgttattaatagaaagctgcttttatatagatccttcaaaatagcagatattccaaatagtgtgtatgtttgtgcatgttgctttggacacacttatgtaatgttttaagacatttaatcgtttagcaaatatttatgctaggcaatagggatgaaatatgctcactatgttaaggatacaatgaaaagatgtggttgtcatcagtgaacttacagaggaagaatcagatcagcaaacaattaaaagttagtgtgtgcaaaaggaatcgctgcaaattgaaattgttcggctgggtgcggtgggtcacgcctgtaatcccagcactttggggggccgaggcaggcagatcacaaggtcagtagttcgagaccagaatgacaatatggtgaaaccccgtctctactaaaaatagaaaaagttagctgggcgtggtggcgcttgcctgtaatcccagctactcaggaggctgtggcaggagaatcgcttgaacccaggaggcggaaggttgcagtgagctgagattgtgccactgcactccagccaggacgacagagtgagactccgtttaaaaaaaaaaaaattgaaattgttccttatataagtaagaggaagacgcaacatcagtaagatttgagttgtcaaggagggcttcttggaagaggcaactaaacagtgacctgataagagtataggagttagggagagtggaaagttttccaggcaagaattggcactagtgatgtcagtagaagccagatcacactgtgccttgtgagtacttttagggatctgaatattctacaagcctttttagaaaggtttaagctgggaagtgacatgattagatttgtgtttttgaaagaacattggcagcactcagagtggaacaagactagagacagagataagagataccactgaggagcctattgctgttatccaggcaagagatgatagtagcctgaacagtgagattaccaataagattttacatgaggcataattataaacagcagagaagtaacagaagttgccagaatatgctgttctgggtgatggctgttttaggcatagatgattcagagctgcctgaatttcctcataagtagagttgtcactctccttcttaataggaaattggcactaggaccacactgacctgtgttttaattttaaggatgtattatctttattaccgatcttcaggtagtaatgacccttagcattttaaaagttattgtttctccctactcttttctttatttaattaaggaaactcctttttaaagtattaagactccttgtagactcctttcaattaatttgttcagcatattagttattacatatattgtacttgctatgtttatatgtttcttgaat

SEQ ID NO: 63032 - DNA, 1928 bp, Homo sapiens
atttactttatgttgcagactcctacaatcacaaggtgagtcgtgacagaattatataatatcttgctttttgtgtgtggcatttaaaatgctgaaagatctgtgagcctcctacaactgccactctaaaatatagaaaggagtaacagtctttgacaactataacccagcctgttctgctcttttcttggtcctttctttgccaagaggttatgatggtattctgaactagggaaagcacagaaccagttccaatggcaatagccaacagttgtgaattgcaacccatcaaagctgcttagtaacatattcagtatatcaagagaaggcaagtagcagggaaatttatatgtcatctaacaaatgaacgtttttgagctgttgcatagttacagtgcttgttagtaaataattttgttttcagcatttccatttttgtctattaaattgtcttaagttttattgcatttttactttttacaaaaatcagtggataataaatgttcatgcagtacttcatgatgtgagaccataaatttaatataattgagacataactgtcaatcattaagtttaacaaaggtagcaaattctcaggcaatgctagatgctcaggaagacaaagtcagttcagttgtgaaagtgtgtcccattgtgaagaaaaacaattcaataaaaaaaaattttttttaattccagaaataacttcatcaaagattgcttccagaagacaagatggagctaaggattttacatagtctttagttcttagaatagaatatctccccttagactgcaatttgaatgtttggcttttcaagaaaatatggaaataactattccttttgtgagacttattgagaatattaatggcaatcagaaattagcttgcttgataccatactcttccatacaacaaacatgagattgatcttcagttatataagtttttgttctttcttttttagattaaagttgtggatccaaaaacaaaaaactgtacaacattagcaggaactggagacacaaataatgttaccagttccagttttacagagtcaacttttaatgaaccaggaggcttgtgtattggagagaatggagaattattatatgtagcagacaccaataatcatcaaattaaagtgatggatttagaaactaaaatggtatctgtggtaagtaattttaaaatataagttaaagaatgtggttttaagaatgatactaagatcctcacagcactgacagaggcatttttggttagaccatctccaggagagtattaagtggatgcttctgttgtattctttgacaaagagaccagcaggactgctttaaggatatccttttattcttaaaataaaagttccatctgtgctgagagtttgagaaaaatactggaaattggagataatctaatgaaccttcaagaaaaaaaaaaggagaggactcagatctgtttttaagtgtacagacatactgacatacactacatacacctgctctgtgggttgggttatttagcttattgtttttgtttttttttttttttcagtgatctttagattaacatgtaacctttgtttgcctgtgatgaatccattaccaaataatctaacaaaagctttagaagccactttctcaagacatcgaaaataagattgtggaagaaacttaaatgagttatagtcagtttttaaagatatggacgtggtttcttatagaattttcaaggggaaatgtctattataaactaactcttgatgtatgacatttacctgaaaaaaatgcaacagtttttttctgaaaaactggtaatttgcacggtatatttttaaaagaaacatagattactattgcaacataaatgtcatttctcttcacgtagatctctgatataagatgaataacatcttcttatagtt

SEQ ID NO: 63033 - DNA, 1139 bp, Homo sapiens
gtaattacctcataaaccttttctctccacaagcaatcaaaaaaatgaaatgttctgtaataaaagggtgtataacatactctcttttatgagaataggccttagttattttattttatttttgagacgtagtctggctctgtagcccaggctgggagggcagtggcgcgatcttggctcactgcaacctctacctcctgggttcaagagattttcctgcctcagcctcccaagtagctgggattacaggcgtacaccaccatgcccagctaatttttttgtgtttttagtagagacagggtttcaccatgtcagtcaggctggtcccaaactcctggcctcaggtgatccgcctgcctctgtctcccaaagtgctgggattacaggtgtgagccaccttgccctactggccttagttaatttttaatctcatttgacttattatgtttctcatttctagatggacaggatgagaatattttggcccaatcattttctgtttaaggacttaaacaatttcacactctaaatgaagtatatacaattttaatttactaatttagaaatatctgagtttatttttcaatataatatacaaacacagtgtttgttatacatgttcatgtacagtgaaaatgcaaaggcattttttagactctattccccttcatttgtctagacagttttaggttagccttagcttatacttttcttgactttcaaaatacagttttattgaacattcttattcttacccactgccagtctgcattgttttttacattaaaagtattatttatagtagactaatatgattttgaataaaatcacacttaagcaatatagataggttcctagaatttatgacgaggataaacctctcacataagaggaagcactagaaagtttatttttaaaacttgttgatccatattctataaggactaatgcatattttttatcttttgcttttcttgttggataaattattatgtccagtgatagtttaaaaagaacaagattttagtgtaagtcacctcacttgaaatgccagtaatgtggtattacacacattttatataatacctggaatctttgccctaaattattctgctggtttgtcgctatttttttcctct

SEQ ID NO: 63034 - DNA, 1147 bp, Homo sapiens
gctaacaaaccctggcccctttacatatgagctctggaggttcgcctggctgcctcaggcttgcagaaggctgccccaatcacagagcctgggtaaggtggaacaggaggcagccccactcggcttttctgattgcatcccacctgtttctgagtgtgttggtttggtttaattcttttcaagggttggagttggaaagtgaaaaccctagacacttgctgtggaatgtttgcctggttgtattggtgtgtccctcttcttcactggcatgtcgctttcaagtgtaccaaaggacattttgttctgttgaaagccacaggaccaaaaggaaaatattgcaactatttgcaaacatacttccctacctgtacaagcagccatatactaaaaagcactaaacaagcacaaatgaacactaaatagccttataccaaaaagcattcttgtaactgtcagggcatggtatgaattccttcctctttaagcagcaacttaccacaggcttggtggctttaagtaatatagcattaagcaaatggtcagttattttttaatgttgaaaacttccaagtgtgaataatacggacatagtttactaccttttgcttttaatatacctggttatctatttccatttgaaataaaatgaaaggagacctcaaactgatgctgagaagtagacaaaatcagctctcagacttaactctccccaattaaaatagtttttttttcccttcccatttttttgtttttaagagatagggtcttgctgtgttgcccaggctagagtgcagcagtgacatgatcatagctcactgcagcctggaactcctgggctcaggatccttctgcttcggcctcctgagtagctaagaccacaggtgtgtgccaccacacctggctaatttttttaaaattttttgtagagatggggacttgctatgttgcccagactggtctcgaactcctggcctcaagccaccaacctctcaaattgctagaattacaagcatgagccaccacacctggcctgttattccttctttatctaatgtgtgctaagcttgtgaaaaatatatgttgaggtaaatagggcaaaacattagttgataaattatgctaattaatgggaaaaatagacatgttc

SEQ ID NO: 63035 - DNA, 4592 bp, Homo sapiens
ctgaaagctttgatgaaatttgtttttgtatggtgcaatatgacagcctgtcattgaatctaaacaacttaatttgcttgtattcataagaagtgttgaacattacaagggcttttataaaaaaccctttgttcatatttcttccctttaaaatatgtaatgtcaaaaatgactcaccttttaaaaattatgcatgaaaacaggtggtaaacattcagtaatacgctatttctccaacatcaagacaactaaaacaaatgataaaaatgtttatttttacactccagcatatcgggtgagttttagggatgtgtatgaatatttaaatcttttaatttcagttttaatgaaagctgaacttaataggaaagctagctcttggtaactagcaatgatcaggcattgtttgcctctgtcaggttttcttatctgttttaggtacattttttcagattctgattgtttgagttaatggttgaatttttaaagtttttagttacttaaaatatgattttaaattacatattaatttagaaaattcctgtgtttacttatattttaaattgtgaaatggatccaatcattagaacagagagaatagttctttgaaactgaaatactttagttttactgaccttgtgtaaagataatatgaagaaccagcttccaaaagaaaccagcatatggcactataaactatttcatttgagcaccattctttaccatggatatattaattatgtattatagtggagtgatcatacagttcccccaaatgtgatgtttcagtgtatttatttaaaacataaagtagaccaggtgcagtagctcacgcctgtaatcccagcactttgggaagccaaggcaggaggattacctgaggccaggagtttaagaccagccttggcaacatagcgagacccccatctctacaaagaaattttaaaagattatccaggcatggtggtgcatgcctatggttccagctactcgggaggctgaagcggtagaatcacttgagcacaggaggtcaaggctgcaggtgagccatgatcgtgtcactgcactccagcctaggcaacagagcaagaccctgtctcttaaaacaaaaaacctcacacatacctaaaataagtatatatctgtaaccaaaggaacttaattttagagccaaatttttctatcttgttggattttttacagtgtttaagatagacacttaagtgttgccgtagtatcaatatttctgtcattgaattttttctcaccccttattatttctcacttacaatttctgagcatgatttttcataattcattatcttcagatcattactataataagataccgtggctcttatgcagatattgcagcaagccttgtttggtttggatttttgcatccctttttctcccattaagggaattaagttttgggatgatggattaaaagcctgtaaagaattgtttgggctctaaaagttgggctcatggtggcaatatccttttaatgtgttttaacattttttaatcaacatcgtttaaaaataatttactaaggattagattatttaatgaatgtctttttttctatatattgaattagatgttatcccaaaaaaaatatcttttcacttcaaaatgaaaatatatgttcaaagatgttttatttttagaatagttataaaaagtattagtcttaacataatgtgtcttgttctttttaccaataataatttatcaaaataagagggaaagtgcaatcaaatctgaattattttactatttgtttctagacacactacttaacactcctaaagactactttgagtaggcaacataactaaatttttctagtttcttatgatacaggttcataaactacaatatttggatttttttccccaaggcacaaaatgtataatggagaccaaatagtgatctgatccatagtatcctatgcctatacactttaaaatgtatatacattttagacaaaaatgcacactccagtattaatatttgtgctaccatctacttggagaagtttaatgagaaaattttagaagaaaagtattacaaacaatattttgactctattacctgttttgccttatacattttagaaactggaaattttttaaagaaaatgctttagttttcttctgttcttcactgtctacagtgtgcttttgtatatggatcaggactgagcaaagtaattacatgtatcagagatacttatctctatactaattcacagacagctcctgatgtaaggatttagagggccttctgccctctgaatatatggtgaggagaatggggtatctggaaaaggaaaatgatctggataaatctgagacctggggggaagtttgttttatatgttcattattggttgttacatatcaaggctgttttggttatgtatcaatattgtggtttatttgagctggaagtgattttttctgtgtatgtatatgtatacacttcaataggttttaattttgaagtgaatatttgccatgactccattttccccataccacttcagactttagcctgtttagttttaaggactgaaaatggtaggtttgggcagaagaatgaatttgaactttgatggggtttttttgtttttactttctatcttcataaccatttaaagcgatttagcttgaaattaaattttatcaggctaccaacatgttatttatttatttaataaacacatttattgaaaacctatactattgtattggcaccatacagggtattgtatttatactagtgagcagaccagggcatttccatcctcatggagttcatggtctaatgaaaatagctggggccgggtgtggtggctcacccctgtaatcccagcactttgggaggctgaggtgggaggattgtttgagcccaggagtttgagaccagccagggcaacatggcaaaaccccatgtgtacaaaagattaaaaaattagccagatgcagtggcacatggctggggtcccagctacccaggaggctgagttgggaggatcatctgagcctgggaggttgaagcttgcagtgagctatgattgccactgtactctatactccagcctgggtgacagagtgaaaccctgtctcaaaaaaaaaagaggaaagaaaatagctaggagacaatcagagcagatcttgggcttctgtggctcatctcagccctttataactggcctgagaagagggtttatctacttgtgcaagtggcccagaaatctcactcgtacatgaggctttggaacatccttgcaaaggtacgctgaaagcaaattgctgttttcctggtggttctgcacgtttcctaacttttatcatagtttgattttcattatttaagaaaaaataaaaaatccaaagaccataagatggcattagattttttaccattaaattattaatgcctatttggtgctcataaagattaatcatgtcacgcatgtttccaatctttcttttgcagtatattattttctaaaaattgttacatgcaaatttaaaccaagatttatcagtaaaagaaaaaaatagaatccttaataatgtaaatgttgttatatatgctaccctggtgaaaatatttttataaatcatgttgtcatttatgctttatgtagcctatttttcaataacctttttttaaaagcaattttttttgacaccaagattgttgatttttaattaacaccagttggtggcactagaaacctgaaatttttcaaagatgaacaaagaaaaattgaaaaggtaatctaaacatggagaatttttaggaaaataaatgaaaaatataattgtatattagagatgtatttttcttctggaatggaattctttttctaaaatgcaaatcgctatccattttgactgcaatgatgaaacttgtttatcttccagaggacatatatatatgtgtgtgtgtgtgtattgtacagatacctttaatttgattacactgtttcttgtaaatatgtttctgtataaaatgaaacttttcaagaggattctatgtatatattgtacttattaaataggtaatgcctatttaccaacttgtagtttgatggcatctttatttgtttatatgcaccatttgctaaacagactgattcttcagactgttggcaagactgattcaaatagcttcaatttcctttttttaactagactgggaatttttgctttctatagttgtctttattctatcaatatgattggaagtcagtgaacaatagtaagcagattaagttgaatgctgggttgtattttaaatttttgtttaaattattgacagcaaaacttagcctgtgtattaattggttttcacactgctgtaaagaactgccccagactgggtaattataaaggaaagaggtttaattgattcacagttctgcgttgctggggaggcctcaggaaacttacaatcatggtggaagaggaaacaggcatatcttacatggtggcaggtgagagagagaagagggaggaagaacttgcagacacttataaaaccatcagatcttgtgagaacttactacc

SEQ ID NO: 63036 - DNA, 1051 bp, Homo sapiens
cttttgcagattccattttttttaattctacaagtacacaactgatactatcattttgttttgcagaataattcaaagttatattttacgagaagaatcaggcacactttcttcagaggcatctgattttaacaaagttcatttaagtagacggggtggcatcatggcatctttatatacatcccatccagctgacaatggattaacattggagctctctttggaaatcaaccgaaaattacaggctgttttggaggatacgttactaaaaaatattactttgaaggtatttgtgtttctcattcacacaccaaccagtaaacatggcaaaatgatgcctgtttcacagtctgatctagcaatcagctgggctgtttctgtaatgcaaggcagtcattttacccaaagatgaagtttcgtgattttctctttttaaaaagtatagttttttatattaggaaagatgaaaaatagcaaaaattaattttgtatttgacagacactaagatgtcattaaatttgcattggatgggctttgacatataattagttttgattgctaaaataattttttaagattatgacatttctgatttatttttcagctttattttattttttgcagttaatattttatttttgctgtgggtgggccttgaaaattagtagttagtttaaaaataattttaaaatcagtaatagtaagtaatcattttatgcattaaaaattgctgtagcttcagtagaaagtttgagtgttactttgaaatggacaggagtactttactgaaaacagctgtgtgtcactagtttatctgacatagcatttaggactaaccactctttcatttccaaaatttaggcaaaaaatagttcaaactgaattgttttatttattatacttttgtttttctcttccctttcccctcaccccaattattaaaggaaaatctacaaacacttggaacagaaatagaacgtcttattaaacaccagcatgaactagaacagaggacaaagaaaacctaaaacaagcctcttgctcagtaaa

SEQ ID NO: 63037 - DNA, 2169 bp, Homo sapiens
gagaacttttccaacaaataaaaaccctagaaaatgtcagaagaatgaagagtgcaaggaaatgtataactttaggttaataacctaataacttaggttaataattttaggtatactatgtatttcacaattaataaacttaattgcaatgctttcttttcaaagtataaaactttaacccatttcctatttagaaaaaaagtgcagcttgctgccagcgctcatttaattttacataaacacactcgaggatgaaacaaatctgactgattttcagtggaagataaaataaaaaaactgttcttggagttatttctaaacagaacttgtctcttatcctaacgtaacagaaatgtatatgatgctacattaggattagagacgagtattctcagggcaaacgggaaatgggttaaaaattgtcacactttttttgttttctttccactaggagtcagaagaaattaaatcaaatgagcttgatgcaaagcttagagtcacaaaaggagaacttgaaaaacaaatgcaagaaaaatctgaccagctagaggtgagtagttttgctctttatatatcctaagttgcataataaatacagaaagagaaatagtgagaacttattgctatctacttttaaggccttttggaaggaacaggcaataaatcttagatatagtttagcacattatgatttgttgtttcttttaaacttttttaaagatgcatcatgccaaaataaaggaactagaagatctgaagagaacatttaaggagggtatggatgagttaagaacactgagaacaaaggtaattcagtctttagtcatgaatccagaggaagggtaaatatcttaaattttgaattcattctgatttttaaagtggtggggaaaggacattaatatagaaatgttccataataaaggaactcagtagagtagaggagcaatttcctagcaacttcttttgttgaaaggaaaatgtcttccatgttagtccctttgaagtgtttgccaaacattactatttcacagcacatttgctgtgtctatagcttatccttgggcttctcatctaaaggcagtctcatcaacgaatcaattggaaagatagttggaccttagaactgtgtcagaaaataacaggaaggctatatttttcctggatatatttaatagatggatagttttaatggccaataatctgttaagtcctcttcgtgtttatagtctttattgtaagattagtatgtcttctaatatgaatatgaatgtgtatcattcatttatttagaagtagtcctttaaccaccctgaatttgaggtcacttaataattttaaattgtttttcatacaccttcttatttgttcttcttgccagttttttgaggtagaggagatatattctttttcaggtgaggagatggtgattcagtaaaaagtgaaatgacatgctaaaactcccatgactgaatcataagaaatctgagactaaaagctaggattgtaaacttcgcattatattttcttcacgttaatggtgctttagaatttttagattattcatatgtaaccactatacaaaatagtttataaagaacaagaatacatggtttgtaacttggttgtgatcatttgataggtgaaatgtctagaagatgaacgattaagaacagaagatgaattatcaaaatataaggaaattattaatcgccaaaaagctgaaattcagaatttattggacaaggtgaaaactgcagatcagctacaggagcagcttcaaaggtacaaaatgagcaacttctgtttgtattaataagcaagcttttaaattttatttcaagattttctaaatgcagttattgcattaaacaaaaaattttacaattttactagctgaaatttttaaatattttctctttatctgaacttctttggattatcttttgagttctgtcatggcttctaaaaatcaaagtttatattccttaaacattggtagtggcaatttataagacagaataggttgagtctcttatccattccttagctttcaaattctgttacttatgcacagtgtttactttttcttctaaaaggtaaatcttgctctagatcttcgcacgtgtgtagcttaagatccggagctgacattattccttggctcct

SEQ ID NO: 63038 - DNA, 1286 bp, Homo sapiens
agtctcgctctttcagattagaatgagttttaagagcaaatgcaataacagttaatgaggcatgaagcttagtttagtgacctgcaagttagtttggacctgaatatttggtgattatgaaaaagaaatgtcctcacattatttacatattaaatggggtgggatgttaaattttactattcatagtttgcaacacccaaatttgccctgttctttaagcattttttgatatgcaaaatttaaataacactgagaaattggacgggggagaatgtgtaagtttccaaatttgaatgtaaactctagaaattttaaaaaatcaatgatgctaagattttatactcaaaaaatatacattcttatttaaatataatataaagattttaagaataagttgccttaacttttttataaatatgactccattggtattgtgcctagtgaatataattttattaaaaagctaatataagtaattataaaggctgatacctgatgccgtaattttaagcactaactgagctgatattagaggtaataaaaatctgaagatgatagaatgtgaagtaaaagaacaactctgaattgtgacttaagaagtgtaagtttatgaaaatatcagtttccaggttttcacaaacagtcttaatgatattggttaaaatcataatcgtggattaccgcattaaatagttctaaatcagtagaactgctaataacccttggttatattgtattctctgatatagcattatcagagaaaactgtaggaggaatagtctctgttgacagtggtcaaaggtagattagagaatagtgggtttccctcaagtctgaagctgacctactaatcagcacatgtgtgagggaactgccaaggcagagaaagaattttcagaaaggaggaggatgacagtctctggagctcaacacggctaagccatctaaattttctctttactttgagttacagaatgaggaattgaaattccaaattcataaaaacagtaatgattctcaactacctgagttgcttcaagatcagaacatcatacttggtcatgtctgatatctgtggtactttcctcatcttcatccagagtgctaagagacaggctcctgaaacctgttagaatactagcacttaggaacaaaagaactgttacagatctgtgtaagagatcttaatggcagctttgagctcagatgaaaccaggtagtctgtaaataggttagagaggtgatttaaggctgacttctgtaaggttacatggtgcagattgcta

SEQ ID NO: 63039 - DNA, 2046 bp, Homo sapiens
ttatggggatgattggagaatgccagactacaactgaaattaattaatgaagttgtttgactgaaatgaaggaggaaagacagactttgcagtggccctactgcttgtagctagccagcttgggttagctgtcctagtcctttttcttttttctcaaggacaggcttttaaaggaattgttagtgataaaatttgtggtgttagttattccacatcacagagtgtgtgcaagtttgtatggggttttggtttaaagtggtttttaattttgatgtttcaatttcttagatgtaaaacgaagatcaggagcagatttgaagaattacaaagtgaattggtgccagtcagcatgtcagagacagaccacatagcctctacttcctctgataaaaatgttgggaaaacacctgaattaaaggaagactcatgcaacttgttttctggcaatgaaagcagcaaattagaaaatgagtccaaactattgtcattaaacactgataaaactttatgtcaacctaatgagcataataatcgaattgaagcccaggaaaattatattccagatcatggtggaggtgaggattcttgtgccaaaacagacacaggctcagaaaattctgaacaaatagctaattttcctagtggaaattttgctaaacatatttcaaaaacaaatgaaacagaacagaaagtaacacaaatattggtggaattaaggtcatctacatttccagaatcagctaatgaaaagacttattcagaaagcccctatgatacagactgcaccaagaaatttatttcaaaaataaagagcgtttcagcatcagaggatttgttggaagaaatagaatctgagctcttatctacggagtttgcagaacatcgagtaccaaatggaatgaataagggagaacatgcattagttctgtttgaaaagtgtgtgcaagataaatatttgcagcaggaacatatcataaaaaagtaagttttttatacctttaggttattttttttccctcacaggcacagggattcgagataaaattctttaaaggaaaataccattttgttcatttttacttgcacattagaatcatgcacatagtagttgaacaataaatgtatagttgctgaatgtgtgagcaaatgtcgagtttttcagatatctgagttcaatatgttaaatagtgtaaatgtattaacgtgctagaaatttttatagacaactcaaaatttttcacttttgaaagaatgtagaagtatattgtcaaaactaagagaaactcaaaaggaaataacaagtcataaaattccacaactttttcttaaaatctgcattctaaattcattggtttaaaacattaaaatttagagaacagaataattgattatcgttcagtaaataataatacagttttggatatgtgaagttctgttttcatgatagtttaaaatttaccatcttaaccatttttatgtgtacgtttcagtagtgttattatatattcacactgttggacaaccaatctgcagaactttttcactttgcaaatctgaaacactgtattcgttaaacaacactatttccacttgccctcagtccctggcaaccaccattctactttctgttgctgagtttgactactcatgatacctcatgtaggtgaaatcatatacttttcatttcatgactggcttatttcatttagcctaatgtcctcatttatccatgttgtaacatgtcagaatttcatttctttttaaggctcaataatattgcattgtatgtatataccacattttgtttattcatccattaatggacatctgggttccttctgctttttggctgttgttaataatgctactgtgaacttgggtttgcaagtatctcttcaagactccaaggcccttcttgatattacccccaaacaaatgcctgctgttgctattcatatccttactgtaatactatattatgtgaataaactgtatgcttttgtacttgaaccatcagtgctgctgctattcttgcattttataggg

SEQ ID NO: 63040 - DNA, 1022 bp, Homo sapiens
gccacaatttcaaattctcttttattgctttatgtccctgactcatgcaggccaaagggtgaggaggagtaatagccaacaagagcgtcctgcagaaagaaacaggctgcgtgggtccggaggagcttgaaaggaagaacccgaccaaagggcaggagacccggctctccaggtcgcggaggcgtgggtgcccagccaggcggagtgcggggcggggcctctcgggccgcaaggtggggcctcctgggccgggaggtgggaggtgagctccgccagcccagcccactgcagacaggttacccaggacctcaaggtgtgctgcgtcaccccgcccgcgctgcgctgattggttcctccagggagcccccgccccctcagctgtaaccgggccggcttcagtgtcgccgccatctttgttgatgtgtcagctccgcaggggtttggggaaacggccgctgagtgaggcgtcggctgtgtttctcaccgcggtcttttcctcccactcttggctggttggaccccgctatggaaaagttggcccctgagccagagctccagcagccttgttagggcgtggcctgaggcttggataagtggggtaagtgtctgaggggtactcggggcacaccggtgagtcgcggtggcggtgcggtggggctgccagccttccgctccttcctgcacgttccgtggcgggggcgagggcgagtgcgaggtggaggtcgaggtcgagcgggctccccgcctggctcctttgagggcgcggaggaaggggagggctggggaacgggtttcaagccctttcctctccctgccttcctccttcggttccgggaccttggaggtggcaaagaggggtcagcgggggtcgtgggggctgtgcctcgagagcgtctgaattcgagcccattgcctgggctgcgtgtgaactgcagccaagccctacctgctcgagaatctttcctagactcaatcgcctatttcgtttttcgtctcaagttgactgtatgtgggtgttttat

SEQ ID NO: 63041 - DNA, 1050 bp, Homo sapiens
ggctcccgctagcacgcccagctaattttttgtatttttagtagagacagggtttcaccatgttggccaggctggtctcaaactcctgacctgagagtgattcgcccgcctcagcctcccaaagtgctgggattacaggcgtgagccactacgccctgccaagttagggctttttagctcacattttcttagtttgtttttcttccttcttgggtattccaccagtaattaatagggctgcaaaattctgttccagtaggacagtgtttctgatgactgtttactcctgtaaaagcttgtgtgtgtggtttatttagattaacaagagaaccaagaaattttgctttcagcattttacttcctcattgcctaatcacctgtgtttgtattatctttttgatcctttactttgctcctgtactgattgctttaggagtagatataattcattgtctcttactcattcatccagaggtgattgctagagtaacagtgccgtggttggacacatcctatcacataagcacactggaatcatccttaaatctaccttcttacctcccatcctttgccctaattggttgccaagtctttattgattcttcttcccaagtatcccttgtatatgtcttttttctttctttccctactaccattttcttagctcaggaatcctcatcattcatggacaattgaaacaattttccaatgtcatagtttatctccctatctgcattcttagagtacttgcctatgtgatatgcctaagaacacacatcttggtgggacagctctgatgaaaagctttcagttctttgtcatttagagaaggaaaccaaacagaggtctagtggtagtcatggttgaaaccgtaggttctggtgcaatagagtgaggaagaatgaggaagatgaagctggggcctgcaacatggagtgaggagctataatgggaaaggtgggaacagaatgggaaaaaccttgccagagcaacagagggtacatgcttccaggagggggagtcatcagtaatatcagatgctatgaaggt

SEQ ID NO: 63042 - DNA, 1043 bp, Homo sapiens
ggttctgttactctctgccgaagagaggcccggtggcctcatggaaggggagacgcagtaatccttcagtaaattcatcacttggttagtggagtctggttgactcatgcttgccaggtgttttaaaactagtcttgctattgaatgcttcatgtattgattgagaccttgtgattcacatgatcaggatatgttctctgtactaatgagctaactctactggagagacaaggcatgtaaactaatgattacagcgtaagacataattactatagtaagctattaatattacattttaggagttgaaggcttctgataagcaaaattagtaaacattgttctataagcttgatatctattaaagaaaaatctataaatgaccatctctaagttgaggaagaaaggtttttatttacatctacagtggaaaaatcatttgagattgagtctctccctttttcagaggatgatcagtggtaccgtgcctctgttttggcttacgcttctgaagaatctgtactggtcggatatgtagattatggaaactttgaaatccttagtttgatgagactttgtcccataatcccaaagttgttggaattgccaatgcaagctataaagtgtgtactagcaggtatgaaatttttatagcctccatattctttaaaaattctacagatgaagaaacatgaaaagatacacgaaatagggaaaagctgcttctcaaaacaacatcatgatcagatgcttaaaagttactataaatgtcatttatcccaaagaaatcagagatttctttccatgtcaattagttggcttcattcaaacgtaccataatttagaaagaatatcctatctcagagggcattacatttgcagcatatccaagatcttttcctcaggctgtgttgcaagatatagttatatcccaaaatacttccttaggctacattcccacaggtggaacaggtcagtaagtctccttcttttcatgtttgtgatacatattgtacattttcttccagaaagggttgacctagttt

SEQ ID NO: 63043 - DNA, 1035 bp, Homo sapiens
cgggccagcagggcttggtcatcttatggcttccaccttgaggtccaaggtcaccatttctcagccagcaggaagggggagaggggaagtggaaggtaagcagcttccagctgcatgagtttgaaattgatcacgtccgtcagatagaacttagacacgtggccaccctagctgccaggaagtctgggaaatgtggtctggcaggcactcatcttcctgctaatattctaggaaagtgctgttctgtggctaaaaggaagacatagagggtgtattctgcagtgaacagagcaccctggctgaccttggtcctacccaacctggcagtccctgggtcccgtcgaggggctctgactggcacatccactgctgaagcccctctgcttgctcctgcagggtgccggacacaagccctggacctcgtcttcatgttggacacctctgcctcagtagggcccgagaattttgctcagatgcagagctttgtgagaagctgtgccctccagtttgaggtgaaccctgacgtgacacaggtcggcctggtggtgtatggcagccaggtgcagactgccttcgggctggacaccaaacccacccgggctgcgatgctgcgggccattagccaggccccctacctaggtggggtgggctcagccggcaccgccctgctgcacatctatgacaaagtgatgaccgtccagaggggtgcccggcctggtgtccccaaagctgtggtggtgctcacaggcgggagaggcgcagaggatgcagccgttcctgcccagaagctgaggaacaatggcatctctgtcttggtcgtgggcgtggggcctgtcctaagtgagggtctgcggaggcttgcaggtccccgggattccctgatccacgtggcagcttacgccgacctgcggtaccaccaggacgtgctcattgagtggctgtgtggaggtgagtgggggaatccacaccctcagggctgcccccatggcaggccctcagcctgagccttcacatacatcatgacgaggatggcag

SEQ ID NO: 63044 - DNA, 1050 bp, Homo sapiens
agaatatccacaagcttcctaagggtctaaagatcccacattcacactgacttgggcagtgacagagcccagagcaaacagggccaggccagcccaaatccagtgacctcctcttcaccttcttaaaagagacaggagaatcacttgaacccgggaggtggaggttgtggtgagccaagatcgcgccattgtactccagcctgggcaacaagagcaagattctgcctcaaaaaaaaaaaaaaaaaagtctgccatgtgtatggcacgtctgagcaatggactctccatgagtctgtaggagagctgggtcttactaacctagccaagtggtatgcagcaccaaccatgagctaccggggcaaagggagacatgactctagtagccttgcacctctactgggcttacttagggtaggggtcttcgggtctaacccatgcctggccggcctggtgggtatggtgttctccattgtagaagccaagcagccagtcaacctctgcaaacccagcccgtgcatgaatgagggcagctgcgtcctgcagaatgggagctaccgctgcaagtgtcgggatggctgggagggcccccactgcgagaaccgtgagtggagctcttgctctgtatgtgtgagccagggatggtattgcgagtcctgccaagtcccacaaactcagctgaaggcaggttctaaaacattcgttcagtggaagaaattattcagtcgtttacccacgaaacatttagtgagtacctcctgcatcccaggcattgttctcagtgcaggaacatagcagtaaacaaatgaataaaacctctgccctcatggagcttccattctaatgggaagacagacaataagcaaataatacaacatgtggtgtggtagacggtgctaagcaccccggagaaagtcatgacaactaggagggaggccacagttaggagcacagtagatccagggtacagggatgtagacggaggcagggatgggtaaatgcggtggtgggagctgctggaagctctttttggggtgctatttgctcagtaaa

SEQ ID NO: 63045 - DNA, 1096 bp, Homo sapiens
gctctcctcctataaccacagcccaaagctgtcacacctgcctctgccccagactgtaccccagtcaactctgcaaccacactcaagaacaggcctctctcggtcgtggtcacaggcaaaggcactgtactccagaaagccaaggtaagcagtcactcccagcctcccttggggccagcagaaatgtcactaaggtaggggcccatcttctgacccaggtggtgctttgtggcttttggcaccagctctgagcaagggctcggcactcaccaaggagtggccatggctttgccatgccttcagctcagtctctggcactgaccaaccagaaaggtgtctgcacttggttcgagcatccttccctgtgagcttggggatgcttcagttcttgccctccacacagctatgggtagattccaggaggccagctgcagctcagggacagattatgactgagttttcaaaccaaaaagtcagtcagtgactccacaggacttctaccattaaaactaaagaaacagactcacataggtggtttgaattgcccaaagttgcccacccaactactggcaaaattctcagcaagttgtgaatgaggaatccatgctatgatgcggtttctccctgatggctagtcaaaaaagtatcattaatcatttactcatttactcatttgtacactaaagaacatgcctagggctgcctttgcttttggcaaattctgctccttattcctatcctccttacctgctggagatatttggaggtcccacaacaatggctaaccaataaatccatgcaagcatctgaacctccactcccttgttgctgtgagagacatcacttataggcactcgctgttgtgccacagtctcaaaatctctgaataggcactctaagcagtgatgaacacacagggtttgaaacatttatcacctctgtgcctaaaatagtttttctcacattttttctatgtatatcaaggttgctacagtggataactaactatctttttggtggggggtgggtgctggtatttgaatggtaccctaggaatgggagaagaaaggagcaagttagaaaacaagcttcatct

SEQ ID NO: 63046 - DNA, 1044 bp, Homo sapiens
tgggcctctttaacagatccatgttaccagcactggcctctgtggtgggctaaatattgggcccctaatgatatccatgacctaacccctcaaatctgtgaatatgctacttgacgtggcaaagggacttcacagatgtgatttaatgaggagattatcctggtttgtgcaggtgagcacagtgtaatcacagtggctcttataagcggggaggtaggagggtaagagtcagggagataagatgctaccatgttggctttggggatggaggaagggaccatgagccgaggaacacaggtggcttctggaatctggaaaaggtgaagaagtagattctttcctagagcctccaggagccctgtggccccctctcagattctgatctccagaactgtagattaacgagttcgtgttgctttatgtcactaagtttggtaatttgttaccacagcaataagaaactgagacatcctctcacagctctgactgcatcacagcgtagctgtctgtgtcgccatttagctgcaagctccaaggacaggctttgtgtggagctcacatttccagggcccagcacaatatccaataaatatttgttgactaaatgagtaaatgaaagcaaagcaaatctatccacttactttgtacatgaaagaatcccatggctgaattataagaaaaataaattagtggcctggattaagagtaaagagaagtccactaaaaatccaggtatctggcaggtcctatctagccaaaatactggaacagatgggattttaaaaagcatctcctctacttatctagcttacataatacactcacaacactgagaacccaaacaattcttcccccaaatggcctccatgaaaccaactcctagggtttactgcatgaatgagctgttctgaaacctggaccccagcaacttgcccaccatccagaacccttggcacctcctgctttcctcgtgatcactctgctccagaccagcatgagctccccgtctgcatgggcagcctttcatttgtgtcactctagagg

SEQ ID NO: 63047 - DNA, 1023 bp, Homo sapiens
aggacatgaaggatgcctgtacttactgggggtaggggtaggaaaattgcctgagatccctgcattgtggtcccgtgtccttcccaccaggtaaagccaaggaaggaaaggagctttttgatccctgacctacccagagtcttccaagtgcttccttccatgaggcatgaatgcttcatcccccactgttcagactgtctgaggtctgtgtttagctgtaggaaataaatactgttcgaaagttgcagggtgtggcttcgtgcagattgggttcatatcaggcttggacattgcaaccatgagcaattacttactctttctgaacctcagtttcttaatctgaaaagggttgatagctttttccttggggatttgtagggttggagtgaaattttgcccttagagagcttggcagtaggttcagcacatggtcagagccccgtagtgctagccagtggtggtgaaacaaggcattgggctgtatgtgccatgggtctgccatgtttatttctgatgcctacagcctttgcttttagtaatgctgccattaggttctatgtggggcaggggaagctgaatcatgaaggagagctgtttcctctttctgaccccatcagtgtggaaaacgtactagtcttttatcacctgagcttcagtttcccccatctgtaataatcaccactttcctcacaatgcagaatgctgggaagatcaatgaaaaactatgcataaaagtgttttgaaaactggaaatcactgaacagatgtgtaagatgactctccaccattgcatcaggaattgcaattccaggctgagggaagcctgcagtgctaccatagctattgctaatttgctcctgactaatgatcagttctagagtatttatggccagaaggcagactcccctggccatggagacccagggttgggtggaattgtgtttgggattggctgacgagatgaacaattagatacaggatcacttggacagggaagtgaaggctcagtaagggattcagtca

SEQ ID NO: 63048 - DNA, 2234 bp, Homo sapiens
ttccctgcatcttctcaacgttccaaggacctgggatggagttgtctccaatgtaataaatcacctctctgtgtcccatcaccagtcagtgttattattataatccccattaatactctgccagctcttttatctgatgggaagggctcctcacctggcccaaccaggtaagggatactgatgtcacaagcattaaagatgggctcctctcccgtcctcctgccttgttcttcagaatgactctgtataaactatagagcaacgctcaaggccatttgtgtggccatcaggactgacagcagctcttttttttttttcttcttcccagcgccacttagcccctgaagtgtttcgggaaatctttggaatgtccatacaggagtttgacaggttacctctttggagacgcaacgacatgaagaaaaaagcaaaactcttctaagtcccactcgtgaatggcaattagagaaaggactgacagtggcggtgccccataggatgtcatattgaggcccaaacttgattggagaatttgcaaactaccgtcgctcagcaacaccaaaaagagaaagtctggttaaaacaccatgagtcaaatgtcgggccagccaacagtaacacttgccaagaagcatggcgtagaaatttctatgttccgaaacacagagtagtgtccacatgtgagcttttcacattaccttatgtatacaacaggagctgcgttgttttcttctttttcttttcctttatctgttgtccaacaacagtgctgactgtccggataagagctggcaagtgcccttaggatgccgcatgggaaaaatcggttatcataatttcaaagtataaatatatttattaagtagcgctgcggctaagaaggaagagtgaggggtctgtccatggggtggcagtgatttcacacccgcctttcttgaatggcttcgtgttactcagccgtgccctggcaggaatggaactccatcagggaacagggcagctctgtttgaatggggtgaaaaacagcaaaattaattcttagcaagctccttgttctctactgttcaccgggacctggctggcaaatgacttagctattagtatatttaaaaactgttcaaaagcaaaagagaaggaacaggaatgaaaggaaaccttcccttaactctttctgcttcccatagcaggtctggttcctgctccccgcctaggacaggagctgtctggagctccacctttgcaaagaaaggaaaaacacaaattgcccccagattggcccagtggcatgccattaggtgattttgcataggggccatatcattcatggccaaaaaaaaccaaaaagcaaaaaacaaaaacaagtcccatgtcctactgactctagttcttccagtcgttatcctctgctgtctctctggcatcctatgaatcagatcaagcccatgctgttgttggtttttaaggtttctttcaataataggctaaggaaagacatgtttttctcttttaaatctctgcaactccaaagtagactccttcgaacgtatttaatttggccttttcagctttcttcttgcccagctctgtcgaattcatgggtgtgtgtgcacatgttggtttcactcacccagagtaattttgtgagcatgcatgtgctttttaatttctgcttgaatgtttgtcctgctgtgttgcagcttctaaagacattgtcaccgagtgtgtgtgactcaaagatcaagagtgaggctaaactgcgaccccaacatcacttccttcatggaaaggtgttggcgctgatgtagctcatggaaggatcagactgggaaccacagaggaaggatgaggtgggatgtggaggtcagagcatctcacgagagtccctcaggctctgcaacactagattcgaatatgagcctagggtttccccaacacgtgcgtgcatatgaaaccacatcatgattcccgacgtgagttagatgagggagagtttgtgtaactccacacccaggagggtaagccactttattatcatgctttggggctgtgcttaagaatttaagctctgttttaaagccgaagaagaaaacatttgaatttaccttcatatgccactaagaacaaaagctctgaagttcttcctgctggcaccaaatattaggattacaagctgtctctctgacaccagtggtaaaaaagcaagtagaatagtttctgagtctgtgttgcagcct

SEQ ID NO: 63049 - DNA, 2537 bp, Homo sapiens
aagaacatggtttatagggcgaatatgttgggaatttcaatataatatagtctgtgaatggttccttgcttttccatggtctttcccttatgatattttcttttcctttccttttcagattaccaggtatggaacactttgtctttcttgaattggccacaccgatagaacagccatgttccaacccagactgctggctccaaggcaacagtttctgttgagaagatgcttgttgtggttgatctctctagtcattactctatagccgtgaagagcagacatgcctggtgcctgggtcaagctgtccctgcaggccttggggacactgcatgaaccaggccaggtgtagggggtctctcttgctttggccttggagagtcctctctggggtggaagtggaccagcatcaagggtctgctcatatacagtttttcttcttttaattataatctctcagtactttaggccacccttttcctgcgcgttctcaaatgaaaagacactgatgtcttagccaataggagagagcagtttgccctcatgacattcctttctcactagaacctcaatcttgttaaaaaaagaaagaaagaaatgtgatggagaataagaaaagaagaaaaatgcatagaaaatcatgattaaagataagaaactaacaataatagacttgggcatcttttaaatgtactatatgctttcattcatggagcctaattcaggaatttgtccataaccatcaagccaagatctctccccaacttgattgcaaaagagctgtattcctgttcctatacagcaaggatctcattttgaaaaatacatggtcatttagatgacacaaataaaatagtggttaggattggagacccaacagggaattgggagcccaagagtactcccttcagtttcctagactatttcatgcctcacctggaactggcatttctgttgcagacactcccagatggccacatgcctgcaatgagaatggaccgaggagtgtctatgcccaacatgttggaaccaaaggcaagtgcagctgttctttttcctctcatatgggaatggcgtaaccctaaacagatttgatgttctatcttttcatcattctcaaagtgttgtaggctggtgtgttcaggtgagccatgtcatgaatatgcaccttgccattctgctgttttgcccacatcaggtcagcaggttaaacccttactgggcatgatgctgtgtgtttacagtgaggtgccagtccctctctgcctatgaccaaggtattcccttggcctctgccatgtgcattacagagcatatccggtgctgagtggagtggctgcagactcaccatgtaggtgaggcaaccctgtttcaccattgaaagccctgcatttcaagaacctcagtcctgggtacactggggtgactggccaccctagctccagagcaccctgtaccttcagagttgtccaagggctcatgctccctggtgaccataaccagggcttatttcaatatggcagttgccagagcactgcttctgggcctgcctggccccatagattcatgagctagtcatgggacaagattgttaaccccagcacaaatgcaccctgccctataacagcatcctataaaaggtaacacattggctgggcacagtggcttacgcctgtaatccaagcactttggaaggccaaggcgggtagatggcttgagttcaggaatttaagaccagcctgagcaacatggcaaaatcccatctctactaaaacttaaaaaaaattgcttggcatgacgacatgtgcctatagtcccagctactcgggagggtaagataggagggtcacctgggcctgataggttgaggctacagtgagctgtgatcacaccactgcatccagcctgggcaacagagcaagccctgtctacaaacaaaaaaagaaaaacaaaaacaaaaaacacgtgcctgtaatttccattatcttctaatgtttaccttcatcccaatacatagtaagttagtgttctgccactcaacaaagcccccctaaggctcagtgctacctgagacactggtggaaagttgagaatgtctaagattctgtccctgtcccctggaaactggagcttccactggccttgcagaaggaagacccatcactcgaattctgtcatgacagtctcttggaagctctatcttgggagtactagcgtttaggtggattctgcttgttaataaaatggactgtggtgttctagaagaggtgttttctttcttctcagatatttccatatgaaatgctcatggtgaccaacagagggcgaaacaaaatcctcagagaggtggacagaaccaggctggaggtaaaacaaaaccgaaaaatccagtcccaactgcagatccctatgcactcccccaactctcccctaagcaatgttttatttcttcagtgaaaacaaaaaaaaattataaagatcaccctcatgtcataggtagaactaagaaataactttggagaaaaaaaatatccaggttt

SEQ ID NO: 63050 - DNA, 1037 bp, Homo sapiens
cagcccaggcaccagaccccagcgagacaccaaagattgagacggaccactggcctggtcccccctcatttgctgtcgtaggtatgcaactgtcacggctaagtcaaagggacaaactgctaggagagctcaagatgacatgcttaaaaacatgaaagaaaatgtatcctattatgaagattttaaagaaaagtatgaccaagaggtagcatagtgaaaagaactaacgtggtattaacttgttgtacaaaacgcttaaaagttacaaaaacacatccaccagagtcttgttctaaccaaacccactgggatccagaactggtctaaaaccaatggtttgcatggactctcagagttaatactgcagaatcagtaactctgttgaacatagttgagtgaaagccttatggcaagaacattgttctatataattagagtctagtgggtgaatttaccgaatgtttgtagaagcatgacttctttcagttaaatttgttttagactatttctgggttgtagttataattcttaacaaccaatcttaacactgaagcactttcatttttcttgtaagatcatgttgtccatcatgcaaaagggctattgcagagtagtaggtgttctgaaatattacttctgtgaagttatgtgattttacatctaccattttcatgaattctgtgctaaaatgtcatatttcagctgtttcattctttgctccatgctttccaattatgtctgtgtctttactatattatcagtagtgaacctactcggcctaaaaagaagtattagcaaacccagaagctaatactgaaaatttagcgagtcagctttacaaagacacgatcttatcacatttctgttaacaacctaaaaggccttcaattttccaaaatgtcctaatcttcattgtgctatttttaataagttatttttggaatatctttcacaagcaatacaagtggattttaaatcaattgatacttatagaaagagtttaaggaaaaatctacctcctaagttcattattcaca

SEQ ID NO: 63051 - DNA, 1068 bp, Homo sapiens
cagcatgtgacccaggcctggggcctcactgagctgaggacgcctgcatggttgtaaagctgagatgcacggcacagactgtttctctccttcactggcttccccattcattttccataacatccattgttggttgggtgtatttttatttctgtcctccaaacttccttgtagcctcattctatcttagtatatctttgggccatttggacaaccttatgcctagagatttggaaaaaccattttcgctttgtttcgggcttcgtttgtaaagtgtctgctaagtttctcttgcttcccctttgaaatactgctagacatgacattctgtgtccatgaagtataaattggatttctgagcaggagggttacatatattaagtttctttgaaaggaatctttcctcttttgctataaatatgagttgccatgatgtaaatatatatttgacacttgctgaaggaaaccgtaactcttattgacgctttagacaagaaccggcaatcttaaaactgtcacaaaattctggatgctgccaacttatcttaaggttccctcaagatgttcatttatatttggggatgtaagcactctgagtccagaaagctaggcagtgctccaacaggtccccacagcagaatcgcacacccccatctctattcgcttgtcttagaattagtcactcgggctctcatggtgccaaaaagaagaatgaaagtggagatgggcatttaaatgtgttaagtacagtgagagtcctgtgagtgaatgctcccctgaggtctaaaaaattagcttactaggctaacaggaaaggaggtaaaaatgaaggccaagaaatagaaatagaaacataaatagaaatatagtagcttgtcactacaatagatgagaacactaacaacttagggtagcccaatctgaggacttaaaggaacaaaatagctatgagtgtgatatatatatatatatgtactattgtattatgtgcgcacacacacacacacacacacagagtagttttgttttttgttttgaggcagaatctcactttgttgccccagctgg

SEQ ID NO: 63052 - DNA, 1017 bp, Homo sapiens
tgctcctgctgaatggggggagggcaggggctacaaagtgcttcccagcactgtccttctaggcgacccatgtgcatggtggatcataatggaaagtaaatggaaaatgtcatttatctacttactcaaccggcagagctctggtaagtgtttttaatggttagtatttgaagaataataagacctgtaatggaaacggaagaggatgtcttcaattaatttttgttctgtgactgtgccttctgaatggtaggacagatggacaaaatcaaggcataggggaaaaatagctgaaaggtatttagagggcttttcaaagagatttcatgaagaaaacaaaaagatgtgctttttaaagcatttggctacttatttgtaattaaatgccatgttttatctctcctgttgaactgctagtcttctaatgaggcatctctttgttatttgtgtgtgtgtgtgtggaaagtaaaaatcgttgttgaaatcaaacgtaaagacatgaaagtgtgctggggagataactatagagtaaatggaccccttcatcatgacagactgaatgagaacagccatatcaacaagaaggttcttaccgaaggctcctttcttccttttgccaaaataaggtttcacctacttgcctcatcttactggcaaaatactctgagcgatcactaccatatataattctgtatctatctaccttgcctgctttcttcatctcacctcaccccacctccatgccaaagatggcatcagaagatgccaaagatagcatcaaaaggaagaactgaatttctccaactgcactttcgagttggtttttctgcaaggaaaaggtgcttaaatgaaagtaaataaattgtacctgcttttagtatgttagccataagtccttgctgtttcctttattctgtagaagtgagcttacctttggtgataaatatttgaaattgtatgcatttataacatagaccagagagtaatttttttttactgtaactctcataaagaatt

SEQ ID NO: 63053 - DNA, 1344 bp, Homo sapiens
tagtgtacttggaatgcatgtatttttttccccaaacttaagcctggagaatttctttctcaaaaatttctgaaacttgttttctaagtgcatagcatagatcagaagcagacgaaatatgtaggcttatgtatgttcatggtgaggtacactgtatgtacctgtcttcggaaaaacatttacatttaaacctcactacagagaacacccctcagaattagtgacacatctgctttgtgcagtgtttttatgacatatttctccaaagcctgaggtggtaggtgtctgcatttttttaacgaataggactattcatatgtgtttaatgtcagttactacagtcccccagcactggttatttaagtgcattttattttctcctgctagtcagtatgttccttgaggacaaggattctgtctcattaatcttgggtccccacagcttctctagaatctagcataatgcataggaactgctcagttaacactaaatgaatgaatctttagggagacgcagcgttttgtttttgtttttcctttttttttgagatagtctgactgtgtcacccaggccgtagtgcagtggtgcaatctcggctcactgcagcctctgcctcccagttcaaacgattctcatgcttcagcctcccaagtagctgggattacaggtgcgcaccaccacgcccggctaatttttgtatttttagtagagatggggtttcaccatgttggccaggctggtctcaaactcccaacctcaggtgatccacccacctcagcctcccaaagtgccaggattataggcattagccaccatggccagccagaaatgcagttttattacttataagtatagataagaacaaaagtgctttgcagttctcaagcatgtattccctgaaatgtcatctttctctattcattactgtcagccaatatttgcatctactattggttaaatatatatggtagatgagttagaaacagtctttgccggccgggcgcggtggctcatgcctgtaatcccagcactttggtaggctgaggcgggcagatcataaggtcaggagatcaatcaagatcatcctggctaacacagtgaaaccccttctctactaaaaatacaaaaaatcagtcgggcttggtggcccatgcctatagtcccagctactcaggaggctgaggcaggagaattgcttgaacccaggaggcagaggtagcagtaagccaagatcacgccactgcacttcagcctgggcgacagagcgagactctgtctcaaaaaaaaaaaaaaaaaaaagaaaagaaacagtctttgtcctaaaggagtttacagtctggtga

SEQ ID NO: 63054 - DNA, 1519 bp, Homo sapiens
atgcagaagctgggaaaggatgatttgaatgctggaattcctgaaccaataaggctgctgctagtagaaaaacaggggccccaagggagctgattttgaggggaagatgataattttggttccggatgctttgagtcatcatgatttcctgatggagataattagcaggtattcggtattgcaaatctttgatttgggagggaagtttaagtttaagagatttagaagctatgtgtgtgactatgttgtgggtactgatgagatccctaaaacagaaggggaacagttttagtaggaaccaaagtgttaaagccacagttcctcatcacctaggaaatttttctaaaatgcacattccttggctccacctccagatattcaacaggtccggatgggacccaggaatctgcatttttatcaagccccacagaagaccaggataccaacaatcttgagtcttactttgagaaacattgattgaaggacagagtgctatactaacatccttcctcttgctgttcttatttgagacgcctctcccaacaatattactagtattttaaattgaatgaaatgttttactttcataaagagtatgatatgccattggttttttttttttttttttgaggtggagtcttgctctgttgcccaggctggagtgcagtggcatgatctcggctcactgcaacctctgcctcccagattcaagtgattattctgcctcagcctccctggtagctgggattgcaggcacatgccaccacgcccagctaatttttgtatttttagtagagacagggtttaccatgttggccaggctggtctcgaactcctgacctcaagtgatccgcctgcctcagcctctcaaagtgctgggatgtgagccactgcacccggccaatatgccattgattttgttggaaattggcaaattgtttggagtattcattgagtcccatagagttgtttgcttttaataaatatgttctgtgaactcaatttctcaagaagattggtctaacctatacttttaacagcaataaaagtgatttataattagtataatataactttggaagtagaaccctgaattcattcagcctttaatatgtttctatgatgataggccctgggagaagttagtttatggtgaattttaacctacttgtgtaatctgatttctgctcttatgttcaaatggaaagcaagatacttttgccttgaagctaacaatttgctaatttgcttcagttaagagtctttttgtgttttggtatgtggattgggggagggagcaccagcatttcaagcaaatcttatttctatcctaaagacactggtaaaaatgtcccctgagtagtttcttgggttctctttttttaaatttttttgagacagggtcttgctctgtgcccaggctggagtgcagtggcatgatcacagctcaccacagcttcaacctcccaggctcaagcaatattcctgcctcactcagcctcccaaggcctaggaccat

SEQ ID NO: 63055 - DNA, 2513 bp, Homo sapiens
ccacaccataaataacatctttcatgtaactgggggaacagaactactgtgtacatttcaccaaaaaagactcagttccacccagccacaagaggataaaaagcctttttaaacgcagtattgctgtaaactggacagaaccattaagaacctattgagtggacattcttggtgaaatgttgtataatgttgttttcattggctttatcataatggttctatatatacaattgcacattgttgaatccaggatacaatcaaaggaacttcaggaaataagcatttctaatgactgtgaaaagctgcaatatttccaatgtcatgactttgatgatatttctgttatattaatgtccttttaggtagcaaggcattttgacattctctgggactcaaatgcttgtattcttttggattaataagtagcaaaaaaaaatcactaattttataactttttaaggtcagaattcttatcaaacaaaatatgaaaactgtaaatgagaaaaaaatacaattcagaaaccattgaatgaattaattataggcgataaaaatgtgtagagcaccattaactttcttcagcttttttaagaataacaatttaatatgataaattcttgattaatataatatatctatatttttaaagaaatgttcttttactcttttgtgcacatagccatgttagtgattttcttcatgtgtgggtcccagtttatttaaactgtgtcgttttcgcagcagtgttcaatttgctcaccattggtagtgtttgctaaaattgtatttttttaagctaagtaacatgtactgggttgagaacctttttcccccctctccctctcagaaaattgctttataaaattgctttataatttgattttcttactgaaacgcatggtggtgtctaggtggggaactgactgataacccttggcagcaatcaaagtgccagtggctcctcgatgtttacatttttttctattttgttcagtcttttgttttaaatgattctaaagagattaaagaaaacagagttttaaatgtcctatttacatgttaaaggatttggggaaattgggtatgtatgtgaatgggtgtacatgtaggaacctgtagttcagcaaagctgcgctgggcacagcatgcttgtacttgattgacaaaatcgtgtttgccagtccactttctatttttcctttaagtgatgctgatcactcaaataatgcttttaagctattgtttgtttttatttgacatgttaagccgcagcactttcttcttcatctttccatttactgatatttgggggaacaggctatcaaaggttccggcttgaagggaactgtcactaccccctctaggaagttattttatgtagcatgtttgcatatacgcattgtgtggcatgtgcatagaggcttgttttacacctatctgctcattttgttgtgttagcttttctggtttatttcatagtttgttcttgctatttattaagaacagaatatcaaaagattatgaatagcctcagctctagaatgcttaccactgttaaaacaacaaaaagactaaacctctaatttcatgcaaatctttgttagcttattctaagaaatttattaagtaaaacaaagaaaaaacagaagtgggagatagttattttgtgcgtaattttctttaaatcattttgaatgatgtgaaggcattcagtttgctgtatttttttaatcacttcatacaaggaaaacttcgacatttacatttctagatgtagtaacagtctactttgatatatgagtatttaaactaaggcattaagagatattagatatttcttaatgttttcatagtgctcaataggtgtagtagcaatgatattacctctgaaaccaaatactcttttatccttgattccactatgggaccttataactagtccatgaaaccaagctcagaaaagctttaactcttatatttgtgtatatgtatgctgcttctgaaaatataatttttctaagttgttgtaatgactttaatttgtaatcagctaaggcttaagatttcatttgtttctaagtttctgtttttcatcccttcttttttcttttatatttagttcagacctagagccagtagaagctctcacagtgagttcaatttgttagtgaaacattgtactgcatcaccagtttttcttaccttctgttgacagctgaatatttctgttactcagtacttgcaaaaacagtaactaaaatgcactatgctgagtggaaagcaccgtcataacaattgattgccatagcaagttccaaagtgaatttcagccttgcttcacatttgtatcaataaatatgcacattttttaaaactttctaacaatatagtctttggatttgtttttagttatgagccgcattctttacttgatagaactcagatttgtcttagcctattgccatatagtactcaccttataactatgtaactttctcgtaatgtatctgttt

SEQ ID NO: 63056 - DNA, 1060 bp, Homo sapiens
acttatttatacgttttcaaatatttatttaagtgcctacaacatgtgaggcatttgggaatgtctcagttaacgtggtacataagttccttgctctaatagagctcacatttggatgtcttctaattctgaacctgaatgtaagagcacaatacaatcaatgaagcagtgagcccaggaagccatggatcttcacaagcctcaggaaaagtcaacatttaaaattttctatttaaagtccaagggcacagcaagctcttggtctatatgggaaggccatggactacaattcccacaagtccgtgcgacctctccgttctgcgcagcttcgcggtatgaggaagagggtcctgtcaggcgcactcttgttgcatcatcagcgtgcacctccacgatgaaacaggtctgggctacaaaagtatggccgcttctgaggcggcggtggtgtcttcgccgtctttgaaaacagacacatcccctgtccttgaaactgcaggaacggtcgcagcaatggctgcgaccccgtcagcaagggctgcagccgcggtggttgcggccgcggccaggaccggatccgaagccagggtctccaaggccgctttggctaccaagctgctgtccttgagcggcgtgttcgccgtgcacaagcccaaagggcccacttcagccgagctgctgaatcggttgaaggagaagctgctggcaggtactgcagcccgggtggggaccaggctgaggcggtcgctgcgagaggggaagcacattaggctttttgcgacgctcgtgattcaagagacaaaaggaggggaaagggagactgaccattgaattagctctggacaggaatctcgggcatctcgggcttggacttgccctggcacgaactcttgtagcctacttggcagttgtagttctcaacgggaggaaaaaaatcccgtacttacacaataaaaccctgcccttgggcgtgcagacctgttttctgtaatctgatcgatccctcaggaggcttttgttgggttcatgtggatgaaccccaaaaggaagtactggttctgca

SEQ ID NO: 63057 - DNA, 1041 bp, Homo sapiens
gacattctcattatcctcgatttctatattgcttgtgattggcctattttgtatttatgttagttaggctagggctttccaaatgtcattgtaattggctgtcagaattgcttgggaagtttttgtttttgtttttgtttttgagatggagtttcgctgttgttgcccaggctggagtgcaatggcaagatctcggctcactgcaaccttcccctcctgggttcaagtgattctcctgcctcagcctcccaagtagctgggattacaggcatgcaccaccatgcccagctaattttgtatttttggtagagacggggtttctccatgttggtcaggctgggctcgaactcccgacctcaggtgatctgcccgcctcagcctcccaaaatgctgggattacaggcatgagccaccactcccggccttgggaaggttcttaaagatacctacattctaatgccatgtttgacaaccatgatcagtggttgtgtcctctaataccattccttgtctttctttgcattgattcctattatgctacaatctctactgtttgtctgttgggatccttcaaagccctaagtgtaccagaattttatagctagaaaataataaaaatccacgaatacttagttcagtggggtgaaccaaattccccactttatatagtagaggcagtacgtctgcaagttagaaggaggtatatttgggcacaaagggaagatagtatatttatggggccttcttactccaaggggtgtcaagttgaaaatgtaaagagttccccaaaaggtttctgttaatttatgagtgagagatccatgatggattgcaagtgacagatcaagggtttgaaactgaggtctggccttagaagtttatgtcaaagcagacaaccatacccttctaagtatggtgatgtcataattagggaatgacgccagggtgttccagagaccatggttctgactcagtagagtggtaattttgttgggaggccgagccacccagcatatccttttggccatttaatctggcttc

SEQ ID NO: 63058 - DNA, 1034 bp, Homo sapiens
tactcgcaatgttaggtagctggagatagcagcaaagaccatggaagagattcagaaatggaaattgaggacttttaaaagtatctttctatataaaaattaacttcttttcatgattctctatctaacagcccaccactaccaagaatttactagatttttgcgggttagcttggatatttacccaccttttaaaaatgccgtttttctcttagagaatgaattctactgtcttgatagctgattttggaatactctttctttataatttagggaatgtccattttaaaatcttttctttgctagtaatgaggtcatagtctcttaacatgtaaagtttgtataatactttttgtttgttttgaaaatgccatccccttttcctcccaagtttatgaagatcctacttcatttgtcttggtgatcaccttttttcatccccatttctctcatagaagctggaatgccttctccagaatggaccaagaggaaaaagcagactttgaaaattgggcatggagggactctagacagcgcagcccgaggagttctgggtaagagatatgaaaggcagttaagtgtccactgtcacttaatatcagaaagaaacactggttgagaacagatagattgactaaagccttctatttttcagtcattttggaatgtttcagatctactggatatatatagtgccatcttttaaagaagcccttaaatggtacaaggcctacaaggctgttagaaatagctacttttatgtgtggatgggactttgaaaaaaggtttctctctgtgcagaaaagagttaacatagcaggcctgaaattactatctttagaaaggcttgcttggacagcttgcccttggttggtatctgggaacttggattttgggagtgttcccacccttctctgtctgataaggctggttggctgtgcctcagatgttctgagaacaccagctttccttctaggaatctggaattttgttccactgctaaggcagagggtgcctgagtgatcatcctgtca

SEQ ID NO: 63059 - DNA, 1028 bp, Homo sapiens
ttttagaacatgcttctcttctctctgttgtgttccctatacatccttcaaaggcctaatacaaactccgaaatgcttgaatgaagcattctccggcctctttagccgtttaggatgctcccacctttgccctgctttggcagcggttctctctctgttcatttgacacttaatcatatactatcatattgttatttagcattattcactcattaggcaacatttcttgagcactgtgatttttctgtattttattttcctgatgagattataagctgtttcagagttaggaaatgtgtcacaggtttctttgtttttccattggaagtattcctcttgggattatgtgcatagtagttgttcaagaaaaattgattggagatttatttgaatggaatcaagtcgcattgaatctttcctgtttgcctcatcagcagcagtatctacaagttctgtcatttgaagagtattatgctcttcagaggattactgaggacagactgtttttgatcttagaccttgaactatatgacttagaaggacaatacagatgagtgtcatagaggttttgaggaggttggaatagactttatgaatgagttggggcttgagctgggcttcaaaggattgactttgaatactttaataaggagttggtgctgtaggcactgggaccctactaaggattgtttggggggctttgtaatgtgaaaaatagggtttcagaaatggttatgaagtggtatgaattggaagaggaagggataggatgtagaaccgtcaggtttgcagggatgtaggctggttgcagtgaggagaaagcctaggtgagttaaggtggcagagggaatggaaaggaaggggggtctgttcttagaccatttggtttgaatcttaactctaccaggtactggttgtgagatgctggacaaagttcttagtctcttattcctgtttcctcatctatcaacaggggtaattatactatcttttaaagtttttttttttttttttttgagacagagttt

SEQ ID NO: 63060 - DNA, 1569 bp, Homo sapiens
gggtcttgaactcgtgacctcaggtgatccgcccgcctcaacctcccaaaatgctgggattacaggcgtgagccaacacacctggccttttaaagttgttataaggattaaatgggataatgaaaggagagcatttagagtagaatctgatacatggtaaactcactgaatggtatttgctgtaaatattggagatattttttctagtttgccaatcagtagtccttgtttactcttataattctgaattgtggtgattgtattgtgttcttatgcacagttatatctgttgatgacaaatatttctatacttacaaaaatgtggcttcttaacaaaaagagaagtgactaaatcctctcaccctcaccaagtgaaatgtgttgacgtatgaataatgtttgaaatttaagagaaaggtaggccattgttgtactttgggctctgtaaatacattcttcagccttcattttaccttgtattctttgtgttagactgatttgttatgtttctcttttcttgattgtatatactgctgggtgctaatcatctttaaatggttcattagctgtgataatggcttttgctttgtttaataatgaattctgtcaaaagactttatcatacccacttgaacatggttaattgtgccgtgtgtttttcactggtgcccatataaaattccagtgcgtcctttgagattgttctaaggcttcattgtctaattggctgggttaaggtttctactgagtttaatactttgagaatggggagaaaggtcttctcttgtcccttctttagaatttcttagttgcatgacaagttcaactgtttggagtaataggagccctaacattttgctaaatatctgttctttcccacttcacattacctaagctgggaaattatgaccaaaaaatatagctattttaaaaacctagttttcagaacagagtgtcataatatttctttctttgatttgtagttgttggaattggaagcggaacaaaaatgttgaccagtatgttgtcagggtccaaggtaagaatactgaaatagttctatttttctttaatgttcttaatgatctacatgtattgggtttttatcaaataaaaaataaactgagtaaactgcatgaatgggtatcattcctgagtattaattatgtctataaacatatctgagattgaaaatatcgagactgaaaattggaaattcttaattgaaaaaccaattagacttaaagaaacaatgctacagtgctcatcatttaacaaaattatatttagacttttaaaacatcatatttcttagatgattgggacttagaggtcataaactctagtgacagacttttttaaaccttggaatttttatagaaacaataccattttgtaaactgtgccctttgagcaaaaatatgctttgttcaatggttataaatgtttattaaagaaaagagtagggcctctttaagatgataaagtatgttcatatatgagagtaaccttgaatagatccaaaagcacttttccaggcacttgatagaagagagaaggggttatttg

SEQ ID NO: 63061 - DNA, 1027 bp, Homo sapiens
gtagcattttaaaacaaatctctgatattatcagccattttaattctcagtgtgtttctttgggctaagaagattggaaattgtttatcgcattgttgcttacttgataggagtttttgaataaagatttattgtgattgcctctttttctatagtgatgttttaagtgttcagaattattcttccaaataacctccttgcaaaagcatgtatggctaggatttaggttattttccctagtaaacgagaaacaaagcagagatactctgttagatttcatctgtcttgccattaaaaaaaaatatattacctgtcagctgttgaaataaatgtaccaggtttagtactttaaaacttgtcatgtttttgtgctttcggactatgtaaaaagaggacagagggcaagctatttctctggaagtaaaccagaactcactggggcccaccttaagtttcctactatcccttctttcactaccgtaaggaagaatagataaattaaatggtctcctagcaactctcacagtgcttatgctgtttataatgcagcaattgcagttttctaagtcagttcacctgcatcattatgtcaccaatttgtggactgtttttttgtttagtgttatctcttagtcataggcaagccagcatttggcccccttatatttttgtgttgattatccttattacgtactgcatattgccccagtagtgaggccaacctttttattgttcataatagcttcattttttctgttaacatttatatgtagcttagtatcttgctcaattaatcaagcaacataatgaaaagaaaaattactgattgatttcaaggcttttcaaaaacagatgttgaaatattcttggaattattattattaataaataatagcagaccctcacttaactgaaagccagctataaccttcaaccagaagactttaagattaaggaggcatagggcaataggaggacgtcagagacttccagaggatactaaagtatttataagtacttatgtaat

SEQ ID NO: 63062 - DNA, 1058 bp, Homo sapiens
gatgtatttatttttaaaccagtaccacactgtcttgattattgtagctttgtaagtctttaaattaagaagtgttagccctccaacttgttctttttcaaagttgcttttgccattcttggtcctttgcatttccatatgaatttttgaatcagcttgtcaatttttatgcacacacacactcaaaatctactggcagtttgagattgttttgaagctatagatcaattttggaagaattgacatctaaacaatatcaagccttctgacccatgaaataagatatctctcttcatttatttaggtcttttatagccatatttttgtagttttcagtatcagatctttacatcctttgtttatgaaatctctgagtacctcaaattctgaagtttcaatttctaatagttcattggtggtatatagaaatggagttgatttttgtatattgatcttgtgtttttcaaccttgctaaactcacttatttgttctagttgtgttttgcatagattttatattaggatggctctaaaatagactttttttccaggtctagattagctctgcttctaaagcatgacttttctggggtgtctatcaaatgacttgtgcattcaacaaagtttcttcattctggatggttgaaattaaaacatcccccagccttgtaagagctttggtagtatttctttagttaattttgtagagaccctgtatgtatgtatgtacagcttagaatttagtcagagtatcaagggtgccttcatagacatttctttgtctgtgtattttcctcaaattccagctgccactacttcctcagattctgatctctgttcagtgagatcactgtgctttgacgttcccctctctgtcccacagttaagaaagcacctccagacaaaaacaagtgatcatgagacttgctttgtttgtttctttttcctcagggtttacagtgcttgctgcctgttgtctgtctaaaaactgttgcttaataattttgtccagtttaacagctgtttatggtggcaagatttgtctagtcacagttact

SEQ ID NO: 63063 - DNA, 1086 bp, Homo sapiens
tgttaactattgcaattttatcaacagtgacatttccttcagcaagtgccagcatggtgacagcattggctgtctagatctggaaatcttacatttgtatgactaaggtgccgctagtaataatgtcttaatgttgctgtagactaaaattttttcatagaaaaatcctcatctgtatcatgagatacatctgtttgagaaacagtatgaacagatcagccatctgaggtctgccttgttggagctgctaggtgctagagaaattcttttgagtgttatagctcttctgtctgtttgagtctagtagattctagtcttttgtttgtgtttagcttttaagggtcaaggtcatactgaggttaaaactgtcttgttgggttgatattaaaatctggacatagtattccatgctgacttttaattctggtattggaagaataattcaaagcatacttgtttttatttaatattgttcaaataaattcaaatttaatacacatataccagaataaaaagtttagataaattttctacaaaatggtaaaaccactgaaatttcttaccattggctgtgaactaaacagattatagaatatttctgtgatttagtttattactaaataggaaatatgtatgaagacatctttgagtatgaaaattctaaatttcagtatatcatagattttagtttttaaaattatagaactgtattttttgtctttttttttttttttaaatatggaacacggtcaggtacagtggctcacacctgtaatcccagcactttgggaggctgaggcaggaggatcacctgaggtcaggagtttgagaccagcctgaccaacatggtgaaacccagcctctactaaaaaatacaaaaagtaggcatgtgtggttgtgcacgcctgtaatcccagctgcttgggaggctgagacactagaatcgcttgaacccaggaggcagaggttgcagtgagccaagatcacaccactgcactccagcctgggcaacagattgagacctgtctcaaaaaaaaaaaaaatagataaataaaaataaaatatggaacacttcactaatttgca

SEQ ID NO: 63064 - DNA, 1145 bp, Homo sapiens
catgagggctgcgccctacgacctaattacctcccagaagaccctacctcctaatatcaacaccttgggggttaggatttcagcatataaatttggaggtttggcattcagatcataataccatgtagccatattttcgtgcacattaccatttcaagcaaattgcctcttttgaaaaaaatggctgaattggttataggatatgtcagggtaagtttctgactttttttttagaatttagtatttattttgtatttaaaatcttgagtttttttcaggaacattgaaatatctctgaggagacgctttttaatgattttgcctcaaatgtaaaaatttaaaaattttagcaagatctgcataaacgttattttggatcattgttaaatttatttatatttatgtataagaattgttttaatattttctgtgattattgcaaggattttgttttctagtaaaattttatcacgaaaagctaagatacgctaagtaggttatttgcttattagcttcttagaaatgttttggtaacttatataaaaatgaatattatagtagagattgtttcaaggaaatatagctgagagtattatgaccagagtctactaaattccttgtgccttttaacacagaatgaggactagtaaggacaagacatgaatacattgtctctagaaagatgattaaagaataaaattggtaacactgcatattgtgtgccagaatgaggttatatcagccttagaaatatttagaaactctatccatgacagcattatggagtagattagaattaaaaattcattcattttttagaaggattttcattgtgaagcactgccagtcatccttcctttccatgctaaatctgaaattatcatctcccaatccttccaaatccctctcaattcttgctctcctttccttccatttctccttctctcatctcacaagctattctgcattaaagaaagatggacaaagactttcgactttgatgaagagaggtgaagtcgtagaagcaaaacctgccaggccagtgactgtatacagtatctcccttcaaaaattccagccaccatttttcacattaggtaagatggagaaatttgaaatcatttgtatttacgtgtatttttaat

SEQ ID NO: 63065 - DNA, 2348 bp, Homo sapiens
tggtatgccttgccagttaatttaaaatgtgttcatgagtttgtgctgtttgctttctccacactctgacttttcagtctcacaaacacatatgctactggatgaataatttatgttttagtgcataaatattttatcactcaattgtttgcatagtgcatttttacatttgtttagggacatcatttctatgtaaagtggatttcataggaggttagcaatttactatgtcactgttaacattccagatgttgaatgtggaggaggtttttatatcagaagcttggtcagtgacattggaaaaggtaagcataaaaatgaattatgaattatcatttagagaataatactccttttcaattggaagagggaattttccgtttttcttatttctgagtactggccttaggaactgaactcttgctgccttcagctttaaaagcattgtaggtttctggcttgcaattatcagcctcagcagctgcagtgaaatgtttgtaatgggaaagaagagaaagagagaacagaaaacgaagacaggaataatgaacgtagggccaacatcttttcaagtacaaaagattttaactcaaactagggatcaaaaaaaaaaaaagatttaaccttctaaaagttattttcaaatttttttaaactggaagccgtagtcttataaacagccagaaggtttcggttctggctgtgccatttactggcagttgtcgcactggacaggtcatatgatctcatctgtaaagtgcggctaatctttactccatggggttggctgcatgagttaaataacaaaaatgtgtgcaagttctttgttgattttaaagcagcttataaggtggattattaagtattattttgctacttaatcatttctttatctgaggcctcttggttcttatattggattattatacttttgggtggttttgagagatttcaattgagtacggtcatttgaacaattacagactatgaaatactgaatcgtttatcttctggattttttttctaccttttgttgccatagaactatcttcctgtgccaatgtgctagagctgacccgaaccaaacagggaccatttacgctagaagaacatgcccttcctgaagacaaatggacaattgatgacattgcacagtctcttgagcattgctcatctcttttcccagcagagttggcacttaaaaaatcaaaacctgagtctaatgaacaggttttgagctgtgaatatataactctaaatgagccaaagagagaagatgatgtaattaagacgtgttgagattggcctgggaatatcatcattttctagttgacatttgaatcctgtgtgcagatgcagaatgacaagctgcattcaaaagacaaacaatatgtcttttttttttttgcatgaagaaaaatgtctatcatttacagtttcaatagcacataatttattttctatgcattataaatggccttgcagttggctcagttgtttgttgtgttgtgaaatgttttaggattttttgtattgtgaaaatatgaatatgattggattcagaaaaattaactttctgaatttgatctgtcttcagtcttgtgaaaaagttgaacaaatttcctaatcaaagaaaaaagtatgagctccatgtttctttagtttcacaaaaatgaccataatttagtgttatttttactttatttaggcttcctggtggcttcattttattgaaattctttaaattgtttaaagtggccattattgatctctttcttctgttttggagagtttattattaaaaacatttctttgataaaatggccatcatctagtaatacctgtgtttgtttagatcttggaaatgaataagctttgataatatttgtaaatgaaccaaattattactgctaccactaacaggttgtaaatagaagactaatacttaattaaagtcaccttcctaccattagagcagaagacagctcctatagttttgtattttggcagctatgagatattttcatggtaatgtcaacatggtcaagcactttgtaccaagttattaagtaacataatttttaaaatttaaagaatgtgtcttcaactaaaaactttattctttagcatttatttatatttctctgtagggtgttccctgtgacattgtctctttagtttgctctttcaagagatacttacagatgttgagatggctgccctgcatttccagctaatctcttctgctctaaatatttaaaaacagttcttctcaaacattttcattcagatagctttctgaaagttccctatccctctttaccataattttttaaatgtagccacat

SEQ ID NO: 63066 - DNA, 1052 bp, Homo sapiens
tcaccacatatcccatactctattgttattgttggctttattgcctgtttttcctgtgaattttaaccttcccaaaagcaggaatcttatctcagtatatcacagagaatcactaagtatctatagaggaaaggaaggagagaaggaaagaagaaaaggaagaaggaaaggagggaagaaaggaagaaggaaaggagggaagaaaggaaggaaggaaggagggaaggcaagagggcaggaagacagaaaagaaggaaggaagaaggaaggaagggagggaggaaggaaagaagggagggagggagggacggataggagggcagaaactctggaaaggagcttgtcttactcctaagcttggtaaagatcagtcttgcaaggggcttgactagaaaacactggcttatctcactgaaccatattcccaatgtcattgactcctttcccctggggagtaattcaaccatgtgttcactgtatggatcagagttgatgatgaatattctcttgcctcagtctcttttggccagagttccttggcttccagcctgctccttgcttgttttgaacgaataatatatgactttccttcttaactggcaaatgctgaactgtggcctctcttaaccctcaagtctcccgataaaaagcaaaatattagattcgctgaccagcgctactccttaccccggctgatttcacatgaagagctatatatggggtggtaacataggtttaaggatggatgtgcatataactcctggataccgttcctgaaaatatactattggggattatttctttggttgaagagtcccttcactaccacatgtcagtccccttacctataaaatgggaaccttagggttgttataaggattaaatgagttaatgtgtataatgtgcttagcacagtacctgccactcaatgctattattgttgttgttgttattattattggtagtagtagtagcagtagttgttgtatgaagatgcatgatttcctgggaaaggtagcacattaaggcaggatcagtcatgagttacctca

SEQ ID NO: 63067 - DNA, 1058 bp, Homo sapiens
tatatactgccctaatagcactatttttccttcttagtattgtcaaaaatgaggtgtttaattataattttgatagttatttaaacaaaatttttaagagattgaggtataattgtcaaacagcacaatttaaaatgtacaatttatttaaattatacaatttgataagttttgtcatatgtatttgcatctgaaactgtcaccacaatcaaaatcatgaaaataccaatcacgctagaaagtttccatgtgtttcctttgtaaaccctcccttttctagttgccaattcctgtcccagggcaactattgatctgctttctctcactatagatttgttggtattttctagaactttttgtaaatagaatcatacattatatacttcttttttgtctggcttctttcacacagcgtgtttattttgagattcattcatggtgtgttagtagtttattctactgccgaatagtgttccagtgtctggatacaccataatttgtttatccattcaactgctgatggacatttggattgtttcaaatttttggctgttccttataaagctgctacgaagtttcatgtggaaggctttttatctttgtatggtcatatgctttcctttctcttggggaaataacctgagaatggctggatcatatgggtagatatatgtgtaactgttaaagaaaccgacaaactgttttccaaagtagttgtatcatttatgttcccaccagcagtgagtcagtgttctatctagttaatttcacatccataccaatacttggtatggttagtcttttaaatttttgtgattctaataagtgaatggtatattattgggttttagtttgcatttcccgaattactaatgatattgagtatcttctcatgtgcttacttgccatccgtatatcttctgtaataggcatttattcaaaccttttgcatgttaaaaaaattttcttactgatttttgtgagttctttacattttctggattactagcttcttatgaggtatatcatttgcatatattttctaccagtctgcggct

SEQ ID NO: 63068 - DNA, 1050 bp, Homo sapiens
tttgtccatttttgctttggttgtctgtgcttgtgggttattcctcaagaaatctttgcccagtccaatatcctggagagtttccccaatgttttcttgtagtagtttcatatgcttaactacctgttattatgctagacattttatttgaaaattattgatagaaataatttaaggcccaggataatgttatctttctttagagagtaccatgtatcttctgttaggagacttggcatattggcagttctggcagcaccataagccgattttaagacttgggagttttctgctgctcagatgactcatagctaacctacagttgaggtaaaggctggttaacttctggtacaccactattttaatagcaagtcattatgtcccaagtcaaagtgccctgttgtttctttgaacccctatgttttgtgggttattgcttccaacttttgtcctcctctccccttgaggctactaaatgcactctcaaccttttggcagtctcttctaaataagcaaatctctcagaacaaaagcatctctgaatgcctgcctcctcttaaagaatttgcaacttctggatcttggctttgtacattttatcattttgttacttgtaagattttaaaattgtcctttaactttttaagttgtcttcagtggagagtttttctgaattactgcacttagtattaatattattggaagtgaaaaatcagggcaagttatttaacttgttacttaaaatgtgcttcagacttctcatctgtaatatggagttattaattatttactatcttataggttttttgagatttttaaatgaggcaacacattgtgtttatagtggtacctgacatgtagaaaatgcttaagttattattacatttatttgagaatataggaatttgttgctcttcaaagattttccaagcatgaattagccactttattacaaaagtaatttgcagggattatgaaagatttgcaaatgacattaacattgactgacatttctgtcaaccctgatttaggtaaattaaagtttttccc

SEQ ID NO: 63069 - DNA, 1153 bp, Homo sapiens
acctaaaaatcccctatgctctgcctattcattctttcctctccctacccctgccaaccactgatctttttactgtctccacaattttgccttttcccaaatatcatatggttgtaatcatacagtatgtagctttttatgattggcctttttgacttgacaagatatgtttaagtttcctccatgtctttttatggcttgatagctaattccttttcagcactgaataatattccattatatggatgtaccacagtttgtttatccattcacctactgaaggacatcttggttgcttctgtaaaatttgtttaaattttagtaagtcacctgagggaaaaaggcaactttgaaaagaactgatctcttaaaatggcttccaaacattgggatagaagagcaatttttataacacatgaaaagcaagatataagaaattgaattcatgttcatgtgtaaagaacacaatagaacagtaattttcaaagtactctgttttatataacttttaaaaaatctgaggaggctgaggcaggagaatcacttgaacccaggaggtggaggttgtgagccaagatcgcaccattgcactccagcctgggcaacaagaatgaaaatccatctcaaaaaaaaatctgaatgatgggaggtctttggttgaaagcaacagaaacaatctggcttacttgagcagaaaagtcagttattggaaagtatgcagagacagagactgctgtctcctagcattcattatagaattctcattgtaatagaattctcatttagctcagcacatggccttccatctacataccaaatttctcatgctgccttgcagctagtatggctatgttactgtattagtctgttttatgctgttgataaagacatacccaagactgggcaatttacaaaagaaagagatttaatggacttacaattccacatggctgggggggcctcacaatcatggcacaaggtggaaggcatgtctcacatggcagcagacaagataagagagcttgtacagggaagctccccctttttaaaaccatcagatcttgtgagtcttatttgctatcatgagaatagcaagggaaagacctgcccccatgattcagttacctcctactgggtcccgcccaaaacacat

SEQ ID NO: 63070 - DNA, 1022 bp, Homo sapiens
ctttagagttaatgctgaaatgagttatgacttcgggggactgttgggaaggcatcattggttttgaaatgtgaggacatgagatttgggaggggccagtggcagaatgatatggtttggctgtgtccccacccaaatctcatcttgaattcccatgtgttttgggcgggacccagtaggaggtaactgaatcatgggggcaggtctttcccttgctattctcatgatagcaaataagactcacaagatctgatggttttaaaaagggggagcttccctgtacaagctctcttatcttgtctgctgccatgtgagacatgccttccaccttgtgccatgattgtgaggcccccccagccatgtggaattgtaagtccattaaatctctttcttttgtaaattgcccagtcttgggtatgtctttatcaacagcataaaacagactaatacagtaacatagccatactagctgcaaggcagcatgagaaatttggtatgtagatggaaggccatgtgctgagctaaatgagaattctattacaatgagaattctataatgaatgctaggagacagcagtctctgtctctgcatactttccaataactgacttttctgctcaagtaagccagattgtttctgttgctttcaaccaaagacctcccatcattcagatttttttttgagatggattttcattcttgttgcccaggctggagtgcaatggtgcgatcttggctcacaacctccacctcctgggttcaagtgattctcctgcctcagcctcctcagattttttaaaagttatataaaacagagtactttgaaaattactgttctattgtgttctttacacatgaacatgaattcaatttcttatatcttgcttttcatgtgttataaaaattgctcttctatcccaatgtttggaagccattttaagagatcagttcttttcaaagttgcctttttccctcaggtgacttactaaaatttaaacaaattttacagaagcaaccaagat

SEQ ID NO: 63071 - DNA, 1029 bp, Homo sapiens
ttcccagaagaaactggattgttaataagaagtggaagatatggtgggaataaagatttttagagcaagaggggtaaatgtagcttgttgtaatcattccagatatagtcttatgatttagtatgtactgaatctgaagttctccaataaaagtcaaaacaagatttcaatgcaagtgttctctcttctaacaccattttaaaaatttgattttgttacagtatccaaagtattctacacatgttctagacccataaaatcaatctccaaaggccaggtattaacttttgtctattttaaatatccacaactattctgacaatctgttaattttataagacaatgaattgtgtgagtggtaatcattatactagatctgttccaagaatacttggctcttacagtttcggtcaatgatgctattgtggcatggaaacaaattgccctcttgtttaaagatcaatggtttccaatttactctttttgggctgcagaaggcttaaaacaaagttttacaaggaatctcaatatgtaaaatattgcaaagtgatgacactatggttgaggcagaaaaggaagagtcacttatcttccatcctaccccaacccatctccttatataacccttgcaccacacattttgaaaactcctggtattatcaaaatatgtatgcttagaaaagactaacttcaaaaattttaaagaccagatttttgaataatcgtaactgtcaaaatcatatttcaaaaacatctaaaataataaattataaaataatgaaagcatgtatgtcaaaatttcttctaggtacaaaagttaaactgcccattttattagactggtgcatgtataatgctcacagaatatgtaaatagttgcctaatatataaatattaatcacaaattcaatttttttattaataaaatgtactgaacctcattgcaaacagaagattttactaaatcaaactattacaaaatgtctacttactaaaaaggaaactgctactgtattatcagccagtcaa

SEQ ID NO: 63072 - DNA, 1032 bp, Homo sapiens
attaaaagtactctagagaagtaataacatttctacatgaagcatacttctatgtgcaatgacagctatggacatactgagttcatgtattcacaaatcagtctcactagcaaatagacactaccacaaaaataaccacttttactctcggacaacaattaaaaaaaaaagacattttggataaaaatccagcttaaaaaacagcaagaatctgaaaataaatacttactttaggaccatttgaaaagaactgtagttaaaagtatatccaccaatcacccacataaatttcccgtgtaaaactgctttatgtgaagcccgacctacagaaggactgaagggtttaacgtttggcagaatccagtaagactcagtagagggaacattcaaagaacaatcaggacctattaaaaaaaaaatgaaacaacacactagattaaacaaagccctcagattatagaaatacaacatatggattaagagaatttaagaattcaatgtttatcatattaacaaatatatacataaattatctgaaatataacttacaagaataatactcacagaaaatgtaatgcttagaggcgaaaaaagtcatatactcacaatcggacttggatgttcaaataaatttcacaattttaaagaattatttaaataatataaaatgtcagatttattttagtatgctacaagagtattaaaatagaaaacaatgtactcaaatatcagttctgtcagggaagtatgtttacctctttcatcatcaagcctccatctacacaaatggatataataatctaccaccaagggttataataaatatttatttttttaaaatagtggaagtaaaagcatttaaaaattaaagtttaaaaattattaactattaaacaaacataaaaaagattacattttttttagcattattaaggacaaccaaagtttgcttcagtggagtcctcaaaaagaaaaaaaaattatgcatcataaaataaaaattattaaattagtgcagaataatttcaaata

SEQ ID NO: 63073 - DNA, 1050 bp, Homo sapiens
acttttatagctctgacatttgagtgaagacatgcaatatttgtctctctgtgcctggtttatttcacttataatgacttcctgttccatccatattgctgcaaatgacatgatttcattttagggggactaaacaatactccattgtgtatatataccacattttctttatcaatttatcagttgatggacacatgttgagtccatattatggctattgtaaatagtgctgcaataaatctgagagtgcagatatcgctttgatatactgatttactttcttttggctacatatctagcagtgggtttgctggatcatatagtaattctattttcagtttgaggaacctccgcactgtttaccataatgactgtgctactttacatacccacacacttatcttagcattatataaattaaccaataagcatttatttcctatgcacaaatatagcttgtttactgataattttttaagactgtataaaatgaatttggcagtagagaagcttctataaaaataagtcactgttggattatgtaacatgaaaagaaaattcgtatttttttctactggtgtaatacatatgaaaactgaagtcccaaattataaatcccaaatgcttatactctatgctcaaatttcctccatttgctaaaatatacaaaaggaagcatccagccaagaaacaggagcctgttttaagaagcttgctatcaattgttatcttcccaacttctctttcttcctccaatgaattaggaaaggaaaggaagtgcccaagtgccccttcacaagaaaggtaagggttaccaaatttgattgcagcattgtttaacttatttcctaccttggaattgtaagataaatgtgtatgatacaaacgaggaaacataatcagaacataacttccacagattcacaccactagtccacccatctaccagtatctgcagccaacacactgctttccaagttatcataaattagggctgtacaaactatttctgtaaagggccagacagtaaatattttaggctttgtgggc

SEQ ID NO: 63074 - DNA, 2092 bp, Homo sapiens
taattgtcatacagtaagagaacactaaactactgctttaagaatggaaaatgcaataagctaataaagaacttacaatttaagggtgaggtagtcctataacaaagaataatgtactcctcccatataactgaagataacaaactaagttgttgattaatattactcatagtcttcaatatttgaatcatctgagtccctagtagctttgtgctattctcagttatttactgttttcatcacgtgctcttcaccaaaaagacatatcacatttgtgcatcatgtagagtacacctctgttaccatttctaatggctatagacagacaccacatgccttcagttcacctttggtaaatccttgtagaacttttaaattatacaaattatttcaaatgcatatgatggaaataaatggtacataaatgatgtaaattatcattatttcaacaaactagaaatagaaaaaaatttttccaacctgacaaaagatatttaaggaaactcacagctaacattatacctaacagtgaaagactagatacatttccctaaggtcaggaacaagataagcatgcctgcttttgccacttatattcaacattgtagtggatgttccagctagagcaaaaactaaataaagacatccagattggaaagaagaagtaaaatatttctatttgcagatgatgcaatctggtatatagaaagtcctaaaaatttttttaaaaagcacttagagctaataaatgaatcagcaatattacagaacataagatcaatgtacaaaaagtaaattgtatttccatacacttgtaatgaacaccccaaaaatgaaattgggaaaataattacattgacaaaagcatctaaaagaataaaatacttatgaataaatttaataaaggaagtccaaaccttatactctgaaaattacaaaacattgtttaaataaatttttaaaagatataaataaatgaaaagacatcccatgtttatgggtctgaagacttaacattgttaagataatactctccaaattgattaagaggataatactctccaaattgatctacagattcaacatgatccctatcaaaatctcagctggcttctttgtagaaactgacaaattgattccaaaattcatatgaaattgcaagggatgcagaacatcagaacaatcttgtaaaagaacaaaactggagtactcccacttctcaaaaacttactgcaaagcaaaagtaatcaagataggttgggcatggtggctcatgactgtaatcccagcactttgaaagtccgaggcgagtggatcacttgaggtcaggagttcaaaaccagcctggccaacatggtgaaaccccatctctactaaaactataaaaaaattagctgggcatggtggcaggcgcctgtaatcccagctactcaggaggctgaggcaggacaatcgcttgaacccaggaagtggaggttgcagtgagccaagattacactactgcactccagcctgggtgacagagcaagactctgtctcaaaaaaaaaaaaaaaaaagtaatcaaaacagagtgatactgggataaatcaatggaatagaactgagagtccagaaataaacccacacatctatggccaattgatttttgacaagagtaccaagaccattcaaagacaaaagaaaatgtcttgtgaacaaatggtgctaggagaactggatagtcacatgcaaaaaaaaaaaaaaagaacttgcacccttactgcatactatatacaaaacttaactcaaaataggtcaaagaactaaatgcaagaatcaaaactataaaactcttaaaagaaaaaaaaaattgggttaagtctttatgacctgagatttggcaatgaattattaaatatgacaccaaatcacaagcaataaaaggaaaaaaagttaaattggactttatcaagataaagtccaattttttgtgtttaaaaagataacatcaagaaagtgaaaacagcacacgaaatgggtgaaaatatttgcaaattatttacctgataatggcttgtatctagaacatatgaagaattcttacaactcaat

SEQ ID NO: 63075 - DNA, 1157 bp, Homo sapiens
gcctgccaccatgcccagctaatttttttatagttttagtagagatggggtttcaccatgttggccaggctggttttgaactcctgacctcaagtgatccactcgcctcggactttcaaagtgctgggattacagtcatgagccaccatgcccaacctatcttgattacttttgctttgcagtaagtttttgagaagtgggagtactccagttttgttcttttacaagattgttctgatgttctgcatcccttgcaatttcatatgaattttggaatcaatttgtcagtttctacaaagaagccagctgagattttgatagggatcatgttgaatctgtagatcaatttggagagtattatcctcttaatcaatttggagagtattatcttaacaatgttaagtcttcagacccataaacatgggatgtcttttcatttatttatatcttttaaaaatttatttaaacaatgttttgtaattttcagagtataaggtttggacttcctttattaaatttattcataagtattttattcttttagatgcttttgtcaatgtaattattttcccaatttcatttttggggtgttcattacaagtgtatggaaatacaatttactttttgtacattgatcttatgttctgtaatattgctgattcatttattagctctaagtgctttttaaaaaaatttttaggactttctatataccagattgcatcatctgcaaatagaaatattttacttcttctttccaatctggatgtctttatttagtttttgctctagctggaacatccactacaatgttgaatataagtggcaaaagcaggcatgcttatcttgttcctgaccttagggaaatgtatctagtctttcactgttaggtataatgttagctgtgagtttccttaaatatcttttgtcaggttggaaaaatttttttctatttctagtttgttgaaataatgataatttacatcatttatgtaccatttatttccatcatatgcatttgaaataatttgtataatttaaaagttctacaaggatttaccaaaggtgaactgaaggcatgtggtgtctgtctatagccattagaaatggtaacagaggtgtactctacatgatgcacaaatgtgatatgtcttttt

SEQ ID NO: 63076 - DNA, 1085 bp, Homo sapiens
cttatgtattctggacacagtgacagtaagccagaagctaaattcctcaagaaataaaacacagccatctgagagcaaaggatgagtgcaggaaggtgaagtaataggtgatatattctgatgatgtaagagtcaaagccaggcaatttaaaggaggaggaattgagaatagagtggaaatggcaataagaagtaaaggggatatgtaacccacttttgacccagctgtactgagaatatgtaaacaaaaacagccatcacttgaaaggactgcaagggaaacagtggagtatttcgaaggggagtcttcctctgagcatacaagtactctcttgctaatggtggtctgcaaatgagttttctcattaagactgcacaaggactctaaatagttgtatatatagttgtccatacacaaaagagccaagaatttgagttcatcatactggccagagccagaaaagaattattttcttgaatctgaataaccaccatagggcatatatttgtaaacaaactaaaaacaataaagaaggttaccactgttttaaaaatgttataaataattcaaaaaaatgaagtaccagaaaaacaaaatggagtaaaggtatagtacaaaaactcacatgtagattgccctagacaccttcaccttcacataacagataataatctcttatagaagccagcagactatccttgagaagctgactttaaagaagtaatacatacataaagatatagcagtaagattagaaatagaatgctaaaaaataaaaaatcctgaaaccatgcaatgcatagtaaagagactgggatagtttcagtacttcgttcataaataaaatccaaagaaatagcaccacctactggaatttcacatatttttttaaaaaattcacaaatcttagaaaatgagactattaagtaatatttcccctcatttggttaaaaaggtaagcttaaatattaaaggacaaaatctaacataatcaaaaaagcttatattaaaaattattaattatcagcttataatttcaatctcaaataactcaccattttgactaaattcatatgaagatttt

SEQ ID NO: 63077 - DNA, 1114 bp, Homo sapiens
gtaatcccagctactcaggaggccaaggcaagagaatcacttgaacctgggaggcagaggttgcagtgagccgagattgtgccactgcactctagcctgggaaacaagagcgaaacttcatctcaaaaaaaaaaaaaaaagaaagaaagaaatataattgaagtcttttttccctcactggaaaaaaataaaaataaaaataaaaagttgataattacagctgaaagttataaatggtaaagtttaataaattccttatgtgttaaaacttactgtgctttttcacaggctaaaggaatacaacaattgaagaaaagacctaaacaataggccaagaaaatctgaggtctccactatcagagaaaagtcttcacatagaaaaataatgaagacataagctcccattataagttgtacaaacatatgcaaagaaagttatgagatgcctcatttaacaaggctataaaatgaagatcacaatgaccccaatattcaaaatcattacaccaaagttaaagtgcctgagcaaagataatatgaatcagcaaaatataccaaaaacataaaaggaatcatttttgagcaacaggaactcctataagttcaagatgtttattctctcttacttattaaatgtaacgaaaccagatgcaactactcctgaaggagtgggatagcagaaatgactgaaattttatgtctccattcttttctaacactgataataaaaacgtaatttgctaactttacataaaaaattgaccctcttttggtatgtcaaattatcataatcttttagcatataagaagtcaaattgaactcagatttctatttttttataaatttttatgaagtataatatatatgccaaaagtataaaaatcttaagtgtatagttcaatgaattatcacaaagtgaacacataaccactccagaagctttgctgctactcattcaaatactacacaatcataggcaatccctatcataacttctaagcccataattctgtttttcctggtgctgaactttatatcaatagaagaatatactgttttcttttatgtctgatttattttattttctgttcctgcattaatttctcttaggat

SEQ ID NO: 63078 - DNA, 1081 bp, Homo sapiens
aacattgtttttctatgtatcatattatatataaaacctagctgatatttaaaatatacttatcagtacttaagagcaccttttattgagggtataaataaagtattataccaatttgaagcgattaggaaacatttttataagtaaaataaaagaataacacatttaatagatgtaagaagtatactttttctcttaaacctcataaaggcacataatctgctttggtaaattatttcaagtagaatcatgtaaagaaaactctgactattaataagcactttaatctttttactattacagttgtttcaaaggaaattcctagtagtaaagttaagcatggtttttaaatctaagtaatgaatgtcattctgtgattaatcatttgatactagtaatttgatctttttctttttgaaataataatttgaagtggtaactcctgacgaacatgggattgtctcagcttttaggaggctcatgaatcattgtttgaaattagtaaaatgggttgaatgaagtactgaatctaggctggcagtgactttatctcattgctagattgggcctgtcaatatattattgttttggctatggtgataagaccctgggcttatttttctggaagttgatgaaagttttgtttgtttgtttttcttctggggaaaaaaaatcccacaaaaagtatacattgttgttgtcattgttaaaaatccatgaagtggaattttgaacttttgcaaaaggttcttcaaggagcttccacacaatgtctgtacttcaatgaagaatttaaggttgagctattttctggctgacaaaatgggaatgtatttttatttttttcatattgttgaagattatgatatatcaagttttatgtgtcaaaaaacttaagtgaaaaaatttggagaattttgtttcagaaatagaaagatgtcagattatgatgattctaattactactatttatttaatttccttctatgtgctaggtactatgttaagtaatttatatacaaaatctttaacctaccttgtagcatggtactattatcctaatattcagaagattaaacag

SEQ ID NO: 63079 - DNA, 1033 bp, Homo sapiens
tgttatagatgtaattacttaaataagaaaacaagtaattcattactttaacttttacaactaactgtacttaagattattttcttgttccataaaggcttttacctaaacaaaattaatttgttttaaaaaatcttgtatctatatgctttcatgaaataccaaagcatgcctttataaatatgacatttctaagaagttgaaatctaaaacactgtattgagaatgttcctagtcactgaatgatgaattattttaaatctcaaatttacgttagtatatatgtcagttctgagtttatattgaaataatacacatttttcttaaccactttccatagtttctatatagttcatagattatttatgattttcattttttatctagaagttttgcagttaaaataattcccttctatataaaaaagcttttttgagaattcaaatcattaaagtgatttaaatgttttatcctgatgattatatttttaggtattctttcagtgaacattgtatctgccattgacttttgtatgcatacatgtcatatttgatttagtatttaactttcaaagaggtgtgccctatactgacattcataagttttacttggaatatttaataaatatatgtcttcgaaattatcttccaatataaaatacctctaagttcattcttttcattttcttgttctcatatgcttaaaattatttgtgagaattctaggcaagagttatttttatttaatgaataatgttagttgagtaaatacactaaattgtaggtcatggaaaattaatgagaatttttttttgcttcctgcttatgcatagtgtatctttaattcggccaatgatgttttcatattatttgtcttagtttattcttttatttcattttttgtttttctgttttcttttttctagcttgtgatgaatggaaaatactaccaaaaccaaatcttcatagagatgtcaacagatttggacactctgcagtagtcattaacgggtaaaagaagcacatttccaatt

SEQ ID NO: 63080 - DNA, 1033 bp, Homo sapiens
cacttacaggacatttactttgtaagatgtggaatgctatggaaaacgtggctgggaaaaaattgtggctgggaaaataaacagtgctggtatacaaactaggtcatagattacattactgcttataatacttaaaattatacaactttatatactttgtaaagaattacaaatttcaaaggagttatacattttcaaatttaataaaaattttaagaagtattgatatatcatctttgtttttatctacctcatcatattataatgccacagttggcttaattgaaacatgccctgaacagcaaagcaaagaaaacccatacaattgtgttaacatgaagttaaaaatgaaattattgtatttgtttatttattccagttagtccaaatcaaaatgcgaggccgtgcaaaaagccatgctctctgaggacatcatgttccaactgtacaagcaatggcatggagtgtatgtggtgcagcagtacgaaacgatgtgttgactctaatgcctatatcatctcttttccatatggacaatgtctagagtggcaaactgccacctgctcccgtaagtatttatctagagtgacttttcacttgacagcaacgtaaatttacttttctgtgatgtaaagaagaattaaatatttgaagaagtttcaaaaaatgagaaaaaatattgttacggctacttttgaaaccaactggtactgttaacctctgatttttattatatcatcattttgcatgccactaagtatcttaccctaaatattaacatattgccacatatgtacagcctcttttccctgaactgtgtgtatgttgcagacagtataacacttcatgagagtgttcacctcaaacatcacagattgctttggtgagcctttttagtatcttttaatctagtgcaattcccatatcttttccttatatgactttgatatttttgaataacctataccaattgttttggaggtttctcaatttggatttgtctaatttttccctcatgattagattcaggaaa

SEQ ID NO: 63081 - DNA, 1058 bp, Homo sapiens
ctgcctctctgattttctgtttatggccagtgcagcatcagtgagggtttacttggaatgactgtatgttaaaaagtaatcccatggaaaaagagcttattaaatataaatatataactattaggcaggaagtggaattctctgcagaggtaaacaatcttctagacatgttagatgatctattacagtaaaattatagattcaggaaggaaaaatcataattataggcaggtagtgtgaaggccttccttccctaatggaataaggcaagtgacaatttatgtccttaatcattagaagagaaggctgaatcaatcagggagcctctgttcccattgcatcctgaggagcactatttaaatatctgatctctaaaatttataaaatgcatctatgtaaatatagcattgtgaaaatatcaatttgtaagtaaaaaatatctgccattaactggcagctgaatgtaagtaagttgtctagttaaatttccttacctcttaaaagaaggatttgtaccctagagctaattctcagttgtggtctagtcttttgagccctataaatgtttacatgtagtagctaaagtttagaaatgatatttaatatttgttaaaactaatatgaatagtttagctataaaactttcatacttctcaaaatgacaaattgattttggctaatattgtattatctcagtgtagtaatgctgtttattacatactaatcaggtgctctggcaagttgatactacttcaatttttaaaatatagatataaatttatcttttggaagtcaaaatctttcaatatatgtggtagatgtggaaaggataaaagacaaatagtagaggggagctagattaggatcactttccagtttttatctgtattattaatattactgtgttctctggaaattcctttaatataatgcccttctttccaaaactcatccaggtagtgcttctttctattaaagtgtataatagtgtttgcatttaatttgctactgcttccgaaaaagaaaatgtatcttgagggtttatgttatgctatagc

SEQ ID NO: 63082 - DNA, 1033 bp, Homo sapiens
tattaaagattttaaagccagcaacatcactttggtagtgatattttcaggtaatattgatcataaagcatatatattcatgtctacatgaactggatattatcttaaatgtctttgccagaatttagattctaaatataaagctctcagcaagttcttaatgcttggaaaaaattcagcttttgtcttagcaagaatgtgaggtagtgcataaaaaacaaatgtaggttcttctatactagatttttaaaaacgaaatttgattttggagtgttaggttttatttcaatttaatttaatttttaaaataagtaatatattaacataattcaaatttaggaaaaaataaaaagttataaattaaaaagtttcacatttatctataacctagtccacactttccctccctgccttcatagataaacacttgtttattatctatccttccaggtttcctttatcaggatgttgcatattccaatatcaacatatgcaaatgtgtaaacatgtatccctcctttattatacaaaaataatatatttctgtatttcgttaaacctgagttcagacaatttgcacaacatttttgtgtaccaccaagaaagaaaaaatcttggcaattaaagggtgacagcattgattataaagaacattgcaatgttagaaatattagaatgtgaaaaacctcatctgttagagttgaagaaatatggtatgtaccctctactacatattactcttgtcacttatcaatataacttggatatctttccattgccaacctcttttgtttcttttattataaatgcattctattttgtagtatgattataccctaacttatttagtccctataaacagactcttgatgtttttctttttcattgttatgaactttgtacattgttcattttgtatgtgtgcaggtataattataggataaattccaaatgggattgcttgcttaatggaaattatatttgtaatttttatagctatgagcagattaccctctgtagggttttaccacat

SEQ ID NO: 63083 - DNA, 1165 bp, Homo sapiens
caatgattgtacacagttttcttctttagctgtcactaagatggtgtcataatgtttagagatacgctctctaactgtcagcgtttgttacagttcagtgatgcgtgataaagtatgagggacattgtcttcttgcactgctaaatgtattaatgcagtgatgatatttctcaatgactttttactcaaggtcaaaatgatgaaattcatctgtacttttcaataatttgtttattaatcaatatatttttcatcttagcctgttccttcaagttttttaggtacattttaaaatttgaagcaaatgtatattaaaatttaaagaagactgtgtcatatttttacatttaattgtattttaaattaccagccattatttttcaattcatcttttaaaataaataaaacagcatttagttattgttctttttgttgctacctatgaaaatataacttgagatagactctagaattctctgatctatttgaattctctgtttatgatctctggatataaaaattacttaaaaaatgataatcattatatgataaccattcatactatgtatttagtaattgtgtcttatttacataatcctttaaagtttacaactttaaattgcttgatttcacaagcaatagttatttttgccctaataccaattctatatggtagagactttaggaaatataaccccctttttacagttgaggaaattgagctcattgttgttagtaccctaaggtcacagatattgaacttaaatctagaattttggaccccaattccagtatcttttctttagttccattcttatttgttcatatttatagacaatctgcagattgtatatcactgacataaatattgcaatgtgttatagaataatgaagttactgataatgtaattaaatattcactgcttctggattagcatttctaaatcactattctagtgatgtaatgtcattattcacaaaacttcatggttcattgccaaccctattccttcttcgtatatggaaatcaccatcttcttccactggaaatattttctcagattagagatgccattgtttatagattttcaattactgtagttgatctaatttcacctaggagggtatatattgattataaatgtttacatgggataattacatt

SEQ ID NO: 63084 - DNA, 1082 bp, Homo sapiens
atacataatataataggctatatttgtttatatatcttaaatgcattaaaagaatatgtggtacctgttactgtgcttagaacagctgtaggaattatgatttacaagcatgtataatatgctatctacctttcattctgcttggaaaaggatgacatatatgagtaaaatagtgagtgatatcatccaaattgtatgatatacattatcatataatagtataatatacgaaaagtgtgtgttagaggcagcaaatcctataggagttttgttaaaaatgagttcaatgtagtcatatgtcatcaagtagaactttttgggggagatgaggactaaacatggatggatgccaaaaaatcgcattggcttgtgtacacacaaactggacctgctgagatccatctgctttaggattaaggttcctctaaaactgaagagcgtcatgaattttctggttctgaaaatacttttagcacagtggccccatgaatctctatgccctgtgactgctttatattactccgatgtagccaaagaagtttacttggaattctagcacctgcctttgctcattggcaaatcccactgcttgacccataccattttcccacagctcccactttacctgagttttgtcctggacggtctgtcccaccatgctctcacctaaatccagccttcctacaatagcatccttccttgattcctgttctcattgagactaccttcctggcccctttgccagtgttctccgctaaagagatgttccccacagcttctgtggctggcttctccagaactttctaactccctataccaatctgtaggaagcctcacagtcagtattatgctgtgttctccatggctgagtcagatattcagaacgtgtgttttaaaagtagtaacagcttcaccatagcaaaagcatagcaaagaaaggcagtaaatcctgacacaattatgaatctcaaatgtattctttcttgctgtgctattagatatgagcaataatagtttataaggatatatgtaggcttttgataatttctatttttaatttgctatgaataatatatatgtga

SEQ ID NO: 63085 - DNA, 1127 bp, Homo sapiens
tgtaggttttgcataatggaagttgccacttaacaatattggcccctattttttattcactataatatatttttgagttacacattgactataatcctaggagtactttcttaattcttatattataatactgatctaatttttctcactgggaagctcagctgaagtgcataacaggttttaattaagaataaaaggaggaaagaaaacaaaacttcacatcattaggaattctgatttctgctgctctaacaaaaaagaccacaagcaatatgagattcatcaaatgtgagaaatgataactaaccatgttaggggtcacctataacaaactacaataattgagaaagtaaccttgacgcatttcagttgaagtgtgagtatctgtagtttattatattccagacagtatacattaccaaagatgtagggccaaattaactttaatgttgcactcttcacaagacattccatagctagcaataacattaagataacgctgttaaagtaagaatttcaattataaggcagatgagattgtgaaaacatgacagctttaatgagcaatagtagttgggattactttgataaggaatatagttatcatagatagaaaagaaacaaaatacagcctgcagccttttcttattgtgtcatgtcaccctctattgataacagctttgggttccaattcatttctattcattctcccaacctgtgctagaatgatgatcctttatcttacatatactgttagaacaccttccaattctgcattccttcattcttccaaatagctgatagcatgttatcttacttgctctcatcacatcttggttaagaaagaaaggcaatcaagatattggccccatcttgcaggtgggaaaactggatcgataactcagtggtaatactgggaatagattcagattacttgaaagatcaccaaatgcttattcaggaggctgactttaaccaaggaatatgtaatgaatagaacccaaatacagtatcattctttgtggttgtatgagacatgctcttgtttttgaatttagagtggtagagagagacatgatcttgtttttcactctggaatgacagccttcttttcctctgatcttatt

SEQ ID NO: 63086 - DNA, 1049 bp, Homo sapiens
aatcaaatcatgtaatcaaaagaaagctgaaaataatagcaaaaggctagttttattagaaaacttttgttctattataataatgcattatgtgaagtgcttggaattggcctcaaatactgttaaaacacatattaaagaagccaataattacactttgtaagtttgcctctttgtgggcaccctttgtcatctccttgtggaataatttgagaggtggaggagacacatagacattgggcgaggtaaggaaaaagttacaacacacattccagtgctctaagacctcattggaccacctgctgatccagatatgtgtatggtggagacacaaaaatcataaataacttcccccccagttaaatatcgctgcaattaaattctccatttgagaaaacaggattgaagagtgatgcccttgttgacagcatttattactgtgggctcacctacttccaaaaaagaattgagatgacttacaatgaaaaggaaggacaaaataacagcacatttgctgttgctggtggtgttggtgttgggttttgttttgttttgtgagtggtgtgttagaataaactttggagtcacagcagctggataaaaatcctagctttttctcttataagattttgacttgggtaggttaattcagttctttgaactttgtttccttaaataaaatcaggcacaataatgactaattcaggattgtggtgagaattaaatgagctaaaataggtaaaacacctaggatactacccaaaacaaagtcggggctcaacaataaccattactttcctcccttaagaagatggagattttaaggaagcttacccacaagggctcttttctctttctctgtcaacttattgtcttttaagtatctaagatcacaataaacatctccaaattatgtaaaaaagaaattggccattgtcagaattcattattcaccaaagcttctctgagcacttgctccatgtatgacacctcacacatgaactctggggaatatgagaagtagctggcatgccccagccccagcagaa

SEQ ID NO: 63087 - DNA, 1033 bp, Homo sapiens
tcattcccattttacagacaaagaaatatcagagcaaccagggttaaatgactttaccaaagttattattacaaccaggactagaattcataggattcttacttttttttttttttttttgagacagagtctcactctttcgcccaggccggactgcagtggcactatctcggctcactgcaagctccgcctcctgggttcacgccattcttctgcctcagcctcccaagtagctgggactacaggcgcccgccaccacacctggctaattttttgtatttttagtagaaacggggtttcaccgtgttagccaggatggtctcaatctcctgacctcgtgatccgcccgcctaggcctcccaaagtgctgggattacaggcgtgagccaccgcgcccggccagaattcttacttcttatctgcctcttaatcttgttaggtcaaaatctctcagcatttttagaaaatgccttttttattatattttcagcagatcatgagtctaatataccagcgttacccttttctatgctttccttccttgagaacgctttcaggagagaaatcagttatagttttctgtctcttccaaatagttaaaaacataagagatcatagatgtagtaaatcagtttagaatcccaatgccttgattgggatgcttaattttactataatagcctaatctgaaatgttatctgaaaggcttatttcttcacattcttttctacaccacaaaaattgttcataacaagaacaatcttgggggaaaaataagatgagatgttttagacagcttaatggggctgccactgtcttggataaccactgtttagagctgtcttggattagctgaaggctagtgttgactgaacatattgaacaccatcttaagttgtactttaagtcaggatagacagtccttacaagaaatgaaagctgctcctttgaccattataggtgttctgtggctagagatgaagtgccacactaacagaacaaagcttgcaatttgtggaattgaattccaagg

SEQ ID NO: 63088 - DNA, 1003 bp, Homo sapiens
atgacaaattcttttatttttccataaaagaacttgatggtttttatttgacctactaaccttcggccagggtaattttgacagtgtctgtaagataataaagtggcaattatagtagtaagtttgatttaaaacacctttaacataaaaaagaatacttgttaattcttggaagtaaaaccacaagtgtttatacatgtgaatatatataatattctttaataaattctatatctttagtagatatatggctgttcaagttatatagttcttgagtgagttttggtatttttagattttccaggaatttattattttatctaagttgtcaaatttattggcagtctcttatcttctaaatattcccttattattttttaaaatgtctgtaggaactatagtgatgtcttctctttcattcttgatatatgttgtttctttttcttggtctgtctggctagagatttatcatatttattgatattgtctgagaaatagcttttgggctttatggattttttcctttgtttttctattttgcatgttattgatatttgtatctttattatttccttctctctctttaggtttaatttactattcgttagtgtcctaggagggaagcttggaacattgattagagacattttttctttcttagtataagcatttaatgctataaatttcccttcaagcatcctttagctgcattgcacaaattttgacttgttatattttcatttttattcaattcacaacttttttcaattttccttgtgactatttctttgatctttggcttatttagaagtgtgttgtttctaaatgtgtcacaattttccagatttttaaatttatttttagtttatttctattttggtcagagaatattactctatggtttttatcttttttaatttgttaaggtttgttttatggctgagagtatggtctgtatggtgaaggattcatttagatttgaattgaaggtgtattctgctct

SEQ ID NO: 63089 - DNA, 1050 bp, Homo sapiens
atataaaattgtatttaaacaactactttttgccagtcactatgctaagtgccttattcttatattattctttataatcctcaatgtaaactttcaagattggcattataatctctattttctgtatggaaaagctgtggcacacaaaagttcaataatttattcaaaatcccataatatttgaacccacacccacttcatgtccagtaaagtcatttgggtctgctgaagtatttctagactttatagtaagattattttcaaactctattgtcaaaattcttgaaattgcaaaggctactccgtctacaaacttcaagggacgtaagaggatggttacagactgtcaagaggatgtctgtggtacatgggattggtaatgtagaaattaggcagtgctttgaatgttactgacaggtcacagcacactgacagcaacagggaagaagatattgtggaaaataagacaacctcttgagaaggtcatctcagtatttgtatcactgatggggtttacagaaaagcagtcactttatccactggcagctgcataagttttaggttgcatttatgtaaagaaacaaataagtaacaagcaagctggcattggtggtttctgggactgaggaagaggagggaaaagaaacccctagggctatagctgtaacatacttactcattcgcacatttgcagctctatgtgtctttagcattctgtgaaagctgatgttcataatgttgatcatggaacatcgagacaatactaaattatgtttaatatagacttgttgagaagcagagaaaaggatattcgttttaagcaatttcgcagtattttttttaataccctaaaacggcaaagttttagctcttgtagagttaatgttcacctttctgggaaaactctgtaatccagaatgacttattctctgagaaatccaggtagtttcatacatgcttttgtaccaagtcatattaaactctttcattcatagttttgtccatgcttttgtacttataataggttgcaactggtataataattacagt

SEQ ID NO: 63090 - DNA, 1039 bp, Homo sapiens
gtggcatcagaggatgatagcttcacgcaaccatctcagtaggtttaagatatgccattgctttcagcaccagctggagttcatggaccagggaaaccctctgtcttaggtgggcacagccagcctttgttctgattctccttttcctgtaggaaaagcatgtttttgatttcaggataattatacctgtcctcttagagctctgctcattgcgatggtgttgtccacattctaagcatgctcaatgttgaatataaatcatacttaaattacagaccacacttttttctctctttttgcatatactattccatctttataattttgaatttttctgtctcctgattattttatctatccaaccactactggaatgaatgctttttgagggcaagggtgatttcaaatctgtttttctcttcaattccccttaagcataaaataaaatgccagcaagctggcaagttctcaataacagtaattgatgatgaaccggcctccttgcttattttatcttttcttacttccctacttggctttgaatttgctcctcactttcttgacttgtgtccaaccagacacaaaaaatggaaaatgtactactttatgccttgtaaacgttaggtattcatgtaacagaatttttcccatatatgggagcagagagtttccatcaccttcagattcatcattcatggtacctgatgatatcttattgcagaaatttctatccaaagttcatttatggatgtttattcaaagaaataaacattttctgcaccttttcatacattgagtgaatgtcttgttcttttcctttcagcacctccaaggtaaatgggatgcaataagtaaaatagtttggcactggtcagataagatggataattataggtacttgcacagctaatggaagtattgttttaaaactgggatgatttccaaaacaaacacttcactaatgaaaacaagtctgtgtgatatacaccaaggtttttctcgatccttcacgagatgggcagactgaaggcaactgcca

SEQ ID NO: 63091 - DNA, 1224 bp, Homo sapiens
tttgtcagccaaaaacagatggttaacatgatttatatttttgttcttattgtagatcttcaccatttaattggaatcagattatcaggctattttgtaaacaacctggaattgaggtgtttgttttatcactgaatatgataaataaagaatgagtggggatggataacatgtttggctgaaccagaaacacattgcatgggccatgttggggcaaaacagatttttgaagcagttctagttgtactccagaattcaggcctccacactgtttggggtatgtgaaaggtttgtaaaagcatgtaaatatcatttgtgccctgaatgaaacatgcaaaataaaattctgtttaaattcttcacaaaactgaagaaaatcgtttaaacccataacttcgtttgaaattcctcctaatgacctgtcatttcctccttttgaaatgatcctattacattaatcagattgatgtagtggtgatagattattctcattcaaaggaatactcttgtgttgtccttcccaatctaccatctagaatctctaaccaagaagagttcagaaagtgatggctctgttccctgcctttaggaacacacagttttgcttggtttgattggagctttgcgttgcctgctttcagtggcgaaagaggcccatttgtgaatggaaatatcgtctccttcagtacctgctccaagtaagactgattcacatgggccactcaggcctgcacggggctgatcgtggccttctttgttttctagcgtttgcttttggtgggtgtgctggagagcctgttcaggagagggcttctccctcccttactagccagattcataaagcagagttggttttacaaccatctattttttaccaagcccataaacatctatgtctctggcactgcctgtggctccggcgtgtgtccagcatgatgatttggtggcacagagaggggctgtttacaccccaacagccaaaccttccatttttcatgaggcactaggaaaataattgtgctccttcccattttcctcagcattggtttccaagctttgcctttgttaccatattttgctgaacctgaccatgctttaaggataaaatgtgctcggaaaaattggtgaattttgtggtgatatgtacaatcatcttttataatttaaaaaaattccattaatatgtatctgttctgggttgtgggagacaagcctttgttttcc

SEQ ID NO: 63092 - DNA, 1004 bp, Homo sapiens
acagagtgcttcgatgcacaccagaccttcagaggaccgactgagattcttctcttagtgccccagagaagatgatcccatcagagaaggaccctaaagagaatgagagagaaggcccttggtctttagaagagaccagatggtattgttctgttagagtaccactcttccttctggagtatgtttctccagcctcgctcagggctcccttggtttgagtgtatttgccgatgctggcgaagacacacaccgtgggtgaccccagtcagatcagagtggggattcatctctgccctcttctgggcatccactgcacggtattcacctcttctagaactcttagtgaagttgttcattggatatgaatgtgttttctgcacccaattttgaaagcatagattgcatccctaaactgctacattcgatttttgaagtggtacactcgccgagtacctactttgtaacacacagaaaagtgtaactcagcctgttctcaacaagcttggcatctggccaagagacattcaaataacaataaactcaagacgtagttaatgaacagtacaagacagtacagacaggacgtactgtaggagtttgaggggagtaaaacgcccccccggccccttgtgggctcacatgctccagggaagggctcttggcacagccagcatccttgtgtttaggggatgcaaaacaaatagttcctaattcagctttatttgaaaacctcccagtttcccagttgggaaaaagccaagcccaaacaagatctgcatgtagttcagccttaggaacacgacaggcagaactgtcctctgcttttcaaagtgtgcattttatacatctaattttatatgtcaactgcgcatactcagagaaagataccaaagtctagattttgaaaatgcaactgaaggagtaactgttggactctgccgttagtggatatggcagaattagctcaggggcctggggtctctagagggtttgcttctggcttt

SEQ ID NO: 63093 - DNA, 1843 bp, Homo sapiens
ttcaggaggagttaagcctttttctagactacttggtgcttttattaactgatgcaagtattgcattcatcatttttttctactttgttgcctttaaaaccctgtcttccattcaaatgtaatgctttgatcatttaaatagcacagttatctgaacacaactgtgaaaaacctcacgttattccttcattgagttttaacattaaaattcccaggaacattagtggttcttgaaaaagggaccgagacgtgaccctgtgtgagcaggtcgccttccagttttcaccatagcagcatggaggggcactagcttgagctgaggtgcaagaagcacttgaagtttgctttcaagctcgcaagggccggggtatgaattgcagtgaaaattgttccatttctttggggagaaagtcctagtccttataaatatggtattctcatttgtcaagagaatcttatttcttttatgttatgttcacctgaaatacagtaggagtttgcttgtgattaattaagcagatgataaatggcacttaaaatgaacattcagcacctcccgccgccccccatgtgtagacagaaaacagaggtaattggatgggaaacagtatggcatttaaaccttgccttttttttttttttttttttaagagcctttcctctgccttatgcagataaagagagaccggcctttcagaattgtgtaatgtcccagacatatgtggaaaccaatcagttgtgcctgctccatgccctcattttgtaagtgtgcctgctcaattgactgttggcaaaactgtgctcagtggcacatcagtcgttaggagctgccaccacctctgtgtgaagtaacgtggcttttctctcttgccacttagttccttggggaggttgcttcggggagttacatttcaccattggtgaaacacaaacctgtttggaaaaggcaaggttgtctgggactgtgttaaccacatgaaccctcagaagcacctctccttcccaaggactgtcactggtacagtgaagcctggtgccatctccggtgagcgctgggggctctcctccctgtgctgccactctgggccctgcactaagggtctgggcaagctatagaatagctgccgcaagctggtcctgtgttccaaagctctgggaagaaattccccttggttcttgctctcccacctactacccccctacctcccaaaaataataaagtaaaataaaatttaaaagataaaaagggcagctttcctggaggtataccagactccatgtctggatatccacttggggtgcagcagagtccatgcctagatatcaatccagtcctgtgggacattgtgagcagcacaattataattaaaacagcgacaataataatggcacttaggctttattgccctgctagtgttccacagactctgaggttagaattcccgtgcaaatgatttattaaggaagtgctctctgaagaaactaataacggagttggggtggggagcaggacagggagggggagaagccacgcatgggagcagattcaaatgaggccctgtctgatcccaggaggggctccagagcataaataatccctgagatgtatcctgcccagaggcaaagagctgggcttctgaatccaacactagtcagtcattgattatggggcacctggcctcagtggggagtggaggtgtaaacaggctgggcagcttggtgccaggggtgctcctttgagggccacaggtgcaggctctgagcagcaacacgcatggaagctggtgagtgggttcaaaggaggtgcgccgggatggggtgctgtcttatgtagcatcacaat

SEQ ID NO: 63094 - DNA, 1042 bp, Homo sapiens
tgaggatatttggagacttgaggagacagtctagttaaaagcttgtgctttttttttcccctggcaatttgtaagttgccctttcttatagacagaaaaggtagagttacaattaagtcagtctgtgtgatgctgtgtagagcgtcattttttcacaatgtgctgaaaagtttattgcctggtgacaaaaaagtcactctgatttcattttcaaaagttgaatttaaaactcagaatctagtttctttataattatgcttcttatttggcaacatatggtgaaaatgtatacggcctatcaatgtgaaagaacagagccgaggctctagccttttatggtgattacatctacctgtatgggggctttatgtacttacaatttgaatcatttatagatgcacactcaacacagttctagcataactagtactgtgggttttttttgctgactaaatgataggcaaagcaattttcaacaaatgtctcccagtaggctgtcatcatagaaggcttgtaatattgctttttaaccttagcaatggcagctatccagaaattattgcattgataccaaactgccttgcaccaggcaattgcccttttctccatgggaacccggtgaactctcaagtagatgcctgctcccctcccctcggattctcttgttttttatttcagggagatcttttacctgttcttgttcagctgtaggtagccaagcacattgaaagtttaaaaatacagcaaaataattctctggattgtgttattatgcctttaatgcattcagttaacatttggagctttgtcaccagataaacggtgcacattggtgcacaaagagaaaaggaagggctttgtttcccacccctcttagacagagacagatctagctttcgtctctctttctccttctcttcttttcctttctttcactttcagaacctcttgaaatgtctttgggggattggtagatcacgagtctggggttttgggaaggatttgttgaggcttctgggaaagaacttgaaggaagcaaatg

SEQ ID NO: 63095 - DNA, 1082 bp, Homo sapiens
gggcaaatatcctcgatgctcattcctaactgaagaaattggacagcagggctaagaaaggcaatctgagttccttctttcttattttcttcctcccacatctgaatcaccaacttatacacgccctttcatctatctataggaccagaatggctccaggggctggtggggagagggagccgggggtgggcaggagaacaggctttcctttgtccatgtgaatgattggggttggggttttctcccttgggaagtgagtatgagcagagcgttgtctgaaggagttcatttcctctttacaagtgtctctggtgccctttgggctcaacctgattgtggctagagcggccactggcaattccccactccatactggcatgatttccaattcctgcaagagcagaaaagatggccccgagtcttattctcagagtaattccccacagcaaccgatggaatgggaaaacatttgtataaatcatctaactttaccttctcagccccgtgacaggggtattagaatatgcctgggttttcaacaaggaaattcaagctcagcaggtctaatagattgactcctgactttgtggttggttagattgaaaggagaatattacactcaaattcgaggccttttgatttgtgtaaatgactactccctatagtttaggagatggaggtggcggacaggaacaccagggtagcgaatggtaggaatatttcaatggctaatatcctttgacatccacagtttgggagaggaagttaaaatgtagccaacagaacagaaaccgccttcttctcctttatttcccgtttgtctgtccatgaatcatttgtgcctgagctatgatcgctgtttcattctggaaaagtgaaattttaaagaaggtacccaaaccattattacaccaaaaagataaataatagtaagaatggaatgatttatatacctcagaccacaaaagacataaactttgagtattccaagataattcacgtgcaaaattgttgcaatatttgtactagtatttattaaaatttacatttgaataaaacggtgcaaaatgtaaacaaagctg

SEQ ID NO: 63096 - DNA, 1039 bp, Homo sapiens
gaatggttctagaagaatccatcttctttattctgctttccaggatcctcagagttggttataaaatatttaagggcgagaaaaggatcgcaggagccaggccctgagatgagcttggagtccctgtttcagcacatcatcttcaccgagcatcaggcggaggagagtcgccgtttgatgcgagaaggtcggggtatttctgtcctttgcatggggccttttgtcttctgatgctgggtgcttggagcagaaggaaatcccgaaggcagtggtcagagccgttaggggagcttgcatgccatgctgagggaaagacaactgaaaggtggcttatcaaacgccaccaaaatggggactttagaaagattgatgtgtttaaagatttaatttttattacagtaaggtcggaaataaccagatgtcgtgaaaaaattaagaaagcaacggaggagctgaatgaagagaaaatcaagctggaatctaaggtattgaaatgtaaagcatactaattatcacttgaaaaagcctgccttaacttgacttttgggggatatttcagtgtttaaccagttgtccttcaagtaggaagcacgttactctgtgctggctgttttagttccatgttgcctggtgatgtttaaagttctgaatcccgtgacaccttcaattccaagacgaatttgccctaaataaactaaggtaatgaagaattcattgtccattttgtgggatggttaaggttttaaaagagcacaatgtcattagaagaatcattattccacttatttaataagtagttggtgcagtatatacattttgaatgataaataatttgtgtgctatgttgatataacaattgcatgtaaatttcaaacaagcccctgcctttagttttaaaagtctctaccacattttagacatgccttgcgtccgaagtataccttttccattagcgtttctctctttcctgcagcgtttgtaatgttctgttattttaaaaagaagcaagagagtctgatggcttcttgaaggatggata

SEQ ID NO: 63097 - DNA, 1021 bp, Homo sapiens
ctgatataatatattttttaatgttactctgtaatattttctttgttagcaaagttttgttttgtctgcaaatggaaatgtaatttgttgatatatacacatacattaaaaaatgttgattcagttgtttttactagaaagaagacagaaaaggcctaccattgtttagaaacatttgttgaaattactaattaatataggttcataagcatgcattgctttttaaccagctcatatatgtgggtaataatacatttgtatcttactaataaaattaacatatgagggtcacagttcatacaatactaatttataactgaaatagtttgatttgtattatagtcaagatggtatgtatatgtgcataaagattttaaaagtggaatcacaattataatgcatatgactaatgggaagaactgaagaactaatcctaaattgatttcttgtttcttttattctgagttaattatatgtctgccaataacaatgaaaatatatttacttgaatatttgacttggcatttattgacccatttatcaaacagtagcagcacaaggagaaactattaatagaacataatttgaatagagcagtgcttgagctattgtacagtcatacattcagaaaatttggggggcatttattttggatgttgtttctggtcaataaatgtatttgggaagtacagtattcattttttttcttttatgtaaaacccggatagcatgtaattagaacttgaatgatagcatttgccttgcagggctcaatgagtcttttaaaatatatggttgcaaaagtctcaggttatatagtatgagtactttatgaattggacagctacactatgcctggttaggtttggtaatatgaaaacagaaaaatgagaacatgccctggatttgcattcatgcttaccaatacatccaaaacttctgatagttaaggaaaagttgtatagtattgatgacagggcaaaccaaaattaaggactgacagaacattggtagtttcttt

SEQ ID NO: 63098 - DNA, 1059 bp, Homo sapiens
caacccttttgcctctggactagactatttctaagctctttactattcaatattgtctgggacagagatttcacaacctgtctctcaccttgaggaagttcttataactaccataaatcttgctttctgcaatttaagttgaatttatatcctttttcttttccctgtggagatgggaacagccccaaactggaaacgatgctttcttatgagggctagtactgaacatagtagaaaaattacagtatttccagtccagcatcatttttagctttcatatattaaagcttcctaacttcatttcaatattcatctcaggagatgttattttttaagttccaaatgaaataacagttgcatgtctaacattaatgtttattataccttttgctacttagaaccaaatgaagtattaaaataaaaaatgagttctcaaaacccatttaaggtctttagcagactcgttttttatttgatataactataatcatgggactgggtttttgcctctgctttgcagattttatcttattattttattagttatattatgtacatgatttattcattcatatattccttataaactgtgaaaatagaaacttattatctaaaaacaaacagtcttaaagcagatttcaatgtgtgtattcaaaaagcgttagtacctagctaagaattcttctaggtattgagaggaaaaagaaagcacattctctgcccttgaggagcctatagtcttattaggggaagagattataaaattgtaactataaagtacttaaaaaataatacaagatagtgtatataaaataagatgtttgatgctaattttattttgcattttaaagattaatacagaatatattttatactagacaaatcttctctgttacctaaggtactctaaaatgtctaattaattgttttattctgatttctgtttttgtactttgaaggttcaacagttttttgaaaaatccttcttcttacagcttttgaaagctcatgaaaatgctttagaaaaacagtacagtgaaattacaaaccataggaata

SEQ ID NO: 63099 - DNA, 1062 bp, Homo sapiens
tattaatttgaagttccagatgaggacattattttcttctctgtgtattctgacacgtgctaataaggaaacacttcagggcctagaaagtgctacacataagttcatgatgcgttgggttgatgactgataatagtgaaattaattatatcttttcttgagactcagtatttttcacatcccaagagataagacaactctcctttctgttattcctaacttttggcgggaaatgattgaaattacttttaatctttctagattccagcggtgggaggaaatcagtctgctattttacttgacatttgttactctggttttgttcttaaaaagtgaaaatgtattttctgtatggattatttagatgatttttatgcatttggataatgaatgtatgatatttgaagtgacatagtcataaacacaaggagtaaagacctcaagttttaaaatttgactctcattgattaacaatttagtgttacctttgctggcttaattttaaagaagttcctgcactttctaggtttcatataagaaaagaaacctcattactggatctatgaagaagcaaatgaagccttctttcacataaatcgtataggaaatatgtccactagagctgaacaaatgcttcatattagcagtgtattaccttaggcaataattttagtagattgtgagacaatatttgcaatttaattttatgttaagttttataagcataaaatatcaatctcttgggtgatatgtatgatgcagaatgagttttgataatgacaatctgctcattcatttttttttgcactttaaaaaatggtgatgcccactggtgtcattagagttagtagtgtgagggcttccaatctgaactccagttttgtaggtttatcactcagtcataaaaatgtgctctgggttaaaattaaacacacaaagtctgttagagaatgctttttccttcacaaatgatgacttaggaaatttggatagaaagaaataccagtgcatatatttagtccattcattgcattttagcagttattaaattaaatgccaata

SEQ ID NO: 63100 - DNA, 1038 bp, Homo sapiens
taattaactaagaatatctttctacactccttgagaagaaaggggcaaatcagaataaaacagactcaaatcaagtgttattgaaaattcgccttctggctatctcttgaaagtaacacctattcatcctgctttattacactttctacagatgtgtgttttttctttttttccagcactaccctgtggtcattgatatttaaagtgataacctgaggaatggcacctttttacaatatcaaataataaaggttatattcattcttcagtacttgctaaggcaggaatgtgactaatagaaaacatccagaaagatcaacatgtaaaagaatctgattaacctgaacttagcgctcttgctcatttcctttctccttgtattcttccttctatccattctttcatccatctctccatccatcctggctcttgcctacctctcagaactcatgccataccagctctcctccttgtagactcctctccagccatacagatctttctgccccccaaataggcccaacttgttctggtgttaggatcatttcatgagctatgttccctctgcctgggttgctccaccccctgatctctgtatggctgtcagcttctgtcattcagatgtcaagtgaaacgtcacctcctcagagaggccttcctttaaacaatctatgtaaagtagtcacgcagtcacactatgacatatcctagttataaattctcttcatacttcttataatttgtgacatctttcttgtttttctgttctacttatcaccactaaaacagaagttccatgaaagcagagtattctttatcttgcacatcgcttatcccttagagcctggaacagtgtgtggtatataggaagtgtccaataatatgtgttgaaatatggtttcaattaacttgttcatttaacctatatttattgcttaaggatttaaatataaattattgattctctagttaaagaaactggattcatttattgttgtttatctttcttgggtgaattaccctgtcttatttcttact

SEQ ID NO: 63101 - DNA, 1067 bp, Homo sapiens
ggagggcaagcacccgcctgagaagctgctggtgaaggatggcactcggtggtgcaccgacgtctttgacaagttcatctctgccgaccagtctgtggctctgggtgagctggtcaagcgtagctacaccccggccaagccctcccagctggtcattgtcatcaacatctacagctctgagcacgacaacgtcagcttcatcactgatcccggggtgaagaagtgtggcacgctccgcctggatctcacagggaccagtggcactgcggtgcccgcccggagggagatccagacccttatgcagttcggggacaccgagatcaaagccacagccattgatatagccacttcgaagagtgtcaaagttgggatcgacttcttaaattactaaccctcccgccccgctgcctgtccccttggactcaacttatctgcatctgctgacctcaaccttgactgttctttccctaaccttgaccctcaccattgcccatgtgaatttcagcagggaagatgagaacaatcagggctagaaataattagtgacttttgagggcacactggagtcagaaaaacagaaattaagattaaggtttaggcatagaaaattaaaggatcctggaggagcagctagttttcataggtacaaaagtggtgaaatggccacggagaagggaatcagtacatttctgcagcagtggttgcgctgctttgaacagatctccgttatgtagaatttaggatgccctattgctgtctttctagatttaaaatgagatctttgaaccaggaggagatcttcatctgagacttgtctttctaaattttttggatggccatcaatataaaatgccacccatctgcagttaatttcttttcctcatcatgtgattaaaagtggtgattcagtgggaactgggaatgtttttagctggtggtagaaggctgcctacactgggcactgttttagattctcatatcatttaaacagcaaggaggttcagggaagaataaccgtagccttgggtaatccactagggcttttgtgagtaggagagctgatacct

SEQ ID NO: 63102 - DNA, 1048 bp, Homo sapiens
agtgggacttacagtgtgggaagaggggacaaggggcggagcttatgccaccctttctcccttcccatccctgtccctgctgccgtggcccaggcccaccttgctttttctggccctgtgggggcctcactgccacaagtcccacctggcaggctgacatcccagtgggacatggtaaccgtaatgtagcgtctgggtctttgcctttcttccttcacaccaactccttgggctccactcatgggtctactgccatccccagtttattttcaagtttgaactttggaggagaattgtatacatacaggcctggcagtttctttgcagcaagttgtcccttcttcctcaccccgttttgtggaagcttcccccttggaccttctatgctcctgggaggtccttgactccacaacctcaaggatggaagaatcagcacaggagctgtccctcggaaggggcccctcttggtcttatttgggatttcttcctcccgaccccttgggatccaggctcagaggtttcacctttcccgagggcaccatacgtgtgagagccacatcctctttcactttaacctccagccatgtttgtgctaaggatgtctaatgtgaccctgtgagagtgaagctggggaggggggacttttacttgcttgaatagggggcagtgggaaatcctgtcatgcacctgagtcagggccctgttgaccgatgtcacctaagggcagacccagcttctctgacccatgggctgagctgacaggcattgatgctgcccgggtggttggccgtagctgagggtactaggtgatgggaagagggttcgccacggacagtgcaggacacgagagtggtggttcttatctggttttataaagtcagccttccagatgtggttctgccattttgaggcatttggtatttacagagtgaagatgttcagtcacctgcctgctggtagtatcagttttagcactgaaagtctcacatcccaggaaatctctctatcctgagcaaactgggacagtgggccaccctccctctctttc

SEQ ID NO: 63103 - DNA, 1036 bp, Homo sapiens
cagtggccagcccatccctgtgggcactaggggcggctgctgtgaggatctggcttccaggcaggaatggcgagccatgctcacctgttgttatggtcccagggacaggacagagctggctcctgttgcacttaagcccctgggcgtatgaacacccacgcctggggcctgggtcagctctctgtgtattgagagtcagttttgtgagtcttcagctgaggctgggttgtgtggcaagtcaccagagtcattagatgtcccctccccactgtcatgactctcaggaagcatcctgcccacctttcccaggagacgtacctctgattttgtttgtgacactttctttacaaaaaacccacagagtcaaccctgagccccagcatagttgaatggccatgggaacctcagcaccatgaattgttttcagcgctcactcggaaggcttgactccaagtagcacacagttcaacttgcgtgcagtcaagggcgagtcgtctcctccctgcactctctccccttccccaggctgcttcccctgcactcccctgcctccttgcagtgtgagaatctggctcagtgtatgtacctgccaaaaatagatctgtttttatagggatgaaggaagagggtggaagctccagaaagaggcaagctctttaaaaagagaattacaaaatgcagtttagccattcacagaagccctgggcatcacggagcacaagctccatagtgtcagccttccggcagggcccagaaatggggcatcgggacacagctgtctgcagagacgccacctggcgttctgagtttttcccaggaagaatattcaagattcatggttttgactcttttcccagccccacaggaagacttcagcaacaaatgtgtgacccacgaaaaggtcaattcttatttatagcctgaaaaaaaaaaagagaggtgcagtggctggtgaatctgtcaggggagtttgagccctgggctggctcttctaggaggtgggacaagaggtgtggggccctcacactggggagtc

SEQ ID NO: 63104 - DNA, 1008 bp, Homo sapiens
tgtcagttgtccaaagtcacatgattaggaagtggccaaagggatttcctctgatcctcctttctccagcccacggtcccattcagtgagggaaaggggctagagctcccggcttgcagaatattcaggaaacagatctttgctctctgatgctggtaagtttgggggaccctgaaactggctcctgaagagctcatggcaggaagcctgggttcagtgaagccacaggaggctgctccaggaaccagctgccacttgacctgttgcatttctttcccttggcttcaggagctgagtgaccaggcgggttcggagttcgagaactctgatgtcagatgggtcatcacggtgcctgccatctggaagcagccggccaagcagttcatgagacaagctgcctaccaggtgagggtagagtcagggcgggtggaagccggaggagaaggactcaagatgtccagggtggtgactgtagccccgcccaggtacctcccacattcactggcctccatgggaggcagcaaggaggctcccctagccagggtgggagctgggagacaaggagccatccctttcctcagcttcctcctgggggagccatgggggtcagtcccacaacaagagctgggttcggtttccttcctggctttctacatttccaggtcatgtttctactgcggagtctccagggctaggatttcaaagctgtggttcagagacatttctctgtgggtgaaatgaagtgagaaccttaagggaaaggcttgggaaacaggaatatttgaacaagaaagcaagcaagccaaggccattggccacgaaccaggcattttcagcttggtgtggaggctgaaaactgcatgtctgccgcagaaaagaagggaagtgtgattgttccctgcacacttcactcagcgggggggtgttggaggtggcagacccctgcagagggcagtggcatggccaaggggcataccaggcacaggcgcttgttggccagggagacag

SEQ ID NO: 63105 - DNA, 1033 bp, Homo sapiens
ttttccgttttttttcccctgagaatttttgagcatcattttgacatcctaagtagtgaagtagagaaacagtagcatgtctctactggctgtgtatatttctgtgctgtactgatggacattcgctggtgaattatctttgatttggaatatacagatatatagatgtgggtgtgcaccatgtgcaggtatctctgaaaatgttacccctccataccttctgtgcagatcagttttcaatcattgcacagtgtagctgaattttaacttctgatggaaaaagtccatgaagttcggctgcctctaggcctggctgagtgatcagcaagtcaaatgatttgtttaatattggcccagttgccgtggggttgaagggaggtacagcagaaccaaaaaatccttgcttcttgccctcaaagtatcctagagtcccctggggacccaagacatgtgttccatgtgtggctcaaccttggctattttgcaaatcagtgagaagacccagggctctgagaagggctgagtgatgggataattaggaccaagcagcagcggggtggatagtttgtctgcagataatagcttgtttgctaattgccaacaccagattttctgggcaattagacatttggtttctttcaggaccgtctgtgcaaatgtggacacatggcgcaggccttccaggtagcaggtggagagggtggcttctggtgctgatggcatttctccgcaggctgcccaagggctgtgggcagggaggacctctcaccaacaggtggaaggaccatctggctggaacccctagtggggaggcagagttccccctgcattcatggaaggggttcccttgtgctgggagattagcaaagatggtggagatcagcaggctggtctaggaactgagctgacttctccattctcttttcaagagcaattagcgcccacggctaatagcaattctgttagtcgtgggtgctaatagaaatcagaaatagcttcccctcccagatgagcaagttgatttaaacttttc

SEQ ID NO: 63106 - DNA, 1040 bp, Homo sapiens
ttcagctgaagaaggatgaaccttcaccttccctacccttacctcctcttccctctcccctccccagggacaggtggtgagtgtttgggaggtgaaagattctgctcaaggggaaaccaactggcctggaatggcctcggccctttctttagcctcagtccaggcagcactagctgtgccgtggcctctgaagactgacctgtcacaaggctgttcatgatgaaattggggaagtctaaacccagggcttccagaggcccaggcaggtggaatcttgtccttgaagctgaagagagtcttgacagtgacccagtgagttttagaatggagactgagcttccctgtagaatacaggaaggctcaagctgtggtcatatggcctctcaagttcttctaggttattctgaaagttccctggggtgagcagacagcttggggggcaaactggggccagagggtctcctttacccctggcagcaccggccctcacgtttcctatcactaaattttcctgaaggttccctttgccaagttcctgtctggtgggaatttttagctttgattaacaagcctagagaagcaaaacgtaaaggaaatgtatttgctgacattatgcaaaggtgggggctctgcttgtgtcattgtgtaagcacacggtcgttttttcagcagcagttggaacgattttataatgatgatggtaacaataataataaacaaaataacatccataatgtatcgggtgcttgccatgagccagattttacagatatagatgcccacccagtggcatgcatctaggacgtggtcatggtgggatttgagctcaggctttcccgactttgaactagtacctctaacatctctcttaccaatatgtgcctctcctacctggatcttcggatttgagagagaattatggttttcgaaatagagctttgcagaccaaagaatacgccacacagtctcatgagcctgcagacagagacagccaggagctgccctgtgatggtgactcctgacttcctccagctatttgc

SEQ ID NO: 63107 - DNA, 1113 bp, Homo sapiens
atggctgaaaaccatacaaatttattatcttacatttctggaagtcaggaataagtccaaaatgggtctccctgggctaaaaccaaggtgttggcagaactgtattccttctggaggctctaggggataatccatttcattgccttttcaaacttctcgaggtgacctgcattccttggatcgtggccccttcctccatcttccaagcccatcactccagcccctgctttcattgccacatcccttctctgactctgcccctcctcctcccattccctttctaaggacacttgtatgaggacctcttattaggcctacttgtgtaatcatttccccatctcaagatccttaatttaatcacatctgctgactcccttttcccataggagataacatagtcatcggtaccagggggctattatcgagcctctcatagccagaaagattggagtcttgcctaggtttggggtgttggagagtcttctgtgtccctcaggagctgtctgaagtttggaaatgactcctcctccgtgttgtacattaggtcaggttcctcgtgcacctgctgcgggttgccctccctggagtttggattgtggatcaacccttgacttctattcaatctcagtagggtccttagagacattgttacttttagggctgatttagccccttctgaggggcccatgactcattgagatctgaataaaaaggtttattggctcccaagcagggaaaacaatcaatgcattaaacaagttattgaaatgtctataaaatgtcacattatatttgcttttactatgtagcaaaccaccccaaagtttaatgggttaaaacaatagtctttttaaaaaaatttattttaagacaaggtcttcctctgtgacccaggctggagagcagtggcgtgatcttggcttatgtaagctctgcttcctgggctgaaacgatcctcccacctcagttttgtgggtagctgggactaaaggtgcacatctccatgcctggctttttttttttttttaaatagggacaaggtctcactatgttgcccaggctggtctcaaactcctgggctcaagcaaccctcctgcctcagcctcccagagt

SEQ ID NO: 63108 - DNA, 1044 bp, Homo sapiens
gaatgactatgaaggacgccctgtgatccccatttcacagaggaaaaagctgacagtcctagcagcgcacagctggaagggggcctaggtaaggacctaggccatgggatgcaggccccaggtggtcaagctgaacagcctctcctggcatgtgcctggcatgtcataggccctcagggacttgtgttgagtaggcctgcggctaatagagagtggctgccctacttccttcagccaccaagctgtagatggtagtgacagggcgctggttatagcccccaaaggaagtaagcaaaggtcagggtgatgctctgggcattgcaggttagggttctggctatgggatccacttccgtgtcaacatctgctgctgcaacttgtctgccgccttggtggtcctcccatgccttctgtgtatgtccctacacagtgtcttgtgtttcccagagccttgtgatcgcctttggccctggacacatgcagtcctccctgcttgggacatcctctctttgtttagcaaggtcctactcatccttcaaaactcagttaaggtatcacctctcaggaagccttcctgggctcatccatcgggatgagatctgcctgtgtggtcccaaagccttcggtacttaatggttgataattccaactagtgtttgttgaggccctacgatatgccagctttgtatgcctgtatctcattgactcctccagcaaccctgtgaggctggcattattattaccccattttgctgataaggcaattgagggctttgaaaaacttgctaacttgcccaaccagtgaatgctggagttgggatatgagtcagccatggagcctaaaatcttgtgctgtttctctcaatgctctttcttccgagaaaggcgtggactatgtctttcatttccatttttttttactaaggacactagtaggtgttcaataaatgtcttactttttgttgagtgtcagtcagcaagacatgagggaacacagcagagggcaatggcgtctacatcttgcccactccgcagtggtgctcc

SEQ ID NO: 63109 - DNA, 1016 bp, Homo sapiens
gtgagatcttttggatacataagaaaaaaatagatgtaattatgtaattttaaaaaccataaatgggctgggcatggtggctcatacctgtaatcctagcactttgggaagctgaggtgggtggatcactggaggtcaagagttcaagaccgtactggccaacatggtgaaaccctgtctctactaaaaatacaaaaaagtagctgggcgtggtggcacatgcctgtagtcccagctactcgggaagctgaggcaggagaatcgcttgaacctgggaggcagaggttgcagtgagccattgcactccagcctgggcaagagagtgagactctgtctcaaaaaatacccataaatggtggtatactaacacaccattctgttccttgctcttttttccccccacttaagactatatcacagacaacattggaggatttggatctgggcaagaatgtgccccagtttatgtgttacaaaactcaccctggctagcgggagagagtggactggggtggggacggtgggtcaggactgttgcagctgctgcagttgacggctgtagctctttgtccgtgtgcagcctgtgctccagccaagtccacccacacgctcattcattcagtgcttgacagtcaataatcgtgggcagaccctgggccacatgagtcaggctctgtccctcttcccactcactgtgccccgagccatactgctgcacactttgccagggcacaggccaccttctgccatccaggctcctctgccactgactcctccaaattcttccagacatgtctccaacgtcacctcctcatcaaagcctctcctgatccccacagcaccacgtcgatggtgtggaaagagggacctggactggaggtgtctcagccccagcccttcccattggcacttcctggagaaacagcttagtctttcagagcctcagtttgcccatctgtgcgctggacgtgattggtatctgtttaacacattgcctgtgtggattacgtgggaaa

SEQ ID NO: 63110 - DNA, 1066 bp, Homo sapiens
catcattattattatattattattattaatgatatcattattacattcccaggaaattctgatctgttgggttaacatttccaaggtgccaagctgtgggtctcttcaagagaacagagacacctgggcaggatgaattggcatctttttgcccagctaatcgataagcttggaactttgtctgggacatagtagatgcttgagaacacccaaggcaggagtgaagcctgtttaccgagatggaagattctgcaggcagggaaaccacatgcccgtggaagaggagaggtgaactcgggggtgctggcaggggctggaggtgggaggtagtgaataggagatgccaaccttttctcaacaatttagttgcatcttagggaaaatgggggctgaggagggccctatgatgacaacttgaattgggtaaaatttaaggataaggaattactaattagtaataaggtagaattcttaagtgtatgaaatgaataatatgtagctaaaaaataatgatatagcattaggcatttgagacatgtggactccaagcaattaacctctattcttcttctgaattgcaattgcactaattggctgctttactctgacggggcgatattaacctttctgcttttctctaaaggagccagtatgttgggtggatgtgctgctctggtttggaggaaaggtatttttcctgaataataacctatttgcaatttttctcccaaatggttgcattgaaaaggttctgtcagattttcttgataaagcttcatctatggaaaagatgctttaaacacatctgacctcctttgggagcagttgggagaaatggcctatctaggctcttcaagcttcagacatccttgtgttaatagcttctccttcatccaagcagcacacacttgtggagggagggcctgcacattccaggcctgtcctgggtgttggggacacagcactagccagacagtctcctgctcctgtgcagcttgtaactcagtgaaagcagaatatcaaaggcaaataaacacgtagatttagaatgcaatcccagggctat

SEQ ID NO: 63111 - DNA, 1012 bp, Homo sapiens
cgggaggctgaggcaggagaattgcttgaacctgggagtcggaggttgtagtgagccgagattgtgccactgtgctccagcctgggtgacagagcgagactctgcatcaaaaaaacaaaaaaacaaaaaaacaaaaaaaaaaaagaaaagaaaaattacattaacaatatttgagggaagaatgttacagttataataggatgaagactttaagaagaaagttttaggaactcaattattcccctatagactcatttaattttctcaaagaaaagtgaaactacattaagtcaaaaaatcaatcaataaatagaaactaccatcccagtcagcttctgtcattcactcaatcaacaaatattgaatgccaccacgtgccagatgctgttctaggcactggggaaagaacagtgaataaaataaattccttctcttcatggaatttaagttccagtgacactccagtagcacttatatcagagtgagtcatcaagagaaagtgaaatcataaatgtgaaaccattttgaaaagttggtgtgcaaggggtttattaacagctgattggtattgacagatccaggtaaataacatgattattcatgaatattccacttccttatttttcatcgatattaggaaatatttgtggggttttagctataaatacactcatatatatgcagattttatgcatactttacacattctttgttttagtacctcggtgattgcatttccatttcatattgagattaaatgtcttagggcatttccagagcatctctgagcttgagaagggttgagtgtattgctaaccttaaacttagcaaactggggagctgacgatgggagggaagaaaggggaaagaagaggctcaggagatttagagtgttcctggaacatatccacggagagagggtaggactgtactctcctgcttcagaaagaggaaatgatattagagagaggatctagtcatgattgttaacattccatgagtctgtaactgc

SEQ ID NO: 63112 - DNA, 1089 bp, Homo sapiens
caaagaagccacgtccacaatccagctctcactccagccagcccttccttctgaactctttccccatttgcagcctggaccacaaagttcagccctcagggatgtcttgattcatttgacatctcaatggaagattgcgagtatcctgggctgggaccaccatgtcttaagagtctccccctataaccctataacccatttgcctcagttccaggaggacagcgacttgatttgtcttgttcgccactgtgtctgcagcatcattacattacctgatggaatagctgctcagtaaatatttgttgagtgattgaatgggttttacacataataaatggttaataagtacttaactcacaatcagatgttttggaggtgggtgagtaatgagtacaccaacctggctggagcaaagggtttcttttcaggaataatgagaaatagggtggaaaagtagtttgaggtgagattatgaagaagctggaatcccattttgtaagagaaggaagcaaccacaaatttctgaatataggaagggcaagaaataagtggggttttaggaagttaacttgcagcagtgggtagcattgatgggtttttgttatacagaaaacaagagacagaggcagaaaatagtatatgtgcaagggcctaaacactgatggcaaccatgggaattgatgagtgagagagaataggaaggagggatgtaaaaggctttgagtggttggatgtggtggagttggggaagcaaagatggcttttgagattaccttgtagaattctgtgatagttaacggaaataggatcagtgcgtcatctggttttgatggaggcgatatgatgcattgggtgttagatgtgtagagcttgagtagcattggtatcccagagaaaagggaggactgaagatcctgatagacaacatccacatagagttcaaagttgtaagaacagacgaatcctttggagggcaaagggggaaaatcgttttgaagtaggacctaaattttggggaaggaatagatttaggacataaagggaaggcaaggagctacctcaggaaaaagggtttagagaagaaggaaa

SEQ ID NO: 63113 - DNA, 1001 bp, Homo sapiens
ctttgggggtcataaatccttttgagaatctatgctaaatgaccatctccccacaaaattgtgcctataatttcaaaaaattcgtggaacttttaaggttcaaactaagattctctatccagtatgggctctgaagtcagacaggtctgagattaagccctggagatatttctctctctctcctatgggcaagtctcttacctttgagcctcacttagaaaaataacacctgccttgcaatactgttgtgagaatgaaaaataattatatacaagtgtctggcccatagaaggtgctcaataaatagcagctaaagaaaaaaaaaggtaatggcacctgtcatcagcgctcagggaatgttagttttctttctttctcacagtaaccagcagttatctgtgcacttcaggtgttccataaatgttactgcttggctatcaaagttatcttaaaattcccttctctgtgaggctgctctagtgatggaggatctctctttacactcaactggactactgcaagtctccaaacagataaagaagtctctccttctgtatctcatagaagcactgtcacattaataatccagaaatcaacactgaaattgtgatatactccacagctcacaacttttaatgatcctaccatattttcaaacatttcactagagatttcttcaagagaaataaaaatggcagctcactatactgagcttttgctatatgccaagcactgattaaatgaacacattatttcatttaatcctctcaatagctctacagacaacttagtgtacagtctgaaagtctaggagtacattctctaaatgtttgcttgagactgtctctgattcaacttttaatagctatacaatcttggacaaataaaattccttatctgtagagtggagataattatagaaatcatttcccaagtaactagagaatcaagaacaaactaaacccaaaattagtagaaggaaagaaatgataaagatcaga

SEQ ID NO: 63114 - DNA, 1085 bp, Homo sapiens
gagtattttcaaaaacaatgtgtaaaatgtcatgccaaggaggggagatggcagaaggtctctttaaagcttttggggggaaaaagggaaggggccagatgcaaactctaagctccatcttctttttcaggctatggctacatctaccccgtcaccaggcttggcaagtacttgtgcatgctctatgctctctttggtatccccctgatgttcctcgttctcacggacacaggcgacatcctggcaaccatcttatctacatcttataatcggttccgaaaattccctttctttacccgccccctcctctccaagtggtgccccaaatctctcttcaagaaaaaaccggaccccaagcccgcagatgaagctgtccctcagatcatcatcagtgctgaagagcttccaggccccaaacttggcacatgtccttcacgcccaagctgcagcatggagctgtttgagagatctcatgcgctagagaaacagaacacactgcaactgcccccacaagccatggagaggagtaactcgtgtcccgaactggtgttgggaagactctcatactccatcatcagcaacctggatgaagttggacagcaggtggagaggttggacatccccctccccatcattgcccttattgtttttgcctacatttcctgtgcagctgccatcctccccttctgggagacacagttggatttcgagaatgccttctatttctgctttgtcacactcaccaccattgggtttggggatactgttttagaacaccctaacttcttcctgttcttctccatttatatcatcgttggaatggagattgtgttcattgctttcaagttggtgcaaaacaggctgattgacatatacaaaaatgttatgctattctttgcaaaagggaagttttaccaccttgttaaaaagtgaaggtttcattatctctcaggtgacagacactggctgagctggttttcttgtgttgtctttcagggtcatgcagcctgtcacctgagaccttcagtcttggagacaaatcccttatgagagccaagttcagtcttgaggccctgcagaaattt

SEQ ID NO: 63115 - DNA, 1600 bp, Homo sapiens
tcagcagccttctaccatctgtcctcagtgaaagccatgctgtgccactgtaccactcaaaggttgcgttcctgcttctacaggggtggactgagcacttatttttatcatgatcaattggtatattataaataagagacaaaagtataccattcactcaaaatagtgacagatttttcctaacatattatcattcttaacattacaaaagcccatctccttgcccatgggaattcctgcagcacaggcggtcatcaacacattagtctgctttgtctgtactaaaacctcttcaaaatacatatgtgaagcctttgcccccagcctcatgagaagacctgctcatagggaggagtccacaaaaatgagctctgtgcaagggattcctttgtttgcccagccccagcagtggagcatcagtttccttctgtaaatatcagcttttaaaaaatactggttttcaggaaataaatgactagtgcatagaagcaggtgtctttacacggagaatcgacaggctgtaatttagctaagctgcctgcagcctccttctaagattctggaaatttaggttgaggaactacagtctaccagaggaagaagaacccttcctagtggaaaagcggttttaaatgtaggcacaaggttcgtgtgacttaccaattgcaaaaccaactccaaagttcggagctatgagtccataaatgttttttgcaaatggaatctgtaagaggaaataaacattatgctaaaataacaagagatccaactctaaatcatctcggaaagtcttgaacttgtgttttctctgagcgtggtatgcctgttcccttctgaagaaaacaggaggaagaagggtggggtttgtgaagaaccggaccctccaaatctttaaaagtcaaagcttgaaacgagttttatgaccaccatgaaaaacttgtcaccggcatatgtgaaagatcagcctagtccaccctcaagttttgacaagaacaagtaggcctcatgagggatggatattggccattggtagaagagattttattctagaaaaacatcttgctattgtttcaggttggttgtcctgaagtgtttaagacactgtcaagcttaagatgatgcaggggaaaagttaaactgtgaaataaaacattttaaataatttctgacataaaatgaaaatacactccttggaaagtcttgtccaaacatttttaagatgataaaaaattagaataaaatgaaagctgtaataaaacatcaacaaactcaaacgtaaaatgtttcttggtgattcttgcccaaagcgcaagttttattcacagattgttcccacttgtcaaatgccatcttttactcacacataaaatgctgactccaacaattatcattcccagaagagcacaaagccacctaccaaaagaaaaagcaccatcaagaaatgatcatttgatttttttctagtccaaattttcaatgaaaatcaaaacaattacttgtaacagcaaaggcagaaacaacttagaattttttgaaagaactacattattgtaacagaatgagtgttgttttcatatcatcttacctccccattttgtgt

SEQ ID NO: 63116 - DNA, 1476 bp, Homo sapiens
tcacatcacagaggaggaaaaagggagaaaattcaggtattgctggactgacgggggaagccagagagttagataagcaggaaagagtggggtgatattggaaataggaacacactttttgagccacagggccagtcactctgttgggattctttcatttaatcctcacaacaatcctatgaggtagacgttatcatttctccatgcaacagaggaggaaaccaagactcataagcctctacatggtggggccagtgtggctcccaggcccatgctagccctaactatctcccaggagtcttcaaacagtttcctgggctacaggagcatttgtaggtgattttatacacacacacacagacacacacaaacacatatacacacatatatactttttttggtcaaaaacattgagtaacctccattcagccttaaactgttatcatggcaacagaatggcagtttgcatttgtgctgagaattttctgactccatttcggcaaggtattatgctagggtcagccaagcaaagatgcatctgaaatttacacacccaagctggaaagcagatgtctcctaagagaggtctgagaaggtgatgtggttttcagagctggggaagcatctaagcaagcggagggaaggacaaggggatggcttctgtctgagttatttccacagcaccttccataccttttccatgagtcagacgggccatgcattactcaaaagtatctagttaaatcctatttaaaataaagggcacaaggccagtgcccagtgcttgatatattttaaaatatgtggaatgaattaatgaatgtaaaaaacacccaagacaaacacaggctgcacataaccttattttaaggtttgtctttaaatctccttttggggaaaagcatcaaagggcagttcaggaaatgccaaagcattaagatgcattcagttccactgtcagaaagaccttctgatgtacttccaagagaacattacaaacaaacctcacatctattcaaacacaaaaatgcatgtcctcttgttcacctcattcatccttaatccaagacactctcctttcacctggacaagtacctatcagcatttgctgttttaaaaactggcaacaccagataagaaagatgatcagaaacactgagcgtctccttgctgggtaaggtaaataccttagaaaggttaaaatgactcatgcatttcaaaattcaaattttgaatcaattaatttggactttttcaaaagagggatgctttatactctgtatcttgcctatggctataattttggtcataaagttatgaattaaatcgttctgtgtgttcacatataccccaaagtccatatacaatgatttttccataaaaatcgtaaaatcatctctaaaatcctacatacagtaaagacaagacagcaactattactgaatgctgtaagggttatgagaaaagcaacagcac

SEQ ID NO: 63117 - DNA, 5013 bp, Homo sapiens
tttcaagttgggaggtctcatctgtttggggcatgttagtttaaaacttgaagatgtggctttaggatgcctagctacatcaaacacggaatacctttccaaattgagactggaagccccctcacctaaggctatagtcactagaaccgcactacgcaatctgagtatgcaaaagggattcaatgacaaattttgctatggtgacattactattcacttcaaatatttgaaagaaggagaatcagaccaccatgtagttactaacgtagaaaaagaaaaagaaccccatttggttgaagaagtttctgttctccctaaagaggagcaatttgttggacagatgggtttaacagaaaacaaacacagttttcaggatactcagttccagaacccaacatggtgtgactactgtaagaaaaaagtttggactaaagcagcttcccagtgtatgttttgtgcttatgtttgccataaaaaatgtcaagaaaagtgtctagctgagacttctgtttgtggagcaactgataggcgaatagacaggacactgaaaaaccttaggctggaaggacaggaaaccctcttaggcctgcctcctcgtgttgatgctgaagctagcaagtcagtcaataaaacaacaggtttgacaaggcatattatcaatactagttctcgtttattaaatttgcgtcaagtctctaaaactcgcctttctgaaccaggaaccgatctcgtagaaccttcaccaaaacacacacccaacacgtcagacaacgaaggcagtgacacggaggtctgtggtccaaacagtccttctaaacggggaaacagcacaggaataaagttagtgagaaaagagggtggtctggatgacagtgttttcattgcagttaaagaaattggtcgtgatctgtacaggggcttgcctacagaggaaaggatccagaaactagagttcatgttggataagctacagaatgaaattgatcaggagttggaacacaataattcccttgttagagaagaaaaagagacaactgatacaaggaaaaaatcacttctttctgctgccttagctaaatcaggtgaaaggctacaagctctaacacttcttatgattcactacagagcaggcattgaagatatagaaactttagaaagtctgtctttagaccagcactccaaaaaaataagcaagtacacagatgatacagaagaagaccttgataatgaaataagccaactaatagactctcagccattcagcagcatatcagatgacttatttggcccatccgagtctgtgtagcagacaggtctatttaagctttcaaatgaacagggtaaagttgcatctaaagtaccacagatacaaccatgtttaaatcctcgtatgcactctggcctgcttctccagttacttgcttgtgtaagaacaaaaatgagaaaggttgttttccagtaaaaacatgaccagcttactaattggttgttttggattgcatttatagctatgcttttttgggtttatactgggaatttatttttactaaattatttaacttttctaattatgtaattatgtaagctagcttttcatgtttatgtatgtatggtgtccccttgtgttatttttcttcctcttggtttttgaattagtgttaaatagaatactgtctagattcttaaaatattttcatttccatcatggttataacaaatttgctgcatgcccaaactgacaacagcaatcactgagggaacaggttttgaatctttcttttgtgttatgaagtttatcgtctctacttgcttgagatttttgttattttgggggtttgggggtgctttttgttttgtttttgccaaatgtaacatgaaagcagatgctgcagctttagtctgttatgctgatttagtaaaaaaaaattttttacatatattgcttgctttcgatgcttctgtgaaatttttttctaaagcttttgtgcagctgtatggtaaaaatatggtgattaatttgaagagcttacattgaaagacaatgtaataggaaataaatgtagattgcagttggtcaagaattttgtagagaggataacaagacttaattactgaaaaacagtaacatagcattttgaaatataatcttttaaaatattgatgctttccttttaaatggaaatttaaattttataattaaaagtttaaacatttatgataattttcctcatcagttctcccataggaaataaagcatgtgaaagggtatttaaagttttggaggactctttttaaaatgactgtgttgataactagtttgggctggttttgttttagaaaaaacattttcatgtaggagtattctgtgaaggaaaggaatcatgcaaaatatactttttgctttggcgtcttacagttgtaaaggaatggtgatcattctgaatacttctgtagtgagtattcattaagaaaagaatgacaaaaatagtattcatacataggaattgggaccagttctctgaaaatgaagatatactcacactgggtccattttacgggtcccagtaacatttgactgagggaaaacaagtaagctcgactgttgttggggtaccttaatggtttcggtctgttatatacctataaaatagacaagtatatgtttgtccctttgtaggtaactgctatgatgattgctatatagtgaaactgacatgagtttaaaactagatggagcagcttttattgctggcaggaaaaagcatggtgtaatattaaggactggggcccaggtctagactccaggactccataaaagagtttaagttcaagcccttccattaatgaactgtgtaagcataggcagttacaaaaggacccatctctaaaatgggaataataatactttacctccctcacagtattgttgtgagggaaacaatagcataactgcaaaagtgctttgaacagtaaaaagatatacaagtaaaaggcattatttatatgagtaagaaagacatttttgaggggagaaaagttattccactttaaaaatcaatagccaagtctcatgccttttgttactttagtaagcgaaaatttcaggtactaaatacctttcttagccaagtttataacaaaaacatctcagtatacttcattacttatttaagcgtgatgtcttttttttttttttttttttttttttttttttttttttttgagacagagtctcgctgtctcccaggctggagtgcagtggcatgatctcggctcactgcaagctccgcctcccaggttcacgccattctcctgcctcagcctccggagtagctgggagtacaggcgcggctaattttttgtatttttagtagagacggggtttcaccatgttagccaggatggtctcgatctcctgacctcgtgatccacctgcctcggcctcccaaagtgctgggattacaggcgtgagccaccacgcccggccacgtgatcttattttaaaagaacactgctatagaagaatttacacaccaaattccctgaaagctaaagtattgttccataacttacacttgaggcaatctgctcagtgtgtaaccactttataaaaaataacttaccattgataacctggaaggtggactacttgtaagtagctggtgtttattgattaaaccatggaagttttcatgatacccaagcatgttgctgaaactgatgcatttgaaagagctgttgaaataatgcaaaactttggttttataagaatctactcatgttttaaaagtatttaactctgtagaccacaattatagaaagctcagtaatgctgctaatgacatttgtaaactatatctgtaatgtagtgcaatatttttatatttcactgggagaggcagtagagacatcatagttgtactttagtgcaagtgggggaacactccaaatagcctagagtatagtaaggtacaaagcttcaatgaaaaaagctgtattatattacattactgatgtaatcttgctgccatgctatgtatcaatagctaaaaaataataataaagactaccacagaaaacaagaatatcttcatttaatgaaatctttaaaaaaggtgattgctgcatctctatggaattatcttctggtataatttggccatgcagaaaagcataacaaagtccacttttcctaaacaaaattgctgttttgcagactgccccaaaacatttttttactattgtttccttatggattatcaagtttatgggtttcctttggctatgtattagtaattagactttaaaatatattttctacattagtattagctgagtgaatggcttagacaaactgagcaacattttagcattattagcaatcataataggctatacttcttcatatcaagccttatattcaatatcagaagtacttgaaataagtggctattttgtgatgctgggaggagaaaacacaacctaaaaattttgaggggtactatcaagttctaaatgtatagctgaattttttttaaagcaatttggaaatatttggctcttaaaaataagataaataataaaatgttaagtcccctaaaagtgaataaattttaaatacctacttttaaaaatactgtcttctaaattgacataattgcttttcttaccaaaagaaggagaggttcccctaattccttttgggccatagatccgcttttaggatctgattaaagatgtggactttcaccgcaggaagatacccatgggcacaccattcaaaatgtatcagatttcaacggttttacaaactcccccgggattaagtcaaatgggtggatattacagctgttttcatcagatatggttatttgttgacaaccatcaggacaacaatgtttatagatggaaggataacttcctggtttttttccacattgaatgtggctagttacatatctcaatttaaaataaattgtggaaagccaaaaaagtatggtcaagctaacctgg

SEQ ID NO: 63118 - DNA, 1037 bp, Homo sapiens
ggccaacatggtgaaacccatctctactgaaaatatgaaaattagctgggcatggtggcaggcgcctgtaatcccagctactcaggaggctgaggcaggagaattgcttgaacctgggaggcagaggttgcagtgagctgagatcataccattgcactccagcctgggcaacaagagcgaaactccatctcaaataataataataatatgtattaagatgaagggcagatacaatacacattcattgttttaaaaaaaagaaaaaccttggaacataacagaaaagcttttgtatgtctctttttttgtttttttgtttgtttgtttttttctgtacataaatatatgcctttcccaatttttgtttaggaaacaaaaatttctaaactatgcatttttgtaatagtctttatttcttttagcatgttgtaaactttccccatgtcaacagatatttttcaaaacatttttatatcgctttgattcatttatatgggtatataattgatgatagttgaaataagattggcaaaatattatatttgaagctcaaaatggaattcattttactgtttcctcagcttttgagtgtgtttgaaatattccaaaagaaaaatccagacttgaatggtgtattcctgagagagagttgcaatggccatctccacaaaacacctgatgactgaggaatagatgagacgagggcagatttttagtcataaaaaatgagttcagattgagttgaagtttttgcctactgtagatcattagatggactaatttttcatttatgcatatgtcaaactataattttgctgagacatagtatggttagaaggacgtagtagaacttaaagctagataaataatgaagcaccatattagaaagctctgaatttccatgtgataagtttgtaggctaaaggggcaaatgctttaggaaaatttcgtagcaatatgtttggtgtttaaagtagggaaggtctgagtgagagattgcagttaaaagctgtttattactaaagtgaaggccagtt

SEQ ID NO: 63119 - DNA, 1126 bp, Homo sapiens
aaagcaagattcagaattatattcatgattataattgtattgactactatgtctcagtattattgagacaaatctcaattttgtgttaaatatatattagaaaatatatagaatagttctagattgtataattaggaatggttttctttttattttgcctttctgtttatttcccaattttctacaatgagcatggagcaaggagtaataataaaacacattgaagataaagtgtttaatttttttgatgatttaaatgtgtagcctaaggatagttaatttatattgttacagtaaagattttctccttcctttatttgccatgatagaaaagtcagcatcagccatggtgctctctgcacataacagtctgttactgtttttttcctctattactaggaatccattgaatcagttttcatttttttcccctttatcaaaggttgaattaataaaaggaaatttacaaagtgttggacttacacttcgtcttgtccagtcaactgatgggtatgctgggcacgtcatcattgaaactgtggctccaaactcgcctgctgcaattgcagatcttcagcggggagatcgacttatcgccattggaggtaattatgctaatatgcattatactttacctttacagataaactacaaagtaggtgtgaggtttttcctttcttcctttttccttatttctataatatgcatatgtcacttttataatggaaataaagtaataaactttattataaataaaaattcaaaggaggccttcaaaatacatttaaaacatacatgccattttagttctagtgtataaatctttaaaatactttgtttagaccacttttatataaccactctaatccttcccttcccaccttctactactctatttattttttcttgaatgtgaaagtaagggcaaataaacaggttatctttctgtacgactaccaccattgctactctgaacctaaaattggtagtattagcactactgcccccatcacttagcactagatgatgagcagaagaaccaacattccttttccaggagggcacatctgaactgtcctgtgatcctgtgtcatctaaatggccagccatttgttagtatgttgtt

SEQ ID NO: 63120 - DNA, 1034 bp, Homo sapiens
cactttaggaaagtattagagagatgttttgggagatctggcagtagcattcaactccctgtccacatatattcagtccagtggtagtcagcaattacaagtttctgcaatttttctgtgccagtcatagttttaagattttacatgcattaaccatttaatcctcatttaacaataccataataataggcactattattatctctgttttatatatgaggaaattgagatgtaaagacagaagtaatttatccaaatcacccagctagctggcagtaaaaacagtctgcaaacccaggcagtgtgactccacagctgatgttcttaactagtactatatcatttccacaaatggtgtcctataggcctgggttcagatctagctttttccactctcgctctatgactatgagcaaggtatttcataatctctacagtagaggtaatagtaactgccttacaggatataagggttaaatgtatgtaaaacccttagcataatacctggcacataatatctattattatttaacttaacctgattgacctcttttgttcctatggttttagtgcatatattttgtgtgtcctcataaatcccctacactcactcccttttattttatttgtttattttttcttgtacaagtttataagacccttttaaatccttcctgtaacaatgtgaggagggcagggagagtatcctcctcaatcatgagatagtggtattgttgttgttgtttaagattgtgttctcaaataatgacttgagaatatcagcaagcttattaagagctgttataaggaggatggagatcagtagctgctgcccatgtcaactgaggataaaatatggacaagcatttatatttcatcaggaatatttaagataagaaataaagaactttttaggaataaagaatattaatatcatagcatggatgttagtgcttccagatagttgtaattaataacagaaagttttaaagcatttaggaagtagttcatgatacttcactatttgacatctc

SEQ ID NO: 63121 - DNA, 1108 bp, Homo sapiens
taggtttgaccaatgtaaagcactgatgggaaataggagtgaactgggaaagccagggttttcttcctcttcccccctctgcattggacaatgtgtctgacagccattctttctccttcgtggcaccatgcttctgacaggacaggcccaccatatttccagcttctgcttgatactgtagcctctggcctctactaataccacctcttcctccccctgcccttccttccagccaaaggttgatagtaacttcttagaactgttactcatatctgagtgtcctcactgtctcctgtttggtactcagttcttctgtcaccaagtagccatcctctgttttaaagggcttccatattaaatacttagttttctgttttcttagagcctattaataaaacagtaatcatcatttcctctggaaacctttcctaactatcatgaaactccttggtaatgcttatcacagttgggatttcgcatttatgtttctatgataatgtgatcagtattgtctccagcaatatcttccgtatcagcaggtaccatgattgttttgctcatagcacgtggcattcagtgggtattcagtaaatgttttcggtatgactaaggctggctgtctgaccatgagccttcatacaacctcaacccttcttcttccagaccttcaaagttttagcgtgacttttagtcacacttctgtttcctttccatcttcaaggctattcctgatgtatgttttaaccaaataaaaatgtttagggtaaggaagtccacaaaatgagagatatactactcaatattaattttgtgaaaagcctgatttttagagtgaggattttagtttacagatgtggtgcattatagtattttatttctggcattactaaacacatcaaaaacatttcttactctatgtgtatagtttaatgtaacctaaataaaatgactaggtataatctaaaattttacttgccttacttccctttcagttttggagagttttagaagtcttgctgaatgaaattgaatgcacctacaagcccacctctgtcatgtattgttgaatgtacatacaaagagtataaaagagcttcctaaagaactg

SEQ ID NO: 63122 - DNA, 1057 bp, Homo sapiens
tactcatttttggatcctatgacagagaggcaaatgttcattgcacacttgagttaagcagtagtgtttgggaagaaaaacagaggagttctattaagacggtaaaatggatttacagtgatttatatctatataaagttctattttataagcatgcatttattactatttctgtattcctagagttatttttggtcatgtgcaaatagctatgaacagttcttatttatttgtctcgttacaatacaactacagtgataaagtaaatcacaagaaactataaatagtattcatattacctgcacaagaaacctagtccgactagctttcctttcagaactttaagattgcttcagttatgaaattagaaggaactaattttaactaaacaccttcaaatacatgtgaattcagagtattcattattcattcattggacagatattttatgagcacttactttgtgctgggcactgttttagatgcaagagaaactgttcaagacaaaaaaggcccctattcttgtgatactaacatggggtagatttgtggtatggggattagaagagggaggaggtgatctacattttatagggtaaagatagaacacagtaataaatggtaaacaaaaaaagtgaacaaagctattcccaaagattcacaggtgctatgaagaaaataggcatatgacagaggaattataagttatgataaaggaggctctttagatctggtgataataggactctaaagagatgacactggagcaggcttaccagaggacacccagttaaatctgaatttcagatagtgaataattattttagtagaagcatgtacccagtactacaggataacagtcaaaatcctgctaagtctttaatggacaactatgtagtatttttatggatattcctttgacttttaaattgtttctgatttatttatgtattaactgttgtgaacatctttatataaaaattgggcagtatgaaattattttggaagaaagagggtaattttgatcagagtggagaaggagggacaagaaaaactg

SEQ ID NO: 63123 - DNA, 1090 bp, Homo sapiens
caagaccagcctgagcaatatagcaagacctcacctctacaaaaaataactgggtgtggtagcctgcatctgtagtgccagctacttgggatgctgaggcagaaggattgcttgagtccaggaggtcaaggctgtagtgagccatgatcacaccactgcattccagcctgggcaacagagtaagaccctgtcttcaaaaaaagaaaaaaacatgttttttctttaaatttttattaaaatataactcaccacctgaaaagtgtactaatcagaaaattcagctccatgaatgtctacaaagtgaacaaactcatgaaatcagcattcaaaacaagcaacagagtgttaccagcaaccaagaagctcctcatatgctacctagtcactaccttcctctcctctgccttaaagtaactactatcctgacttctaacactatttttagatttttttgtgtttgttttttgcctgattttgaactttgtataaattgaatcatactgtatgtactcatttttgttgtctttagctcaagagtagtttgtgagattaatccatgttgttgcatatagatgtagtttgttcattatatttgctgtggagtattccactgtgtgaatgtacttcagtctgtccatttttgttgatgggtagtgttgttatgaatattcttatatatgccttttggtgaacatttgtgcacatttctcttgggtatatcgaggagtaggattgcagagtcatagggtggatctctactggcttcgtagatattactacaattttcaaagtagttttaatagtcgaaaccagcagtttcacatcctctccaacatttggcattgtttgttctttcattttacttaatgcatgtaacttaaaaatcaaaacagaagaacttatgatgaaaatcagcaattgcctccctaaaccctttactttcctgccctaagctagactgttcagaagcaatcatttgtaactatatatttctttttttttttttttcactttgtcacccaggctggagtgcagtggtgcaatctctgcttactgcaagctctgcctcccaggttcatgccattctcct

SEQ ID NO: 63124 - DNA, 1444 bp, Homo sapiens
ggcgtggtggcgggcgcctgtaatcccagctactctggaggctgaggcaggaaaatggcttgtacctgggaggcagaggttgcagccagccgatatcgcaccactgcactccagcctgggcgacagggtgagactccgtctccaaaataaataagtaaataaataaataaacaaactggtgatgatgtgggactgattcaagtttcagataagaatgaattacaatacatctaagatatagcatacttctcacagggaaaattaaactagctagtgttcatctttttttacagatgaggaaatggagctcggagtagttaaataacttgcttaaagtcacacagctttcaagtgttgaaacgcagctctgataaggccaggccacctttaaacacacacacacacacacacacacacacacacacaaactatgttgttcttaagtgatttattttttaaaagcatgccatcgatatagtaaatatgtgggatatctttccaaactaacctagaactcttgagaagagtatgactataaagctgatttttttttcttaaattggtcattttagaggatccttttaaaagtaaatcatgaggctaaatctttgggtactgtcccacgtggcatttcttttttaattgagcagaattgtgtttccaaatagaagagacaggtttcaccatgttggccaggctggtttcgaactcctgacttcaggcagtctacccacctcggcctcccaaagtgctggggttacatgtgtgagccgctgtgcccggcctagtttattcttttttagctatctaatcttcttagtagagctaaagcagtaaagagaattgtatggagtcttacgatcctttggcatttgtaatcattacataacaaatatcttgccagttaacgttgttattacttctttcccccttcatttattttgcctttttcgtgttgctaaagtgaatcagcctctctggactgccagttcctgatgtttcacctagagatgctaagttgctcaagtggttgctttctaaggacccagctgactgacatttcattttacccaagttaacaaacttacaatgtttgtaaaacattttattttacaaaatgaattataatatgtagacaatatgtttacagatttattcaagttaggaatttcattcatccacctcaatgttaattggtttgattttttaattaaaatagtatattataatagcaatatatttttttaaatgaacctcagaatccatcctcaagggagaaagattaccactaatgttcttttactacgtggataattcatcttaaacatggagtctgagtaatagtgtctgggtggggagctctgtttagggtttaggagtcaaatatttgagattcttacggatgcttgtgttcctggagtattattgtatatagacaagcaga

SEQ ID NO: 63125 - DNA, 1800 bp, Homo sapiens
tcccagatcccgaccgcagctccagaagtgacggccacgtgggtggcggcgcgcgccgcggggattggaatgttggcgtggggggacgaggttggaagggccgcagagaagtaaaggaggacccgcgtccgcgtgcccgggcgccgactgctgggcgacgccgccgggagcgagcacgcctctgacgtcacgcgctgctcgtccaatgagtggaggcctgagggaggcgccggtcccggccccgctgccgccgccgccacaccggcccttcgggagcgtctgaggaggcgcgggccgctgcgggctcgggcgccgcagcgcgccggcccgagcccctggacgaggcccacggagccgctcgccccgacccagccgcccgatgtcctcaaaatggaggcagcgggggcggcggcgtgaagaaagcggcgctgtgggcgcgggagtaggggcccgggcggaggcggtggcgggatggggctgctgctcatgatcctggcgtcggccgtgctgggttccttcctcacgctcctcgcccagttcttcctgctgtaccgcagacagcccgagccgccggcggacgaggccgcccgcgcgggcgagggcttccgctacatcaagccagtgccgggcctgctcctaagggagtacctttatggcggcggccgggatgaggagccctccggagcggcccctgagggcggcgcgacccccaccgcggcccccgagacccccgccccgccgacgcgggagacttgctacttcctcaacgccaccatcctattcctgttccgggagttgcgggacaccgcgctgacccgccgctgggtcaccaagaagatcaaggtggagttcgaggagctgctgcagaccaagacggccgggcgcctgctggaggggctgagcctgcgggacgtgttcctgggcgagacggtgcccttcatcaagaccatccggctcgtgcggccagtcgtgccctcggccaccggggagcccgatggccctgaaggggaggcgctgcccgccgcctgccccgaggagctggccttcgaggcggaggtggagtacaacgggggcttccacctggccatcgacgtggacctggtcttcggcaagtccgcctacttgtttgtcaagctgtcccgcgtggtgggaaggctgcgcttggtctttacgcgcgtgcccttcacccactggttcttctccttcgtggaagacccgctgatcgacttcgaggtgcgctcccagtttgaagggcggcccatgccccagctcacctccatcatcgtcaaccagctcaagaagatcatcaagcgcaagcacaccctaccgaattacaagatcaggtgagctggaggtcggggagggggcctggctgccgggaacccgggcctgggcgggacgctgcgtggattgggaagggcaaaggctcatttctgtcctggcgcctgcttctggggccttcccaccctggacagggccccagatcaaggcgagtcgtgaacacttgctttgcttccgaacggcattgataggagctagaaaccttttcgcgtgttcatggggactcagggtgctgtcaacgcgggcagaatcgtctccttttataagcagcatattggaaatggaagggaagcctaccctaatccccaggagtcgcttctgggactgttgagaaactctccctctatgtggttgctgcattgagggcagccgcgtcactggctttgcagcatccccttggccgctttgagaaattgttcctggacacagtacacgcgtgaagagtgtgcttatagccca

SEQ ID NO: 63126 - DNA, 1040 bp, Homo sapiens
gcgatcagggagactcaaattcctccaaaatcctcatgggcctctcatcaaagacacttcaactttttaacaatgttattatttgattacaggtgtgttttcaacactatgacagtgtgaataaaggcatgtttagaaaactttgcaaatgtcttttttattgtaacatatgacctaagctgatgcagtaggcttcatttgcaaatgtagcttcaagacacgacccctagttacccacttcctttccaatcagactgccccccaaactcctccagcatggaattctagagtctaaaagaataatggcaatgccactgctacctcctgagtgcctggaatatgccaggctccatgctaagtgctgtagatgaattatctcatttttccttccaacggccctttgagggaggaacttctgtctgtctagaagatgaggaaattgaggctgagtttggcccgcaggcgtgtttttattttctatctgaatgtctctaggtagagcatccactccccagttgcccagttgtcaaaggctccatcatcccattttcgtaaccacactcacctaaaaaaaaaagttttcttttttttttttttgagacggagtctcactctgtcgcccaggctggagtgcagtggcccgatcttggctcactgcaacctgcgcctcccgggttcacgccattctcctgcctcagcctcccgagtagctgggactacaggcacccgccaccatgcccagctaatttttttgtatttttagtagagacggggtttcaccgtgttagccaggttggtctcaatctcctgacctcatgatccacccgcctcagcctcccaaagtgctgggattacaggcttgagccaccgcgtctggcccaaaaagttttattttaaacagctttattaagatataattcacatcccatacaagtcattcaaagtgtatataatggaatggttttgagtatattcacagatatgtgccaccatcgccacagtccattttcgaacatttccctcatctcaaaaagaaatcc

SEQ ID NO: 63127 - DNA, 1032 bp, Homo sapiens
ctccagcaactccctcaccaccacgcctccctgcctaccatccccggaagggtgcttattctttaacaaagagaatctaaaaaaaaaaacaaaaaactgttgtctaatatatctacagtaaatgttacactagagcttttattttcctctgtagcttttcagaagaagcaatttaccttggatttgtaaatcaagctgaaacttttttgatgttcatgtactcatatgtcttgtaggtggtaggtgtcacttgtgtgtatgtgtaagtgaagtatgatgcatgctcattcacttggtccctttgaaataagggaaaggatcacagtgctgctgggccatgatggtatgtagaagggtctgtcagcacacatggaaagcccccatttgcacagatgtagaactttaataatccagatgcaatcattggaagtatttaatatgcaattggtagcaccttagctaattaatctgcatatgaagcattttctgatatatttaataagaggtatagaagctcttcaagcattaaaatagagttgatgtttcattccatttgttttatccatcaaaaaatgcactctcacagtggagttgaagtctaatacatgatacatgtgggcctgttagtcttcgaagcttccagatggtttgtgttttgaggtacaaaaaaatgctgcagatctagaaatgcatatatttagcgggtatttgaaagatagaagcattatttataactgaagagtataacacttatcttcttaagtaaatgctctcataacttgtatacatttttgcaggtacaaattcaaaagtatgtaagcattgtataatgtgacaattgtataatttatgtaatctgatgcatgaatcagaatttttatataatatatgattattgacttatagttgattaaagtgtttaaacttaattcagttgtcaacatttattacagatacagcggtgttaccataatggatttatatatgagtcctccttgttttttaataaatacctaggatgcctcttatttg

SEQ ID NO: 63128 - DNA, 2169 bp, Homo sapiens
gcctgcaaactcttgaaggcctagcgcaagctgtatcttctccacaaagcctgagagattctatgaaattggaaaagtttttcagtcctgaatgttttcacttatcctggagaagtgggtgtgcttcaatgacccaagcatcaaattggtatctgtactctagcttctctttctctggtctggtaaagtcctggttccttgggctgagaggctggggaagtggtgagggccagtgaaaagttaaactttggcttttctcatgaacacccccaaatacatagcactattaaagtagatcctgaaaacagggaaggacagtttaattcttattgggggtgggggtcattctgcattcaccagtccccattccccatcctccactgaatagattagatagtattccttaacagcaagaaaaccaatttcctcaatattttagttaagtttccttaaagccaaatggaaatgttttaaaagatagtgatgaaaattattttaaattgttgggcttaatgagagaactatgatttaaaaagaataaaaaattgcttagttgtaattgggcattatgttttacagaatgaaaactcttaatgctatacactataaataaaagattatgttacagggccttgattaaattcctgagaaatatttttctttcacttttgatataacattaatattagaatgctttgtaataacagtgaattaataagtgtcttttaaaaaagatttttggttatatttatgcttttgcctaaaaagaatttttgtcaatagaataaagttaagtaaatagatgaaatgggagagaatgcaaatatactaaccgtagtattaatatggttgaactcttgagtttcctgataaccagggtcaaaaagggaaagaagataaattagatattattataggagaaagaaatagaccagttactcaggggaggaaaagttctgcctgtttctaaattaaaacagaagttactcacatggggcttcctgtaaggataatctttgatttaattccgagtgcttccattttcatagcaaattagaaaagatttttgctgtaaccatcttcactaagaagccaaacatataacattaaatcacagttcagtggaagcagtttcataaggacacaagtccaagtgtatagttttcagttacttcttacagttcctctgagttaacttttagaaatctttagttttcatctattttagttgtatttattatagaatatttcatctcttaatgtaatcttacatgatataaccagtctcagatattaggaaattgcccacaatgttagaaagggttttaggatttagagttatagtcaaaactttggtgcatctgccctagttcttgcctcaggactggctagccaatttgtgaactgtcacattcactttaagcaaggctagcgaaaaacttcatcagggtttgaaaaacaaaaagtcgaagttccaggtaattcttaatgtttgtcccagatgttatatctatgaaagtgacagtctttatcctgttctaggacagcaacccctttgatgccactgcagggtatcgtagtctgacctatgaagaggttctacaggagctggtgaaacacaaagaactccttaggaggaaagacacccacatccgggaactcgaggactacatcgacaacctccttgtaagggtaatggaagaaacgcccagtattctcagagtgccgtatgaaccatccaggaaagctggcaaattctctaacagttaataaagccaattgtattgtattgataattggacaaagagagagaaagaaagaaggaaggaaggaaaaacttgttactgaaagagactacactatcaggtttcattacatattctcctttattgtgaagagtagttttacctgtaaatattagcagggactatcaagagtgacctttgaagcaagctaaatcatttaaatgtttaaattgaaaatgggccagattctcaatgaataagtggttccttaggactcactcaggtgctggtactgacccactaatctgccataggcccagaaatatcttcagaagtacgtgagttgttcctcaggaatagatttttcataaagcagaattgatcctgtggctggtttctcagaaatcagtttgtagaaatattt

SEQ ID NO: 63129 - DNA, 1013 bp, Homo sapiens
ttttatttctgtgtcagagcaggtgccctctttgtttttcatcaagagtataaaattctactctagtagtctctgaattcaaggttctttaatatatcagaaataatattcattgtatttttaatgttttgtcatcctggttttaaaaaataaatattcttcacttaacagaaaaaaatacataaccaaaatttgaatgttaagtattgttagactgtcgtcacgtcattttatggaatagtatctcttgtacttacagagatggataagatcttataatggcaactctttgtgcctcccatctttagactaccagacagtgtatattagggtgacattctaagattcagatgtttatttttgaatttgataagggatggaaatttttgcttttccttggttatatgtattattgctgttctttctctgtgagggttatgttgatactctgatacaaaggatgcacaaagcaaagtctctgtctttaaaagtataagcaggtagatatagaatgtgtaattaattgtcctagttgtaaataactgtcctgggtggtacagttggtaagtgctgatagagataaaaattatagattagatggataaggttaggcagtctaggcattacagaaaaggtagaactaaaagtctcgaaggatggatctgtgaagacagagaggtaaagataaatgagaaaaggtagagaggtaaaaatgaatgtgtgaagtggttctcagggacctaacctgcctaaaactgttaagggttagaagtagtagtgaagatgtgaccttattagtatgaatttagcataccagaatgaagaatttgcatctaattctatagaatgtatgaagagttttccatatatgactgatgtgatgaaaatactattttaggaaaactcagagaacagtgccattgctgttatatacgtaataatgccggaatcggaagaggtgcacatgaactcagaaaaactgcgtttctaagtgtgattttagattccgaaca

SEQ ID NO: 63130 - DNA, 1760 bp, Homo sapiens
aagcttgtaagcatgtagccatttttatgaaattgtgtaacatgttcattaaaagtcaaagactgtttactgtagaatttacattttgatttttaaaaagtatagtaaataaatgatcctaaagaaaaagagcctattgatagtttttaaaccttcatttttataatgtcccaatggacttttttttcctgaatgagtttaaagttcagtcgttggcatcataaaccttaatatgcaaaggatttgttttaatagcaatatttactttttgctcatatttgtctagtgttaaagataatttgcctgttattcatggtaggctataaatcttttacacacttgaaaatttgtggcttcatttatgagacagaagacaaaaacttttgagatgatttttagacccattaatccattagtgctcagagatttacagaatgtatccaatgaaacaatgactataaacacgaagtatgcaacgtgattagttcccttaacactaactagaacttttatgtttaactccccagatactacttgaaacttttttaccctttgtcatcctaatactcattataatagctctcattaattggtgtatctcccagtgggttaatttgcagataccagcgatgccatccttgtgctaactctaatgcaaattgatatttagagtcttcaaaattgaaaacaaaaaaagctctgtaacaaaaaagacaaactttgctggttttttttttttcttgagagattgagatatagcaagattctgagagagaagaaaacaggccaaaaaaattcacaaaaactagtgtaggctaataaactgatgtgaaaatttctcaatttacagcacttgacaggtgctaaaagaaaagcatctttaattttaatgtgttgttaggacctctttagagagactgtacaagttattaacaaggtcctctgagacaggagacgggtaattaacaagacctatggagatatagtttaggtaattaacgagctcttaggcactggacactggataacacgtagcgagtccaatacttaaagagaacaagttgttatgatatgatcaaatataagatacagcatgtaagccctcttgaggtttctgataggaaagtagtaagattgtattccagtgaccccagtgcactgactattgtaaatcagcatgtaaggtttttggtttaacttttaaggtagcatttgagagaattatttttaattgttgttacatgtagattaataatctttgctaattgccattaatgaacatgtgtattttgagaaaaatgcattggaagcacatcagttgtatgattctaaattgtcttaaacatttattttcagtttattttttacctgtgacttgtcggctaaaattgcctattgcaaattaaccttgctttccttgtctactttaaaacagtcaggatctaggccagcgaggagatgtggccctggcaccagtttggtttttacatgttatgcccaggttcctccagtcatgcccctatgctaccttcaagtctgagattttatattcccaacttcaaatatttggtccagttatttcctgtgtaaatttgaaatttctgaagtatgaatcttgagttttggctcagaaaattcccacattcagcaaacatttattaagaacatgttatactctaaaggttaagaatataaagaaggcccttgcgaggctcctgattcattctgttacctgctgtctcagtggtgctactctagcc

SEQ ID NO: 63131 - DNA, 1073 bp, Homo sapiens
tccaatgctggcatgctgcaaaactcctatgacacatatacagtaagtagtgttggagttcttgtaatcttcaggagaatgttttctcagtttattactggtactaagttgtttgtattttataattgccactagtcttgttttttaattgtaagtcacaggttgtttagcatcatcagtatcaactaatttttttcatgctttatcaaataaattgtcaactaatttatcatttggtttatcacacaatttgcgaagtaatccttctttttatcagcagtatatcatttgccaaaaacaaatatgcctgaatgtttgttataccatttttaatttgttcacaacaaattatcttttaatatattataaaatcacaaataataaattgtaaataatgttaccaccaggctgtttttcacttaaaagtggaaatgatgggtgtgtgtcttcaccaagccaaatttgttcatttcatttcttttttttttttaactaggacatagcaagttctggcttatttaagagttcatggaagagatgtataccactttcaggtctggcccatggaatgtcctcttaacactcttaacacaatcctccgttttgcctcttcctccatatcctggaccagggattggcaaactaagcttggaggccaaatctggcttgctgccagtttttgtaaagttttgttcgaacacagccgcattatcgtcataattgtgtacggtggtagcgttgagtagttgtgacagagaccatatggcccacaaagctaaaactatttattgtttgggctttacagaaatactttgctgacccctgcagtagctgaatggagaggatctttgagatgggcagagctgtaagtaggagcagcctgggtctctgcatgcaagtggaaggcccacctgacgaggaatagccaagtggcccttgtccaaatgataaattcacaggatataagttactgagatttatatatatatttattagagcacttagcattatttatcctactgaggagggcacatgggctgtagtacctttcgttgtgtttaagaaagccctag

SEQ ID NO: 63132 - DNA, 1348 bp, Homo sapiens
gataataaaatgagtgccagtttccttttatggcttggctgcctgttttactgctgtttctgctatctcaaaaccctgagcataaatgaatgttccatttcatcataaagtccttagaagaaaacttttatgttcagaagtaagaaagtaaatttaatgctaatgaaaaagtctctgagaatttttaacattatcatgccaaccagaacctctagttttgacatcatagtttatatgattgtgagctgaatacattactaatggtctagcaatatgctagttgttatcagcctcgatgcttcagactgctacaccttagcattttaagattgtttccttgattttttgaaggttaatacatttaagtggctaattgctctcattctaaaagcagcagaatgcacacagactgtgtcaaatagtgtgatgtaatgtgtcactgattatgtactaactacaaaattgtttgtaggaagtctcaaatctccacacagaagaacattaagctttgatacttctaaaatgaaccaacctgacagcattgtggatgaaggtgaattgtgtttcggaagacaaaatgacccatttacaaatgtgactgcttcattaccccaaaaatttgcaacactgccaaggaagaaaaatccatttgaagaaagcagcgaaacatgggacagcagcatgaatttattttcaaaaccaattgaaataagaaaagaaaataaaagagagaaaagggagaaagttagcctgtttgaaagagtgactggaaaaaaagatagcagaagatctgataaacttaacaatgggggatctgatagcccttgtgacttgaaatcacctaatgcatttagtgaaaatcgccaggactattttgattatgagtcaaccaatccatttacagcaaaattcagggcttcaaatataatgccatcttcaaggtaagcttaatatgggggaagttctactatttgggaaaatcttgtacttgaaggtatcaaatatttcttttaaatgctagaatattttcaagtcattttattttatttgaaaaacatttttatttgtataattaaattatagagccaggcaatgttgcatatatttttggaactgaacttttttatcttaagaagataaaagactcttattctctatcctggtctacttccacttatgtgagccagaaattcaccaaaacttagaaaacaacatggcttgtgatgagacatggcgagagtgaattgccagtgggtgttagttcaagccagaaatttaggtgataatgtttctagggattcgttcatgggctacctggaaaggaccaacagcagcccatgtgctattc

SEQ ID NO: 63133 - DNA, 1103 bp, Homo sapiens
ggccaggtatttattattgtattaaaatgtcatgagattcattttataatgctcaaaaataatttgtattggtgaattctttcaaaatctctgcctcaatgtcttttaatgttaaaaaaaaatgtccttaggccgtgagcaacacttaatcccatatggaaaacttctagcattgataagaatttttgatgatgagtgattttcaaattacaaaagaaaagattatctgaaaacattttcaaacttgccaaagacctattcattccttcagtatatgttacatcacagagacaatgatcagttttttaaactaaataataagtaaagcccgaaatactgtggctgacagattcttattcagagcttaggttgccttgatgtatagttactttacctaaaaggctatttgtatgtaacagaactcagtatcctctctctattatgtgttacagccaatttttttttcttctctttaaggtggtttagattagaatccaaacaaggaaaacgaatcaaaaacaggggtgagataaaggtcaatattcagtttatgaggaacaatatgaccgcaagtatgtttgacttatcaatgaaggacaaaaccagatctccttttgcaaagttaaaagataagatgaagggtagaaaaaatgatggaacattttctgatacgtcttctgcaatcattccaagtactcacatgcccgatgccaatagtgaattttcaagtggtgaaatacagatgaaatccaaaccaaaaaagccttttctcttgggtcctcagcgactctcgtcagcgcattcaatgtctgatttatctgggtcccatatgtcttctgagaaactgaaggctggcaccataggtcaaacacatcttctcggacaccagttagattcctttggaacagttccagaaagtggtaagtgtcacattcttgtgtactcattggtctgaactacccttttagtttttaaagtttaatttctaaatttagtaaatcaaaatagcagttgctttgtagtattttccaaattttgtcattcatcaaatattgagtacctactatacctcaaattggtaagttccttgaaggcagagcttg

SEQ ID NO: 63134 - DNA, 1078 bp, Homo sapiens
agaacacgttgtcttttgcgctcagacatcggttccagaatcgcagggaaggtttcctccgcttttgcccttttagctcacttgcataccatgaacacattgcttgctggtcttacctagtaaaggtctatgtgctatgaacgcataactaaaataacctcaggaaaaagaagagtgataactacaaaaacaaaacataatgttcctccacctcctttccgagggcatttgaaggcccaaggcattagtcctcttggtcctttttgagggctcatgtttgggagtttcaaaaggcagtgatctaattgttaaattttggaacaagttctcccagtttcatccttcttggacgttcatctctgaggattttaatgagccagagcaagacagaagtgcaaacatgaaatgcgtctccaggctaagttgaccaggattagacactgccatggccagcctcctccctctggaaggcacatcacattattattattttaaaaatcaaacttctttttagctgaagtaagtttcctttctgctcctacaaatatcatggctggtttaaggtttgatgtctgcttaatgcccaattatgctatacaagacagatcacactacattagccaggattatgttgcctcttgatcttatcagctttgtttcctaaactacaaaaagatctaacacagtactggttagcagtttggcttagacaatctctatcgtcatccatcactgtcaccagttagcaggaggcattaggcacaaagctaagagacaggatgcagagctgacactctcttcccaggctaacactctaattccacatttacgccagctcttcctaggctcgcccttccttactatggaagctttctttcccttgcttatttttggaaaaggaaatctattcccgtaagttgtttgcttgcttggtcttaaattctttgtaagtatagacaggagagggagtaaacgcataaggaaaattaaaatatatattcctcagctaaaatgagggttgtaaagtcagagatctgagggagaagatggagactaatggattgaatctgaccgttcc

SEQ ID NO: 63135 - DNA, 1084 bp, Homo sapiens
gaagacaggacacagcctctgacttcataataaaactttgtgtgcgaggggttccccaagagcccccaggatgaacatgttgctggatggactcacaaatgctgctggggaaattgttgatgctaccttgcttcttctagaccagagagctattctggaacaagcaacagtacataaagaggcttttgaaaatgtcagtggctgagaaactgcaaccagcagctatgagcggattttgaggggcataaaaccacacagctcctgaaagcagctggacgttccactggcaagctggacagaaaagtgcaccaaactaggcgagatctttttattaaccacagtgtcagagaatggcgaatacatggctatttgactgtaattatgaaagcactggtacaaataaaaaaggagtacagaatgtcttagtcccattctttaagatttctgttaatttttaaactgtattttaatttaaggacatttttataccttagtaataaattaacatttcaaaagtacttttacctgctgagatggttcattccgctaatatgggtaacgctgtggactcaaataattagtgtaaattgcctttgaataacacagagctgggaacaactttaacttgctagggcttaatgccccttgcagtacaggatgaagagtccttaatggggcctggaaaaacaactaatacctacaaatcaaaggagaaaagccgtttttgatgcatttgtctgagagtgtgagttttaaactaaattgttaacacttcctccccgctgagggtcatggattagctaggctgggagattctttgagaatctttcacactgaccaggggaggtggggggttccaaatacaagtgttttcttaaccttaatccctacctccctgaccaggacagctctgcatttccctctaattaggtgaagaattaggaggtggataaatgtgttcagggatgaggataaagtgattagttcactccagaccatgatagtgatttctaggcgctacttagttcctttcaagataataacttttctcttttttacaaaaacgtattcaagcaaacctcaa

SEQ ID NO: 63136 - DNA, 1097 bp, Homo sapiens
tgacttctgacagtgtgcatatgccatgaccaggccgctggaacatcttcacacctccctggaatagaatgcaattacattttccctttaaataaacttttcaagccaatctattaaatggttatctgctgtctgctccagggagtgcaggcagatggagagctgggctggggtagaccagttgtaaattcatacacacatacacacacacacacacacacacacacacacttgaagtcctgcacgaggtcacctacaaggtcaggccacctcttcctgggaccttgctcaggttttggtgtctcagaagatgctgcattaccaacctttgaggagaaaaccaaatgggcttgtcacaaagaaatacaaagtgtgactcagagcagggagcaagtgtggagggaagggcctggagaggacagtgagtgggagagctgccatttgggctggtctggcttcagaaccctgctttgctttctctccttttggctcaggagatgattgcacatgtggctcacagctgactcttgcaggatctcagataaatgatgagaagacaggtaacacctgggcaactttttctcattctgtgtggatagaggttggggccagatggcctctctcctcctcccccattatttatggaaggcttcacttactttccaacaggaagaagcaggaaacactgggattatgtgttcagggacagaaaacagtgtgtacaagcacgcgggttctggtaagccaatgagtgtagacatggttactgccccccagtcgccactctcttccaaaagccctcggcttgggtctgattaaggactctttgaaggtcatcataacagataacactcccacagcattttctctgagccaggcgctcttcttagggcaacacacagcaatcttttgaggaaggtgtgctactattcccattttacaggtaaggaaactgaggcacagagagattaagaaacctgcccacgtgtatccagctatgtaagtgaaagaacccaacatgtggatctagagtccatgctgataacctccactctccaacactctgcagagcagaaggacccttgcggtcatctcac

SEQ ID NO: 63137 - DNA, 1041 bp, Homo sapiens
aaattagccatatgtggtggtacacccctgtagtcccccagctactcgggaggctaaggtgggaggattacttaaacccgagaggtcgaggctgcagtgagccgtgatcgcaccactgcagtccagcctgaccctgtctcaaaaaaaaaaaaaaaaaaaaaaccttctggaagcagaaaggaggaggttttccaaaaccaaatcatgtcaagtacctagcttgacctcaaaaaaaaatacagaagcagggttggtaattgattgacaggaagggcagctcaaagcaggaaatggagagtggtatgaaaacacttaagcagtactgcccaaaggaagaacctgaaaagttcagccatagattttctgagaagatgaaagtgtaggcattagcatactcaagaatcaggcagacagttttccccatttggaagctgaaaaaggaatgatctgctgcccaagacaagaaaatgatgtgggcccagagggaaccgtcactcacacgtacactgtccagggggccagagaaggattacagccgccattttggcttctctagagtgaagcagcaaaacaatgtctagtggttgctaggcaaccattagtccatcgctgcccttttccattaaacattatctgccttcttagattgttttatttttttaaacaggataggtaatgcaacagagaattaacggtgcaacctaacaatgaaaacgcatttgaggttcccgaatcagtgaaggctttgcaaaggttagatcactcttgggtggatgccgaagatagtgacagttgactgaaacctcttccccagacatttcatcactggtcctcatgtttcctagtgccaaaaataataatgtggacgtaacaataatctctgtacattgtaaaatgtctgtcctctgctacgacctgctccaagctagatcttgtcctgaagcaagtttctctatcggcaaagagtggatgtcagaggtggtaaaatggagttctagccctggtcagctttgcagatagctaagatcatggtatccaaag

SEQ ID NO: 63138 - DNA, 1119 bp, Homo sapiens
tgacagcgactcaccgccttctttccctagtaatcctggatgtcccctcgatgccagtcagctggaagggaaaagagcatggaagagcactggcgggaagttacgggcctggcctggaagtggaacacattagttctcactttgcactggctcagacttccttacttcatcacactaaccacaagggaagctggaaaatatagactgggaggaaagaaattttagtaaatagcttgcagtatctgccacattgcctcaatcacatacgatgtagtaactttacattttgctgatgttgagtagcacaaactactatttgtgatttgatggagtcatttttacttgggtgtgttgacagagctgagtcaaagtagctgttcatattaccgtgtagtgggtgtggtgtcacagtgtgatacctgctgaaagagcattgcatgctcagtcagtgaggcaaaggcagtgcttattatgccataaagggctgttgggactttaccaggtaggcgagtagaagcgagtgcatcctaggtagaaggaacggcgtggcacatttgaggtacagcaaggactttagcaggggccaggggagagaatgagaacagggaagtagagcagcagaaagagatggcgttgaaaagagctggccagaaccaactcacacacaactttgagagatgctggggagattggacttgtgcggggaagagttgggtgtctatggatggtgatgtgggatgaagaaggtagtcagagagcaggcttttaaagagtaatgttatattagtagtttagtaatatagagttagacatttagtatttagtaaagtaggtcatatttatacttgttgtgtcatggtacctgtggaatgccatggaaatgtcaaatggacacttctatgtagcaacctggaggtcagaagggagggaggttgcagaaataggtcgatgaaagaggtcttgaaaggtggcatgtcaacaggaacaaatgccgctgagctgtcaggcaagataatggtggagaggtggctgttggagttagcatcagatggcaccggtgatcttggccaaatcagacatccagaccagaattgcaatagatggtgcaattgcaatctt

SEQ ID NO: 63139 - DNA, 1043 bp, Homo sapiens
aggtaatcagagtatctaggttttcaaatttaaattagtgggtgactttatgctagaaagtagaatatgtgttagaataaatttatcaatatatattcttggcctttgtaggatactgagacaataaggtccatttttcatttttgaggttggggagctctgtagattttgataaaatgtgcagaactgcattctttaatctttattatttcatcctccctccacactgcttgctttaaaagaaaaaaatacctacacacattttctagtgttaactgctgtaatcagcatagacttcctgggaagggattcttgccttcagtaaaggacatgacagcatgtggccaatggagattgccacgaggaaacctggaaaggcattgaaccattttgtgctactgttaaaatgaggtgtgttgtctctttattatctcctactcaatagtgagtattctggaggtgtctgttccctttccggaatttcttcaaatacagagatgcttcagagtagcttcctgccacattggctttcatgatcttaatccctggaacacagctataggcttctgggagatagtttattaaatgccatgcagaatgctatgtttttagatgtgcatgtaaatcaagaattagctgaggaatatctttttattagtagtagtagtaactcatttttagattcaagtaaagtttgttttccaggtgagatgacatttttaagaaattgaatttaagtatgtgcttttatatccggaccaggtttctcaaggaagcagaatacaagggaatgaaaggggaagggagggtagtgcccaagagaaacctcggctcctaagtgctcccctgccaggtttcccccgtgcctgcccactggcaccatcctggcagctccagcccacaccccctcctggaccctgggctgcctctcgctgaatagctgcagggggcctgctatgtgacaggtatggaatgaggtaatccttttccacctctaatttctgaagggtgtgtctgtccagtttttacttgttcattgaatt

SEQ ID NO: 63140 - DNA, 2305 bp, Homo sapiens
ctcagcctcctgagtagctgggattatggacaaatgccaccacacccggctaattttttttttttttttgtatttttagtagagacagagttttgctgtgttggtcaggctggtcttgaactcctggcctcatatgattcacctgcctctgcctcccaaagttctgggagtacagacatgagctaccatgctgcccttgtattttcttatctgtacccagtgtaactacacgtttactggaactgtgtttttaagactgacagttgtttataatggattagtcgtaagtaccaaaaagtctcagttgatattatctttacaaatgacttgaccttaatgttataaaagtagttactgtttttttttaattggaggcagacttgatatttcagagttgcatagtaaaagcaatttgttaatttttgtgtactttcagataaactattacaataaagaaaggagcagaatgtagtatttggaagatgatttaaattcagcaacgcctaaaaatgtcttcctaagtatttttctcagccatgtcattctttaaattatgagatggttcttagaagagaaaatggtgtaattgtattaaacagacaattataactcaagataatataactttgaaccttctaagaactgatttgtttggttttcctcccattccccattcctccttaaaagattgaatgaattaatgagcagaaagagaggattggtaacatgggaaatcgttttcattagatgtacatttcctggttctgacaggaaaggggctccagaaaatcataaaacaagcaggtgaacaagaccaggtgtgtcggcacctccctgctcagtgcccagcggaggtaaagaaccactcagcatggtttttgtcagttcacctcttctgtcgttgtcagaggtttcctacctgtctgatataaactttctctgggttgataatataaattcagaaacatgtaaaatgaatcatgattatattactgttatttttagacttaaaatagtaacaaaattttatttatggtggcacatttaatggctttttttttctgtgttctggaataagagaatacctagctactatttaagcatccaaaaatcatatcttgctttcatttagttgagaaaagccagcatagagaaagcaaagttttagaatattatgtgtcatactaattcagtatccagaccaaatgttggaaagtcttattttatgatttaatatcccttgttccattttacagatatgatcatgtaaaacttacctacaatattcatttcaaactgctaaattaggtaaatacagacttttagtatagaaacctttcctctaaaaatccattatgggggaaatattcactatacaatccagtggttttgtctgaaatcctaaaaatgttatttttgagcaggcgagtggtatagatattctcacacttggggccccgatatgggcatttccctttgacttcagtctcatttttttttttttttctgtttctactccttagagcatttagtgacccctgcaggcatgttgcacttcccatactgaagccttgccagagtggcctcctgtagggtctgacttgggatcctgtccagccaaggaagcccttcttcagcctgctccagtgcccgcagttgccccctcagcatcccctcggggttctcatgtagatgggaacattttaactacgcggaaggcaggcatttcagcagaattaagtatagcgggggctcatctaataaaggaagccacttctcccaagtcgtcactcctttctgggcatgggttgtggaaagctctaaaacgttatgtgtagcagaagaaggggttggagggaagatttgtggggacaggttgtcttggattggccctgctgacatgtcatttgagagcagttttattttatcctttctaataggaattaggtattttactcctagaaacattattccttgagtacgcatgctgctcaaaggatgtagtcatttgtccactccattctagtcacagcaaaataaggattctttttggatcagtaataactttggttcctaaaacttcaatatgtgcatttactaccaccagaatgcctgagttagatcagtaatgtaaacgtcagttattgttaactgagattaatatgtttcaggccgttggtatggcattaatgtaactatgatttactatttaagtactttaggctaaaacatcttactaaagaacagtaattttgagctttacagcactggttctgagaaagggaagttggcagtgcattcttgt

SEQ ID NO: 63141 - DNA, 1023 bp, Homo sapiens
gaaacttgatgtctctgtcagtgtctgcagccttatcaggggtaaattcctgttcagcctactgcaatgctgaaatagcttgaagatcctcattactacctttgtggaccctcgaggggcctcagtttgagaaggatttccatccaggagactggtataactagggtaaagggtctattgggagtcacgggagatatgggtcctgtctttgtattcattatactttgagaaggaatgaacatagaatttctaatttctagacatggctttcttacccacaagttctcaattatttgtataagtgtaattactgtattagctggaatatttattttcactttttttttctcctttgtaattcttagcttggtgtaaaaattgccaaagcagttgcctgccacaactttgtaaaagccaaaaaggaggttgaaaattcacaggctgcccgaaaaaagaagaaacttgcatgggggtgagtttacttaagatttttggtagtaaatctcctgacttcatagaaattctgctaatatattttgtgatctagttcgtgtataactgttaactcattttacatttttttcttcgttgaatgtttatcagattataaatatagaggcatttcttcatcctgtttaatgtttattttgtaatcattggagtatgtgaaaaatttttgtttgttttgctttggtctctaagtaaacatgttcagcaaagtatttttttttttaagaaataaattgagatttgtatgttcttccttttaggtttgaagcaaagaagagatgggaaaccaaaagcaacatgggatacatgtaacttgccagagtgcttcaagacatttgtagactcaaatgctcaatttactgagaatgttttcctgcctatgttaatatgtcagaaaattgatagcactaaaacaaaaataagcataaaatttgggattttgattatcagctcttttcagtctttctttaaggactttgtcctattgaagtgaataaaatgaagcattctgtt

SEQ ID NO: 63142 - DNA, 1957 bp, Homo sapiens
attaatgcagagtttcgaaagttattttttaaaaacacagtgttaccagtcattggaagtactttttcttatttgcttcttgaactttgtatgttatttcaactttggctatttctttgcttgttttttggaaggcattttatgatgccatgcaagagacactagaaagggatagctgacaaggaaaaaattaaaaattggataaaaagtaaatgaataatgtcatattactaaaaagatgagaggctaatttgtgccgactttttgctaattttgttcaagcctcaaaatgaggagctgtcacccgttctgtgtagcactgatgacagtgccaatgatccatgaaataagctgccgctggctttgttctgataagaatgaacaaatctgcaccatgttcggctcccagaatctcattttcatacttgcatgcaggctaaaagaaataagctgtttgcaggcttgattaatcagacattggaggggtttttgtctctttgatctctttcgtctcctaggtaacttgcttgacattaatgttgagcttgagtaaagacaatcaagaattgtcgaccaaactgatataaaaattaaagaccttaacactttaagtactccagtaatggttccgctttacttcagaaaacatctgttttcatttaattaaagaacaaaagagaatggcataaatatttttcatagagacctattattccataaaaagttaaagtatgataattggtatttttaaataagtgccttgaaagtgttcaaaagggaggaaaactttataaatctgttacaagctagtaattttgagatgagtaaaatttactctgaaacggataagaaatttacagttatgctagattaagcggtttgaatcagatacttcaaatgattatcagcaaactttataatgacaagattttgcaagaaaaactaactttattttgaagtttgtcttttaaaaatctgtactgtgttgcaaggatgtgccattatatctattttacaacccaatatgatttacacacgctaaacctgtaaaattgaaaggaattaaaaaaatgtcgccgtgcatttgcttgaggttatgcagacgcttttacaaatcttccaagtggctgtaaagatgaatgcctcaagggtccagccagggccctgcttttccaaccagctaaagcccttatcttaaatccaagcaaagtaccattaatctttttgaaagaccttttatggcttttaatatatcccaaattagaacattttacacccttggttcctgaaatatggtgataaaaagcctttagagcttaattttccttactgcatgctctgaccaatttgcagttctttgtgataatgtttagacaccttaattaaaatgcagcaaaatattggatgttctatatggaaaatgctgatactttggctacacatacaagaaattttgtatatattttattcatttaaaaaaatttctttccacgttgtgttgctatagttatctgatgacccaaaaccattttttaaatattaaaccattgaccaagcttttgtgatgtttacattgagcatgaagatgcatttttctttttatggaagtggaagggggattcttttcggcctattttatttgtttgtaatactgcagcacagcacgatattcttttatattctggaacccaggttagtcatcttgactgggaaactgcgtttcttctcaactgcctctttcatagaaggtcttattagccttttatattttcagatattttttctttctccacagaaataagtgagacacgttcattttaattatacgaaggacacaaaaaggctatgagttttcatcattacaagctaaaagatttctttctgtagaaaatacatagaccaggtttgcttagtgttttatcagctgaagaacattttatttaacctaagccaaggt

SEQ ID NO: 63143 - DNA, 1291 bp, Homo sapiens
cctaagtttaaagttacttctagtcagggccattatgtttgcatcaaaaaaataactgaaaaaaactgaattgaaagacaatattatagtgaagcagatctttattctgtaatccagaaaacaaaatcgttttctgtttttgtgaatactttgtgtagaaatgtcttgacagccacgtttctgaggtaaaacggtttgctcagatacaaagctgagcggtgtattccaattagctgttctaacaatttaccactggaacctgtgaccctgcggaaaggttgcagatcttttctgttgtcttaattgtgatttctagccactgaagattgggtaaacatagtaaaaaatgcattaagtattatttatatgtattttaagggtttaaatttaatatctccatttgaatattttatttttatggaaaggaagttacttcattgctagtatcagggatgtgtatgacgaatataatgtaggttttgctgtaaaagcaaatggttgttttttgtttaaatgattatttcatacagagtcatctaatgtctgcactctggcaaaatatattttatgtctctctttcaaattttattactgtgccttctgtcccttactttttcttttgtttgcttgtttattattactctttccagtaaagcagtagagtttaggagaccattttctttttggtatatttcactgatcagcaatgagaaagaatataggagaccattttctttttggtgtatttcactaatcagcaatgagaaagaatataggacactggggagggaaaaaacctttcaccaaataggcttgtgttgatcaggagctaattcaccacctagggaatgtgggaactctgcctctgggaaggatatgtgtgtctgttgaggatcatctagaactcgctctcattcattaactttggtcatctttcagtgctttttaatttaaaagttactctgtgtatcattttgtattccgcacattatctggggggcttttaaagggctattttaattctttgaagccttgttctccttagttcttacaggtaattcagttattacatgtagatcaacaattggcacaatgtatggaaaataagctgtgacttcccaagtaagagagggcctggatgaatttctttacatctagtttaaagatatgtttgttcccatacaaaattgtgcacagccgtgacactgcagcattttaatatcagaaaaataaggctggtgttcagtgatggttttttttctctcaggtttttaggtgtgcttattcaaat

SEQ ID NO: 63144 - DNA, 1001 bp, Homo sapiens
caattgggacttggataaagttttcctaaatgatgcactggcctggtgtagggtcaccatgtgacattctgcccaccagcggttgcatatgaactctgtccttgtctacctcgctactattcactacaagctttcctttctatgtgcagtttgaagctgtttgtcaaaacatacagaactagcgccttagaggtttcagaaatgtgagtttcctttgaggatattaggattcttttttttttttttttttttgctttgtcatactgcagttttagaaatgggaattgtatgatactgactagatgttttccattttttaagggctatttcctgtcacactttttgacaaatgagattgcttcagaaatacatgagattttcagcccttgtaagaatagtaaatgtttttctcattgtactttttatattcatacaaatacaatgtttttttctggtaaaataaatgtgtttaatgtgggattatagcattctgattaaaagaaaaataatttaggccctgttctttgccctgtgtaagtggaaaaacatctggaaaatgtttgccgttcagacacaggccaaattggaaagatactgatgttactttcattaagtacccgtgaagaataatcaagatggaatttttgaatgaatagtttggtttgagatttaattttacatatttatctccttggtaccaataaccatggatatgagagatgggattttgagaactaagtgtgagtttgggggcagaagccctttatgaattaaatgtatatgtgcatgataggtgtccttttggaaatcaggtatattggtttttcatcagtaccgttttcttttttcaagcagcagtgactgggacctgctgataaagcctttgctcagaggcacagatcccagagttcttaaagccttttccaaccataataagtgaaactaatttttgatgtttaacatttataaacctatgaaaccaatggggcagcatcagtatt

SEQ ID NO: 63145 - DNA, 1040 bp, Homo sapiens
tgtgatctcttccaagtagcaagtgactgaccaacagaatcccccaagtcagtcagtttcctcagattttgctttgctaaaggaagaaaaggtaagggaaagcctagtcttcagggttaaaatgtggactccatgtgatccgtgcacaactgtccatctttttatctttttctgcttattagtacccccatctgaaacaaggggaattcacagagaagcatttattttactgcaggttctatgttccttttagtagagttagtaatgctgaagttttgagttgaacacattttacttaaaaaaacaacaacaccctttatattttgcaattatttcagactttcaaaaagttgagaaatttggaaaaagatttcctatttacctttccctcagataccagaaatgctaacattttacaacatttgccttcatgttttctaatttgacatactttatttaaatttaccagttgtcccactaattccctttatagcaaaagaaacttctttttcctagtcaatgactttgcattttgtcgtcatgtttctttagtttttttaatctggaatggttcctcagtttttctttgtttctcaggaccttaatatttctgaagaggccagttactttgtagcatgtcccttataattttgatttgtctgctgtttcctcatgattagttttaggttatgcatttttggcaggaaaatcatgggagtaatgttgtgtgtttctcagtgtcagcgatccagagactcgtgctgtctctttgtccctttcctgatggtgttacttcgattaactacttcaggtagtgtctccagatttctccactgtgatgttattgtttctttctttggaataaataagtgtcttgtggggagttaggagataatctgagactgtgtaaatgttctctttctcatgttttccctgtttgttttagtgtccactgctgattttcttgcttgtgacagtttttattatggtgactgccaaatgacttttgatctttaaaatatgatctcattgtactttta

SEQ ID NO: 63146 - DNA, 1052 bp, Homo sapiens
gtctttttctttttggctgcaggctttaagtatcttgtgaattttttattttggcgtagggaaaaaacaagttgagaaaggggattcagaaattatatttttttctttaaaccttttaaaatcatttgtcacattaaatacttctgtgtttaatgtgtgtgtatgtgtttgtgtgtgtgtgtgagagagaatatatattaatgactaatataaaggaaattataaagccatggacttcatttagggaaatagccaagaaataacataaatggcagttatatggcctttcagaaaataagctgacattttatataaggtttttaaattgtaaaatgtacataacataaaatttactgtcttaatcatttttagctgtgcagttcggtagaattaagtgcatttacattgctgtccaaccatcactaccctcctccaaaactttttgtcttgcagaactgaaactctgtacccattaacctctgtacccattctcccctccacccagccttggacagccactcttctgtctccatgaatttgactgctatgggtatctcatataaggggaattatttaatatttgtccatttgcatctggcatatttcacttaacatagtgtcctcaaatttactccatgttgctgcagcatgtgtcagaattcctttcctttttaaggctgaataatactccattgtatgtacttgttacattctgggtttgtattgcattttgcttatgtagtcatctttcagtggacacttgggttacttctaccttctgaccattacgaataatgctgctatgaatattggtgtacaaatatctgtttgaatgcctgctttcagttcttttgggtatgtacccggaagtgaaagtgctagatagatcacaaagtatttttactgtttgttttttttcttgtaagatacagttctccccttcccatcttataagttcttgtgcttgcagtttgactattactctgtttcatctctaaggtagccttattttgattcactgagtatagctttcattgtgtataacagcattt

SEQ ID NO: 63147 - DNA, 1503 bp, Homo sapiens
gctggctttggccaagttcaggagtcttgggctctgtttcctcatctttaaaacaggatagcattattattcatggagttgttataagaattaaatgagcttttttacagtattaagcccagaatctgccacgtaataaacactccataatttttagctattgttatcattaacattattgttgttattaagggaaagcataggctttgattcacaaaaatctggatttgcgtcttatttttattagttcaagaagttacatgacctcaggtaagccatttactgtctcagccttctggtactaatgggaatggtagcagctaccttctggtgttattgtgagaattaatggtctacttgtgtaacacattcagtataattctgtgacatggtcttggctagcaaatgtttgctttccttccagcccttaattttaggtttcttttttttctagtcaggccttgaaaagaggatagaccaggctgtggaggagtggaatattgagaaggctgaggaactcagcaaccagctagctactcgagaggtgagtcaaaagggttacacattttctgtattttcaaattttctagaataaatttgtattctttttatgatcattaataagttcagtattaaaatatttcatctgaggttttcctttttgtccattttcttctcttttattctgtcatttattttgaaatgctaggttttattttgtctttaatgtttttaaatcattctggtctaaaacttgctagaaataatccatgattgatactgaaccttagattttacctggatcagagaggtttgtttcaggtatgattaaaatgctagctttcttttccgtttgcatctttaactcatttgaactctgagggcaactgtgtattctaaggccacatccctgaaccttttcttaacccttggtaaaatgctttcttactgtttgctcagcacatccccctcagccctaaagaattttgggtcttttttctttttttctatagtataaaactaatagatatattgggtattcttttgccaagtacagaaggccacaagaagattctgaattatactcctggaggtggggtgtgggcaaattcccccagttgagaattaatgtcaatatagattaaagagctcatattggcatgtgttttgttattattgttgttgctttgtaattcctttttttcctttctaggaaaaaatctccaccatagtctttttttttagtgccttgatccttccctccttcacctcagactttaactactccatagtgtttcgttacgtagagagcatcatgggttatctgggtaaattactggccacactcactattctgacttgcaggtggactttttatcctaaactgagaccagagataactgtgatttcagcaaattcttctatggaaatactgttgcactcttccatcattatatctgatgtaaaaatatctactgtggatggatgtttgttgtgattttt

SEQ ID NO: 63148 - DNA, 1041 bp, Homo sapiens
agcttaaaaattttcctttagttattttcctgctccttagacaagacgccctctgaaagctttgtccattaaatataggtgaaacatgcagttttattctctaattggtatagcttcaaatatggtattttaatcctaaattgcttgcaaagtatgttgttaggtttttaacattcttgagcaatgctttactgaatttcatgttttttttagacaaaactactcatatattagagaatcaaggctctattttctttacctgtaggtgtatgttgtaacaaacttgtttaaacagcttttaaacttctaaactttttttttacttacacaagtgaagattttaattattttataacaggttcattctatgccattttagattaaaaaaaaaaagtttagatggactgttcccaaaccattgttataattattaggcacctggaatgtcttctaatggtcttaaaattatttctatggttattctacatgtgtaaattaatctttttcctcatagaagaaaagatgtggagtgggctgctacctcctggcctaaatgaaagtgacgctgagtcaaactcggaagatgaagctacgttggagaactctggacttaacttacaggaagataaagaggatgagagcatcagaaaaacagaaatcatagatttctcaacagatgaaccaaaaactgaaacagagtcaaatgtaaatgcctatgaagagtgtccttctggaattcccatagatatgtggaatgtaggttttctctgaaatgctcttgctacagcctgtgtgtgtgcacatgcctctgtgtgtctctgccctggtcagaatgtgcatgtattcttgggacttaacagggagggagatggactcagaatgcttttactgttctctgaggcatcggccacttagatacttgcgtttattttgttttgtttttcatagaaagacggagggggaaaaaaaaaaaacccaaaccactatgtagtattagctgtttgcctagcgtggtacatgagtagtttctgtctttattta

SEQ ID NO: 63149 - DNA, 1028 bp, Homo sapiens
taaacaaatttaagtttctgtttctctgatattccacgtttctggagacaggctgagtgaattttcacagttaaagggtaacttgggattatctgccttaaaataaagaaatacgctctgaaaggcataagtaagagacacttatagagaatcattctccacagcagccaaaacaagaataacaggaggcctaacatggtgccagttggaaactttgtgaatgacaagtatatgctatgaatagaaagactgttttgaaacatgagtccaaagcaaaagtcactaagcagccactccatattggctgatctgtaactgggctgctgcttacacgggcaactccattttgcaggctgcacagtaagtggcagcagttatccgtgtttatcagtgactgctcagtctcccttgtatttgtttttttgagagtcacaggaaaatggcacatgactaaaggttctaaagagtggaattcaaaacctacctgatttgaattttgcctggatttagaggtggattccacctttttcaaactattttaattttttttcctttgggtacactcaagaaattatcataccaggcagatgccacactgaggacagtttttaatgccacatgagcaggagctaaaaatatataattttgagaaaatttaaaaagccataaaaaatgcctaactacttgaaggctgattagcaacaacaacagcaaaaagcatgccttcttcggggcaactgagactgcttcccagagggaagcatgtttgggtgcccagagcatagactatcaccctgcagagatgctaaaacagtggtttagtaggagacctgtgccactgcccattggagaggcatacacgtttcatgagcagtcacatctaaagtccaggtcaaggaatacttggctcaaaaactgagcagaaacttgctatgtgtatagctgtcatttcgtgaggctagggatttttgcctgttttatatacttctgtccccagggtcttgaagagtgtctggcacataagtggg

SEQ ID NO: 63150 - DNA, 2311 bp, Homo sapiens
actttttcttctgtccctttaacaaatttgcagcaattaccctccctttggggtctagagtgaaagctaatttgtgggtagatgagattgcagaagaatggatgtccatggctgtgaacactgcacactgcacatccatctccagtgctcacactgtgcagctaccactccctggctgcgtgccatgctgtcgggttgcagatttgcacacataaattcctcaggaagagtttgcatgagcatcacctcgcaatattctgtactgaccaaacaagggatttgaacgtttttcagcacaaaaggataacttccgagtggtggtctgtacgcatactagcaaaggtaatggtgatctagcaaacaaaattggtttctgcagttagaagtgagcaggagcacttgtattatagtatttaaataatcctggttaatctctttttaagccgagtaacccctccagattttgcctttttattattgaggctggctttattttcttctactttttttcccgttttatagcagttaattatttttgtgattattatgcaagaagcattgcccttgagttaaactgttattgtttcataagcagctattaaaataactgagcattgttttatgaacatacactaatctgagatactgaaaagctttgcaactaaaaagcaaaacaacctacattagtcatctagccattgtttggatgttttgagttgattttttatggtgcctcttttagcttggaatattacgtttactttaatccaagtctaggccttttaaagggtccttaaaattaaagttcagaatgtgaatccctttgacatctattacaggtttataggacctttttggttgtgattactgttttcaatacgattgtataaatgaagttaactttgtcagaagttaaaatggaggtcataggagttcctggagaaatggctctcctgtttctttcattaccccactgaagttcaccccagtttctggccacaagaatatgagaaaggaaccctgttgttttccaagggaaatcattcctctctgtccccactgttgattaactaaagtcctggacaccttccttcctccactggccaagacccaccttgacccaccttgaacctcttttcagagccgagtggcatgaatatgtgtactgtttctgcttctgttgatggagtggctgtgggagaattaaaggaaatgctaatttgagcttcattcataggggaacctactatatattgcatccctgctggttggaaattatcttcatctctggactgcattgtttagaaaaatgttaatggcttacaattctgagaactttattgtgtggctctggggttaagaattctgtggtttgaaaaaaaataaatattttgtattgattctcacgtcatttcaatgttgtgactatgtactaaatgcactaagactgggtattctcttagaagagtgcgttttgttaaacagatggcagttcactctcattagttctatttgtcaatattacagccacacacttcaggataacttactcaaatgtgaagtcatgggaagctatggctagtaacaggaatgcttatgaaaaatttggagggcaagcacgagcaagaggcttttgccactcactagcacagccagagcaaggatgaagcaatgaagtcttgttcctagtggtgcttgtatgtcagaagccatagtgagctcagcacagggcgttctgcacatcatctctttaatccaagaaaaacaaaatggcggatgaaactcctattgacctgggatacaaagccactgactttggctcttgatcttttggtgggttctgaatcactccttctgtattagggcatatactttcactctaaaacattgtggtaaatgaaataaatcttgtacagatgtcgttggccttgttatgttatgttataaatcctgtacagatgtccttggccttaatacctggttcactggaactttgttataatatagaatatttgattttgcttatagcatattaatattgcctcctacatgacagccacactgagcacacatctgttaccacagttacttagcctgcagggtgagtgttgatcttgacttctgcaaccagtgctaaaaaacagtgtgtaacaatatacatatggtcatatctattctatattcatatatagtatggatacggatatcagtatatttgtagtttttgttttttaaacactgtacagtttcttctgtggacctttaatcaacttttggacttaggttgtttttttctttgcatttattggta

SEQ ID NO: 63151 - DNA, 1079 bp, Homo sapiens
gtaaagcagccatattaatgcactgtgataacagtgcattgaatttgatgatacccatgttgttctcataaggcactgcttgtaatcaaggtcaggatgctttgcatgctgtggcagctccagctggtagcgatggttctcagggcattggaaagaggccaccaggttctttagtttctactgggatgacatcgtagcccagtcccagttccttaggttctcagtccccttttacttccctccaccccacatggttttgaggattttttttaagccttttttggggagttgggagaggagtgagaaatgtgtgttgaataaacagattcctgctgttatcaaatgctgtctgctcttcatactttttcctattctgatgttttttcagatagctcgtcagcatgtgcaagttccagggggtacagatagtgaatgtattgaatatgctttccttcctgaaaagaggacacactggagctgcagagactgtattcagagcacagtgggggctgcacacactcaggagctctgtcacaaagctgttcatggaagaggatgttggacttcttacttggtttgtaattttaaaacaaaaactaaaaaaaaaaaaaacgttgctgctagacttgggggtgattttgaaatgggacaatcttttaatgagtttatctacagattctgtgaggaaaaagcatctcagaaagtgaccatttctaagtgaaatctgacagccaaaatcagcagcttcctccaaaaatataagagcagaagaattttttttttaagcacttgttttgttcatttgtggacttggcattttggtgtattggtttcacatgtcaggatctcttttgctttaaaaccaagcagatcattacagtacagtatttttcacccacaaccaaaacaaccccttttaaaagagttggtctttgtttagcattagaaagtcttgttaaaggaaaatgctaactctgcttttgctagaactttcccccatcagttcacaactttcttctactctgtgccttgagctttgtgcactttgcaactgtgtgaccatgttgtcaaactcctcc

SEQ ID NO: 63152 - DNA, 1020 bp, Homo sapiens
tctgatgttgggaggcaaataacaaacaacaaacatgtaaaaaaaaaataatattgagtagtaagtcctatgagtggacagtaagtagtaaagtgctgacatgcaagggacagccagtgagccaggatggctgacttatagtgaacagaggcagagagtggaggaaagtgaggtgggagagtaggctggagaatgggttggaattaatttttaactgtagtgggaaaccactgaagggctttcatgagaggcatgaactaatctgtcttctacatgagatcactctggctctcatctgggttgataaataaggctcatgtacttgtgtagggaagagaagactgtggcttggcttgggatcatagcagtggagttgatgaggagtgattggttttgggacagaatgccccagaatgaggaaaagagaggatgaccaaggattttgggttgagtgatcaagctggaagattgaagaaggaatggggatggattggagtcagcattgtattctggtcatggtaaacttgccagtgtatataaatcatccaaatggacatggtgatgaggagttggacctgtagatctgaagcgtagagaggaaggcagagttggagatgtagatatgggagcctctggcctgtggagagagtgtatgatcaccatcctggactacacgtggagaagaaaagatgaccagcgacagagggctgggtagagccagcaaaggagacctcaaaaggatggcagacagggtgaggtaaggtcaggaatgtgtgctgtggcattactgaaacctaaagagaaaaaaatcgtgtttcaggaagaaatcaacttataaatgctgaggaagaaaggctagtagtgattattatttctcattacctaagcatttgagtcatttctgttattgtctgagaagctggagacacaaaaataggatttgtaggtagcttagggcctagtcagaacctctattttcttaactctaaagtggaattagaactttcataggtgtttgag

SEQ ID NO: 63153 - DNA, 1019 bp, Homo sapiens
cggctaattttttgtatttttagtagagacggggtttcaccttgttagccaggatggtctcgatctcctgacctcaagtgatacacttggcctcccaaagtgctgggattacaggtgtaagccactgcacccggcccagtattcttaaataaatgcaaaataatctgagtatgatgttataggtttttttctaggcttaccataattctgaagtctttatactttcatacattcatgttttatttgaacatttgctcttaatttaggatgagtttatacctttaaaaagacagccttctgaaaacttttttgtgaagcagtataggaatatagctcttgtgaattttgagcatattgagtttgccttccagagcaatgcatggaattgcttaaacgtgcccatttttctaatcctaattttggtactggaataagagaacagggtgcaggactgcttggtttatagtagctcttatgtcagatttgcttgggatgagatgagtaactgcctctgtaaataacctcaggttgcattgtgtctgcacatgaaggacaaacatggcactattcagccactggccagtttggttatattcagggaaatgtcttgaatttttggtataaataggaatttttgtctctaagtggaattattttataaaacttctggctggatttaaatactaggcagtattccaagggatgataaaatgtttttacaaacttaattagaccatttttgtaattaaactttattatacatgtgctatgaggattaaactttgcctcataaaagtattctgacaggtgctttgcacagagtaagtccgccaaagtggacgttctcatatgtaattctgagcttactcatactggccaggaaggacgtgcacatgccacctttggcagctgtgatggggagcctgcctctgctcttgtgcatggaccttccacattctgtcctgtccaacttaatgccttaattaggaataatattttagaagaagtggtgtctactg

SEQ ID NO: 63154 - DNA, 1063 bp, Homo sapiens
tatcattcatgatacattatactagtgcttttagaaagctttacttacttttcagaaccttcatgaattgattcatttccattagtggccagcagaccttcacgtattttagctactgcagtggattaaaaaaataaaatccttagtatataaacatttgattggtttattggactgttcctttcttacaattgtttatgtttcaggagtctttgggagaaacagtaatagagaaatcttgacagtcaatatgtgttacattctttttaacctgttttcttatttcagctttacttttagaagcccagtcaacaccatttcaggtcacaccttcaactatggcaaatattgtgaaaggcctgtataccctcagaccaggtaaacatttctcatttctgttgggattggaactgtttgttacagccttttccaagagggcagtggttctgtatgtgttttgtgaggcttaatggtacttggatttgctggagcaaaaaaattgagtagatactcatcattgtgaaatgtaaactcagagctcagttggaatgttctctgctagtggaaaccaactagtgtggtttttgcagaacctgtgagggaaatacaagaaataaattgtaggatacactttggataaaattgaatctcatgtttggtcttagtttcttctttacttcctgcctcacgctgcacatacttacagacatccacattcacaaccccgtcttcttaggcctgttaagtaacttgcgaagaatctagaagtgttggtaaagttacagtcattttgtaaggatgttctggggagagagacaatcacaagaaccaaagcaaataccaaagatcactatagtcaaaagcatggtttttaaattcttaatgtgtctctctatcttagaataaaacattataaatttaaaggaatcccaaggagcttttgtatatatctttctataagccggaacctcaaacttgtcatagagttgtctagcaacttataaatgtccatgggagagagattacaaaagttatcaggatagaacgttgttctacaatctat

SEQ ID NO: 63155 - DNA, 1013 bp, Homo sapiens
ctttgtacagtaaaatatcataagctaaaagtaagtggggaaaaaatgcaaaattggaaaatataagacaaaagtttgctttccttgataatcagctttcatgaattggaaaaagataaccctaaatttctgttgaaaaatggacaaagcatatgaacagacagttcatagaaaaaaaagattataaacatgaaaatatacccaatatcacaatttaagaaataaaataactttttttccgctaacttactttagttagtgaaattggaaaggtttgatcaatattcagttctggtgaatctataaagaaacaagcttctcacacttttggtggaaatgtaaattggtaaagcctctttggaagactatttcgcattattgttaagagtttaatatgcaaaaatctgactcaagaattgtatctctaggaatttattatacaaataaactcataaatacatacaaatatgtatataagaattatgcaggtttttaaaatagcagaacattgaggaacatttgtattatcagtagggactattatttaaataatttatgaaagacacagaaaaatatgcaattaaaagtaacacaactctgtttttttagagaaaaatcttccaagatgcaacattaaatgaaaaagcagggtacaatgcagtgtttaatattttcacactagtattttttttttttagggggaaaaaagcatatccatgtatatgcaaggaacatcctagaaagaatatacagaagttttcccagtgtagaatgggaccttttgggaatgggtcagaaggtctgcattgagagacttctctttattgcatactcttttgcatgctttctgttttttaaccatgtgcatcttatttttatatatttttttaaagagagaaacgtgtgttaagaattcagtggctgggcatagtggctcacatctgtgatcccagctgctcaggtggctgaagtgggaggccaggtgtttgagaccagcctgggcaattgaaaca

SEQ ID NO: 63156 - DNA, 1052 bp, Homo sapiens
gacttctggtcaacagtaggcaatattggtagttaaatttggggggacgtgaaaagttatacacagattttttactgtgttttgggtgttggctcccctaactctccggtttttcaagggtcaactgtactatagactgggtggcttaaacaaagaaatttgtttctcatggtgccggaggctaggaagtccaagacaaaggtgcttcctattcggttcctggtgagggccctctttctggcttgtaaatggctgccttctcactgcagtcctcacatggccttttttctgagccctatgggaggagcgagaacctgagcgttctggtgtttcttcatctagggacactaatcctatagatcacagctctaccattgtgacttcgtgtagccttaattacttccttattcctagtatggcagtactaggggtttagggcttcaacataggaattttcgaggaacacagtctatattctattcagtctataacatataaaaaagttggtagtgttctctcttgatggttttatgatttggtattttgtaaaagtgagttaatagaggaatgcattgtgttttactgctctacagagctgaaggtgtatatgggtcatttgtgtccatgctttctaactaatatttataattagctacagaagggtttacaaccaagttagcatagaaatcagaatatttctgtgcttaaggtaattataaatttcattagccattctaatagtacattaagcctataccacttagttgaatatcctcccaactcattccaggttcaaatatagtttggttctatatagaatatccatgtaattcagtaatagtttttaaaaatcatttatcgttgagtgcatcttttttttttttttttttttgagacagtgtttcgctctgtcacccaggctggagtgcagtggtatgatctcggctcactgcaacctctgcctccaggttcaagtgattctcctgtctgagcctcccaagtggctaggattacaggcacctgccacccccacctggctaatttttgtattt

SEQ ID NO: 63157 - DNA, 1773 bp, Homo sapiens
accacagctagtatttttcctattttggatatatggaaattgaaatttagagggcaaaatgaattccctaatgtcatacagccttgttaagtaggaatttagatttaaataatgctaaattagatttagagtcaaagtttagatttgaacaagaccctttccttgcaaaacaatgcattctttatctactatgttctaggcactgtggtcagcaccggagatatacagataagacacaaatattgccctccaggggtttgaaggtagtggcagactacccagtgagggaagtgagtgcagtggggccccactgaagggccatgtagttcagatatttttgaaggaatgactaggagaagttagccagcttagtgggtgcagagagagatggttaggtagaaagaacagtcagggaggccttatgtcttttggggagtgctagtattcccattgtcagtcctgttctttgctgtgcaaccagaggtgtagacagttgtgccctacgttgagaagtttgtgaaaaggtttcagagtgccaaaagagaatttaagtaggtgtagaaggccttggattgatcatgctttgagttgtaggtcttgggtttattcactgtagaactgtagacaggtgactatttctgagccccaatcacctcatctgtaaatggaaataacattcaatttataggcagttagaaggactaagaaaaagaaatgcgctgggtgtggtggctcacacctgtaatcccagccctttgggaggctgaggcaggagggttgcttgagcccaggaatttaagaccagtctgggcaatatagcaagaccccatttctaccaaaaaaaaaaaaaaatcccaaacaaattaggcaggcctagtgctgcatacctgtagtcccagctagttgggaggtggctgagttgggagaattgatcaattgagcctgggaggtggaggctgcagtgagctgtaatcatggtactgcactccagcctggaagacagagcaagacctttctcaaaatgtacaaaaaaaaataataatttaaaaaaaagaaatgtaaataaaagcacctagcgtgcaccagacctgtaagtacgatgaattagaaaaaataaagacaattctttacatatatataagcttctaagtagaactgaaatatgagttgaatcttatttgaaaatagtatcaaaatatttggacatttatgaaacagcttagctgaagtggtcttataatttcatgttttaaaatttaatatttaggaatccttccatgtggcatttcttaatatccttatttgaaagcaagactttatgtgtaagatatgattgataagctgtggggctgccacaagttagttcttgtgtagaatcagttttgtttgcattgtgttttgtaccatgctcgtcccccaacactctgacccaggaatgaattcttagttggaagacctggatctatcatttggctaacggtctagtcttagacaaattactggccatttaggtgtttctttagtgttaaaatgggacctaattaatttagctttagagaatagaatgaaatcatgcatggatgcacttctgtaaaacacagtgtcttcgactgggctgccacaacaaaatacagttgacccttgaacaacacgggtttgacctgtgtaggtccacttatccacggattttctcccacccctgacacagcaaggccaacccttttcccactgttggagataaggatgaaaatctttatgatgatatacttccac

SEQ ID NO: 63158 - DNA, 1118 bp, Homo sapiens
gaactcacactgtacgttagccccagtaaacagtgttgacacagagatttggttcctaggtcaggacagtaacattcaagtgggaagattagcgccgatattactaacctgcattcagggtcctgttgaggagagaccacagagacaaaggtgctgggaaatgttgcaatttttatctcaaataaggctgaatttacagtagttttaagtatttcacttttaattaaaaggaagttaactgattacatttaaaccattttaataaaattagagtgatgttgatgtctaactgtatcttggttttaagcaaaataagtaagttgactgtcaaattaataatggaaattaatagaaactaaaccataatcagccaacagtacttaactttgattcactatttataaactccaatttgcatataaaatctttactgccagattgccaataaactgagctagtcccttggtagttaaaatcagagcaaggattgcgttgctatttattttttgtccagtgggtggcagcataactcaactggttatcttgtgtacggtcatttgaaattttttatgtgttttaaaggttttaatttctaaatctcttgtactacaaagtgtattctaagaaaactttcctccaaatactctgtttatttcttgctaaagtgaataagattttagataataagaaaattgcttgatatcctttcttcataggtttcaaataaaataaatattgcaactggtaaatagccctttacatgtgtgttctactgaaaatgtttctaagttatgtggagatctatttttttcctctctactagaacttaaagcagttgtcatggcaaacccaggaatttgccagggagacaccctaaccctcgatcattcaataggctctcattcagaccatgattctaataagtttactatcttcctttgaaagaaaggattttgtttgtattttcatgtgccttcataggacttaacataataccaggcccaaaaatagagatccagtaaaaagtacttggtataagttgattacaaaaacatatgctggctttaccactgacattaccagaggcatgtgtttgttccaggtaaaacatcatccag

SEQ ID NO: 63159 - DNA, 1007 bp, Homo sapiens
gtggtggctcatgcctgtaatcccagcactttgggaggacaaggagggcagatcacaaggtcaggagttaaagaccagcctggccaagatggtgaaaccctgtctctactacaaatacaaaaaaattacctgggtgtggtggtgggcgcctataatctcagctgctcaggaggctgagacagagaattgcttgaacccgggaggcggaagttgcagtggtgccactgtactccagcctgagcgacagagcgagattccgtctcccaaaaagaaaaaaaaatggtggtcttgatttgctagagcctcgattaagcttactagtaacaaaagtaaattctggagagataccattatcctaggcatcagattgtttccatagtttttcataagcagtatctggcacttaatcagaaataactagtcatagtaggaaatgaggcatcaaaccaggcaaaattgtgaagtacatttttaggcaagaattgggagaattcatcaccagtagtttcttacacaaataaaagtgtttttcagatagaaagaaaatgtttccagatgaaaacttgaagatatgtaggaatgaagaagggaaaatatgcaagtgtggatcaataataatgataatgtcttctaggatataagaatatatatatataatcaaaactcgtgacaataatgtgtaagtttgaagggaggagtgaaggtttgaaatgttctgaagccttgcattgtccaggaaatggtaaagcactactttattttcaactataatgtgacaaggatacagtctgtagtaaaaaaacatagttaacaagacatagaggggaaaaaatggaataattttaaaataaagaaatcaagaaaggattttttaaaagtacagagaacagatgagataaatagaaaataggataacttcagcatgtctattattatgtgaaatgttaaagactaagcactacattaaaaaaaggaagacaatttcagattggtactgttccttgtgg

SEQ ID NO: 63160 - DNA, 1043 bp, Homo sapiens
ttaaatagcagcggggagtggtttaaaacatggggatccagggctctgtttccagctctgtcactcagcatttgtgtgtttgcctctttattaaacgtgctaatatatatcatcttataaattttcttgacattaaaatgaagtagatttactagactatctcgttgcttcacactaaggtgtaaggtattttctcgacatcaaaaggaagtagatttactaaaatatctgtagttctttacactaaggtgtaaggtattttttcttctgcttcctgcctggcaaatgcttcttcattcttttcttaggcttaagctcatttgtgtccatctgtgtaaagccttcctggaactcctgcactcctctcaaaaccgaacagactattggcatttcttctgtggatccatagcatctcagcaataagaagtctattagggcagtgattgtgttattgtttctgcttccctgtctgactacttcacaggcccttccttgagggggagggactctatcgtgtttgtctttttatccttagtgtctgccacaattacaactcagcagatgtgttctggctgaatgctgagtaactaaatgtgacctgtactaatggaaagagtagcataattagcttcagatgaccactactcctgtgctctctagatttgtaagcattttatttatttgttcagtgtgatgtgtgtggcctgatgtaatctttattttatagagaccttaaggcagttttcatggggacagatcaagagacggtgccaggctttatgagccagaaacattttatttggatggagcattttgtttgcagctctggttttcataatgaaatattgttgttatgagccaaaataagagcgtgggaggagttgcatttggcagataatcagaaatttagtgctggagttgataaatcaatgatttggacctacagggcgtcagcctcagtcaagggcatcttaaaatagctgtgggtttgtatagtttatatgtcagagggacttatttatttttatcccaaggcatatcct

SEQ ID NO: 63161 - DNA, 1127 bp, Homo sapiens
cgagattgcgtcgctgcactccagcctggcgacagagcaagactccgtctcaaaaaaaaaaaaaaagaaaagtcactcagcaatagattaccagggtctataccacaattaggaagcaccccagcagttttgaaataaccacagtttatagcacatgctggggtgtgctttgggcttggatattgttcttcacaacttgtggtctgagatagcttagtttttttgtgttttttttccccaaacagttgttgcactaagtagcattttgttttctgtttcaaatgatagagctgtgttttgtcatagtcagatatatacttttcttgttgttagtataaatttctttcttcatctttttgccgctaactataaaatctttattcatttaacacatatgtttagtgcttaggcattgtgtataaattgttgatgaaaccctagatctatgctttatagcttttgagtgatttgctttctaattcttcactccaccatctacctgaatttctacctgaatccagtttatggacttcgggtctcgctgtggactctgtcacacacttctgttcatttgccagtaccctagtcaggttcatcatcatttctcgactgttttactgaaatgcttatctcaactgccttacttcattgatacaccttaatttaaccagtttttgattgatgaatatttaggttacttccagtctttggccattactaacagtgctgaagtgaatagtcagtcttgtaagtaatgtcgtttactaagtctaaattgtggttcacagaagttgtatcaagttgcattcccatcagttctgtatatatcacagtgtctgttttccctcaccctactaatacagcctattatgaaaccaaataatttttagttttatattaatatagtaatgattcttattaatgattaaaacataaatcagagtgatatttcttctgatgttagtgttttttttttttttaatttttttgagatgggggtctcgctctgtctcccaggctggagtgcagtggtacaatcatggcttactgcagctttgacctccctgggctcaggcgatcctcccaccccagcctccccagttgctggcactacaggtgcatgccac

SEQ ID NO: 63162 - DNA, 1052 bp, Homo sapiens
tgttttatgtattccacacttacggattggagggtttggtttatactttttgattcaaaagtggttttcagatcatgacagaggaagcctgccacctccaccatacataatgcagacactgtggaagtcagcaataaaagcaagaatgactgaagtatctggtgtaaaaatcatatttttagtctcagagggagaccttaatctgttggtgtttattgacacacaattctaactctctttggttattttgtttctcagctcctgttaatggaagcagcaaattaggaagtggggtgggatatgagatcagcacagtgaaaggaggaagtgacaagtatgttgttccacacagctgatgtacaaagaggttgtattgcaaacacttccgtgagttagaaacctctctctactgattatcaaccactctctcttccttattttgacattcatttaaaaagagagagagaacctggtttataaatagttatcatattcagaccttagattctcacctactattagattctctagtactgattaaatgtgtaatacactacttagaagggcatatttatagcagatggtactatcttttccatccgaacaccgatgggggaggataaagtttttatttaaaagttgtgattggttactttttgaaggtatgaattattggatcagtggttatatatcaaaagtgtgctttaaccttggactgagttaagtgctttatgattaacttggtttgtgggggtttttgtttgttttacagttgtgtgtataaatgtgtatgccagcagcactcggaacagatgtatagtgatctgattaaaaagataactaatcacttagagagagtctcaaaggagctgcaggtaaagaactgattgtattgatttttgcttccttgggttttcctgactggttgcagttagcttttctaatacacatttggaagcttgttaatttgattatgatataaatttataaatgttttctaggtgaatgttgatcaaatcatgtaatttttggaatagattgttaatttgaaa

SEQ ID NO: 63163 - DNA, 1426 bp, Homo sapiens
caaaacactcctttattccccattccattcagtgtgggttatgtgattcatttgtaattcggttcattttttgtgttttgcatttcatctttaccactacagccttgttgattttttaaatttacatagtaatttgatgtacagttcttttggtcttgacaaatgcgtgaagtggtgtatcccccaccatagtttcatgcaaaacagttaattgccataaaaattcctccatgctactgctttatagataatccttctccccaccttccagcccctgtcgaccactgatctgttttcctccctatagttttgcctttattagtatcatgtaaatgggactcttagaatatgtagccctttgggtctggcttctttcacttagcaaaatggatttaagattatgccatgttgttttgtgaacattcctcagtagttcattcctcagatgtcctgtaaaataaaattaaataacagaagtggattgatttaaagaaagtattgaacaaaaatgatatagatggtacatagaaaaaaatcttgaacctggatgactaaggtgtggaaatcgataatgtgataaaaagatactgggaaggctttgctttacctggtatctctgacagtaatgagccttgagttcttgaggaagtcacttaaccactctgcttcctagtctggtaaaataaacagtgaaatacctggtctcgttgttgttactcctgaggtaactgtgattcatgacacagaatataggcaggttcttctggtagctctttttttaatattaacatttcagtgccgtgaagcaactgttacctggatttcaaagctgttaggatccactgtacaaatgctttgtggaaacctgtagtgtgggagtaagagcctgtctgtaggaatgaagtaagcctcagcgcagggtcccagttcactgacttcttttctgttgggcttatccagtttaagatagtagcagcctgagttggagctgtagtaatgatgaagaggtgctggtgttgttgtaaatctcggcaagttttacagcaacctctttgtgattgcagcatttggaccttaatcctcatagtcctgtccttaggcacatttcctcgaggatgtctacaaagattgattgttggtgttcacgatttctccaaattttcctgtggttcattgataggccattttgtcacataattggcagtgtgtatttgagggtcagagcatgtttgagactgctccactaatgacagaagcttacaggaaacccagaaggaagccagtgatgattgcttgtttggttgttatttttaaagatggacaggttcatactaacttctcttaaatccatgattaatggctgcttaacatccttgaccaggttgccttttttgtttttaattgaaataggatagttaggtgatag

SEQ ID NO: 63164 - DNA, 2062 bp, Homo sapiens
gaatagctaggactacaggcaaacgccaccatggccggctaatttttgtatttttagtagcgacagggtttcaccatgttggccaggctggtctcgaactcctgaccttaggtgagccactgcacccggccttattgtttctttaataaatgtgtgtatagtcttatctttgtttctctatatataatatgcccctttttttcctgggtacttttaaaatttttacttaagttttccgcaattttttatgttcttttttagtgtttattttttggatttgtggggttttagaatttgtcaaatttggaaaattattcattattttttgtcagaacccccctgccactagttacacatatgttataacacttgttattgtaccatgagtcactgaggttctgttcatttttttaaagattttttttttcttttttactctctgtgctttagtttgggtaagttttaatgctatgtcttcatgctcactaatgttttcttttttagtatctaatctgctgttaatcctgctcttaaatcagtgagagttccaactgtttttaatgcaggctgacagtccaggtttcagttaaccaagcaaactgttagaactgtatccagtttcttgaagtagtatagtgaataaagaatctttagtaagtgcattccttttaatgacttgttgcgtctaaagttctttcttcattgttcagcaccctcacaatccattcccacatgtattcccaagtttctgccagtataatgtattaaagtcttatagttcttttggaatgtaagctgtctcctatttatttaggtttggtacttgttcccttgggaaatctgattctagttagagatctagagactctaactagagttctgcttagagagaatcttttttgtgaggtttcaggtaatatcatggcagggtctttaatcaagtaaagttagtctcatgttgggaggggggtgtgtaagcagggtttcgtgaggtcagggttttcagattgatcatactccaccaaactggccccatttctgctgggattacaggagtgagcctctgttcccggccgaacttcaggatcttattggggatcttgtcttgctattttttgacctgcatcatataaaatgttgttgatgaaactgtaagagaaaggcattttaatgtttacttaaggcccagtcccaaatctctaaagaaaatgaatactgtttatttactgtaaactctgtaaaccgtagaccatatgtattcacattgtaaactgttaagcactatataaaggttgattgttaatatccttttatggtatgtcttgacagggcaagctggctttccattttttcttcctgcttttgtggacattcggttattaacctctaaagataaagttggatagatgtgtaatatgtagttgcaggtatgctgattcatcatctgaatggcattttattaagtgtttattgtgtgccaaagtaatattttagcctctggtaatgaagagacacagttgaatgtgggaggtgatagaaaggtaattatgatacattatgattaaatgctataataaagctatgtatttggtagcattcaggaaagagagtctttataaaaatgaatagaagttggccaggaggatagggggtggggatggggaagctggactggaagagacttccttgcagaggggcagcctgtgccaaagacccagaattgaaattatttttggaatacagagtaggaggagagactggctcatgttaaacatggatagatagaaagggctagatagtgaaggaccatgttagtggaaggattttcttctgtagtaatgggaggttttaagggagacatttgtcttagtgtgttaatttagagcggatagagagtggaggtctaggggctagttagggtgttacaatttctgtaatctagacaagagatggagattgaacaaatacaattttaaaagataagaggtttcaatttggagatatttagggactagaatctacaaaattttgggggtgaggaaaggaagatgaagattaaaga

SEQ ID NO: 63165 - DNA, 1647 bp, Homo sapiens
ggttgcaccattttacactcccatcagctgtatatgacagctccagttgctccacttacttaattggcacttgtactggttaggctctgcattcttggtattgtcagtcttttaaagtttagcctttctagagcatcggtccccaccagggaccagttgcgtggaagagacaatttttctgtggactgggggatggttttgggatgaaattgttccacctcggatcatcaggtcttagagtctggtaaggagtgcgcaacctagatcccttgcgttatagggttggcgctcctttgagaatctaattcctgcgctgatctgacaggaggtggggctcaggtggtaatgctcgccggcccacagctcacctcctgatgtgtggcctggttccttacaggccaccgaccggttcctgtggcctggggttggggacccctgttctagagaatcgtagtatctctttgtgtatttattttgcatttctcttttacatgtgccgttggctttttcatgtgatcatttgcttgccttataattttgtttgtgataatctgctcacatcttttgctcatttcttttgttgtttgtcttaatgtgtttaaagaattcgctataaattttggatacaagttttgtcagacaactattattactgttttctccctctggtttgtcttttttttcttaacggtgtcttctgaagagtacatgtttttcagttttgataatgtctaaactgtcaattttttcttctagctgttgttttttgtatcctaagaaatatttgcctaccccaaagtcaagattttatctgtaatttttcttagcagttttatggttttagcttttacgtttaggtctgtgatctgaattatgagttgatgtctgtatagtgtgagataaggattgaggctccgtttattctatatggatatccaattgtgttggcactatttgttgaaaagactatccttttcttactgggttactttggaaactttgtcagaaataactgaccatgtatgtgtgggcgtcagttctatttcattaatcttatttagtccatcagatttaggattgttgcatatcttcttgatgaattgactgtttatcatgatggaatgtctgactttatccttgttaatattccttaccctaaagactcctttttttttttttttgagacagtgtctcgctctgttgcccaggctggagtgcagtggtgcgatctcagctcactgcaagctctgcctcctgggttcacgccattctcctgcctcagcctcctgagtagctgggactacaggcgccagccaccacgcccagctaattttttttttttttgtatttttttttttagtagagatggggtttcaccgtattagccaggatggtctcgatctcctgaccttgcgatccacccacctcggcttcccaaagtgctgggattacaggcatgagccaccattcccagccaagactacttttacttgtaggcattccaggtttttttttaagggttattgtttgcataatgtatcttttaccatcattttacttttaatttattttttgtgtaaagtacatttcttgtagacaacatatggttggatcttttttaaaatccagtctgacaacctctgctac

SEQ ID NO: 63166 - DNA, 2270 bp, Homo sapiens
atcaacacctccacctccaagttctgtgagtccagcctttccctgcagccttggcttttctccacctcactcggacgccgaatccaccccctcttggagaaagctccgcttcctttgtttcaggcctcggtctttcctcttctccccgtccgccttcgcctccctgcctccttccccctcaccgtcccctccccctcatttggtgtctgcggccagcgcctgagcggccctggcttcttgtattacctggcctagagaggcagcctggtacacacggagccccaagttcggtcagtgcgatccctatcacaactggcagtctctcaacattgggaagctcttttcgcacccgtcttctcttgaagtttcaccctcaaagtgaggggaaaataaggctgcctgagtctcgttagggaaaggccttcagtcttctgcagccagagagagaaaagaaatctggcaacttgtgttcttgtgtttttggccaggctgtgttaaacaagtaaggaatttgaaagttgacctatatctacaccttgttccttctctactgtgttacacttttgcatcctgctagggaaataatgagttgctttccgatgcagtggcagctccgacatcgtcttgaagctaataatgcataaaatcacttttcagagcttacactcataagaataagcctttcaggatgggttatgtcttgtgtccaaacccaagattgggttgcatgttgaactttatgttagtagtctgtcttaacgctcaattgcacgcattaagatttaagaccaaaatctgttttgtaatccgaaactgcctctgaccaggatatatgtatgcttccatagctaggaaaagaatgtgcttttactttggtttgtgtgtatgtgtgcgtggcggtggtggtggtgataggatgttgaaaatgattgtgaccatcacagccaggtttttctctcctattattaactgcaagttttgagtggcatctggtaaagcaactggagagttcatttctagctactaattttatgaagctgtacttgtccagttagctgtgcagagaaaatatttgccttgatgcagatagtcggaatcttacacactgtgtgtgggaacagcgcgtaattttatttgccccaagatactgccttagtcaaagacattgatatgtacgtttggtaagattatatacgctttttctccttattcatgataatcatgtttatattgtatagtttgtgtgttgaaggctgtgttgtggaaccagacctcctgtagagtggcagaatgacttcacctgagtcacgaaggaagattgccttagtaaagttcctttgaagagttcaaaaaagagcataaagttaggaacagaaatcagtaaaattgagaacaaaaggatttgtcacaccaaaagattatttttgtgaaaagatgagtaagctaggcagacagacctctgataaaaacgacaagaaaaaaagatgcaaataaatgaaaaatggaaaataactacaaatatcagattaaaaaaagaacgttatgaacttaggctgatgaatttgaaagcctaaatgaaaaatatagttcttagaaaactagtaaatgtgaaaattggtatcagaagaaatatcttgaactaataaactgaaatggtaaagatctccctttttagaagctctgcatccagatacgctgatgagttccaccatactttaacacttaattctttttgcaagttgcactggaaaatagaaaaaataccaagttcattttatgaggcttgtgaaatcttgattctaaaacagataaggacatgtaagaagagaaaattataggtctgttttacttagcatagaaatgaaaatactgcagaataaatactcgctcatcaaatccaacagtgtgttacagagtcctgatccatagagttagtcctagagatgaaagcatggtttaacatctacttatctaatttagctctttaatagactaaaggaaaaaaattacgattatctcaattggtgccctgaaatcattcaactagatccagcagctatttatgataaaaactcttggtaacctaggagtacaagataactagataaaggtcattaccaaaaaccttcagtaaataataatacttaatggagaaattttagatacatatactttaagatccgtaacaagataaggatgctcctgtcattactactgtttagcattgtaggaaggtcctggctaacattataaggagcaaaaaaataagg

SEQ ID NO: 63167 - DNA, 1005 bp, Homo sapiens
tgcccgctctccaaagtgccgccgccgcccgcccgcccgccgccccgcagcgccagggacggcccgcctggcaagaagctgcgctgaaggcccgggctcccggccgcccagggtcgccgccgcccctcgcaccgctaggtctgcgcaccatctcgcccccgccgtggggaggcgtgcggctcagcggtcggctcgacatgggacgtcgtcctggtggtttttgaaaagcagccgaccgtgtggagtacttccgtgctgaacgattgggactagacgctgaaatccccatttgtcttcagtttctagtttgcacatccagaacggcgaaggctgggtgtgtattccactaactgaaatatggcaacttagaggcgctgtttatttactgtatacgtcgacctattttagatgcgcatcagtatgaaattgtctcaatcttggatgtttcattttatgaatggaggcactttactaggtctagaatatttttttaaaagcctctgaactgagcttaaaactggcgattttatgaaatgtcggcaaaatgactattttattgtttgaagcgagttaatattctcagttgtctttaaaaatcagttactctaattccaggtgaagcaagccgctggtagcatcacccttatgagaagtgaaggttttgtaaactttccagtattaatttgggcgggtattccccgcttgtggcttgtttctgtcctagctggaggtgtaaaatgcacaatgtgtagcaggtagaatacagctccttatcgttctatgtaccaggtattttattactgaactagcaactagccttttccacctttaaaagttgtgccaagtcataatcatattgtgtataacttggaaatggtgctgtttaaaaaaattgtgtatttatacagtaacagtatgaattcattaatctcacctgtaactttcctacttggcattttctctacacactcaccctcttccagttctttaaaaacgtttatgata

SEQ ID NO: 63168 - DNA, 3961 bp, Homo sapiens
gatgcaattttcttcaaggaagaaaatgtgtctgctggccagtatggtagtcagcagtcacatttggcagccaagcacttagaatatatggttgatggtcctaaggaaatatctccgttttactttaaatgtaagtaaccacatatgggtagtggctaacgagtgggacggcacagatctgggtgttctcatttgttctccacgccccaggcatcaggtaaggtcaggttatgagtttaaactgtctgttatatttgtaaactctaagccccagcttggactggatgtacttataattatccatttggtctaacagtaagaacctgacctgtcattgtaaatggctacagggatgaaggtggctggagaagaggaccagctgaggaatcttcaagctggagagactcaagtcgccgggacgatagggatagggatgaccgtcgccgtgagagggatgaccggcgtgatctaagagaaagacgagatctaagagacgacagggaccgaagaggacctccactcagatcagaacgtgaagaaggtatagaggttacatacaactgaagtattggagaactgtcgtttctggggggggggggatttgggttatttaattatatcataaatttgtatgaaggccaacaataagagagttgatattctatttagaattcatgattttcatacagttactcaatggtcatgttgtaaagtgcacttatctctaaattcaaagtacagtagtagactaaattggatagcaggcaatatatataaagtttacttaataaaaatgaaaaaaattgttatttaaaagcagcttcctggcagattaagcacaaagtagaaacattttctctgaaattgtaacagaagtttattctgttttaaaatatatgtatttttcatttttaaaatcctcatttttctcttggtttttaaaaattaattttccatatgtcttgacatcctgttatgagagaatttttctctcatagccataactttaaaaactcctgtattttgtatggttaatttgctgttaaaattcttcaagagccaaaaatcctttcagttataaaattttcattcagccagatttttgccaccttgtcttacgggtttatactaactgtagtccttcccaggctagtggtttctgcctgttttcagattttgagttttatctgtacatttgtatgttaaagattgtcagaaattgtatgagctttcattatgatttctgtatttaacaatacagaatttaacagaatttctgtatttaacaatgatttctgtatttaacaatctttagtacaggaattttgagtaatttgagccaatagaatatagtactaacttaattttttttttttaattaaactttttagtaagttcttggagacgtgctgatgacaggaaagatgaccgggtggaagagcgggaccctcctcgtcgagttcctcccccagctctttcaagagaccgagaaagagaccgagaccgagaaagagaaggtgaaaaagagaaggcctcatggagagctgagaaagatagggaatctctccgtcgtactaaaaatgagactgatgaagatggatggaccacagtacgacgttaagtctcaagataatggatttaaactggtgtcttaaataggtttgatcacattcaaggattattatacttgtgcttcaaccaatctaaattggattctttaatgttgtttcaccataacacaaaaagcatgaacttgtattaatcctatataatagattgatcatgcaccatatccacaggaggttggaaaaaccatgccattttctggaatttaagggtgttgcattatttcatcaatcatttgttgacaaaaaagaaaaactaaaaaataaatttaaaatgtgacccttcaggtattgagtaacacctttatcttggtatagaactgatactttttttttgattttgaaatatctgataataatttggaatgaagtaaggttctgttaaaatatatttgaagaccctttaaagcagtgaatctgaaacaattttcacacccttaagtggttgatacgtacctattttaggtattttgaggtatttaccataaactaaatttagaaattttttagattcacttgaagtaaacattacaaacattggatacggtggggttttctttagattttacttgagagaaggtgagtacaaagcaatttgcagttgttgtaatgacaagattactgcgcaagtgtgaatccaaacagtatagcttttaaattttaaagcatttggtaaattatcgctgagtttttttctgttgccaatagcaaactgcttttccattaatggagaattcatgcctttcaagcattttaaatatgacaatatttataaatgtatggtttggaggaatcgtttaaattctctttcctaattttctttcttttgaagatagattctttcaacaagtaatttgtagtaatgactgtgttgacttcaattttggagcgcagtagctatgttaaagatgaactatttggtctcattgaagccaacacagaacttgctgctgtgttttttcttcagtgataaataaaatacttacagaatttgttttagtgttgatttgtggttatagtattttgtttataatggtaagtttgcatattcagttgagttttttttacttgaatttttatcagtgccattaaatgtctgtgtttagtatcaatgaaaatgaacctaaatataacaaagaaagcatatgtggctaggatgtccccctaacatgtcttcctttgttaatgcaggaattccttagtttccttgtaacgctgtcctctgagtttgtgtgtgcatgtgcgtgtttgaagtaccaccttgggttttcacctgaaattagaaaaatcgtagttaatttgagaaaatgttacaaattcatcatggctgtaggcacttatttctgttattgagtagtggtgagaattcctattggtacagctgtagggccagaagagggagtattgatgctttttaacttaaccagatgcagctatttttgtttgatgttaccaatgatagaaatcattttaaacaccttagtatctggtatttcaaatacgtagaagtctttaaaggtctttcgtggggagaaggacttttctttcataacaagagaatttcagatcagtgattacaagtggggcagtaacttgctaagagtttgcttcctggagagtagatctgtatgtgtgacatcacaggtaagccccaagaatttatttaatcagatttgttcagacgagttactgctgcctacgttagagttagatttcaaggcgagtcagcaaacccatcctttctgctcagtctcccgtactgttctcccaagttctttgttctgggagtcagaacccaagtgcaagaggagggcagaagagtctgatgctgttactttgcgatcctgctcttggtttccactgtccaggccatacaactctgtctactcccattagtatttaccaacaggtgttaaaggaaagctgaacaagcagcctactcaccgatctgctaggtggtcttccatgttcatggtggcttctgcagtttcattgagagtaacattgctgttaatacagatagatccagtagtagagacatcatcggtccaaaagactttgcatctcattagttgtccatagtgactaccaggaggtggctggcatctataacgtgtgggacgtttttatgtaaagaactgcctgtgtttttttttttttttaaccaaagacactgaccatagattgacttatacttttataagtctaattgaaatacttggggtactatgaaaggactgttccttgagtggctacgattagaaaatcaggactaacaaacttttctttgtctggaagcatatatatttgtgatataattttaatatgtataattt

SEQ ID NO: 63169 - DNA, 1129 bp, Homo sapiens
ccaggctggagtacagtggcactatcttggctcactgcagcctctgcctcccaggttcaagcagttctcatgcctcagcctcctaagtcaagtagctaggactacaggcgcaccaccacacctggctaattgtagttttagtagcaacagggttattaccatgttggccaggctggtctcgaattcctgaccttaagtgatccacctggctcggtctccaaaagtgctgggattacaggtgtgagccaccatgcccggcccattttaagtttctcatataagtttaagatactgttaatgatgtctgtgcagtgatgtacacagctttagtatttttttaatcagtgtcttaaattagcatttagaatgatgatgaattaatgccaacgtctattcatgattgccaatctgtttcttcttttaaaaatattttaaaaatgttttgctttttcaaaaaaacaggtggatggagagagaaagaaaaagccagagaggagagctggggtccacctcgagaatcaaggccatcagaagaacgtgaatgggacagagaaaaagaaagggacagagataatcaagatcgggaggagaatgacaaggaccctgagagagaaagggacagagagagagatgtggatcgagaggatcgcttcagaagacctaggtgtgatgctctaattaaattatttgtagaggccgggcgcagtggctcatgcctgtaatcccagcactttgggagggcggatcacctgagttcaggagttcgagagcagcctggccaacatagtgaaaccccatctctactaaaaaatacaaaattagccgggcgtggtggcgcatgcctgtaatcccagctactcaggaggctgaggcaggagaattgcttgaacccgggaggcagaggttgtggtgagccgagatagcgccattgcactccagcctgggcaacaagagcaaaactccgtctcaaaaaaaaaaaaaaaaaaaaaaaaaattccctcttaaagtaagaaaatggaggcccaaacttcgtggctgtccaaaggctgtgtgacccgttgggcattggaaccagtccagccatctttgtcagtccgttgcttttacccctgtggtttagggcagtcag

SEQ ID NO: 63170 - DNA, 1731 bp, Homo sapiens
tttgcatttttagtagacccgaggtttcactatgttggccaggctggtcttgaactcctgacctcaagaaatctgcctgcctcggcctcccaaagtgctgggattacaggtgtgggccactacgcctggtgaatttttatattctttatagtgatggggttttgacatgttgcccaggctagtctcaaactcctgggctcaagcaatcctcccgccttggccttccaaagtgctgggattacaggtgtgagcgactgtgcccagccgcatgtcttacaattaagtagagatgggttttgccaggccaggctggtcttgaactcctgacctcaggtgatctgcctgcctctgcttcccagagtgctgggattaaaggtgcgagccactgctccggcccatactgaagtttttaaaaagcatgtgaaaaaaaaaatccccaaaggatcatatgcttttttattttatatatttttaattgttcttgttgctgtgtagggagtggagacgtggagaagggcgagatgaggacaggtctcatagaagagatgaagagcggccccggcgtctgggggatgatgaagatagagagccctctcttagaccagacgatgatcgggttccccggcgtggcatggatgatgacagaggccctagacgtggtcctgaggaagataggttctctcgtcgtggggcagacgatgaccggccttcctggcgtaacacagatgatgacaggcctcccagacgaattgccgatgaagacaggggaaactggcgtcatgcggatgatgacagaccacctagacgaggactggatgaggacagaggaagctggcgaacagctgatgaggacagaggaccaagacgtgggatggatgatgaccgggggccgaggcgaggaggcgctgatgatgagcgatcatcctggcgtaatgctgatgatgaccggggtcccaggcgagggttggatgatgatcggggtcccaggcgaggcatggatgatgaccggggtcccaggcgaggcatggatgatgaccggggtcccaggcgaggcatggatgatgaccggggtcccaggcgagggttggatgatgatcgaggaccttggaggaacgccgatgatgacagaattcccaggcgtggtgcagaggatgacaggggcccttggagaaacatggatgatgatcgcctttcaagacgtgctgatgatgatcggtttcccagacggggtgatgactcaagacctggtccttggagaccattagtcaagccaggtaaaattctatttcctagaatatgcttaagtgttcacctgtaaaagtgaaattctgatggataaatatcagggctgtattgttattttccagataaactggtctttcatctttccttcagtatcatttgcagtgacttcgctgtcaaaagtttgccttcagaataccaccatccaaaacataaataacccaacccctctcttctttagtgatgtgctctttgttttccttctgcttcgatgactgcttctttgaaggctcttcctgtactcatgctttcagtattggtgtatttttcaggttttactgggaaccagcctccttttaaaaataaataattgaaaccaaaatgtactttatatatttatttttgccaactgagagattatgcaaggaggaactcattttactttactttttttgagacagggtcttgctctgttgcacaggctggaat

SEQ ID NO: 63171 - DNA, 1045 bp, Homo sapiens
gggattacaggcgtgagccaccgcgcccggcccatcagagtactttgaatagagaagtactgttaatttaaccacccccattagacattaaataaaatgtctccacctttctttgcttcgtaggcactgtgatgtccatttcagggcatgtggcttttttcacattcttcaaaggggatttctaggttgaaggaaatctgtagaggtgtatgttcccaggttgctttccagcacagtgttatatcggtttgtaaggccacctacaatatatgagactaccagtttccctgtagcgtcagtctgatctcagattaaaaaataaatgaaattttaaaacttgcttatttaagggcttcatattgttataagtacaaaaaatatttgaatggtaataccagtagttgtaatagtaaatggttaccaatgtaatgcttctttttcactttgtcaatggaggactctcgttggggagatagagattcagaaggcacctggagaaaaggacctgaagcagattctgagtggagaagaggcccgccagagaagtaagtagagttgaggaaaataatgccgctccagttcctgttaatatcttatcagtggttttaaaatttggttcattttgtagaggcagggaaaggagagccatgaagaattgtgtgcatgtctgattgcgtgtgggtttgtattttgtttttttgggtctgctgcccaggctggggtgcagtggcgctatctcggctccctgcaacctctgcctcctgggttcaagtgcctcagcctctcgaatagctgggattacaggtgtgtgccaccacacctggctactttttgtatttttagtagagatggggttttgccatgttgcccaagctggctttgacctcttgacctcaagcgatctgactgtctcagcctctcaaattgctgggatgacaggcatgagccactgcacttggcctgtgttgttgtttttgttgttgttgttgttgttttgagatggcgtctcactctggagtgcagtggcgcgatctcggctcactac

SEQ ID NO: 63172 - DNA, 2480 bp, Homo sapiens
tgggctcaagtgattctcttgcctcagcgtactactgcatctgacttacagtattttaaaattaaggtttgtacattggtgttttagacatgctattgtatacttaatagactgcaaacttctatatgcatcggataaccaaaaaatctgcgttgcttgctttattgcaatattctttattgtggtggtctagaaccaaacctgcagtgcctccaaggtgtgtccgtgtatcataatttttcctttataaagttcctggtatcatggggctaaatgaaaactgtctctcctaaatgcctcaggattactttgtctacctcttgcccgtaattgccttctggggacctattgacatggatgtagttaacgttttcatttttatggcatgacagaaggggcagtggagcagcttctaatttttcaagagtatttctcagtaatttggggttaatgagtaaaaaaaaaagtgcattgaaatttcacaatatttgtacttgcagattactacaatgcagctagaacgtgaaaaggctcttgaacataagaatcgaatgtcacgaatgcttgaagacagagatttattcgtaatgcgactcaaagctgcacggcagtctgtttatgaggtgagcttgctgatttttgggaaatgtttattcatgagctttctagtattggcctaagggttctcccttaacaaattggtatattctttattgagttactatgtgtaacggtcattcaaataatagaaatttttggatgatatttcataagcaaaacaatcatcaaaattgttctaaaggtgaaagttgaatgcataatttaatacaagttttgtttactgtttttgttagaaatgaaaaaactagatcaaaatgtcctgggcttagattctaatttgaccattgaattattttgtataaagacaaacccactggaggtaggtaatatcaacaatttaaatgttttaaaatttggcctgctgacaagttaatggtcatttggaagttagagtttttgtgctgagaggttgctttcgatgattctgatacacttgagagtcttttgtaaacctaatagctttctgcgagtttgttgctcttgacaaagtgtgccctttttgggttgggggttacttcgattgcaggaaaaacttaaacagtttgaagagcgattagcagaagaaaggcataatcgattggaagaacggaaaaggcagcgtaaagaagaacgcaggataacatactatagagaaaaagaagaggaggagcagagaagggcagaagaacaaatgctaaaaggtacacaggtcaaacaggattggaggggtgctaatgcaaggttggtgttaagatctagtttttagtgatcttatgtagaaaatacaggaatcaaggtaattggccttttagcactgtaattaactggatctcagaacccagtttgctgtatgtgaagttgttacatcgtctgccagcatttccccacacatttgatgttcttctagaaattaatactttttttaatcaccgtattctgtgtattaacatttattgaggaatacattccagatgatggctgttaaatgatgctatatctggaatcccagattgctcagggatgggggagggattctagtatcttattacaaaactatagttgaggggtgtagtacttattttcttgactatgttctgtcctgtagctgattacaaactattttcaaattcttttacttgtacattatgctacctgtttaataccagaaaagtggaactagcactagggggaagatatggctgggaggcacacttagtaacctaatcaatggtctagagcgggaagagagagagcgcgccgaacgagcaaaacgcgaggaagagctacgagagtatcaggagcgggtgaagaaattagaagaagtggaaaggaaaaaacgccaaagggagttggaaattgaagaacgagaacggcgtagagaggaagagagaagacttggcgatagttccctttctagaaaggtgagtatagggtttattgattttattttgttttaatgtgactttttttttttggttgaggcacagtcttgctctgtcgcccaggttgcccaggctggagtacagtggtgcaatctcagcccccgggttcaagtgattctcgtgtctcagcctcctgagtagctgagattacaggtgcataccaccatgcctggctgatttttgtaattgtgatgtatttttatcacccagttctcttccatgatacctatgtaaatgtatttaaatcagttattttcacatctctttctcttttttttttttttttgagacagagtctcgcttcattgcccaggctggagtgcagtggtgtgatctctgtctcggcttcctgcaatctctgcctcccaggttcaagccattctcttgcttcagtcttccaagtagttggaattataggcgcccaacaccatgcctggc

SEQ ID NO: 63173 - DNA, 5581 bp, Homo sapiens
ttcttttttgagcatttttgtttattttatgaatacaccatatgtgaattctccccagtttggggctattagaaatagtgctgccatgataatttttgtgtgataatttatataaaagtaaaactggtattttccttgttattggtaataaaatattctattggccacagtagttgtctttgtgaatatttaattggttgtagttgtgttttttagagtttcatttcctttttacatacttgtggggcttttcacggtaggttaatgtgcatagtgtggggcaaaagacccagcatagttgtactttggattcatttttggtaaatttagaggaggttgaggcttgatgattttttaaatcattttccagatttccaatgctatcatttatactaagttcagaattttagttggaaaatttcctttggcagttacatcttttgttttgcttactgtaggtcagatttaatgtactacaatatgttgtcccagaagtgaaagacctttacaattggcttgaagtagaatttaacccattaaaactctgtgagcgagtcacaaaggtaagcctttgtatttaagttctggttgttaccacagagttggccttcttgcagttttgggttgtattcatatttgttaagagagaagttttgtcctatgtgttggaattcagtgcacatttcattgtcttttttctttatttcaagagaaaagatatatctgatgtgctcagcaaacctttggaggttaattagcagcatgactaatttagccattgctgccagtcaccttcaaacaagtatcagtagcttcatgatacattttgtatttctttgcattggatgatgtttttgtatattaaaaaaaaaagagttttagatgttttagtatctcttatgtagaaagtgtgattctctttcaatttaatggattttataggttctaaattgggttagggaacaacctgaaaaggaaccggaattgcagcagtatgtgccacaactgcaaaacaacaccatcctccgccttctgcagcaggtaaaaataaaaaaataaaaaaagttttgtgatgttatgtgctcatcatgaaactaaaaactggaaaaatctagaactgcctaggaagtgagaacctccccaagttctgcccctggcaaaaattagtctatttattaatttgaaaatcagaattattatatttacatattttgtaacggacgcttttgttttttggctgaacactgtctttgggcatttttccttgttagtaatgtagggctaccttattccatttaaggtactgtggtgtatttattcagactctcttgatgaaaacctgtattcctagattttttttttccctgttagaaatcttgtagcattgagcatctttcatacatgtatctttgcatacttctattactttctgtggcataagaagtggaattagtcatagggtttatggatttaaagctttaatagctattcagaagcctggattaatagaccccccaccatgagtgaatgagacagccttttcatatattttagtccaggggcttaagtcagtaagtgctcccattttgttttccatttgttgcatttgggaaggagggcgttttattatattttcatctcagtatttgtgcacatttcattgacctgctttcttttatgtgagtagtgttatttcttatgtgctatacaaataattgaaggctaattagcagtataactataaatagtaatgctgccagtctccttcagacaaaaattctataagaagtgtttaaatatattcggtaagtagcaggtttttaggcttttttgttttacaacaactaggatttgaaaagattataggtttgaggaatagtatgataatggttctcaaagcatggagtttagagtcgatggtctgggattagcattctggctttaacaatgtactgctaacataaattctctggcataatttctacttcccatgactgtcatgagattgcacataaaaagtgctgaataaacagtggctagtgttattaaccctttgttttctatgcaggtgtcacagatttatcagagcattgagttttctcgtttgacttctttggttccttttgttgatgctttccaactggaacgggccatagtagatgcagccaggcattgcgacttgcaggtaggtatgtgctgtaaggagacaggagaaggcccttgagggctagaaagacacataccttctgtttctcagcttttggtacagtgataccattttaaagtttactgagtgaacttttccagcttttgtatatgacattcttctgttactttttgacttcatgcttacttgtggatttaaccattgataatttaattttcaaaggttcgtattgatcacacttctcggaccctgagttttggatctgatttgaattatgctactcgagaagatgctccgattggtcctcatttgcaaagcatgccttcagagcagataagaaaccagctgacagccatgtcctcagtacttgcaaaagcacttgaagtcattaaaccagctcatatactggtatgcatcttcccggggaaataaatcccagaagttttgagggactcttaacgccatgccatgtcttttacaaaaaggtttgagacaatatctgagagaagggatttatgatatgtttcctatagaattgtacttggtagttttgttatttgatcaaatacacaaatcattgagctttcttccattgaacaaaatactactctgtgtaggtaatgtaatagggtggattatgttacagaaacaacagagtggacataggattcctcaaatagtgaaatacagtgactggatttttccctcctgcttaagttatttcttttttttcttttttgagatggagtctcactctcacccaggctggagtgcagtgatgccatctcggctcattgcaatctctacctcctgggttcaagcaattcttgtgcctcagcctcctgtgtagctgggactacaggcacgtaccacgtgcacagctaatgttttgtatttttagtagagatggggtttcaccatgttggccatgctggtctcaaagtcctggcctcaagtgatccacccgccttggcctcccaaaagtgatggggttacacgcatgagccactgcctgtaacaagttatttcttgtatgtgagctctgttaatgaacacctaaggtaggtttggtgcagagaaaagttgtcttatctaggagagcttctttagctgcgtcattgctattaaaagactgaataggagcaacaccatagcatttaataccgaaaacaaacagcttggatagtgtcatcttccattatcaaatgcagatacatagaaaggcagtacatcaggattattttgtaatttctttgatgcctaataccagagaatgttaattttggtcatgtaaaaaaattcatttgtttttgaagcaagagaaagaagaacagcatcagttggctgtcactgcataccttaaaaattcacgaaaagagcaccagcggatcctggctcgccgccagacaattgaggagagaaaagagcgccttgagagtctgaatattcagcgtgagaaagaagaattggaacagagggaagctgaactccagaaagtgcggaaggctgaggaagagaggctgcgccaggaagcaaaggagagagagaaggagcgtatcttacaggaacatgaacaaatcaaaaagaaaactgtccgagagcgtttggagcagatcaagaaaacagaactgggtgccaaagcattcaaagatattgatattgaagtacgtagcatcttagttattaaaaaattagttttatccaggtattttgtactcttagaaccacagtcctttaccatttgttggcttactgggttatttcatgcattttggtacagctggtcatgactaaatctgtgagtaagcatatgtttattgctctgtgaagttttgtgttttttttgagacggagtattatcttgtcgcccaggctggagtgcagtgacgtgatctcagctcactgcaacctccgcctcccgggttcaagtgattctcctgcctcagcctcccaactagctgggattacaggcgcctgccaccatacctggctaatttttgtatttttagtagagacagggtttcaccatgttggccaggctggtcttgaactcctgacctcaagtgatctacttgcctcagcctcccaaattgctggggttataggtgtgagccaccacacatgacctgtttcatagacaccttatacacatagcctgaaggtaattttgtacactattttacataattttgtgcatgaaacaaagttttgaatgcattttgactgacctgtcacatgggtcaggtgtggaattttacacttgtggcaccatgttggtgctcagaaagttttaaaattgggagcatttcagattttgggtttttggattaggtttgcttaccctatttagtagagtctgggtagatgtaggttggagtagtgagaaaaggatgtatggatatttttttccttatggtcaaatggaaataaggctattgtataatatttttacatttcctaaattatcacccattgtaacaataaaagcaatgtaggattttattctagaaagcagtgagttatgttaggcattgcttgtttctctttattaacaattgtgcatttgtattacctttcaggaccttgaggaattggatccagattttatcatggctaaacaggttgaacaactggagaaagaaaagaaagaacttcaagaacgcctaaagaatcaagaaaagaaggtaaatgaaagggttggtaaacctttaacataccaagttaagagagattttttaaaactacgtgtgttttcgtgtcattcagattgactattttgaaagagccaaacgtttggaagaaattcctttgataaagagcgcttacgaggaacagagaattaaagacatggatctgtgggagcaacaagaggaagaaagagtaagttttttatttaattgtaatatttttagattgtaataaaatcctctgccagtaatggaaccaaggattcagaattgctttattttgtattcttctgctagaaatggtgctctaatggctgcctatgaacagattggtagaaagagggaaaatttcacaatagagattacaaacgaaacttggaaaacaaaggacaactgaaaagcccattttataaaaaactgctttatatacactttaaatgggtaaattgtatggcatgtttatacatctcatagttttcattttacttgcagaattgtgcagccatctccacaatctaattttaaaacacgtctcaaaaagaagttctaaacccattagcagtagtcatccctattcttccccaccaccccagccctaggcaaccgctaaactactcctttctctagatttgctgattctggacattttatataaatggaattgtgtactgtgttgtctttcgtgactaaacaggtcattccatagttttgttaacttatagtatat

SEQ ID NO: 63174 - DNA, 1060 bp, Homo sapiens
cttggctcactgcaagctccgcctcccgggttcatgcgattctcctgcctcagcctcctgagtagctgggactacaggcgcccaccactacgcctggctaattttttgtatttttagtagagatggggtttcaccgtgttagccaggatggtctcgatctcttgacgtcgtgatgtgccccccttggcctcccaaagtgctgggattacaggcgtgagccaccgcgcctggtcaatcacaatctttttctgaagctagaaaacactgacagtactgagtggatagatgaagtcctgattctccaagtattcgtttaaacacagcccatttctcttactcccatgctttgatggaataatatttatgagtatagtgcaccatggtgatgtacacgttctgtcactagcacgccttaccgtaagattaaagagaagtgcttttctgcttaccaagtatcatttacaaacctaacagatttaaaactttgttctccatagaatgtctactagagtccttttagccactctttccatccctattactcctgagcgtacggatattgctcgacttctggatatggatggcattatagttgaaaaacagcgtcgccttgcaacactactaggtcttcaagccccaccgacacgaattggccttattaatgatatggttagtattaatttgaggatttttgtagctttgggcagaaaactttgtggtcaggtttaataactcatgattaaatactgggaattctgattcagtgccaagggttctgatgtatggacagggaagcactggtgtcaatcactgttcacttgaggcagttccgcgccagtgggtgagcaggggttaaattggtgggagttttgatctagcaggacttgggttggctctggggaataccgtgggccagttagtaagagaagaagtaatgatgggcaagaagagtcatggcttatttcatggaggctctaggaaaactaattaagctgtgtgtggtaaatatgaagaggctaggtgtattagtatgttctcgcactgctatatatacccgagg

SEQ ID NO: 63175 - DNA, 3264 bp, Homo sapiens
taaaaaagagctgggatcttgcattgttgctcaggctggtctcagacttctggactcaagtgatcctcttgcttcagcctcccaaagtgctgggattacagctctgcccagcctgaattttcactttctttctttttttctttcttttttttttttttttttttttgagacagagtcttgctctgtggcccaggctggagtgcagtggcgcaatctcggctcactacaagctccgcctcccaggttcacgccattcttctccctcagtcttcccaacagctgggactacaggcgcacgctgccatgctcggctaattttttgtatttttagtagagatggggtttcaccgtgttagccaggatggtctcaatctcctgaccttgtgatccacccacctcggcctcccaaagtgctgggattacaggcgtgagccatcgcgcccagctgaattttcactttcatacaagtaaatttggactttttgatagctgttgatacaaatattaacttgaagttaaactgcatctctgttttaggcctgttaaaatagacataactatttttaaggggaaaggaaatctaaaaaataatctaatagtgcatatgtgacggtaaaaaaattaacgtgtccagttaaatgacagaacaagtagttcatctgtaatcagttgaaattaggttactataagccctcaatttgtattatgtagttttaattagtacagaaccttgtttcttactatgtaagttagatatcaaagttcattatatttcatactagatttttttactcctaggatttaaagtggtgggtctttgaaaggtgacccctagatctaaattctagtttcccatttgtaaactctgccagcaccacattttagttgtaagcaaggaccagtgattatgtctttggttttgttagggctcactcaaaaaggtagtctggatgaaataagttgattctcattgcatcacaaagactaatgatgagtttggtgaatcctgttaaaacaactgatcttaatgtgtgaaataaaacctattcaaatatttaagtagatagtggaaggtacctaatatattttacaattatgcttatagctttcaaattctgcctccaatacacgcgtaaggctgaattccgtaaactgtgtgacaatttgagaatgcacttatcgcagattcagcgccaccataaccaaagtacggcaatcaatcttaataatccagagagccagtccatgcatttggaaaccagacttgttcagctggacagtgctatcagcatggaattgtggcaggtatgttggagctattagcttttcttcctagaaataatagtctgtgttacttttctccccccttaatgaatagcttcatcttggtatgcattggttaatttcaataaggtaaggaattaaagttgcctaatggactgggaaaagttctgaacaagaaatctcagaatattttgtttctagttgccttctatgaattctggaccaaaccatataatctctttcagacccagtttcttgacatataaaacaatacattgccagtgctgctcgaagtgtggtttcatgactggtgtcatctgtaaactatctggtctgtgatgaaataagtatagagtagaaaagcatatgcaaagtttcttagtagcaattttattgtacattttgtgtgtttttactctgataaaaagtgagctttttctgtttcatttttgtggtaattttgtattttatattcttcggtaagaggtcagaaatttaaaacaaaccgaatcctttactactgattgtttggagaagtgctgctgtagattattctagatttcttagtggtgctttagctgcctgtcttgcattggagatcttgatggtgttaggaagctagtcctctccctggccctttttctctaagaatcctacaaagacgttccatataattttgtagtcatgtgaccttgaagtcttttgtatatttgacggacaatatttgattgaaattatagaggaagaaactaaaaattgggagtctttgagccaagtgaaagtgtgatttgatgtcttgttcttgcccatgtttccttttctatagggacacccatcttaaaatactacctgtagaagataagtaaacatgcccattatagaaaaaaatccataagttaaaagaagagaaatattcatccattatcttatcactcagaaataacctgttgtatatccttctagattttttctttatattgcccgaagtgatgggataatatgcaaatattttcttgagtctgctctgtctacttcccattatttcctaaagaactttaaaacgtttaaggagttagtgtttttgtaattatggcagttttctaaaatagatatacatgagtaaagagaaccacacaaaggtattttatttgctatttttatgttttctgtgttgtaggtttcatagaaatttgaattagatttttttcgtgttatagaatgcaatgactttaatttatactcctaattttaggaagcattcaaagctgtggaagatattcacgggctattctccttgtctaaaaaaccacctaaacctcagttgatggcaaattactataacaaagtctcaactgtgttttggaaatctggaaatgctctttttcatgcatctacactccatcgtctttaccatctctctagagaaatgagaaagaatctcacacaagatgagatgcaaaggtaaaaatgttatacttggataatgttgaaattctgtaacaaatatcgtctattatatgacatggtatattttaggccatggtttctcagcctctgcactactgacattttgggttggataattcttagtcatggggctgtcttgtgtactgcaggtggtttagcagtttagcagcatcctcagcttctacccattagatgccagtagcaaccaccgccagttgtgactattaagacgtctcaagacattgcccttcctgaacagtattcttggactttagtagttggtcttgaactcctcacctcaggtgataagtaactccgctaaaagcccaattgagaaatttgaatattaggaaaaacacatttaacggatgagctttctatccacatagaggtggagtctattctcagaacaaatagaaaattaagaaaaatacttttttttccttttctttttttttttttttttttgcaagacagagtcttttgttgcccaggctggagtgcagtggcacg

SEQ ID NO: 63176 - DNA, 1911 bp, Homo sapiens
cgcctggctaatttttgtatttttggtagggatgggtttcaccgtattggccaggctggtctccagctctagacctcaagtgattggcccacctcggcctctcaaattgctaggattacaggcatgagccactgcgcccggcctggaacttttaaatcacagtggaatacagtgattcagttttacttgtagatcatatttcaacacagtacaggtctttctgttgttttacttttgataattatggcatagctttagaagtcaaaaataaatgtaacttggtaaaaagttggtaatgagttggggaattgaaatagctgtttaaaaaggtaaagtttagactcttgtatagtgtacataactaattttaattcttctgaatttttcagaatttcttgaggttggcaaaaagcagcctgctctggatgttctttatgatgttatgaaaagtaaaaaacatagaacatggcaaaagatacacgaaccaattatgttgaaatacttggaactttgcgtggatcttcgcaagagccacttggcaaaggaggggttataccagtataagaacatttgtcaacaggtacaaacggaactgggttgtatatttttaacaagtgtttttagtaatctgccgaagaacttacctttcgaagtgaatatattgtatttctcttaaaaatttgcctttaaaacatcttatggttcaatggaaaaataagttctgaagagtttttgtttttttggattaggtgaacataaaatctctggaggatgttgttagggcatatttgaaaatggcagaggaaaaaactgaagctgctaaagaagaatctcagcagatggtcttagatatagaggatctagataatattcaaactcctgagaggtatgtgggttagacctctaataaatgctttgatagttaacttggtgttttcttttacatgggtcttcatttccttttgaagtagatgtttatcagaaaaaaatgcaaatctttgaagttttaaatgcatagtaaccagttaatttatgtaggtaataaaaattcatagaagtggaaaatgacagccttaagatagaggggcaaataccaatttaaatgaacataatgcagattgggaattcagggagtagatagtgacacctttgcagtgtgtacatattgtgggaagaatttgcactgttttctgatgaacattgttttggtttttaatcacatggcaaagtaggaaactgtctaaaattgttttcaacatttttttctttgtagtgttctcctaagtgctgtaagtggtgaagacactcaggatcgtactgacagattacttttaactccatgggttaaattcctgtgggagtcttacaggcagtgtttggaccttcttagaaacaattctagagtagagcgcctgtaccatgatattgcccagcaaggtaagatgagaagatcaaatctgagtgaagtgctttgaaattgactgaggagtaaattttctgaaaagtacttaaaatgaactagtttttatccttattgaaatgttggcattcacatgagtattaaatgactgcggccggatgtggtggctcacacctgtaatcccagcactttgggaggtcaaggtgggtggatcacttgaggtcaggagttcaagagcggcctggccaacatggtgaagccccttctctactaaaaatacaaaaaatttagccgggcgtggtggtgtatgcctgtaatcccaactgtttaggaggctgaggtggcaggatcgcttgaacccaggaggcggaggttgcagtgagccaggatggcactgttgcactccagccttggtaacagcaagactctgtctcaaaacaaaacaaaacaaaacaaaacaaaacaaaacaaaaccaaaatgactgagtaag

SEQ ID NO: 63177 - DNA, 3266 bp, Homo sapiens
tccttcctttccgtctctggccggctgggcgcgggcgactgctggcgaggcgcgtgggaccttacgctggttccccttcgtctcctctcccggcccgggccactagagagttcgctgacgccgggtgagctgagcctgccgccaagatgccggcctattttcagaggccggaaaatgccctcaaacgcgccaacggtgagtagctgatcggggcgcgccgggctggggcggcccgaggcctccgaggtcgagagcgcgggcctgcttcccactgctccgccgcccggcccgcgcggggagaggagaccgatgcggcctgcccgccgctgtcccagccggtggttgggcatgggtttccttctcactctatcgactggggtctgggaggcgcgtagcccggaaccgtcgccccaggggcctttccttccccctgccgcctccgggtgcgtcgcggggaccgcagcccgggagacagcccctacccggactggagctccctccttgctgcctgcgtcctctggctctccaggtccctggggctttggtctgcttagggcccgcgtccccggccgccatctgggagtgccggggagtaagaaacatggctccctcccggggacaatgcacgcgagagcctcggctccacctcctgcccgggccgggagccctacggacccacccccggccttcccgcagccacccccgctctccaagccgcgctcagtgctttgctgggtcggcgtccacttaccctttacccagctgctttatatccacttaggggcctctgacccatttaacctgattcctgttgttttgttttgtttttgttttttcatttttcctggcattgattagaagcagtcctaaagcctgtttcgaatcactggaagttggaatagagttaatgtaaagggacttcaggtcgcctcttaaagataacgaaacaggcctagagagaggtttccccaaggtcactccgggagttgttgagccaagagacttaaaaccaacgtctcttgacatccagatcagtccttttttctctttttttctgccacagtgctgctgtctgcgatttctatttctatatgtgtacttcagccattggcgcttgagggaaaaacttgtgtgccccgatctctccaaggcatttattacattggcgttctggggatgcacatgttcttggctaggctctgggcttaagaaactttgtgtagggttttttttttcccctctaaccggacaatttttctaatcgttagggcatggatagctcttattttcatccttccttcaccgaaatagaagtttcgggttttacccatgttgtagatgaatataccttgtgagttacagttttatgtttggagagcttattttgttagcttctttgaaaattcatcttatgaaaatggcagtttgagtcagcacataaactgataatttggcagaaccagagatatgttggtcatatactttttaaagtaaaagtaacactttttgtcggggagggaactggtctgtggaataggataattccacattgtgtggaatggagtaattgttttaaaaacctattgaaactacaacatagatgtgagcactaattcattctaatgataaccagtgatctaatggttagaacagacaagcagttttaggatgtttattaatacatcggaaagaagagattgaaatggaactttgtcactataaaccaaactgtagcaaagtttatgacttttcgtcgtttcgaaagttagaatttgtagtatacaaaatgatttgcatgaaattactactctgcatggctgttgtcgatgttttacagtcatttgcatgctttgcccaacaggtatttttttttccccgtgctagtaggccaaagcattataatggcctacatattatatatttggtgtgttcgggtcttgtttcctttatcgcttctctttttggaaccttcataagaacttcatatagaaaagatatgtaatgtgcatcaaacatttttttcctgtttctaaattgacacaggcttgattcatgaagggcaggttaaggaaaggatctgaaattaaagtaggcaagatgagggacactgggggggaaacttgagttttgtttgtgtagctttttaaaaaagactgtggtcccttgcagccctttgaagctgttggatggggatgcatgcgttcccttcagagtagaaactcatacctttggattgtgagggatcccttctcaaagtgagcagatcgtggatggtccagggcactgcttccaaaacataagtgaaggatcaaagggcattcccctaattggaaataatctcattttatctaaatgttttacatgtaatatttgtgatcctaacaatatttagacctaatttattgcattgtcttaataaaatgtaaataaatttaagtagaatagtcgttcaggtcaccctaagcatatatatgagcaatttttgggggaaaaattatagtagtcattcaggaaggtgagaacttggaccagcagttacaggcaagaatttcgtatcctgtaatcatttggagaaggcccctttttcatattatatcattagtggtgccacactaactgctgctgaccttattatagtttatgttctacaaccagtgcctttgaaaaataaagctattaaggccacaaattgagtaacatagcatatccatttggtctgttgcacaaataaactagcaaacatcaagggctgatgtaaacttctttatacatactttcagtaatgaatttgaaaggtatgctccaaatgctcacccatccagtaaggtttataattctagattttaatttttatttctataatattaatctggaagtcaatatttaagtattgaaatagaacctttagtttatcatagttctttccagtctcaaaagcttcccccggccactattaaataattcagaggaggccgggcgtggtggctcatgcctgtaatcccagcactttgggaggccgaagcgggtggatcacaaggtcaggagatcaagaccatcctcactaacacagtgaaaccgtctctagtaaaaatacaaaaatattagcctggtgtggtggcgggcacctgtagtcccagctactcaggaagctgaggcaggagaatggcatgaacccaggaggtggagcttgcagtgagctgagattgcgccactgcactccagcgtgggtgacagagcgagactccttctccaaaaaaaaaaaaaaa

SEQ ID NO: 63178 - DNA, 1014 bp, Homo sapiens
cctgctgtcagtgctggacgaagtgctataactactttatgtaacattacagaacagctagaggtcctggggtaagagaaaaaaagcacatcacaacaaatgtgaaagccttcattattacacgttccagtttgtctcgctgtgtaggcataagctaatggtttattttcagaaagctgcctgaaacgttgctttgtattcttctaggaagaactttaattcctcctgaggaactctactttctgagccaaactgctaattttctgcggaactgtctagaagatcattcaagagaccctgcagttgcactttctcgtaaaagttaaaaaaaaaaaaaaaaaaaaaaggtttttcccggcctttgaacattttgcctatgagagttttgcatatattttatacttgagtagacaactttaataatccatatttatactatcgcagaagtaagcatttggcaaacgttcagccattagcactcatttaaccctgttagcaatattcttttgaaaaaagtgccagtccttatgtgataaactaagaagcccattgaatataaaagtgtgtaggactgaaacagtgaccttatattattgctaagggaatatgagattaacttcctacaggggccaaaaccagagaaaggcttccagcaacttcgatgaaagtagtttggccacatgtcaagccaattgtttgtactatttatgtacctttttcataactggaattgccaaataagcatggagatctaaatgatgtacttgttagtgtattcattcatattgactgtaaaggattatttttcactcagtactgatgtccttggaaatcttacctggaaacatgtttgcaaaaaacattattgggtctttcatctttttcttggtattacatatttgttcaataaaaattaaacaccctcccttttttttgagtgagggcagggagtacctgaaataagacaatgtttactaaggcaaataattgaaaattaaatctgcactttatgga

SEQ ID NO: 63179 - DNA, 1050 bp, Homo sapiens
agtagctgtctagaatggaggacactgagtaaggaaacaagattgcttttggggttggagggcgtaaacagcgccccaggggtacgtgttccgcttgagacggcctatccatttaacacctgtgtcctgggcacggtggactctgtgttctttcttcaaatcctcaacttgagacaggtttattagttaattagtgatttcacagtatcctttcgcaggccgatccccactccaaccgttccctcagcaaccccaggggtgtcagacggggcaccctcccactgtcttctccagccagccttaaaaaccccagagacgccagcctgggaacgatctcagtatggaatctgaagtcgccttgtcagcacagacacctctggggtccccagaagacctgtggcaaagttctctaaaccgaacctggagaggggaaggttttcaagcaggaaccacataaattcacctaaaactcacgcctacacccctctgtgataaaagatttctgtttcttctgttggagactgaattttctcttcaagactacagtactgtatctgaaaaatagttaaattcataatgtttctattaatagtttttcttgccttagaagccaagttaaaaaaatcattttctgaaagcaaccatttcacagtccatctttttcaataatgtctaatctatagcagaaaatgtaacctatttttttttttaatcacccaagcagtaaagaaacttcttaaactttttttttttttttttttttgagacagagtcttgctctgttgcgcaggctggagtgcagtggcaccatctcaggtcactgcaacctccaccctccaagttcaagtcattctcatgcctcagccacccgagtagctgggattgggattacaggcgcgcaccaccatccttggcccattattgttatttacttatctctacatttgtttataattgaaagtttccattaaaaagttttaagatggctgggcacaatggctcatgcctgtaatcccaacacttagggaggctgaggcaggtagatcactt

SEQ ID NO: 63180 - DNA, 1062 bp, Homo sapiens
ctataaggcctctaactgattggatgaggcccacccacattgtggagggtaaccttcttttctttttttttttttttgagacggagtcttgccctgtcacccaggctggagtgcaatggcgtgatctcagctcactgcaacctccgcttcctgggttcaagcgattctcctccctcagcctcctgagtagctgggattacaggtgcgtaccaccacgcccagccaatttttgtatttttagtagaggtggggtttcaccgtattggccaggctggtctcaaactcctgacctcaggtgttccgcccgcctcggcctcccaacgtacggggattacaggtgtgagccaccgcgcctggtggtaacctgcttttcttaaagtgagctgattgcagacgtgccctgtgtctgcagagtacccctacagcaacagctagatgagtgctggattaaataactgggtactgttgccatggtgacccgtgaggctgactgccacagacaggcatctgacaagtgctgggtacctctgagagtgagatcctattcttcaaatccaatatctgccctcccagtgtgtgctgattgggggccactcccctcccagcctgctctgcacttacagaggtcagtggacacccctttctggggttaaaagagcccctgcttctcccattcagcagatgtccttatagtcttcattgctaaggactacttttgtcaagaatggacttagaacattgaattctctgatccaaaactccttttcaaggcctcaattctgaataatttttactattagtttcttctttttcttcttctttctttttcttttctttcttttttttttttttgagacagggtctccttctgtcgctggagtgcaatggtgtgatcacggctctacagcctcaacctcccaggctcaggtgattctctcacctcagccttccaagtagctgggattctaaatatgcaccaccatgcctggctcatgcttgtgctttttatagacatggggtttcgccatgttgcccagtcgtgtctcaaactcctgagctcaa

SEQ ID NO: 63181 - DNA, 1042 bp, Homo sapiens
gtaagccaattccttagaacaaatctcctaatagacatgtactgcccaggtgcggtggtgcacacctgtaatcccagcactttgggaggccacggtgggaggatcacttgaactcaggagtgaatgggagggacaatggagacagaggtgcatgcttttcttttgagagatttcaaaaaggaattgggggccaggcatggtggctcatgcctgtaatcctagcactttgggagaccgaggtgggtggatcacttgaggccaggagttcgagaccagcctggccaacatggtgaaaccccgtctctattaaaaatacaaaaataagccaggtgcagtggtgtgtgcctgtggtcccagctacttgagaggctgaggtgggaggaccgcttgtgttagggaggcagaggttgcagtgagccaagactgcaccattgcactccaggccagtgcgacagagcaagaccctgtctcagaaagaaagattatgtacatatatcccattggttctgtttctccagagaacccagactaatgccccatcttatcagggggcaaaatgagaaatttctctctcagcatgctaaggaaagacgggtaaagaaaggttgaaggcagacatgaatttgtcaccggctttcaaacagaaaagtctagtcgttgcccaaaaggcaagcagctatagcttcatcctgtctcttacctttgtcccagcaattctggaatgacccaggacattgccttccttgtccatgaccgcaatccccttaatggattcaagacttcgggacatgtagacattcattccactggcttgcactgtagatgtaaagaagtaaagaacacccaagacgggggtgagtcttgttccagcaaaggaacatctctttgggtgtctgccccctgcaagcctctttctctgacagctggcctttcttgaccctcaggtggacacctgccataggctgggccaaccaagtgctctcctggggctgtggaagtaggctaagaactgctggccactcagtcttggatcctgaccaca

SEQ ID NO: 63182 - DNA, 1064 bp, Homo sapiens
tctgtctccgtctcttttctttcttttttccttcccttgggagccactgttctattggctattaatgctgtcattgttatatactgcccagaggaccagctttgcaaaactgggttagttttttaaatgtagttagaattctgtcccataaaccagacagcaagtttcctcctacacagtggatatttgtggggattccctgcagctgattcctggagcccagtggcaaaccccagaattcagacagggctctgacgtcagaattcattctccactgcaggcagcgttcctgccgataggctcaaacggactgttccttatctaccttgcagtatgtggggctttctggagctcacaaacaccagctcctcaagacagcctatggagagctcacatatttaactttttctaagaatgtgctggggaccctgggctgacagcttggctctgttgcaagtaacttgactgatggcatggtgtgtcatcagcacacagcctgctctgctctgagccagaggcaagccggattcggggactcatctgagggataagttaggtgttggtattctccaagggtagagacaggactttttaatgttctggtccatttctctgtgtggctcgtctctttgcttgtcattagttcatttgtttattcatatgatccatttattttgatttgttctgtcaatgtggtaaataacagctctggccttcactctctgaaaggtagaacaaatgtggtcccagaaatgagacaggcaaagaaattctttgctgttgagccacctttaaaagctttttttttttttttgtttttttttgttgttgttgttgtttttttaaggctgggtgtgatggcttaaccctgtaattccaatggtttgggaggatgacttgatgccaagactgcaagaccagcctgggccgtatagcaagaccccatctctactaaaaattaaacaactagttgggaatggtggcgtgagcctgtagtttcagctattcaggagggtgaggtgggaggatcgtttgaacccagtagttcgaggctgttctgcagt

SEQ ID NO: 63183 - DNA, 1448 bp, Homo sapiens
aggccttaatgaaactttcatctttatgttttaaaggaaatctttaaaagtttaaagaactttaggttaaaaattgggagattgccactcacttttgggactattattatggtaaagtcacagttacctaattaagcttttgtattttcagatcaagccaagtccagctgcttccaaagagtactttcagaaggtaaatcagtagatcacccatgtgtatctgcaccttctcaactgagagaagaaccacagttgaaacctgcttttatcattttcaagatggttatttgtagaaggcaaggaaccaattatgcttgtattcataagtattactctaaatgttttgtttttgtaattctggctaagaccttttaaacatggttagttgctagtacaaggaatcctttattggtaacatcttggtggctggctagctagtttctacagaacataatttgcctctatagaaggctattcttagatcatgtctcaatggaaacactcttctttcttagccttacttgaatcttgcctataataaagtagagcaacacacattgaaagcttctgatcaacggtcctgaaattttcatcttgaatgtctttgtattaaactgaattttcttttaagctaacaaagatcataattttcaatgattagccgtgtaactcctgcaatgaatgtttatgtgattgaagcaaatgtgaatcgtattattttaaaaagtggcagagtgacttaactgatcatgcatgatccctcatccctgaaattgagtttatgtagtcattttacttattttattcattagctaactttgtctatgtatatttctagatattgattagtgtaatcgattataaaggatatttatcaaatccagggattgcattttgaaattataattattttctttgctgaagtattcattgtaaaacatacaaaataaacatattttaaaacatttgcattttaccaccagtaactgttggatcagcttattttgggctctcctttccttctcagattatcaacaaacatttattgagcatttacctcaggggccacaaagagaataagatgctggttccgcactcaaggaactcggtttaggggcaagacagatagggaaacattttctcgttgtttcagtaaatccttgagtgcctaccccgcaccaggtgctgttttccaggcacaagagcgaacaacggacaaacccctgcttttaagctcttacattctagaggggaaacacctcatacatgtagtaaaagtagagtgtttggaaggaaaataatgtggagtgaaactgctgaagcggagttgtaggtgttctagatggggttgtcaaggaaggccttaagggagagcctctctggatcaattttctcattgtaaaatgaggacaataattgtacttatctcagggttttgatgagcatcg

SEQ ID NO: 63184 - DNA, 1023 bp, Homo sapiens
cttggcttcattaatagacaaaaaccaaattttaaatttgtcccagttttcccaattttgggaagagaggccaaatgttagaccacacacaattccagcggatttcaggccaacaaagccttgatgtgtctagcccacttagcttattaacggactaaaactgcatttgtaattaattccatttcatacagaagccggaagtctctacctgaggctgaaataagaaagggatcctgtcacagaaatactagacacagtaatccacacaaggttaacaaaacagtgggaaatatggaaacaaatacctaatgccccgcctggattcgttcttttaaggttggggcgacagtaggaaaaccacgtgtcacttgcccaagcattcagccttaaagggaatttctccctcagggtctccaggaggcggggaggcggtggctcctccggccccgcccccccaccagcagagggcccgctcaccaccccgtaggccccgcccctgcgtctctgcccgccccgtggcgcccgagtgcactgaagatggcggctgctgtaggacggttgctccgagcgtcggtgagtggctgtcggctggggacaggcgtggagacactggtggctccgggaacgtgcttctcagacaggaccccgcgcttctgggcatgagggccattcgcccttcttggagggtttccgcgggtaacggacccagaggcctccctccgggaaggttccatgcgcctgcgcagaaccgcccttccccactccatcctcgcggtctcttccccgagtccctcctctttcggcgtccccggtccccaggcccatctccacttaaggtcctggccctgattctgccaccgaccctgtgatcttgggcaagcgccttcgcctttctcagactgtgtacttaagatggaaagaatgatgcctacatcaaggcgttgctgtgaacagccccttaaatactggataaaaacgcgcaaagtgctaaaaaactcacaaaggctttccctcccaatccca

SEQ ID NO: 63185 - DNA, 1059 bp, Homo sapiens
gtcacttgtcactctaaagcagccagtgggcaagaaggtttatttcagaagccccgaagggaggcagtgctttgaaaaccccagcagagtttaaaatattcaggttagtctccctcccattgcttagctttggtgggaataaatttttaggagaggcttgttacttggtgacttcaggttctaaggcctgagctgtgtgtgtgtgtgtggtttttttttttttttttttttttttttcctaacctgacatttttagtggacaggatctaggtgggtgctggtaggctctcctctgggttggggaatggtcctgaaagggaggaagcagagaaaacagccctccacctcccccgcccctctttcagcctttgcagctggccacctagtggtgggacacggttgtgtatctcaggattcgggggctgggaaagttttcactctcgctccattctgaaattatttcttgggaaatcactgggtctgatggtactggagccttgcaagtttcgctggttcctcctgttgcccagggaatctgcccccgacatttgctgctgtagatatttgtttgcctgatagatgctttttttcttccctgagcatttggttgcttcttttataatgctttgcttagagtgggcaaagtgatatcaattccacccgccccctccaaattgttctccccagtattttttcaccaacgtgaatttactgtctgatattgttgttcgttaggccaacaaattgggtttttttcccagagccttggagaagagagctgcaggctggaagcttgtgtggagtgaccgactcccattggggcagaattacagtgattgaaagtgctcaagaatgtgcctttcacttttttttttccttttaaaggctttttcaattttgctgtgagagtttggtcgtcatctcatggtgagaaaatagctcttgatgatgccttggaaatggagagggcctgcggaagcagggagagactgacacgtgaacaagaaaaattaatcatttaatggaaacctcatttacaatttgcatctctccccttct

SEQ ID NO: 63186 - DNA, 1033 bp, Homo sapiens
aggagaaggagaaaatagggaagggggtgcggagagtgaggaagagactgaggaaggggagggggctgcaccatggaggaggggtgaaggcaggggttgggagttgggactgactcacctaagaggaaattcaggtcagggacaatcatggatggtggcgggggtggagggggttaagctaccatatcctcccccaccccctttttcaatatcttgttgggaaatttgcctaaattgagcaactgactttcctgattcaaattaagtgcatgatatagatacatacagagccccatgttccttcttgaaattcttaatgtggggctattttaaagcagtcattttatttaaaaaaacaattaagttgcataagtgcggcagatctacagaaagaatagaaagaaacctccacaggcaggtgatctaaaatgggggtgaagacaggcaaaaccattttaagggttttcattttttctgagctgggaagacatcaggaagaaggtatacttaaagatgccaaagaaactcactgttcttgtatccacttgaaaatggttttctccttaaaaactgtttcttgtgagatttgaaacattttaacaataactcagagcacacttagaaagaaagtgtttgaaacaataaaacagttcattgcttgttccctggtgtccgaagcaagggagtctatctgacgtaccagagtcaactggtgacatcctcctaaactaggccagttttgatagggcctactgtgtttctaagaacttgtaatctgtggaatatcaaaaatttttttaaaaaggtaatgatgaaatgaaccccaaggacagcttctggggcctgtgcagaaagcaagggtaaacagataagctgagataaacagataagaacatgcctctgtcctgaagtggcagaggccacagggccactggtgcctcggcttccctgagccttctcagctgatctgctgccctgtcctctgtttccggcatagaggttacccttggtttaacggatggggaaactgaga

SEQ ID NO: 63187 - DNA, 1086 bp, Homo sapiens
gtaatcccagcactttgggaggccaaggtgtgtggatcacttgcggtcaggagttcaagatcagcctgaccaccgtggtgaaaacccatctctactaaaaatacaaaattacctggatgtggtggtgggtgcctataataatcccagctacttgggagactgaggcaggagaattgtttgaacctgggagtgccactgcactccagcctgggtaacagcgaaactccgtctaaaaggtaaaataataatttaaaaaaaaacataaaaataaaaaaagggagtcacttgttcaaggtcacttgaactgtggacttttggggagcaattgcaagtggatctcccctatcctccaaagtgcttttatgttccaaaataaatctttcttccttcctctcataatatatgccaaaacaacaaactcttctcgagatggtagggtttttaagtgtaaatacccatgaggttgtaattgtggaagagaaagagtgtctttgtcagattccctgggaaaaggggcaaattgggaatataatttctgtctcagaccgtgatttcagctgagggccagtttgagagcagttgggtaaattaattcctactaggttgtaaatgactgataggtgaatcctcaaagtagatgtttccattttaaaagtagaactgtgtatcaatacaactgaatctgtgtttgaggacaaggcaggatgcctacatgccatacataagtgcctgtacacacataagcacatgtgtacgtatgtggtatgatcgcctgtggaggcccattacctgtactctctcgctgcctgggcccctcctaccaacacatcggacaagcgaggccagcctcttgcgttatttttcccctcagcatggctagtggccaacgaattgcccccaagggactggatgtgaagccccatgggtggtggtggtggggacagtcatgggagtttaggtgtgggccacatcattggcagcagcaccacctcctttccttggcagaggcaagaggtgggcagcgggcatgccagttcctgctggctcaccacacatagctcccatctgccctgcaccctgcttccc

SEQ ID NO: 63188 - DNA, 1054 bp, Homo sapiens
aggcggcatagcacgatgttgaatcaaaggctgatggggtgggggagagagagagagtcctcattgcattgtttcattttggtgtccagccattctgggggccagatgtacccccctggtttcctgtttgggtgaacgtgtgacttgccacttacagtcaaaggatcctgactcattcagggttaaaagtcacatccttaggggatacctgccttaaagaacccaagacagcaggccagagacatggggcctgggtcaggaggagccagccccctgagtcaaggaaggctggatgtgcacctttgtcccaggctttgcttgagcagagggccaggtgtatttgatatttgccacaaagaatacaatccttaacctggctgcccttgtgagactccaactgtagcaaagaaagattaggaaacaaacatcccagtcaccatggaaatgtgaacccaaggtgttaggaacaatagctgtgtgagtccggaagtggattctgtccacacacatgttggtttgatcccccatctatttccttgtgggggcctgggcatatctgtgaacgtatgatatagccagctgctctagggctgggtgccacctcccattagccttggtttcatcatcaccaaaatagctgtaaacctaatacactgcttatgcatgtcagaacctccttacagcctccctcggaggtaaatattatttttatcttaattccacagatgagaaaacagaagctcagggaggttcctaaactttcccaaggtcacagttgttgatggaagagccagggtttgaacccagcccgttgagtctgtgcttttttaaccaccacgttcctcacgttggtgttgacaaaaaatattactaaaagtagttcattcttactctacatgtcttatttcaattctgccacaaacctatgaggcaagtacaactggttaattccatcttataaacgaggaagctgaggcacagaagacttaggaatcttgcccaagttccaccgtcagtaggaggcaaaagtacatttgggggttacttttttcag

SEQ ID NO: 63189 - DNA, 1025 bp, Homo sapiens
tctgttgtttataaattacccagtctcaggtattctgttatagcaacacaaaacagactaagcagacttctgggttgaactcaatggaaacttcttgttctaaccttatgatctctgagcagcatttgaaattgactcactgtctttgcttgaaattcatttattgctggggctcaggaccctaccctcactgggacctcactttgtctttctagctatgtttcttcctgaaatattgacagccctggactcaggcctcagcattctgggggaagtgcctctactcagagttaacatttattgagcacttactgcatgcatgtgctatgctcagcactgtacatatcttgtttaatcctcatgatgcagctctctgaggtcagtactatttggtcatttattcactcattcaccaagatttttgggctcctactatatacaaggcacaattccaagtgcctaataaggcagatgtgttcctacctctggggagctgacacctagtgggaattattcaggttaacaggaaacagagtggagacctgaggcttcttacccagtcacagccctggtgggcagaggagccaactctagtgccgtgctcttgaatgctttgtttctggtcccaccgatggccgtgaatccctcacttccagtgcacatatctctcttgatgccattgactctgccagggtgttctcggcatctcaaacttagcattttcgataggttttattgctagtgttgtttttgttctctctgaatgtgctctgccttttcaccctgcatccacaaatggcctgggagcctgtctcaacaccccctcccttaatctccaaatcctgttatcaagagtggtcagatcagcttcttcagtgcacccccaggaccccattcttactcttcctgccatggttccagccccgcacttcctggacacccttcgttcttttcatgctctggcatgttcagctttgctttctcttcactgagcctttgcacatgctgttccctctgccaggaat

SEQ ID NO: 63190 - DNA, 1017 bp, Homo sapiens
ctgctgggggctcagtgatgagctgggtcacgctgcacagccccttatggttgggagcatttgcacaccttgtcagctctgactacatgcccaggccatggggactgtcattatcaatgttttgcagatgaggaatgaggctcagagaagccaagtgacctccatgaggtcacacagcctgtaagtgacacagtcagaagtctcatcctgaacctaggctcattcaccaccttccagctcagccacctccccaaaccaccagtgtccaggtagccctgagccaggtgcagcctggagggggcagcaggtcacacactggggcacagacgggctgccagatgtaccagcacctggagcgtggctggttcttggcccaacacctgtgggcaaacccggccgcactgctgctggctcctcactgaccacctcccttcccttccttcttccagtcccctgttttcatagcccaagttggccaagacctggtctcccagacggaggagaagctcctacagaagccgtgcaaagaactcttttctgcctgtgcacagtaagtgccgtagtcacctggcctgtcctccccgggctgcccagagatgggatgccgcagctctccacctgaccatacagggcactgaggcaggtcttccatgcctgacagcttcagccaagttataccaactgtttgtatacttcccacgaagagaaaaagatatcaaggtgccaagtccaaagaaaacatctgctgcaaagggtattgaaagcaagtggctctccaggctgttgagacagaggaatgtgcaaacatttgaccctgtctgggtggtttggaagtctttcccagggtcctcaacccccaccactgccaccaacccgagccagtgctactgatgcagggggagcttctcagccaaaccccatcaccttgtctgcaggtggcacgtctgccgtgcaggaggtgacacaagtcgatggccatgctgccagcagagcaccaactaaacccccaccccatcc

SEQ ID NO: 63191 - DNA, 1059 bp, Homo sapiens
tgtgcatgcacgtcctcctgaatacctgtacttccaagaggtggtctcctgttttcataacccaacactctgagataggatcttccaactttttagccccggctgtggaaagatagtgagtatgaagtctttgtgcatttggaagtgacatcgctgtgtggattatgaatacagagagctgccatcttcctgatcacaatagaccacgattgcaaagcctcctctcccagagaccccttctgcgcctgccctccccacccaccacccagctgttgaagctcagcgtgtgcaagtcagaccctgcacaggccgggggtgtctcacctggcctaaacgtaaaggcttgtgccggagacagtgattgaaaacatttgaaaagccagctctccctggcagagaaagacacttcccccccaaagtggaatttagatgtctttccctagtccatcaagaagtcatttttgtaacagtccctaagcgagtgttctcaattagaagagtttagtggcttttggtgttgttaaaataataagaatccttctagcatccaaagctttctaatttttttcagggagatttggacattaatgaatggaaacttccacagtggcggtcactcctgaaggcagcggcttctgttctcccgctgctgtaactctgtgtgttccgtctatcgcgtcacagtgccgctggatctagatggagccactgttgttgtttttaaaagagaaataaattccttaatggaagtagcatggcatcggcatctctctcctgctgctgagctcttgttctgtttcttctgcatacgacagctgtccccaagatgcctgtggcctttgggctaaccctttcctaaggttgacagtggaacccacccaaacccggcccccacactgaccaccccctgaactgcccacagatggcccagctccagtgggcggggcccaagaaaacctgaattcttaccaggccgccggcttctgatctcaaacccagcagatggttctagaagtgctctggccacttggcaccaaggaggagctgggtgacaagggc

SEQ ID NO: 63192 - DNA, 1866 bp, Homo sapiens
ctcagcctcctgagtagctgggattacagtcacgtgccaccatgcccagctaatttttttgtgtttttagtagagatgggggtttcaccatgttggccaggatggtctcgatctcctcacctcgtgatccgcccgcctcagtctcccaaagtgctgggactacaagcgtgagccacggtgtctggcttttttttttttttttttttgagacggagtcttgccctgtcgccaggctggagtgcagtggtgcaatctcggctcaccgcaacctccgcctcctgggttcaagctattctcctgcctcagcctcccgagtagctggactacagatgcatgccaccatgtctagtaaatttttgtatttttagtagagacagggtttcaccatgttggccaggatggtctcaatctcctgacctcgtgatccacccacctcggcctcccaaggtgctgggattacaggcgtgagccactgcacctggccattaagtggtttttaaaatacaaagctacttatccaaatgaaatgtaccatttaaaaactacaactgggccgggcgcagtggctcagcctgaccaacatgatgaaaccctgtctccactaaaaatacaaaattaagcgtggtggcccgtgcctgtagtctcaactactcaggaggctgaggcaggagaatctcttgaacccaggaggcggaggttgccctgagccaagattgtgctattgcactccaccctgggaaatagagcaagactccgtctcaaaaaaaaaaaaagtgcaactgttgccgggcatggtggttcacacctgtaatcccagcactttgggaagctgaggcgggtagtggatcacctaaggtcaggagtttgagaccagcccagccaacatggtgaaaccccatctctactaaaaataacaaaaaaattagctgggcgtgctggtgggcgctggtagtcccagtgacttgggaggctgaggcaggagaattgaacctgggaggtggaggttgcagtgagctgaaaatgcgccactgcactccagcctgggcgacagagcgagactccatctcaaaaaataaatgaattaattaaaagtatggctgttgagctaacagatgattttataacatgacccaatgctatcttgatccaacttaagcctaagaatcgttgctccccaccccgttcatcaaaaacatcagcagagactttttgggcatgcaaggaaatgttttttatttcataattattttgagatttattttggtgatgtgtttctgactgactgccatattctttgttctcataatttctctactagtattttcactcccaacccccgtgccattcccacttgatttttatgtctgctggcagtgagaggctaaaatggccaacttaagccaaagctgtaaacaacagttgaagtaagtctttcaataaagactagactatatgataagtggctttttcttattgtcgtttattacataattattctaccaggttgccatgaaataagcaactgggttttaagttttcagtagttatgtggagtatgtatgtagtcaggacctatttccatgttctgtgtaagtgttaacaagtccattagctttgctgaatttaatctctggatatgaaggagtagaaatttgcatccttctaaaaatgcatgctctgtttaatattaatatattaaaatttattaatttggagtcctcagatacgggaactaattttactgtctaggttgctctttggtagtatctatgagtaaagatgatacttgacaaaaataatttaataaatgttttagatactttactagtatgtccaaattaaattttccctattaaaagcatttga

SEQ ID NO: 63193 - DNA, 4488 bp, Homo sapiens
ttttgaggtggagtctcgctctgtcacccaggctggagtacagtggtgcgatctcagttcactgcaacctccgcctcgcaggttcaagcgattctcctgcctcagcctcctgagtggctggaattacaggcgtgtgccaccacacccagccaatttttgtatttttagtagagacagggtttcaccgtgttggtcaggctggtctcgaactcgtgacctcgtgatccacctgcctcagcctcccaaagtgctgggattacaggcgtgagccaccgtgccctgccttaatttttgtatttttagtagagacaggatttcgtcatgttggccaggctggtctcgaactcctgacctcaggtgatctgcccacctcagcctcccaaagtgctgggtgcccggcctgaggcatatcttaatagtatatagtaattaacagaagagtttcatagtacaatataacagtcaacgtttttgttttgtttctgcatacagacaacactaagcagttgagatttgaagatgtagtaaaccagtcaagtccaaaaaattgtactgtgtactgtggaggaattgcgtctgggttaacaggtacaatgtttggttttctaatcacctctgaggagcttcatcactgttcatatgaatttcatgatacacatcagccatgttttatttgtatgttttgttttatagatcagcttatgagacagacattctcaccatttggacaaattatggaaataagagttttcccagaaaagggctattcatttgtcaggtaacactctacttgaaatatcattattactcttatatttgattcattcctttcacttatgttctccagggtatcagtgtttgttattttagtgcttctttgcagtatagaagtttaagctacctacctaatgtactttagaaaaaaaataccaacttgcaggtgtaaactgatgagtttccatgttatttattgtgttaggttcttaaaaaataaaagacaaaaccatatcatttttctttcttagattttcaacccatgaaagtgcagcccatgccattgtttcggtgaacggtactacgattgaaggacatgtggttaaatgctattggggtaaagaatctcctgatatgactaaaaacttccaacaggtaattcgatttttcatagcattctttaaggtttccatcttacatgtcacataaaagctttggaaactctgtaaaatgaacaataaaataaagcatatagctactttcagttgattgtatttcaaaattgattatttgcggtattaactgaatcttaatactttcttttcacaggtgtcaccaccccaataaacttagacaatgataaataacagagtcctattcacataagggtgcttacttagtttttctcttccttgtctcccactctttcttcatatacggtgtttcttatgtgttccctaaaacaatactttgctttttcctaggttgactatagtcaatggggccaatggagccaagtgtatggaaacccacaacagtatggacagtatatggcaaatgggtggcaagtaccgccttatggagtatacgggcaaccatggaatcaacaaggatttggagtagagtaagttgtttgggtttttccagtatagaaacgtatggttctgacaaaataaataaaagtgtgttttcctagggagaatctattttaattatatacattgagctatttggcattatgagcattatagaaactaatctaacaaaatatgatttatgaggctaagaaattacttctcattacctaggtggaaaggggggattggggtaacatttagtgtgtcctatgatccctgtaagcagttggtagaatttgatttacatttctgatacacttttatttatttttgcatgtaaaagatctttgtccagatatattcaaaagtttgatggttttatgcctatgtggtatgtgtgagaaatctgaggtttgtgtgatacaaagtaactggccttttttttttttttttttcttttgttgatagagtggtttcctcctttgtaattcccctgcccagggccagcccatagctttattttcagatttcttcctttgagactgtttccaacatgaacttgtttttaaaatttcttatgtaatagatgatgtgttgaatcattcacaatttttaaaaaattagtttgcagatactcctcagacatcagtgtgttaagttgtggttatcttaaaaatatcaaagactaatactggaatatgtattctacacatatatcatttatttctttgatctttctatttgttgtaggtgtgttgatttctggttttctattctgtgattaggctctgcttgatttttgtgtaaatacatatgtgattttttttttcttgtgtttgctgaagattttttctttttcttccaagtcaatcaccttctgctgcttggatgggtggatttggtgctcagcctccccaaggacaagctcctccccctgtaatacctcctcctaaccaagccggatatggtatggcaagttaccaaacacagtgagccgggactctaaaaaaaaattgtaattcatgataggcttcgatttcctgtgacactctgaagacatgaaagtagacatcggaaaatgaaaatatttattttaaaaattgaaatgtttggaacctttagcacagatttgctttggtgaaggacacgtgtcttctagttctgcctttttaagtttttgttcatgatggatatgaacatgatttttctttatgtacaaaaactaaaataaagtcaataaagacaattctgactacaaattttgatataataggaaaaatggctaatacattttgattcttagatactattccatttttatcttgctgttcagtattttaactcactgtgtttttaaaagagcaaaaaagggaggatcgtgaaaacctgggaatcacatataagttcatcctgaatcctgatactcccctccccttccctgaggtggaccacatttgaagtcagcagagaaaaagtgtgatattcagaagaaatgcgtgattttggagtcgctttggaggaaatattttctttctctatgcctaaagaaactgaagccagactgaagttttgcaccctaaaaaaggaacagcattgtttgagttacttgagcaaatgttggtggtccacgttaagacatatttttaaaacttccaaaagtgtcgattattaaaattgtagtattttacatttcattttggggggaaatccaagtatggtgtttgtattgaagtcagacagtcatacttgtgcttttacatgaagtttaaatgatacatattgtaaatattcaataactacagtgtttaaaaagcatgcttcaacatagaagtagcagcaatgtaattatttgaagtaacacttaacacactccgctgcattgaatgcagtggattgatcagaatgttaagactgacatttccaaggttggctactatgtaaaattaaaattacacaaattgtgcagaaaaagccttaattttaatttcatacaatctttgatgcattagtatgttctaaaatgtcattgggaattagttttttgtttttgtttttttttttttttttttttgctttacattacttggtatgtaaataccttgattaaaaccttgtaaaccaatttcaaggttactataagttgtatagtacaagtgttttttaaaaatcttggggtgtttttaaaaattaagatatattttgcccaagaatttttttaacaagattgctaaaaacatcttatttagacacttcaatgtaccaatttataattggatattcagtttaaatagtacacagagttgtggcttttattttcaattaatttttttccttgtgggcagtgtgcatggtataataagcctgagcagaggcttaagttgtatgtgtgcagagtttgtaaaggaatcaattggaagatgcagaagaccgaggtttgctttcaaggtatttttcaggctgtgtgggtaaaatttgcctcaaatttctatcaaacaggaatgtaaaatagataaaatcctatgtatttgaattgtcagagctagggagtgcaaatgttttggcaatgtattcaaaatgctggcctgggcaccaaagagaaaatagccttttacagttacatagtaagatgcgattagtacccacaaattactgttttctaaacatttgaagttttacgattagctttaaaataatgattttataaattggtggtcacaataattttggtattactttcctccttttcccacttagcaatatagccaaatgtattcaacataaaaattcatagggtctgaaattcatagctgggccaaattttttatggcaccttagttttaccataatggtcatctattacactcttctgttataaaatatacccttatttcttttgtttatagtatctttgaggaat

SEQ ID NO: 63194 - DNA, 4448 bp, Homo sapiens
atcccactttttttccctcaaggaaatgccttctggttcctttgccactattgtttagacgtcttattttggatttttcttctaaaactttcctggaatgaaaaactgttgtggttgaaaagatctttattttatctggtatatttatcccttgtaagtccaactagaattccacattttaaatattattcttatagggcattttacattgaataatgatgaatgtttttagccttacataaaaatatgtatttgtacagttgtgcagctattcagtacaggttgcagtttcatagaaattcatttctagtttggttgtcaggtgagaatgttgctatagcttaggtagtactactttcttcacatctttataaatgtgttttaggtaactactgtcaagcacagggttgcagaatatatttaatatagattttttatatggtgttcttatgatgtaaacttatagctttgtcttggaatattttattcagatacattttcagaacctcttttcttgatcaccactgttatttctctgatctttggaagaccaaattcaaagtatatagaatcttcagtacattagactattttggaaggtagggaattcatttcagtagctggttataaagcttaagttttcttgtttttattttcattctttccatatccagaaaagaaatcaataaaattcagtctttgtagcagcatagaattccatcatttgtagtattgatcctaattttgatcagtagtttatgaagttggttcttgctgtatttctgtatcctgggataccacttatagaggattatgatgcataagtagaacgtaatttaaaaataatattggagaaggaaagtagtggtaaggagtggtcctcatcagatctgagtttgaggttttgtttggtttaatataatcttctattttatatttaacacacttcaccagaattctttattttcatttaatactgatgctcatgattctacaactgcttttatagttccgtttgagttcagcagtattctgaggtgcaaagtcaggtttagctttaaatcttatttaaaaagtgttaggctttcataagcttatgcagtctcaccttgtatattcccagctatcagtaatgttttttcctggattttcttctcagcaacccgatagcagaagggtcaactcttctgttggattttctgttttgcagcatacaagcaatgacccatattgctttgtggaattttatgaacacagagatgcagctgctgcattagctgctatgaatgggagaaaaattttgggaaaggtaagataataggatgatggcaccttatgagtacatatatttgcatgtcaaactagtttgtattctttctaggcaaatttttgagcagatattcggctgctgagtgatggttttgctttattcagcttagtgcttttacaaaaataaccctgcttgataaatgatttaataagtggtaagtgttgtaactcatgacatgcctaataattttattaaatataatctttatttttaggaggtcaaagtaaactgggcaaccacaccaagtagccagaaaaaagatacttccagtaagtactcctgctgcattttactgtggaagagttctgaaattatccaggaggcattaccagcttaaataggtttttttttcctcctctagagttgccttaaaaaggttttagtggctgacttcttaagtatttgattaccaaatgctctgatttcagatcacttccatgtgtttgttggggatttgagtccagaaattacaacagaagatatcaaatcagcatttgccccctttggtaaaatatcgtaagtatcataatcagtactacactcagtcatgataggcagaattgtatatgattaacttgtaattgaattaagattttctttctctagttagtatggttttgttttgtttcttatttttcatttatttattttggtttgttttgagtagtggatgttgttgaaaatgttaatgtcatttcagtgtcttggggtctcgttttcatctaatcctgtgtataatatgttaaaaaaaatttaagtgattctgtttgttatctttgaagcagatgtttgaatggtaaaacttataaagtctagctttttgtcatatgttttcaaaatttgatggtttaggataatgagttaatcaaaagtaaatgtgatctatactgtgtaagagttcaataacttttataggaggaatttataaatgggggagagtaggtaaatccttggatatattgtgattaaattggaaatgttcatgttttattatgataaatgtgtttttgatattttagctataagtgaaaagtactattatactattaaaatgtttcaatgtatgagtcataaatgtgggattaattagatgtttttgttagtgatatttgattctactagttaagaggcaaatgtggtttgatttttaacaaatttatgctcagattttactgttgttacttggtaaaaaatatattggaaaactaaaaatggttatgaattgtagaaaatgtttatcataatttatctttctgattaaaatcagtttattttgtatatttcctgtagatttaaattaaacatcttagtactactttacaggaaagtgtttcaactaagaacaacaatattttctctatacaatttgttgttctatagatttaatttctttaaaagatgtaattcttaactttctgttttgatatttgctttgctttttaatctaaatgtggtaagtagtactattttaaaaatcaatataaaaataatacaggttgctgtttttcaatctttatttatacctgagacctgcagtttttcttaagtccaagtcacaattaaaagtaatagcattctggttattttgcagaattgctcataagaatggacaggatcttgaaggctaactgcaaggaactgtgcacactggaactcagttgtagattttttttctcatttctatttattcttattatacattatttatatatacatattttagtatttacattttaacattctatattcagtggagttctatatttccaatcatttaacttactcactaaaatttctgtgtaaatttgttgttttcgtactggtgtgcttagcattgttgttagttttttattctcctttcttaaatttctgaaaatgtcaatttttcaaaatttacagctgcccaaactccaaaatgatggtagagaattgaccaagaaaaataaagaaatctgttaacaggccatgtatgcctttttaattcctattttttcctctttttcaattttttaatatttcatatattttgtatcactaggcagaagacatttaactatttagagattgcatggtaaagtagttagtattgttacagtaatttatagaatcagtaaaccttagaggacactagtaaatagaatattagaaagggaaactgttgttcctattaatcttcaaatttgagcatttagtttagaaagcacaggctatttgattaggttgcatgtttattacatgtttttgtcctactgcttttttctaacaggtaaagaagcattagggagagttcaggaatggttgtagttaattagggctaactggaattttattttaaaaatgctcacaatacagtgtgtgtggttccttttagtttttattttgagggtggctcttacttccctcatttagctgtgcttcttttcacagggatgcccgggtagttaaagacatggcaactggaaaatccaaaggctatggttttgtatctttttataacaaactggtacgttcttccatctcaatttatattttttaatactaaatttagtcattagttacttaatgtattgaatctgaaacttgaatatacttgaatgttaactacaaacacaacttttatgtaatgttatgtatgttttaataatagagtataatttcattcctctttcataaactcgaaaataaatagctagaaaaagaatgattatactataaggaagattattaaaattgtgtttgtacattggtaaaggtcagatggatttagaagtaaagcccaagtctaggacagatgagctaatctgagaatttagaggttaggtaaattatattcagttttaaccatgaaaatctcagttttaactctaccttttaaattattattcatactcttatataactgggatgtgaatgactacaacaaattatgtaaataaaaatttaagcaattcatcttgatttttgcatatattctttgtaaaaggggtaccaaagtaagcatttgcattaactgtaacattaaataataaagtgggctttgattttaaagcagtttcaataacttaaatcaatgttttgttttgttttgttttgtttttttgagatagagtctcgctct

SEQ ID NO: 63195 - DNA, 3435 bp, Homo sapiens
cctaaataagggttaatcttactttcataggatcaggtttaattggagaaattttgttgaaaacagaggaagttaaaatgaaataaaaggtggccgggcgcagtggctcacgcttgtaattccagcactttgggaggccaaggcggacagatcacctgaggtcaggagttcaagaccagcctgaccaatacgatgaaaccctgtctctactaagaatacaaaaattagccaggcatggtggcatgcgcctgtaatcccagctacttgggaggctgagacaggaaaatcgtttgaatctgggaggcggaagttgcagtgagctgagatcatgccattgcactccagcctgggcaacaagagcaaaactccatctaaaaaaaaaagaaagaaagaaagaaagaaagaaaaggtgatgaattagatgataacacattagagccagagctaaaggaaaaattgctgataacgtatttttttcttgtgcagatacgtaggtaacctttccagagatgtgacagaagtccttatacttcagttgttcagtcagattggaccctgtaaaagctgtaaaatgataacagaggtaagatcttcccagttccatgtgctgacaattagcatgatgggttgattagcatgattttaaaatttcattgtaagcctcaagttattctggtggagagatttgtgttgtgttgacttattactttgatttggctgacaaactaggcttagaatggagttttatttaagagggcaaagtttccgtgctgttaagctcaaacggtcattcttcatggtgtggttatcttgaagtgattctgctttcagaacattattagagctcatttcagaatggtgaaaaattggaaagtatttcatacaattccaataagaatgttaacgatttagacagcatgtgttcatgtgcgagaacacgaagttattatgtgtgtagtgtgcagcaccgttcgtctcgtgtgtctgtagcaaatacttacctttttatactttcctgctaagactgtagcagcacccaattagtcatgttttaggcttttcttccttgtgtttttgttcattgatcagctttcttttttttttttggactatttcctatgtactagatactgcagtaagtgctagagatacactggtgaataaagatagttccttggcccagagaattttacagtttagtagggagacaaaggagttagcaggcacttaggaagtaggataataaatgctctagaagcagacaacttaaagtgctgtgggagcaaatgtgtatccagtgcagccttaggtcagtgagcggcttcttggaggactcactgcctaggcggaaaccttgaaaggatagtagtacatactggctagaaaggaattgagggaagaagggattccaaataaagggaactttgatccaggttggtagggagagcaggagtgcttgagacagagagggaaaaatagaacccgtagcatggttgtagttaaaatggaattagtcgtaagagatggcaggagtttatggaaagggctagaaactgtgctaaagagtttgttttatcctgaaacggagaactgttaaaaacctttaaagtgcattggccttttgattgtctttcccaagtaatgacaatcatcattttgttctggtgtattatatttttccttcctgcctttaattatttatttgtgctttcatcgatcaaaaatttcctttgcactaggcactatacaaggtactggagatataatggagagacagccaaatgagtttcccaagcaaatagggatgtaagccatgaagagaataaaacagagttctgtgatgattggagggttggtgctatataggctaggtgatgagagatgtcacctctttgagctgagatgaataacaagatggtgctatctatggtaagagctggaggcagaggaaacagcaaatacaagtcttgagttggtaatgaacttgtgtttgtggaatcaaagaccgatggctagagtctggtgagggatggaggggagttaagggaaatgagtctaacagcaggattcagaatcacaggacattatggtccatgacatagtttaggttttactctgattgctgtggcagaccagtggaggggcttaagcagggggatgaggtgccaagatttgcatatttaagcttactactctatgtagagaatgactgttttatggagaatagattgtagcgggcaagagcagaaggagaaaaaccatctggatttacttcactagtctaggtaagagatgatggaggcttattctcgaaagtgctagccgaagtcaagataaggacagaggttgatagatttggaatatattttggaggtagaattgataggactgggttggctgtgggacatagggaaaggaagaaatcaggaaataccctaagattcatgttaatgcagttgtatagttggtaatgctatttatttgctaaagtgggggtgacctgatggatgtcaccatggggagtggtgggaatcagaaattgtgttttggatgttagatttaagacatgaattagacatcaaagtggacgttagattaggcagttggataaagtagtttgcaactctagagagaccggtgctgaagcttgcagtggtatttgaatccatgaagccatgggactagatgagttcacagagagagaatgatggtaaagaagagcacagaggccgtgaggtctgagccctggacaagctcaacatttagagtttgagtaagggaagaaagatcctacagtgaggaaacaggaaaaccagagtgtggtaggagacagaagagaatgtttaaaggaggatggtggtcaactgtagtgaattctgcttggaagtaaagattaggatggaaaaggaatcacagaagcagcagagaggtcattgttgagctcaacatgcagtttcagtggcatggttagcttggaagctgacagaagtaggtttaggagagaacgggttgtgagaaagtggggaaagactcactagaaaatttttgagaaacatttgtaaagatttattttaactattttttaaaaccccatgtatacatacagctatttgaagggtagagggactcgaaatgaattttcataacatccatattctagaactcctagatttgagcttgtaaagtctcatatttctctgtcttgacatttatgtcatccaacaaaaattggtgacaacgctaaataaggtagggacataacggattttttttttttttttttaagagacagggtctgactctgtcctccaggctggagtgcagtggcgccatcatggctcactgcagcctccacctcctgggttcaagtgatcctcccacctcagtctcccaagtagctgggacagcaccgccacacctagttcatttttaaat

SEQ ID NO: 63196 - DNA, 3981 bp, Homo sapiens
tgaatgaattccatcttccaaccacttaattctggtttccttcctttccaatgaagagtgatgactcagcatttgcattcctttctgaatagtgtggcactccttttctctgcatctttttttttttttttaagtctgaatactttttaattaaatgtttaaattgggcaccctaatttcccggcctctccaggtctagcactcctaccttgagtaccaaggagtcagatcgctgctttgtttctcttgcctctcctggtattgataggatcatagtccacttggctctgctctctgatggggaaattgctttttagggaatagatgaaggtggaggggcactcgagaagtttgactagcttcacatctcttcactcctaccaaagaaaggatgctcagtaaagaagatagatgttcagtattgatagagatttttttggtgtggccttgtacaggaataaatgtgttctctaacgtctcactgaagtatccgtcccgttttgagaatctgaggcctactgaagcacatccaatgcttcaatgaaacgcctgcttaatagaacgtctttgtgttttgtgttgtcttccatttctgccttctctccctagaagaaagaattgggacacacttgaaatttgtccttcaggccgggcgcagtggctcacgcctgtaatcccagcactttgggaggccgaggtgggcggatcacgaggtcaagagatcgagaccttcctggccaacacggtgaaactccgtctctacaaaaaacacaaaaattagctgggcgtggtggcgcgcgcctgtagtccctgctacttgggaggctgaggcaggagaatcacttgaacccaggaggcagaggttgcagtgagccgagattgcaccactgcactccagactggtgacagagcgagagttcgtctaaacaattaaaaaaaaaattttatccttcaacatctgttgaagccaagacttggtgttgagttacaatgtgtactttgatataagcatctgggaaagctaggcttaaagactagctaacatgtatttaacaaagataaaagttacattgtatctaaaaatctgaagtatcatcacacactgaatgattgataaatactcatggcaggggtctcatttactgtatctgttccttaccaagaggaatctctggttttgtagtgctaaagaatgtgcttttttgatgtcttttatttatctttgcatctgccttgccttcatccctatcagagtttctccaggggaataataagctaacttctttgtcacttatttccttcctctaccttctctaatctcttgttctttctttgaaacagttaagttgtctatgtttacagttctctaaaactgtgacatgttcatatgaataaataaacatcttaactctgttgttttgtatgtcagtacgtgtttactattctgtcttcctttttccttctcccacccttttccatagggcctttttttttttttaagagaaggactactacatcttcctaggtcttacccccacagcacttagttcactgcctggaacataagaggtactcagaatttctacagtgattatacttctttcattaaattagtattaagttcttttttaaaagtcctggttgaactaagattgtaggcagacattactgtcacatgtggtgcagtctgttgacttttatatattttttaaaaccttcaaatgtaaaatcttgagataaaagcaaatgtttaacaattgggatttttattagagtttaatacaaataatgcatagtttttctaagtgtacgttttacatattctcaaagggttctattagatataagtaacatgatgaaaactgaacatgattttagacgttgatatctagtagggttttttgtttatggagatcttatattttacattgtgagctatggattaggtttttcaagtggccagtatgttttaaaagaatgtgttcttaacaaagcttatcttaaattgtttccttaagatgcctgtgtgttactagtgaggtttttttcctgcagacacacacaagctaagacatatggttctatcttcagaaaacaatatggtgtttagagcctaggtaggtctttaaatattcattacctacagtattactaatttatttgatggtatttaaagtggcaagaattgctttgatgttgagcctaaatttctatttgtcatatagttgctttaaaggtctgttttctgatgttcttcattctcatttgacatttattttggggtattatgcattgagtaacttgtgatctaaaaaaacaaacaagatcatgctgtgtaatactggtgttggaactggactgtctgacacctgccttgtgggacacacatttcaggcttgggttgtgtgtatctttgtagtgcagtgatttgatccatggtatatctgaatctacaatatgacactaaattgtaatagtgttttattgtagcttattttattttcttcatctatcggatgcaccaaaattgctaggaattcgtgtaataccatgttacacaatcccttcctttaaggctattctttcttcctggaaataagctaatgatttagagtataatctgaacatctaagaacaaagcagaagaaaattctataaactattacaaaattgactggctataccatggatttggctatactgtggctataatcaagcccctcattcaaattcaacttaatcatattctttgtttctttaaagtaagagagagagagtgagtgtgtgtgtgtgtgtgtgtgtgtgagaatatctcatatatatagttggtcaatttagttgtacctcctgcagctatcttccatcatgcctccttcctaaaatgaaatactgtaccgacaaattgaacaattaattagagatctattgaaggatattattgcaaaatctcttcttgtataggacttgtcaagaacaaaagcaaaactattatggaaatttagctatagttttttgtgtgaaagtgctgataatttcagccttggtagggctactcttttcagagtgagagcacattcagtgttgaaaaagtgtcattagtcttctgaaaggcatgatattcttaacttaaaattctgcccagtcggacacaggaagtagtttggcaatgtgaatttctgcctactgtgaaactgctaagtttttagccccaaattggattttaaccctgatattagagataaaggtgtcattttcagtttttaatgcttcagttcctacagttcctgttcttagaagacaaaatagactctaaggtatgcctcttctgaattttttcgttgagttaaaaatcattttggaatttcctaagtgtttactctttgaattgacctctcaatacaaaaattagagccatttatcttttttctgttattttgtgtatgttctttaggtagcaattatatatttaaagacttggatctttagcttgactatttcataaccagagcagaaagaaagtgaagtgtagaagctataatttggaacgaataaagatgtcatttcaatgaactaccaagagatgatcttactaggtcaggcattgaactttgtcttaaatatttttgttagtatttactttgggacagattattttatgatactgtaaaagtacttaaaatagaatagtacagtattttaaaagctatacaatacgtctctcaagtgttatgatgcacgaaggcaaatgtaaatgaagaggcaatctgaaatttgggtacaagaactcagtaaaagaaaaggcagtctgaaatttgggtaaagtttaggtgaaattatatagtgaatcatggccttttaatcctggtaaattaagatattgtatgtgttgttatggaaggcctttcatgttagtttttgaaatttagtttgctgcttaacatttaacttttagtggagataatttgaaaaataggaaacctt

SEQ ID NO: 63197 - DNA, 1372 bp, Homo sapiens
cgctctcgggctggacgaaggcggagcagcagctcagactgggccaacagaagagccttacaatgcctggagcagtccgaggacagcccccggcgcgaggaactctgggacttgtagttcgctttcccagacagcgcttttccccacttggtctccccgcctttcaatgtcgcttttattcttccctttacctcccagcccgccgacttcctggtcgtcgcacgtcctcacgtatgactacactacccagaagtctcctcttcacgtcccagcgcgggtgggcgccggcggctcctcttaaccacaggttccagaagtcctctgcagaagtgcttccctctctcatttccaggaccacaattcccagagacttcggcttcacgacgtttctctttttgcccgatctctcccggagctggctgggcttcggccggccagaggcccacagcgacgacgtgatccgtcgtgagcgggtcccagggtttcctcggcggcccttttttctctcccctcggtcgtcccccttgcaggctgtcgcggctggcctgagcggtgacctggcgggtcgcgcctgcgctctgccctgtttcctgcctggctggtggcggcggccattttgttcatcctcctcctcctcctgctcctcctggttggagcgcagtgtccggagcgggctggggggagagagcccgagagcagggttcggtgccttttcctctgtccccagccggtgcccagagcccccctccccttcctccccaccccctcccctccccaaccctgccctcccccttgtcccgggatcgctccgtcgcacccaccatgatggaagacgacgggcagccccggactctgtgagtacccgagacgaggggtgccaggcgccaagaggcccgggcaccgcgggacgctaagggagggagcaggagagactgggccgaagccgggactctaggcggctccctgaccagggcggcgtggacgcgaagtgcattcctcatctgtccccttttccttgggaaggaaatcctcccttcccccaaacagtcacttcctggggtctggggcttgtctcgacctttttctctggcgtccttctttgcatgccctccctaggccgggtttctgcacggctgaggctgtcaggcccaggagaactcctgcaccccctccgcgttggacgccctgggctgggcctggagctgccggcgcccacgggggaagggcctggcgggggtaggattgggggtgggcccgggggtgggccccgcgggccctgaggaattagcactcaccccttccacgtcctcagctcgagtcgctcccagctcttctccccagctaagctctcggaggaagcaggacactcttt

SEQ ID NO: 63198 - DNA, 2135 bp, Homo sapiens
ttagttgtatatttattcttgaaaattagtacaagaggctgtaattagctgggatgggcacagttacatatacctttttgtgtgtctgttccacccatttttgggtgaaactgacactcatttcaaaccacctttcttaggagtctgcgtggatgtacatgatctttagtgtggtttacaactattattttgaagccttcttcctgtagacatagggatagtggtatctgttggcagcctttgttgtgagtgaagatcaagtttgaacataaacattcccagcactttgttctcagcatgaaacttacccagcaagttgagatcttcctgtacccacctggtgcatgggttaggctgtgatttcataaaccttattaaaagaaaaaaagcaggtttagttaccattattcttgtcagcaaatacaaagaactactaaatcagaagtctgatgctgggaagatttatttgaaaatttcacggtcaaaattttaaagttgaaatgtccttgaagatctcttatgttaggcttctttattttctgaaacccagagagttcaggtgtgactttgaaggtcatccagctagtaccaacaacagggagagaactagtgtcaggaaagtcctaataagaggcagtgtgtctcttcagaagttggaagtgagtgttttgggaaactgaggcatgcaggctagaatacttgattatttttgtgccctcctggccaccaagttattgggtcactgacctctgtgctgaggttgcttggattttgatgatgggactgatgaactcaagaaaagagttccctttaccaagtgaatgacttgagacttgtcagcatggcaccaaaacttaaggagaaaactaacattcagcccatgagctgtttgtgcttcattgctttcaatcctgtgctttgacacacacaatatcaggttgcacttgtgtgagttacaccttactggagactaaatgtagtggaaaatccttgaatatcattttgtatttgaaattggcttctcaatgcataatgagaaaaaggcccttgcagaaaacaaagggcgattttggaggagctgagctgaggcccgtctgagcatcatcatcttcaagaggaaatgctgtcaatcagtaaaaagctgttcattgagcatgaggagctcaagagacgacctctcttttgggggaggactcagcttcaggatgtttaaaatttaatcacgttagtaagaaaatggaaagaaaagactagacctttgtattttatttcgtcttctactgccgtcttgcagttgatcttccgccttctcctgaagtagttaggacaactccctgttttcacagaggggcagagcgaaagcaagtatcttctgtcattgctgaagcaggacggctcccggcaaagatgctgggcttcatccagccccattctaagcagctgggcctccccacctgcagtcttcctggattttgattttctgcacacttgggcttcccactaatttggcaagttcataccagtccaggccctttcctggcagaggatggcattcagtgctggtgcagccactcctccaggctcctccctgaataaacagaggccggatgttctggagtgctgttcccgccaggcctccttgggatgagagggagaccttcctccctcatggagcagggccgctctagctccatggatcttgggggttaccagtctggcactctccagggagtcctgttaagaacacagattgtggctgtgtctcatcgcctccctgccccaaccccatgttcaaatctgaattgctcagtgtagggcccagaaaactattaagtccagaaagcttttttggtggttctgattctgctgcactggcagtgggagccacggatggccagtgatcccattttggggaggaggagctgcggcttagtgcctcctgaacatctatcctgcagagcattttcccaagcctccattttccttcttggggaaactccccaggtacgcgggcttctggaggtgtgaatatggggatgacatgggaagcgagccgagacagcaccttgcaaagtctggcagggtggctggcagtgcgagagtggggaggtggtccagagatcttcctggacccc

SEQ ID NO: 63199 - DNA, 2272 bp, Homo sapiens
cttccttctttgagacaggatctcgctctgtcactcaggctggagtgcaatgacataatcgtggctcactacagccttgaattcctgggctcaagcgattcttccgcctcagccttctgagtagctgggactacgagtgcaagctcccacacctggctaatttttaaagattttttgtagggttggggtcttactatattgcccaggttagctattttcatttttgaaaattttattgggtttcttttcattgccattaagaataccatctacagagaaattcagtgagaggtaatagacaaatagcctggggtgatcaatggaagcctgactaatgattgggttacatacatgattaataccatgtttttattttgtaacagccattgattgactttgaaaatcttttatactattaaactttttttaaaaagccatttctcagttttctttctaatctgtactagctacaaacaatttctgtgactttcagtcagttattaaaaatatatttttgtgtccttttttcagcagcccatgacccatcgagaaactgcacctgtttcccagcctgaaaacaaaccagaaagtaagccaggcccagttggaccagaactccctcctggacacatcccaattcaagtgatccgcaaagaggtggattctaaacctgtttcccagaagcccccacctccctctgagaaggtagaggtgaaagttccccctgctccagttccttgtcctcctcccagccctggcccttctgctgtcccctcttcccccaagagtgtggctacagaagagagggcagcccccagcactgcccctgcagaagctacacctccaaaaccaggagaagccgaggctcccccaaaacatccaggagtgctgaaagtggaagccatcctggagaaggtacaggggctggagcaggctgtagacaactttgaaggcaagaagactgacaaaaagtacctgatgatcgaagagtatttgaccaaagagctgctggccctggattcagtggaccccgagggacgagccgatgtgcgtcaggccaggagagacggtgtcaggaaggttcagaccatcttggaaaaacttgaacagaaagccattgatgtcccaggtcaagtccaggtctatgaactccagcccagcaaccttgaagcagatcagccactgcaggcaatcatggagatgggtgccgtggcagcagacaagggcaagaaaaatgctggaaatgcagaagatccccacacagaaacccagcagccagaagccacagcagcagcgacttcaaaccccagcagcatgacagacacccctggtaacccagcagcaccgtagcctctgccctgtaaaaatcagactcggaaccgatgtgtgctttagggaattttaagttgcatgcatttcagagactttaagtcagttggtttttattagctgcttggtatgcagtaacttgggtggaggcaaaacactaataaaagggctaaaaaggaaaatgatgcttttcttctatattcttactctgtacaaataaagaagttgcttgttgtttgagaagtttaaccccgttgcttgttgttctgcagccctgtctacttgggcacccccaccacctgttagctgtggttgtgcactgtcttttgtagctctggactggaggggtagatggggagtcaattacccatcacataaatatgaaacatttatcagaaatgttgccattttaatgagatgattttcttcatctcataattaaaatacctgactttagagagagtaaaatgtgccaggagccataggaatatctgtatgttggatgactttaatgctacattttaaaaaaagaaaataaagtaataatataactcaaaatggtttttgtggtttctaaatctttgaaagcagtggcatcatggagattgtctgtccctggtttcagtcagaataaatgacaggtgcatttaacaagcctgctttgggttttgtgacgtctccaatagcccggctcaagagagaattgtcttggtcacctttcagtctcagattgcaacaggaacctgggaagactcagggctgtgaactccggtaatgggaacatgcctgctgcatccgttcggaccgacccagccaacagccaaggtgccagttaggtagcatgtctgcccacctgtcctcaggcctcaccaagaagctgagattgtccaaaagtgcccagagggcctggcgcaatggctcacacctgttatcccagcacttt

SEQ ID NO: 63200 - DNA, 1067 bp, Homo sapiens
tttgagatttttgtgtgacttgatgttgtgcgacacaaaatgtattgtgggtccatgtttgggtgtcatgtaagctgttcggagaggcttaagtctgcaattagcttgctttaggaaaatgtgtgtgcagtcgtggtttaaacagagcagtccctgccctcagagcgctgacagtccagtttcttgtaagatggggctgggtggcacctgccccttttggcttgctaatcctttcctcatatcactcagagattcttccactttagggaaagcgagaggatagagttctttaaggaaggagccagagcttttcagacttacttgtaattcttatgtgcagtctagacagaaggattacatgatatgaattgaaaaggataaaaggttcagatgagcttttcagatcacagcgtggtatcacttataggatggtttttaaggacaggccctttaacatattatttccaatccccacagcaaccttacaggacacgtgtgggatcctctttttcaggtgaggagaaaggagtgagaggttattagtaactcgttcggggtcacagcctagagttgagacactgacacagggcagttctgtgacctccagaacacttttgggcaggccccactgctttcttaggaaggcctactagttgctttgccagagcagtgaaggataacttatttttttcctcaggctctgtctatattttcttgctattacgttgtatttcctcttttcagaatggaggataaactccttggcccagataaagttcttgatgatctcgggatagagttattatggataggctaattttggccagtcttctgtcattctcttctctgatttgaccatttgtctggctttctccccttccctcctttcactcccccaaatttgggtaaggcttcagtacagcttgaagtaaagcagatttcaaaattcctaggttgtcaaaagagtcaactccttggattctaaaagcttagactattagaactggatgggacttaagatcgtctccaactcatctgacaacaaacttttctacaccccagtttct

SEQ ID NO: 63201 - DNA, 1098 bp, Homo sapiens
atagatacaggggagatctttgagcagatgcattgacatgtgtactcattgggaactatttcctccagtggtgagcaacctgaagcctttctcagtgtagcttttcaagagtcctagatccaatttcatagacatcctttcagagcatgcacagcagaggtgaaatggaggagaagcgtgtagggcaaaactaccttcttcaaagaagggagaaactttgtagaatcactggttcctagacgcttgtgttttggccaggccctggccagcaaaggctagccaaaggcatgctttggaggagaggtagtatcaagtttttttagagtagaccgtgaaggtgccagaaactaaggtgcactgacagcttggtctatggggaacctggctgcattggttcaggtccccacttgtcccacttgcctggcctaaacacacccctggcacggagaaagaggatgagactcactgctggatccctagcacctggcccataacaggttttttgtgaaagttgtactgaatgaattgaaataattctagtccctggtctaccttctatagtttaagcagcaaaggggttgtagggacgtttaaagggagaatataagaacaaaagactagaacacactgcctctcttgccacctaaaaaagtcatgcaaatttctcactgtcattttattcagtgaagcaggaatctcactcttaagcctgtggaattcattaaatttgttttctttctgaataaaaataaatgggacccatagacatctttgtttttttccaaaccggcccttgtgcagagaaggttgttgttgctaattttagtccttgtgatgtatggtggaatttattcatgtatttgcagataatactggactactggaaaatcaaactagtttgatcaaactagtttggggtatatcccaacacattgccaacacatgtttcttgggtgatgcattatgaatgcattatccaaggatttatctaatctttgtttgaggtggttgttactttcaggttcttagggtaatgagtttggaaagttgtaatttaagctgtacttcctttttcattcccaaaccatgacttttctt

SEQ ID NO: 63202 - DNA, 1050 bp, Homo sapiens
tagaattctggggcatatctaggcattaagatatttgcgtgaagcatttattactctgagaaggctttcaggaattatggtcctaccatgaggtttaataattgaaaaatgtattgaagttgggttttttctttcatacttttttctttttttttgagacggagtttcactctttcgcccaggctggagtgcagtggtgccatcttggctcactgcaacctccgccttctggtttcaagtgattctcctgcctcagccttccgagtagctgggattacaggcacctgccaccacacccagctaatttttgtgtttttagtagagacagggtttcaccatgttggccaggctggtctcaaactcctgacctcatcatcctcctgcctcggcctcccaaagtgctgggattacaggcgcgagccactgtgcccggccccatacttttttctttgaagccatatgaagacccttaaattatggagaggttactgaatggtaggagcctggagttttaaatacatacacatttctcaacttgatgtgaaagttactaacatttattatgtgacggatgctgggcacttttcacataatcctcatgaaaacctgggactacaggtgtccggctaagttagatggaattctgtttacgaaggaggaaactgaagctgagaggggttcagagactgtagtagagctaggattcttcacccaggacaccaaatgcagactacatctatagcacatccaagtagctgaattctgtccagctttccagttctacagtcagccccaggtcacccttgcacattctttcctgtcacctggctctctggcttcaggccccttcatgttcatcctctacagatttgtcctgtgttctatctcaaatccaaatctgccctgctggaggaagcggctcctgaatttactacctgttgtcccgctgagtgggttcctgtttagttcttcagcctcattcttcctgctccctgtcttattctgcatggccagcagtaccaaactatttggagtcttctttgccttcag

SEQ ID NO: 63203 - DNA, 2033 bp, Homo sapiens
tttttttgccttccattgaatgtatcataacaaagacattcaagatgcaatagtcaaaactcaaatgaatttggaggctaaactattaagtgtataattactctgtgagttacagattgagtgtaagtttcactaaaataaattgtaaatgataataatgaaaatgtaattttaattttctgccaagacaaatattgttttcattcttgataatcttcacctgtcgaactaccacaaatgttacgtttattaccacgtatataaccttttgcaatctgggccacacaagagaataaaccctgtccttaggcatccgttgcatgtaatgaatttgcttctctcttgtgtgtctagaatggaaccagcttgtgtcatctaatttctcatatggaagaagtgagaaaactgtcacccaaaacaaatcactgttctgtggtttagatgaggaaccctgattgagatgcctggcacgtagaaggcactcaaacggaaacagttcctattgtatttgtcctggaagtcagataaaagagcagttgctttccggatttctttgtttggtataagcatcttcgggaaaatgtattttccagagtgtgatccagtaagtggacagctctgtggcaatttcttaggccctgtctttggatcctgtgctgtaggaccacacgcagctcctccgtttgtcctcttgtagtgtaatggccctgttcctccactgtagggcgccaaggtactgcttcctatctgggaagagttttctgaatgttactgctttccccttaactgtccgaagccttattgtatcccaagccttattcaggcctcacatttaatactttgtcacaaattgctttatggtaatgtattccatttggatattcatactgcttttttgggacattgattttttttcaatacactgctaaagatactgttttaatatattttctggtgaatgttttctcatcactgcttcctattttattttagctactgatctacttcttgcctggaatcccatttgtttggggttggtagaaggtgttattgggaaaattcaacttcattcaggtatgtttctataaactccttaaacttgtcaaatttattgtagcattttttggtgttttcctctttgaggatacatgagattctcttatagctttgattcctttgttttaattttgggtctgctcaaagtgggtgtataatgagcgaagacctgtttctactcttatggagcttacagtttaggaggaaagacaggtatcaaagagtaatcatggaaataaacgtatgattatttggaattgtggaaggtgccatgagggaaagatatagcaaatgcattgatctcaaaggagagtagtaggaataaagctggagaggcaggcaggtggcagaccatgactggttggctttatgtcagctgactgttcctgatgcagtcagctctgccagagacgagtatgggtctcttagcacacagtgtggtcctgtcagggatccctatccaggacaggcagattgatgggaagtccaggtcactcaccaggccctcacttggaatgacaggcacctgtgtcctcagtttaaagggaattttgttggtgggaaagtataacaggtattatacaggtgggtcccaaaaggctaactgaaaggggccaaatgaaattttattttttcttttttggtgccttacccttcagggagctttttaaaattagagatgggttcttgctacgttgcccagactggtctcaaactcctggcctccagcagttcccctgccctgggctcccaaagtcctgggattacaggcatgagccaccatgcctggcctaaatgaaatattttaagcactacatttaaataaatatttttcctttggtatcaattttgatgagttatgaattataggaggctttgccattatttctgtataattgtgagtatatatctttatagtgtgtcctttttatttaaaaataatattaagcatttgggagctagattgatttttgtgt

SEQ ID NO: 63204 - DNA, 1061 bp, Homo sapiens
gtctcctacaaataatgtacaaatgtaagtttgttaatggttgatgagtttacgatacagtcaaagtatggtcatttaggaggcggtgaaggtatggtcatctgtggtcagccccctttatatgtacttctcctccttgccattctttggtcccaaaataggtgattgataggcagtgagaatacctgtgatgtaggatattttgaaagaagggagaggtggagggtagagtgaactggagaaagaaagtataaaaaaggaaaaaagggcagggaaattctcttaatttttcattctcctaatccttggacattttttttccttcttcttgtcacgtcacttgaacggtttggctcttaagaaaaagagtcgggaggaagcaaagggaaacacttttctgggcccctgctgcttttccctccctcccaaccctctccatgtcactctgcccccagccccttgcctgtgagcacccaccttacttactctcctcatctgtcctcagggatgcctcctcctctcctctccctgcccccgattaaagctcttgccctgggtcagattggctagaagggaggtatgtgcctgctgtgtgtgagaaagaattgagaaaattacttcaggggcattttccccaggaacatcttatctttggaggataggggatgaggggaataaaatgtctatactgaaactctctcctgtttccctcctacttattctccacatattaatgcacaaatttttcttctcacctagggagatgggaacataaatttatttgaacagatgtcattgacagtcttaaagtggcgtgggtgagcaatgccgctgttcctgactgtcactgaactctgagctctgtggaatgagcaagtgctcgtgacttaggaactgtattagtttgctgtcatagcaaagtgccaccagctgggtggcttaaacaacagaatcatattttctcacaattctggaacacagaagtctgaaatcaaggtgttggctgggttggttcctcccgaagcctctgtcctaggcttgtacatggccaccatcccctt

SEQ ID NO: 63205 - DNA, 1022 bp, Homo sapiens
ctctcaactaaaaatacaaaaattagctgggtgtggtggcgggcacctgtaatcccacctacccgggaggttgaggcaggataatcgcttgaacccaggaggtagatgttgcagtgagccaagatcgcaccactgcactccagcctgggctacagagcaagactctgtcaaaaaaacaaaacaaaacaaaacaaaaaaatagaacaagtcactaaaagactacattgtgaaaatgtataaaaagtaatgtttttggtaacaacacattagtagcgttagtgaaagttattttgtaatccacacatttcttttaaaaaatatatgatagaagaatttcaaactatttctgtgcgtgttatcctttgttgatgattgcctgcccttttagcaagctctgccacaaaaaaaaaaaaaaaaaaaaaggttctatttgccctaatgcctagaaaatatctatttagaaccattagcctatttttgggttgcaagacctcttcctcagacatttgcaggcaggtggatttcagccagggtgtaatgtagtctgtcttccgacaactcaaacgtgtctgactttggtttgaccagttgagatttctttactttatttatttatttatttatttttgagacagagttttgttctgtcgcccaggctggagtgcagtggcacaatcttggcttactgcaacctcagcctcctgggttcaagcgattctcctgcctcagcctcctgagtagctgggattacaggcatgcgtcaccatgcctggcttatttttgtaattttagtggatttccccatgttggccagactggtctcgaactcctgacctcaggtgatcggcctgcctcagcctcccaaagtgctgggattacaggcatgagccaccatgcccgaccgagatttattaatatgaggaacagaaagtaggagggatgtgtaatgcatcaaataggtgaaagaaaagtatagatctgtgaaaaatcaacattaaaaaaattcattgtagtatccagga

SEQ ID NO: 63206 - DNA, 1055 bp, Homo sapiens
agccaaatctctgaggccattgctgtactaccagtatttgatagggggaagatacagaatatgatgagattattgcaagaagttcctttggtttgatgattatttttttccttttcttggtcatgtatgttggaaaattgactgtctaaagacaattcattcaatcaacaaatatttatggaaggcctgttatgtgccacttgtcttttagacattaaacaaagcaggcaaataggtgaataaagtcatatgttatcttttaacctttcagaaatttcacaccttttccttttggtttctcccctttagtggtggttagtatcaatgattttcacataatctagtggtgtcttcgctagatacccatcaattgcctctatggagaatgaggcctgagattattcttacctctgtttgcaatgctgatcaaactgtgaccaccaaaacccagtggtagaggagaaaagcaggggcatctgtaatgagcatttgtcctgtgtgctgacaatatcgagctctaacatgttttgccgagtttttgtcagaatgcttttacattaccatttaaaactgacgacttgaagtcgtcatattcaaaggtgacatttggcagcataaatttctctatgcctgtcaagagttttgcatttattgctagaacagaaatacaaataatgggaatggtgataagaatgcaggtagatcctttacctcactattttcaactttagccaccttcctaagatcctatctgcaggctgcataaaacaaaacaaaacaaaacaaaacaaaacaaaacaaaacaaaactgagataggacctggagtgtttggtgatggaagaagaggtggatttgaagtggatgctgagattaaggctgggtacacttacggagataagagagaaaggacaaagaagaactctctggagcatttttatcctttactgtctctgcagataataagttgagaaatctgtcttcttagtctgaaagagacagaagaagaaatctttattttatttatttgttttttttgacacagtatctctctgtc

SEQ ID NO: 63207 - DNA, 1059 bp, Homo sapiens
ggaacacaggtgaaggagcctgtgtctttttcttcctcctgtctcatgggcttccttgagtgcctcctattggcagatccagcaggccaagcagaaatgtggtgtgtaggctgggcgcagtggctcatgcctataatccaagcactttgggaggctgaggtgggtggatcacctgaggtcaggagtttgagaccagcctggccaaaatggcgagaccccctgtctactaaaatcccgtccctactagctgggcgtggtggccgtcatctgtaatccccgctactcgggaggctaaggcatgaaaatcacttgaacccaggaggcggaggttgtagtgagcccagatcgtgccactgcactctagcttgggagatagagtaagactctatcttcaaaataaaaataaaaataaaaaaataaaatacataaaataaccttgtgactgtactttgaggacacgaatctgtttatcttatgtacagtgtttaagcagccaggtttgagtttaagccctggctctaccacatacaaggttttgactctgtacaaagaacttaacctttccaaacctcagtctcataatttgtaaaatgtaggtgataacagtatcaattacatagtggtgttaggactagtgaatgtgaaaaaactgtgtaaaaaagctcttagaaccctagccttggcacagagttaacatttactaggcacttaactattctgccactattagtattgtttctgtgtgcttttttgatattcagtttcacttcataggcaaatttaaaacaaagacaaaatataatagtatgatcctgcacattaaaaattgtaccaaaacagtataaatatttcattatatttattcaacttgtagcaatttataaagccatctttcaagcactactttattaaaaatgagtctgaaaagaccatttctcttatttaagggtcctaaattgtatatgaatatgtttcctttttctgcagtacacattttttgctatggtttcctggcccatatacagttaatccaccaatgtgttcattttagctgaaaaa

SEQ ID NO: 63208 - DNA, 1048 bp, Homo sapiens
taagtcaccacttctctagggacttgctctgacatctttgttgtgaaaagcgcaagggaaacaaaacagtttaagttgtcactgggttgttctacaggtgctggtgatgtgcagcaaggtaaggaaactcctgcttttcctccctgtgtagagctgctcatctgcacacccaggctaaaagcccattgtgatcaactctagggaactagccacattttcccatgtcagaaacatcggtttttgaatattacaccagtttgagatgtaaataatttttattgttttggtgtttgtcatataatttgttttgacctgtaaattctagaaattctacaaattgccaagaatggctttaccctaaagcaccatctaactgtgaagacttgatgccacaaatagcatttgacaagcttagatcagggtagaatactagtagatattttaatttaactatactatttgaaaattatagaagtcagaccttggaaattataaaagcctgtagaattctagacttgaactgaaagcccacaatttattttgggggcattcttgtgtttaaataagatgtcaaaatcagtttttgtttgacagggtgactttacaaggacaggagaaaggaagttagcaggagttatgaaagatggagtgaactcagcaaacagatattacctcaaccgatttaaggatgcttataggcaagctgttataggtaagaagcagaaaagcttttctttcctcaaaatttatgtcttctgtgactaatattttacagaaaccagcttcattaacataattcatattttgtaatatacttgtgtttctgtattgagcatcttacccaatatatcaaattcaaatttttacaagattagaatttgacaaatatttttggctggagcaacaaaagaaaccatctattttccatgcatatttgtcagtttattactcaggtaatagaaagcagggtttgaagctcctggagtgtggaataaggtgccctaaaacctcaacaattaaaaacttcatattccgtttgttttctcat

SEQ ID NO: 63209 - DNA, 1031 bp, Homo sapiens
aaaaactaaatgtgtaatttactttgtagaggtaagaacacacaggaatgaactgacaaacagaacaaattatgaaaaacgctaatcccctaagcatctgcatgtccagcccttgtgtctactgtagtctacccaccccactccaaaaaaaggttcaggttatatcccaaagtgacctgttgctgaattactttcaaataagcaaagtgctctgtagtgtataagctactcaggtctacacattctagaatgatgcacttctgtagtcctggctgtaaaatttggaaatctactcaggttccgactccgtttaaaaccctttccaatgaacagaatttgtgatccctgggttcagacagtacaattaaaataccccaagaggtgaaaatttcatatttttaaataaaagccatggaaggattcttatggctaaaagctaaatctgaattatccgtgtctggcattgtataaacatctttttaagttcattttgctggacttgattaatgatttcaggttctggaggactcttctgaacttttgacactgcaaagtttatcccatgggttaatccagcttgggtaatactagcaacctggaccatggaacttcgaatcttggcaaagggagagactgctctgctgctactgctctctgaaggagaaggagttacatgaagccctgtctcaagttcaagcatgctggaagcggaggtgggggttttttgagatgcaactgaatgcgctggctcaactgacaaaaactgtgggcctgttgcagaaagagagacatctaattgcgatggccgagaaggtgtctgttctgttgattctgattgggtttcatttgaaacttgattggtcatttgatttctttcctgactagcctgctgagacacagatctggtctctgataggtgggtcactttgttctgtgcatcttgcacaaatctgtggcagtaaatatccataggcttggcaaagccagtcaatatgtgtacgtcgccagcagaaggacttttcttcaaagga

SEQ ID NO: 63210 - DNA, 1069 bp, Homo sapiens
ttgctgttttcaggaatgtaagaacacccatattggctactggaaattctagaagtcagtcaggttttaatttattccaggaggggcatcctcgacatcttatgtagatgatccacaacttcaaaatttagtctgggcctagtgcagtggctcacacctataatcccaacactttgggaggccaggagttttgagaccagcctgggaaacatctgtctctacaaaaaaatacaaaaattagctgggcatagtggtgcatgcctgtgtttctagctacgcaggaggattgcttgagcccatgagattgaggctgcagtgagctgtgatcgtgccactgacctccagcctgggggacagagcaagaccgtgtctcaaaaacaatttagtctgaaacacaattgtgctgaatctgtctgactataactctgaccacacagaaccagggctgcccctgtaatccccacagtaagaaagttgtatggcatattccaacaagtattggttcgtctggtgtctttagagctttactctgttgaagtgactgattctcaactgaacattatgtcgttactttgataagcattccacttttgttatttattagtgctatcttttttttttacgtgttaaatcttgtgattattaaaataaagtaccattgtaatttaaagtgacaaatgggtatgagaattccttgcataacagattaaagaatttgtaaacggcagatttgctataactgaacacttggtctagctgttgccagtatgttactcctttgaaatatactcatgatgtaaaaagggaaatggatcagaaactatactttaaatccaaacattcaaaactgaatgcttgcttctaccaacttttcttccgggtcctgaaaatattaagggttcccaacatgggagaaaatacaacccaacattaggtgataaaatacacgtttaaactctacagaaattagttcgaaagagatctttgaaaaatcattttaagaaggcaaagttccaaacagggttacacaggagtctactcagtttcctggccatacaggattaacgct

SEQ ID NO: 63211 - DNA, 1129 bp, Homo sapiens
atttaggagtaggacatgttaaaatgctgccaggctcaacattcttaccaataatcacctggttttcttgcataaatgctctctggattgctgcaagtatggttttatttctagtttttaaaaagctgattttgatcagtgttaacagtagagacagttttctgcggtcccttctctgccattttcactaacatcactcttcctttgtggaaaagcattgtttcctatgccagttgctgatttatatgtttgcttgaccttaaatgaatctgagtttcattattttattttcatcagcagcattatgtatgtatatgctttggtactttcacccatattgcctcctttgtctaagaggctgacatgcaccttactacatcagtcaaggaaccatgttaattttcttttccttacaaaaatgcacatcatttacatttactcttttgataaaggcagttgaagatgactttgtggaaatgcggaagaacgaccctcagagcatcactgctgatgatcttcaccagctgctcgtggtggctcggtaagtggcgcacgtccattattgctgtttcggtaagcttgtgtatatgtcttctgagttattcagcagtaactgaggcagaattctaaaaacggaaatgaacttttccttttaaaaacgctgtatgaaagggctcattgagggggaatcgagtttggctggtgatctcttcagtggaacaggcatgctgcttgttctctaagcttcaaagagtgagccactttccaattctgactcttcaacgatttctttttagaagcctaacttggctgttgacttgtgtgtaactaccatacggtcttgtctcctaacgtgctctgtgttttcacaaagtattcctaggtcttaaaaaaaatttaaaacttactatcccagctctagacttaaatttgtttctgtgtttcaaaccaggtgtctgtctctcagtgctggtcagacaacgctgtcaagagaacgatggctgagagcaaagcagctagagtctttaagaagaacgaggcttcagcagcaaaaatgtgtgaatggaaatgaactttaaagatgtaatacctatgaagagtaatgggcaaactgtagccacataattgt

SEQ ID NO: 63212 - DNA, 1061 bp, Homo sapiens
gtattgatagacctttttaattagctgctttttagaggttggctacatttttgtgtgcttactgataccattgaggaaacataagtaaccaagaaaaagctttcataattatttctgaggtagttataaagcatgtaaattaatattaaaaatagatgctcactggctgcggtggctcacgcctgtaatcctagcactttgggaggccaaggcaggtggattgcgtgagcccagaactttgaggccagcctggacaacatgacgaaacttgtctctacaaaaaatccaaaattagtcaggcatggtggcgtgcacctgtggtcccactactgaggaggctgaggtgggaggatcacttgagcctgggaagcaggttgcagtgagctgcaatcacaccactgcactccagcctgggtgacaggacaaaaccctgtctcacacacagaaaaaaaaacattattccctccccctaaataataagtggtattttctaattcccataggggctgacagagatgatgcatctttctttaaaaatgtagattaatttaggaactcagaaaatacagtgtactccttctcttttcaggcagactgccagattcacttacagccccagctaattccaccaaacatggaggagtacatgaacagccttctctcagcggtgctgccttccgtgctgaacaaattccgcatttatctaactcttttgagattcttggaatatagcatatctgatgaaataaccaaggtatgtctaggttaaaataaaggatttccctgtgttgaattgcagtatgcaaccaatttacatttaccataattactgataaggtaattttgttatttgttttctgtcatgtctttttttattcctctgttactccattattgtctttttgtttgaaataggtattttccagtgtcccattttaatcccttgaagtttcttaaagttattttcttagtagttgtctttgggggataaacttaacatgttagtataatcatctattagggattaatgccagtttgtttagttatttttaatttaaaaa

SEQ ID NO: 63213 - DNA, 1815 bp, Homo sapiens
ggattaataggagacaatggatgcttgtatctgcttctgccttcagtctattgtagtctcaggttttggttgaagtatatgaaggaaagctggcctcacacagatggaaaagtagatggtaaaggaaggatggtttcgatagcctttgcagataactgggtggtggtctttgatactagaccaaaactgtccacatgagattttcttaaagatagttaagtgtggaatctgaaatcctattcgtaaactttccatagtctgctatggtaaaattcattagtctcgcacattgaaaggatcttttatccatgcatgattttgacctgattgaccctgtaaaagggtttaagcaattccctgggggttctcgggaccacattttgagaattattgaaacagatcctttgccctcacagagtttaggtagaagaccaacaaataaattaatacatggtaggtcatttaagcacccctaagctccccgttttcttagaatcactgaggtaatacacaaaactcctctaaattttcgcaatatatcttacctcttccttgacagccttcccccaccataccctcttctccatccctgccacattgtttgaggctggagggatggaagaatggattggtgtataaggcagagcacagagggtgttgggaatggtggctcaagagctggaggaggagcatagatggttcgcttactcgttaaacactgagtgagaaggtgctcgcgtcctggaggcacctcctgagagctgcaggtccatccacagctcagtgtgctctgctccttgatttttctctgaaaagtttgttcaaaaatgtctatgataaatgaatacaattttaactcaaagaatatagaggaaaattaagcttttctctccctgtcttgaagagtaaaattaacattttctttttgctagctagcttgtgttaggtgaaagaggttaggttttggggtatttaatatttatatgtcagttatctaccatttgtttcattggttaaattaaaattgattttcaagaatattgaacaagacatttgagaataaagtagctcataaaatggatgaaattcaaatgtaagatctagatactatttttgcttctggagttcaagaaaccatatcactactcccttagaaatttataagatcactttttccatatgaaacacaatgtttaattccaagtacatattttcttaaaacagggaaacttaaattcttgttcactaaaaaatttctctttgcagtcttttcgtctgcagatgactatagagaacatgaaccatttgaaattcattccccacaaagactacacagccaatcgcttggtcagtgggctcctccagctgcccagcaatacttcccttgtaatcgatgagactctcctggaacaggggcagctggataccccaggtacgtacatagatgtttctcttccatttctgacttccttcgcactaaagccagatctaggaataacttttagaagagtatctatggacaaattcacatttaacaacgtaagataaaggcttggcatatgaatttgattaaagcatatgttataaactaattatatacaccaactatgttttgccatagtattctgaaagtagtacaatggaacagatatatatcttatataatatatcttatataatatatatcatatataatatataatgtctcatttaatatatatcatatattatatattttatatattatataatggagcaataatataaagggtagtattagtataatggagcagtaatataaagggtagtattaga

SEQ ID NO: 63214 - DNA, 1165 bp, Homo sapiens
gtccatcatgacagacaattttgaaaggtttttttttttttttaaattgtgaaaaatcttctggccattccaagttttgtgttaatccgatgttgcagtttatgaataaatgcaaagttaatcatcttgtttttgttttttccttttcttggtgtggtttaataggttttgagatagtgcacagttctagttttaactgtcagcctttgggaaaaggctttttttaattttaggaaaagccttttttttttgtagtactgtggtatattgaaaacagacattagtctggaagttaggcatcctgtgttttggtttttcacttatttgctaactagcagaatgactcttggtctcaatttataaaaatttataaaataaaggacttgctttaaggtctgtttcctgatctaaaattccaagatattggtacttcaagactaatatcttaagctttgtgtctgttctaacagtgtgatttcatgtggtctcttgttaggtttatgaagattgggattgtttcaaagtaaatgacattcttgagctatatggcatactgtctgtggatcctgtgctgagtatactgaataatgatgaaaggtgagtctgtgtgctctttttttggtctcctttatttttatataatttcaagttttcaggagagttacaggatggttttaaagaactcccttttccctttctcccagatgtaccagttgtaaacacttgcaccccatgtgttttgtcattcatttgtgctctctatgcacacatttttctgaaacacttgaaagtatgttgcagaaatcaagcccttttacccctaactgcttgtcaacatttcctaagagtactgactttctcatatataattagagtacaggtatcaaaactaggaaatttgccacaaatatacaatacactaatccacaatctatacttaatttcactaattgtcttaatcatgttctttcttacacgtctcccttctgcatcccccagtccagggttcagaagctcgctcattctctatttctactgagttcatactgtatttctgattccagttcagcaccacaggtgtcgttctgcttgttctcctttctgtattagtgtaactctcttaaacttgattcccatttttcacaatcttatcatttgcacattt

SEQ ID NO: 63215 - DNA, 1073 bp, Homo sapiens
cctggtacatactggatattaataagtatttggtaaattaatttattgctgtatggttttattctgcttaattaatagaaaaagtatgttctaccaaggagttttgctgtcggtagaccatgtattccttaaatcaaagatgtcaaagtaaccatattgcaaatcaacttttgaaactggttatacatgagatttgatgggaggaatttgttgatatcttacagtaagggaaaaaaaagtaaaatttttagatcttcatgtttatctttgtcctcttacagatcaaacaaaagactttgttagtatgtgctgtttccttaaaaactgtaacaacttgaactttgcaagctcagaagcatcacgtatatcaaacttgaaaggcacttatggaatgttctttttctccaggaggccttagaaatgactaagtgcaatgctatcctttgaatttagggagtgttggtggtcttcaatggtgtggagagccaaaacgtttagaaactgaagcttctactgggcaacagctgaactctctgaacttgtcttctccttttgatttgaattttccattgccaggagagaagggccctgcatgccttgtgaaggtaataaaacctttcgtagatccaacactgaaatgttatgtgtctcagaaagtagcttagtgtctgagcatttgcatttgttcccttgtgctgggctagctatagcaaatcactgcaaatttaatagcctaaagcagcaaaagtttatcatcttacaggctttaggtcagaaatccaacatggtctcactggggtaaactcgaggtgccagcagggctacattcctttctcggagcccctaagggagaatttccttggccttgtggctccttcttccatattcatagccagcaacattgcatttgtctgaccatttttttcatgttgacatctcatctgaccacaaccaagaaagtttccccaattttaagaatccgtgtgattacatggggcccagccagttaatcgaggataatcccccccatttcaaggttattaatttaatcacacctgcacattccttttgca

SEQ ID NO: 63216 - DNA, 1028 bp, Homo sapiens
gaggctgcagtgagctgaaattgtaccactgcactccaacctaggcaacagaacgagactgtctcaaaaaaaaaaaaaaagaaaaggaaaaaagagatgagttctcactgtgttgcccaggctactctcaacttcctgggctgagtggtcctcccacctgagcctcccaaagtgttggatttacagatgttagccactgcatccacctgggatttgttaggggtggtgtagaacagcccttgttgaacagtagatcatccttattcatgaggtctgctatttctgggtcttacccaaatgcctaggatgactagtagggtccattatagtattatactacttccagagtctccatttaactctctgccaactagcagctgttctctgctagtcctcagggagtcttgacttgtatatccacaatttagtgttttgtcagagatccaaatggaaccttcagggtcttttatccgtaactacttcctttctagtacttctctgcaaattccagttgcttcactagccctgaaccatgtgctctgtcttctccacccagtaagagagggcctctactgctctttgttgcagtttggagaacgtctccaggagagagctgggagaatttggagtttacctgctgtgtttctcctcattcaaggatcataaccttatgctccctgttgtccagtgactgaaaacagttgcttcacatattttgtccagttacattgttgtttacagcaaggatagcagcataaggttgatacctgttattctcatgaccagaactggaagtctagcctccttttatgaaaatgcattctattttaactgaattgccaaactagtaattttttataagtcatataattagcaaaactttaggatattcctcagtttatgatagtcttttcttaacttttcgtttaacgcctatgttaatgcaaaccaagctcgagtcagtccctcaacatcctacactcctagtcgccacaagaggagttatgaagatgatgacgatatggacc

SEQ ID NO: 63217 - DNA, 1077 bp, Homo sapiens
tgtttaatataatctttgcagtaaccttccaaattagggcaatttttctgtccagatctgcctactgaactagaatatttaatgagcaacaacttctgttgtgaattaacggactgatattggggtttgataaatcagtttcctaaggtttggataagccaagagttagactctaagaatataaaaaggcctagataacatcataaaagtaaggttctagatccacaaagcagagaactagacccagattataagtcactccagaggtcccatttttctggatttgagggaggaagtgtttgatgacagtatttgaagtgattttatatccattttcttttaaaaagtaatagtttggaattagttacttgttaattaatctgtaaaatatttgctgtggtgttataatgtgaaaatgtggttgctaattttaaaataaattttgggttttttaaagtaaatttttaaaaacactttttatgtatatcacagcctcaacaagaacttgatttaaactctccacgaaataccactttggaaagacagactttctattgtgttccggtgcctggggaatctacgtgggtaaaagaaatatcctttatctgaactttcttactgtgttgatggtttctaaaaacttagcctttaattattcttcctttgcaaagcttggctttattttaataaagtgtgtttcatttgttctaattgagaaaacccataaaacgggctaagtatttgtcactgagtaatgctaaaataacagtacattcctatagtgaaatactgttaaaatgattgaagtaattttttttttttttttttttttttgagatagggactcactgtcacccaggctggagtgcagtggcacaaacatggctcattgctgcttcaacctcctgggctcaagcagtcctcttgcctcagcctcccaagtagctgggaccacaagcgtgtgccaccatccctggcgaattttttgatttcttgtaggaacagggttcactttgttgcccaagctggtcttgaactcctgggctcaagtgatcctctcacctcagcctaccagag

SEQ ID NO: 63218 - DNA, 1990 bp, Homo sapiens
gcatacaggtgttctttccaacttttttgaatctggaattattcccaaatgaagttataaacaaaaaaacttaggctctttatttcaggatagttgtaaagataaaaaaactacataaaaatgtattgaaagaacagaatgctttacaagcagtgcttcatatgctgctgaatctaggtggccttgtagcacattctgtaggtgtccccagctacactgtgggtgctagagagcctgcaggaggtcagcatcctcctgatttgtaactgccccttcccctgctcagtacagcttcttgaatgtgtcttgtgcagtacttcagacacactgaagcataaaatacaccctatctaaaaattcattctatcatagtagctaattttagtttgttttttgctgactaaactattgtgtgactcacctgatcatagtcttttattatatattgcatgtacattagctttgaaaagtatatttctctttcagcccaaaatggagttaatcctgactgggagaagaaagtaattgagtattttaaggaaaagctgaaggaaaataatgctcctaagtgggtaagcttattgctattttcgagggagagggttggacagactatacagtttctcttagtagagtaactaagtaacccacatgtaatttaaaaatatgtaaattaatgtacttctgcttcaagtacatttgtattaaaagattttggtcttttgctaattaagtttaagcatgtaaatacttatacattatgcctctaggtggcagtaactgactgttacttcctgagacaaatctttagttgcaagagtgtcagttacctttgttttattaccttcattttaaaagaattggcatgtgctagttttaagagaagagctcaacaaagtaaatgcctttttgatcattgaaaagtgttctgaatgaaaagcattttttagcattcttttacattgtggtcaaatgttatctaaaacttgaaagaaatggaagagaacttgggttccagcaattatattgaccattgagatcatttggctctctgatgtggcatgggtgtgtgtgtgtgtgtgtgtgtgtgtgtgtaacagtttgagtctggatataaagtttgtgtatatatgcttaatgttgtatagacaggatatttagttgactgacttgattattttcctttaaggtaccatcactgaacgaagttccccttcattatttgaaacctaatagttttgtgaaatttcgttgcatgattcaggatatgtttgaccctgagttttacatgggagtttatgaaacggttaaccaaaacacaaaagcacatgtaagtattgctgttttcatgaatttgtggtattaattttgtccttttactgttggtggtagttttggttcagatatattgatataattctgtttttctatgtttggggtcataggttcttcattttggaaaatatagagatgtagcagagtgtggggtatgtatctttaatatatatgaaacatttttagtaagaattttttcctaaacagagaatttgtttagctaatcttaaatttatttatcttgtgtataagttacaagaaatcatgtgaaatgttttccttatttggttttatttaggagtttgatgtgacttttttttaatcctctaaagatcttttgaaggggaaatactgttaatgccaaaattaattcctctctccaatatctgtatataatatatgtaaaacaaagaaccctaggttgcaaaattaaatcctttttaattccttcaaagacaaagccaatggtaatctcactgtttctttcatagaaagctgtcagaatcagcctataatacagaaatttaatgaaatattcattcctaggtagctcggagatgagattcaaaagtcatatattattccctaggaaaggcatgttctctttcagatatacttagaaaactctaagaagtggaaaggacccaggagacat

SEQ ID NO: 63219 - DNA, 1064 bp, Homo sapiens
agaggggcagagcagactattttatcactagcattttagagaatttaaagcaataataaaatgaactaaaagttagttggtctgctttttattatcaccatgaatctaaacagacaatctgtgcccttattgtctgtacccagcttggacctcttctaccactctgtccttggtaggccactgaaaaaagttaatttatattaaggctataaaacccaagaacaggggaagtggttgggtattcgaagagactgagtggaatcaggaactggaaagctagcaggaatccaagcaactcagtatttcttctcttgggatacattaatctctgcacactttctctttctctactccatgtctcccaaatttacttgttctcggttccaacccacgctagctagcatctttattttcaggcatagaaaatctgattggcacaacatggagtcaggaatccattcactcagggatcagtcatctgtggccatggcacagagttaggtaggacaatcgtgactgttatccacacctcaacattgggggcgttctcaaagaagaagaatagctccggcagccatggcagatggcatacgtaggagtttttaagttataataacttacacatggttttaaaaaaaatcaacatgatggtatgaactgagtgaaagtacgtgctccctccattgaagtaaccactttttttttttttttttttttttttttttgagatggagtctcgctctgtcgcccaggctggagggcagtggtgcgatttcggctcactgcaacctctccctcccaggttcaagcgattctcatgcctcagcctcttgagtagctgggactacaggcgaccaccaccacacctggctaatttttgcatttttagtagagtcggggcttcaccgtgttggccaggatggtctcgacctcctctgccctcgtgatccaccaccctcggcctcccaaagtgctgggattagaggcatgagccaccgtgccctgcctgaagtaaccgcttttaactgtttttgcttttagaggtttttttctttgagacagag

SEQ ID NO: 63220 - DNA, 1785 bp, Homo sapiens
taggagattgttgtgatacagtacaatatcttctaggttacagtaagatatcttataagatggactgtgcccctcttctagaagcctgtaatatttgtgaagtagacatatacaatgcattccttatctttttttttttttttttttttttgagacggagtcttgctctgtcgcccaggctggaatgcagtggcgcgatctcggctcactgcagcctccaccttccaggttcaagtgattctcctgcctcagcctcccgagtagctgggactacaggcgtctgccaccatgcctggctaatttttgtatttgtagtagagacagggttccaccatgttggccaggatggtctcaatctcctgacctcaagtgatccgcctgccctggcctcccaaagtgctgggattacaggtttaaccccccacccattcctcatctttcaagacaatacatcacttcttccaagaagctgtttcttgttctcttaggcccccactcctatgtgcactcctagctcttttttcatatttgtattattgtccagggagattgctttttgatgattatgtagcattgcccagagcatagtgtttaagagcacagactgtctgtattccagtccttgccctgccagtaacttgctgtgtgactgtaggcattttactttacctctctgtgcttcagtttctatgtatgtgtagcctcacagaattgtaattagaaatgctttaatttttgcaaagcgctaagtatagtgcgtgccagacagtgtgatttaatgtttgtgaaataaacacacctgcctctccatttggactgcagtcttcttcagcagctatgacctaattgcctttttatctccaggatcttatttagggcctagtacatagatcctctttggatgctgagtttccagtgaataatttattcttgtttgaaggatgaaagacagtttcatggagaagcgaagacaggcacactgggaacagctgtacatgaaggttcccctgcccatgtgttatgtttcttcttgatgcttgtcactacctgacatgtacacatatttgtttattccactgcactaggatgtaagaccatgaaagcaaaaacttacttttattcacgattatattcccactgcctagaatggtgtgtggtatttagtagaccaattattcagtagatgtttgttgaatgagtgaaaggatgggagtcaaaatgatgtctcattttgacctgtggttgaaaggttaggtgttgctgtctttggtgaagaaccagcatggttggagcagaatgctgtgggaggatgcaggaataaatagggctatacttggggttttctaattatcctctgcaccattaaagttgtttggttatgtccgtcttccttgctatgtagtgtttggtttgtgtgtgtcactgtgaattcatgctaaacgttttcattgttaagtctggtatagctacacctgtctttaatgcttttgtttcttggagacagtctgtgtgtgtgtgtgtgtgtgtgtgtgtgtgtgtgtgtgtgtgtgaatattaataattttagaactaaaattcatctctaaaaatctcagaaacccattcagagaatttccagagacaaaagaagaacctgtctccctggaagcaacagttaatcatataagtggaagagagacacaggaagcaatttcatacattcagcagacatggaaggcctggcacagtggctcacgcctgtaatcccagcactttgtggggctgaggcgggtggatcacctgagg

SEQ ID NO: 63221 - DNA, 1068 bp, Homo sapiens
tgccgtcccctccaggttccttcttcagtgcagtcaccggcacagcagcaggtacctgccagacctggggctccctctgttcaagtgccatctccttttctacttcaaaaccaatatgagcctgttcagccccactggttttactgcaaggaggtagaatacaaacaactgtggatgccttttagtgtgttcgactctttgaatcttgaagaaatctataattcaggtaaacattggtcatacatcattcatatctgattttaggaagagaaggaatgagatcatttattcatgatctattttctgtgaatgtcaaataccttaatccttatagaccccagactctgtaccttaaggtgacgatattagtataagtcctgagttacctgggtaaggtatttgaagaaatgttttagtaatttacttcgtagtttaaaggtattttgaatcagagaagttgagcagttcatataatccaggtttcaatttttctgtttcccttgttcatttgtagttatgggggcatttataaagggcattctgtggaactctctatcctggagatgctctgtgaaaaaagggttccctggtcagatgagttttggaaatgctgctctctgtatctaggtcttgagagagatggtgtgcaggagtacattaatgctttgagaagtcctgcagtgtagaaatgtgtttctttgtttatcctgatatattattatatcactgtattattgtatgtagatattattgttctgataaaaaaaatccatcagttctttgaattatgtttttaaagtttgccctagctgtttcttttctacttaagagtcataattttgagcagcacagattaatcttaaacttctattttgaaataaaaatgagcctagttttttgtctttaaagattgagtagtcaccgtattcattatttattatttcatttttattttcttgagacagagtctcactctgctgcccaggctggagagcagtagcgcaatctggactcactgcaacctctgcttcttgggttcaaactactatgcctcagcctcccaagtag

SEQ ID NO: 63222 - DNA, 1055 bp, Homo sapiens
ataacagccccacctactgtcagacaattgtggaaaaagtaggaatggagataaaccatctgcatgcactctttatgagtcggaacccagacttcaaaggaggtgtctctgttgctggtcacagtttaggtaaaactgtcaaatattcacattttaaatacaatttttgttgagtcataactgctttcagtgtaggtgatattgttagtgcaaaattaagaattacagattttaagtttcagaaaaggtagaaatgaatgctctgagtttagattctgccttttctatattcacctctagtattacctagggaatgctatgtattttactttattctgctgtttgataaaataattaattatcaggtcttgaataacatgtaacttctgtatgacttttgactatagacagtgaaaaaagaattagtgttataaaagtacctactacattataaggcaaaatgtttctttttcataggttctttaatattgtttgacatcctgtctaatcaaaaagatttgaatttatcaaagtgccctggacctcttgctgttgctaatggagttgtgaagcagctacattttcaggaaaagcaggtacgtctgtacgtggccaattaacatttcgatttagagtctatggagctgaacaattttcaaaagtctgaactgtttcttgaaacttttgtttgtttgtttgtttgtttgtttgttttaactgagcctcattggttgcttgggctagtcttgagttccctcctggcctcaagcgatcctcctgccttggcttcccaaagtgctggcatcaataactcttcagagaatccccaaattcagagtacagttataggcccaaatataatagcttccgtgtccagccctgaaactggttttacatattaaagtacaccgaggtttagaaatggaatggaatcatatagctcattatttgagtttctcactcttcttctttatgggttataaatttaaatgtgaaagtttgtgatttttaaaaatgtaaattataggaaatggagacttgagtgatttattaaa

SEQ ID NO: 63223 - DNA, 1032 bp, Homo sapiens
cttttcagaatattcaatttttttttttttttgaggcggagtttcacttttgtcacccaggttagagtgcaatggtgtgatctcggctcactgcaacctccgcctttcggtttcaagcgattctcctgcctcagcctcccgagtagttgggattacaggcgcctgccaccaagctgagctaatttttgtgtttttagtagagacagggtttcatcatgttggccaggctggtcttcaactcctgacctcaggtgatgcacctgcctcagcctcccaaagtgctgggattacaggcgtgagccactgggcctggccagaatattcaaactttgaatggcaaagtactgtgcctaaaattatgatttctgtgtaaagcaaaattgtttgagagttttcgtagatcagcagtcattatatgggagtttttctgagcttgtaatgtttttcatacttttttttttaaagatgcctgaagagccaaagctgactttggatgagtcgtatgaccttgttgttgaaaataaagaagtcctaactttgcaagaaactctggaagcacttagcctctctgaatattttagcacttttgaaaaggaaaagattgatatggagtccctggtactgatcatagtttgcttcattttgtttgaaattgtttttcttgtgtagattgaaaattaagaataaacattttcgtatcaaaatacactccagagtagacaaagactgaaatgttttaaaaaattgaaaaacacagaagaatatttttttataatctgaaaggcttttctgagtatgatgcaaaatccagaagccatcaaagaaaaaaattgtataacagtagacaccataaacaacatctaaaggccagtgatacatttgcaacacacattatagacagagggcttacttcattgattttcaaagcttctacaaatcagttacagaaagaccatcacatcagtgtgatatgtaaataggcaaagaatataaacatgatttacagaaaaggaaataacaaatggtgtcttc

SEQ ID NO: 63224 - DNA, 1033 bp, Homo sapiens
cctcctgagtagctgggaccacaggtgtgcactaccaggcctggctaattttttcttttttctagagatggaggtctcactatgttgcccaggttggtcttgaactcctggtctcgagctatccttccaccttggtctcccaaagtgctgagattactggggtgagccactgtgcctgacctggacatttttttaaattagctgaagcaaaagctgcagagaataaaaaggcattttttaaagtaatcacaatgttgttactattcctaagaagtagctaatcattccttaatactgagatagcatgttttgtaatgatagctgagagctgaactttttctcatgattatgttactaaattttggtattttacagaaaaaagcagcgtcagaaaagaaggcagtggcggccacttctacaaaaggacaagagcaaagtgcccagaagactaaagacatggcttccctcccctcagaatccaatgagccaaagaggaaacttccagttggtgcttgcgtgtcttctgtgtgtgtgaattatgaatcttttgaagttggcgccggacaggtgagtttacatattgactggggctacatagttcatgttggaatcataatctttatcatttgggttggctttaagttctttaaatatttatttaacatttatttgtgatgtggaaaaaactgattttctcttagtgaaaatttttttcttcttcaacagtgctcacaataagggattaaatgcatacagaacgtgttgtctaacttttgaaattgtctctatttcagttttcccaccgctcatacttttatagcatcagtctcttatagccactaacaacagaagtggccatagttaagaaattatgttcagaatatacttcagtttctgtgagagcaacttggctgtattcactcaacttatgtttcctagtactcataattcttcccttggggaaaaagtcttataaaaattgaccaatgctgcatttaatgatatactttaacatacttgtatcacagtggct

SEQ ID NO: 63225 - DNA, 1002 bp, Homo sapiens
ctttaaaggaaaatctgttaagataaactgtactgtcaatagcattacttcaaaatccatgccatctttttttagtgggtttttatctgatagttactgaactttttcctctgcaatttaaaaattatattgagattcttaaggccagagtggaatatccgagttgagaactcaatttgttttagggtttgcattttaaagactcaatctgagaggttttcttcctgaaactgttgtttaactatgttacagacttgacatgcaatgtgaaggtcatcgtgctgtgatgtttttgacttcttcagattctaatcctgtttcctttctttctacaatgctttctcaccccttatcttcacaacttctctcagcttgttggctcttttctcctctctctcgggtaaccagcccctcttcccctggctctttggaggaacggggagtgagcctggtagctcctcaggttgctacatgcgtcaagcagtattctcattgagcccagaaagtcagctaaagtcaaaggataaagattaagtgattgactttgatattgaaatggtttaaattctagcagaaaaggttgttgaaagtccagatttttccaaggatgaggactacttaggaaaggttggaatgttaaatggaggccgccgaattgactacgttctccaagaaaaaccaatagagagttttaatgaataccttttcgctcttcagagtcacttatgctattggtaagtgttcttaaatttggtaacatttgagtgggcttttggtgctagcacgtgcagcaattttagttttagtgagattcttttactgatacaatgtactatgaatattcatttgaattactatatgttcagaatcgttatttttcccccttagttacccacaagatggcagtatgtcatctgcttttgaccaaagacccttggttcttgcacactgtttttgtgggaatgcctttcacagtgggagtggtagggactttgaaatgcc

SEQ ID NO: 63226 - DNA, 1025 bp, Homo sapiens
tttgagatggagtctcaccctgtccccaaggctggagtgcagtggcgtcatcttggctcactgcaagctccgcctcccgtgttcacaccattctcctgcctcagcctccagagtagctgggattacaggcacccgccaccatgcccagctaattttttgtattttcagtagagatggggtttcaccatgttagtcaggatggtctcgatttcctgaccttgtgatctgcccacctcggcctcccaaagtgctgagattacaggcgtgagacaccgtgcctggccgattgtctgttcttttacttcagaaaagacaacgatgcatggtatttgactgtaaatttgtaaagttcactgaggttttttttttttttcctttttaagactttcttgtctgcacagaaagtcccagtacaacttccattgctgagaaaatcctcagaggactttcccacttcgctcctgtgatggatgacagaagagtgattcattaacaattgctcagccacaattctcggatatagggattcaaaagacaggacacagaactaacacagtgaaaaaaatcagtaccacatttggacagtataggtgagaaaacataattataaaaatgatgccatgaaaaattccacagatcagtttagttgtatagttgtcaaagttatatgtgatatcaatgaagaaatatttgtagcatgtaaacggttatttctgtttcttaaaaagtattgttagtgggctattaaacttggatttttctttttattaatgcagtatgttctttttattcaagtatgaacttgttgagaaactatagtaatatgatttttaagagatttatgttctacttaaaatgtgaattgtacttctgagctgccttaatgcaaggtcatttatatttgttaagaggaaataatcaagatcactcatatcccaactgaatctgaggttttataaatccctcaaacgattgctgagagcctgattgtggaaagaagtgagatgcaccttattttcaagaag

SEQ ID NO: 63227 - DNA, 1469 bp, Homo sapiens
tgtaattcagagcgatttaattagctttaataatagcatccatgcttagtccttctgaagattcattgcaacatgagggcataaattggcaaatgtctacagtagggaatgcctggttataactctcacctctggactctcataaattcaaaacagcagtatcagtctcttccatcttcagttttcaatggatttttctctctcaactttccaggtgacgaatgacaccttctttggtctatctaatactcaacctactgatattgttgcagaaacaaacttccctggtttatccaaagcatatttctctgctttgaactgatatttatgtaggcccttttcatgtgaataaaaagtttgctagaacagacataatctaaatccatgtttacctgtgatttgccttgaagaaagccaaatggtttgtctgcctcagctcaagaatgaactttccctttcggccggaaccgccatcttccagtaattcgccaaaatgacgaacacaaagggaaagaggagaggcacccgatatatgttctctaggccttttagaaaacatggagttgttcctttggccacatatatgcgaatctataagaaaggtgatattgtagacatcaagggaatgggtactgttcaaaaaggaatgccccacaagtgttaccatggcaaaactggaagagtctacaatgttacccagcatgctgttggcattgttgtaaacaaacaagttaagggcaagattcttgccaagagaattaatgtgcgtattgagcacattaagcactctaagagccgagatagcttcctgaaacgtgtgaaggaaaatgatcagaaaaagaaagaagccaaagagaaaggtacctgggttcaactaaagcgccagcctgctccacccagagaagcacactttgtgagaaccaatgggaaggagcctgagctgctggaacctattccctatgaattcatggcataataggtgttaaaaaaaaaaataaaggacctctgggctacaaaaaaaaaaaaaaaaaaagaatgaactttcaactcttttcgcttgggaagaaaatgttccagatcattggatcatttttgtttgtttgtttgtttaataatttggagttatttttattcaatgatttctacttaatctggaaaataatgaaagcttttgtaatgagacaatatttagaaagattaaccagtttatatatttgtcaatggttttaagaaaacaattggaaggtgaatttaaaaatagaatgactccacagatgcttgcaatcctctccagcatttcttcttgcctgaattttggggaaaacaaaaagccattttaactggggtaagatgatacctcgttgtagttttgatttgcatttctctgatgatctatgatattgagcacgttttcatatacctgtttgtcatttgtatgtcttcttttgagaagtgcttatacagatctt

SEQ ID NO: 63228 - DNA, 1294 bp, Homo sapiens
atgacaaacaggtatatgaaaacgtgctcaatatcatagatcatcagagaaatgcaaatcaaaactacaacgaggtatcatcttaccccagttaaaatggctttttgttttccccaaaattcaggcaagaagaaatgctggagaggattgcaagcatctgtggagtcattctatttttaaattcaccttccaattgttttcttaaaaccattgacaaatatataaactggttaatctttctaaatattgtctcattacaaaagctttcattattttccagattaagtagaaatcattgaataaaaataactccaaattattaaacaaacaaacaaacaaaaatgatccaatgatctggaacattttcttcccaagcgaaaagagttgaaagttcattctttttttttttttttttttgtagcccagaggtcctttatttttttttttaacacctattatgccatgaattcatagggaataggttccagcagctcaggctccttcccattggttctcacaaagtgtgcttctctgggtggagcaggctggcgctttagttgaacccaggtacctttctctttggcttctttctttttctgatcattttccttcacacgtttcaggaagctatctcggctcttagagtgcttaatgtgctcaatacgcacattaattctcttggcaagaatcttgcccttaacttgtttgtttacaacaatgccaacagcatgctgggtaacattgtagactcttccagttttgccatggtaacacttgtggggcattcctttttgaacagtacccattcccttgatgtctacaatatcacctttcttatagattcgcatatatgtggccaaaggaacaactccatgttttctaaaaggcctagagaacatatatcgggtgcctctcctctttccctttgtgttcgtcattttggcgaattactggaagatggcggttccggccgaaagggaaagttcattcttgagctgaggcagacaaaccatttggctttcttcaaggcaaatcacaggtaaacatggatttagattatgtctgttctagcaaactttttattcacatgaaaagggcctacataaatatcagttcaaagcagagaaatatgctttggataaaccagggaagtttgtttctgcaacaatatcagtaggttgagtattagatagaccaaagaaggtgtcattcgtcacctggaaagttgagagagaaaaatccattgaaaactgaagatggaagagactgatactgctgttttgaatttatgaga

SEQ ID NO: 63229 - DNA, 1076 bp, Homo sapiens
aaacctgggaggtggaggttgcagtgagctgagatagtgccactgcactccagcctcggcaacagaataagactctgtctccaaaaaaaaaaaaaaaaaaaaatccctccactatcttcaagcttacatagtttctgatgaaaaatttttgtttttgtttctctgcattatatcttttttcctccgattatcttcaagatttccttaaccttggttttcaatagtttgattattaaaatatatatatatatggcttggagtttacctaaatggaattcaacatatacatatacaaatatatacacatatacaaacatatatatacacatagagacagtcaattcttgttatttgtggtagctatattctgtaaagttgttgtatacactgaattagtgaatactgaaactttgtttgctcctaggggttaggttcttgtgaggctctggtcacaacattttcatcaactgatcaatagataaccttgctttatatgtgtttccgtttaaagacatattaatatgtcagttgatctattaacattgaactcatagccaacaacacatgcctgagcaaagattatcacatatatatatatgtatgtattttttgcaagacacatcacaacttctcatacttagaaacggtaggcagtatgcttggggacctatttaaacagtgaagtcaccagcaaaaggaacaaaaatgtgaaaaatgtggtactaaataaatcatgagatgaacacttgttttgccattggaaaagctaaagcaagaattcttgtttgacttcagctgggaacacacatgtatgttcggtgacatttttttcaccattctgcacttgtccacaaaagcactgcaagtattgattttgaggttgcaaattatagtgagtaggtaaattgacaaatacagaatctataaataactagaatggactgtgtacacatatatacactatacatattctattcatacacattctatacctatgaacttaaacatatacacatacaaatatgcatacacacatacatatgcatatatacacatacctcatttaaaaatttttg

SEQ ID NO: 63230 - DNA, 1009 bp, Homo sapiens
tttaaaaattctattgttaatcatgttgctataggcatgaagcatttttttttttttagagaaaaacttaatgttttgtgaaagagagagacagctagagttttttgtttgactttgccttctcctgactttccctctgcaaggtttttgtgtttctaagttgtcttcttttagttaggagactagaatacagaaaaacattctgctaaatatgattttaggtattttgtcataaattagatcttaggaaaactgattttcaaggcatcctggggttttaacctaaatttcccaaaatattaaggctgtgaatcatttttcatcacaggatctttgtgatgtgtcaaagaaaacaattttgtaactgcagttaaagatatctaccaaagtaacacaaatgctgccttcaaaatgaaaaccagttttctgtttattcttgctaaatgtttatgtaatataaatgtagtatgggttctggttgatgttttgtgaaaattatgttctgtttcatccagcgcaagtatttacttgatctgatttcttcttgatacaggttaaatgggccagggaaaactatcaccataacattggctcaccatattgcttacggttagcttctgctgatgtcaatgggaagatcatcgtctgggatgtagcagcaggagtagctcagtgtgagatccaagagcatgccaagcctatccagggtgaggaaagtctgctcagctaagtgtgtatattgatacacttactcttggagtggttttttggttttgggggttttcccccattcatttaattttatcaattccaagttagctcttgattgtgttttgcctattctgctgatctaaatctggctttctgtccttactaatacacttctaggcatatttcttcaaatctcaactgatttgtgctttggtaaaactcattaattgcaatatcagcctcattcaagcatgataagaaaaagtaagtggtacaatcttgtaatctaagctacaat

SEQ ID NO: 63231 - DNA, 1814 bp, Homo sapiens
ccacctgtttctcttcaacttagagaacattcccattatgttatgaatgcataacattgccagttatatattattaaaattatcactatattgctctcaaaattgtattggaataaaactgtatgctaaacttcattaaactttaatcagagttttgcttttctcaatatagtgcttaccagcgagggtattgttttcatctcagacttctccccatccaagcctccctcaggccctgggaaaaaagtttacatatccagcccacactctagcccagctcataacaagctggccacagccacaggtgccaagaaagctctaaataaagtaaaaattttaatcactcaagagaaacctaggtaagttacaagtgtaaaattaacattcatctacttatctggtatgaaagcatcatttttggagatgtacaaagactgatgtttttcttcatctcactttttctcatttctaattttgaatttattagaggaaaaaaatatttatttttgtcccctgccctaagaggagattcagcatttaacattgcctttgtttccactagctgtgctaaacttccccactgacttttatagattaaaatttttgaattctgatttttacttgtgaaaatcgcaatgatcctaaagttcaggcaattgaatgcattaaaaatttgggcacaaaagctggatactcattttaaatacattttcctgacttaggtgctgtgcattctcattcagcagtaaaatcggagtgtttttcttatgcaggtgaagatgtctcccatcctggttaagagccaaggctccgggggaagctttagctatgagactgagaaacttctttaatcttactcaaatttctctctcccagtctctaaaataaggctttaaagtatttcatagggttgttttaaagatcaatagatccaataatgtaagtaaagcatgtaatgtcattgatacatagtaatttatttagaagatgtcggctgttattaagaaattacaactgaataaaagtttattttaagtaatttgatgtattcaaaataggtttctttctttttcctatagcaataatctgtatattattgctttggcaggcttttttgtttgttttggcattcattttcagatagcctttatttttaatatgccaagattactctctctaggcttggtgagtaactacttgaaaaatatgtggtaaaaatataaattgctctacaaatacattttgcacttgtgtgtaagtatcacttctatatattaagccataggctggttaagttcactagttaatttatctctcaccctgtgccaaaatgacttaagattacttcttaagtatcttaagagaactttctattttttatgtattccctctcataaacaagaaattatttggcagtctgaatagttttataagttatgttttatatttcttaagttttctctcatatgaattatatgtatatcttgagtattggggaaatacattatttcttcaagtagaaccgctctgggtgctttcacatctattaattcctggactcttactacaattctggcagtagtaatattcccattttacaaataaggaaaactgagtcccacaccaatttaaataaagttactcaagctcacccaactaggacatggcagtcgggattttaatgcaataaaaattcctctttctagtcttgtgaactaactttattttaaatttcaaagccttttaataaaattatgtttgtaaaatgaaatgtaaaatgaaaatagtacataattgtatgtctattcctattg

SEQ ID NO: 63232 - DNA, 1069 bp, Homo sapiens
atcctcccaagtagctgggattacaggtgtatgccaccacgcccagctaatttttgtattttttagtagagacaagatttcaccatgttggtcaggccggtcttgaattcctgacctcagatgatctacctgcctctgcctcccaaagtgctgggattacaggcgtgagccaccgcgccaggccaggttaaccttttaagtatcacagcttctgattgtgatggaaatctctgaaaagtttgcattgtcttactgtttcaagtgcattgttgtgtggtgcagcccaggtgactgtttattgccaccttacgctgttcctatacagcatctccccagatacatttacgtggaataataatgtctttaaaagctttgggcttttgaggtgcagtgacacaggtatctgtttggactctttcaggctgttattcatctcttctcttctgttgcagtgtctgtagcttgccattctggcacttctagtagtctctgcttacactgctgaatcttctctctctctctttcccatctcctcttctctcgacatttcctttcaccctgccttgtgtgtctggtgtttccttttatggtcagcactaaccaatcgaaactctccatttaatcactacttattctagggattatgttaactattaatacttcacacgtatcatttcattgaatccccactacaatcgtatggggcaggtattgtatttccagtctacagagtaagaaactgaaaattacagagtaatctgtgaaggagctagatggaattcactctgggcctttgaagcctcagaacctgaactcttcacttatacttacagtgcatgtgctgcatctcctgctaaaatacgcacataggttagtaggaatcatgttggcagtaaaattaaaatgttggctgagccaagatttgtgctaagaatttcacacatgcttctgaaaaatcaaacatgttgtcttttcaaacacagaaagttttaatagctaattaatcagagaggtattaattttaagtaaggtttattatcctggattagtcaggttatagatgtcacta

SEQ ID NO: 63233 - DNA, 1020 bp, Homo sapiens
tactgaactttttatttgctctaattcatggtgaaatttttgcaaaaaggggcttatttagtaattttgtttattttaggcagtatttggcagtcgtattcagagataaacccctggagctatgggatgttaggacttgtacccttcttagagagatgtccaaaaacttccctacaataactgctttggtaagttacaatttaagaatttaatagcttatttaggtatatatgtatgtggtgaatgttttgcttaagcttgaatcaaaatcattactgccaatgtcatttttttggttaaaaatgtgtgttcagagaagatgatctaaataaatggagataattcttattttcttggataaatcaacctaatatcatattagtgcaattccaattcaagtttcatttggatattttgaggaatatggtaaacatattcaaaaatgtttatgaaagaataaaggtcctaaatagctaagtcatccttgaataaagaggagtaaatgtgggaggtgtgggtggggttggcccttcctacctgatattagtacatcttacaaaaccatggaaataaaatcagtattgtattggcacaagaatagaaagtgagtcaacctaataaagagctcaggaacagacccatgaatatttggggacttaatatacagtaaagtagcacaaatcaaagaggatggacagactgtgtagtagacggtgttgggaaaactgtctcactttatggagaaaaatacttgatctctacttaataccgtatagagaagtgagtgtcacaggactaaagacctaaatgtaaaaatgtaaagctataaaattgaatataacaaaatacaaaatattgctgtgacctagaggcaggaggagacatcagaagctcaaaccaaaaggcaaaaaaaaaaaagaaacaatgcatttaattaatcaagattaatgctttttgtttgatgaagatgtcaaagttaaatacagaagacattttgggaaaacaaattttccagtgtct

SEQ ID NO: 63234 - DNA, 1109 bp, Homo sapiens
atatcttaaaatgttgcttcatattatatacagaatttcatttctttaatatttttttttattaatggactttattataatattgatttttaaatccagtttttgttttgtttcttgactattaccagagtttttacggtattcagtgtgtgtgctagtccactaatggtcaattattcaaaccactagagttttcttactttttaccatggataccatttgaatttttatgttgtacaataaatgcaaaaataaaatttcttttaataaatagagaagtaattgagcagtaatattatttaatagctaacatgtattgactatttactgcatggcaggcattgctttaaggcctttgcctttataaatttattaatactagcaacaactcaagtttcatgaacttaccctactttatggacaataaatccaagacagaaaggttaagtaaacatgcctcaaatcacataccagtttcaagctgggattcaagcccaggcagtgtgactgcagagcccaggctgctgagccctccatgataccacctctgagcatctattagaactgcaagttcctttcttcctccaagttagattgactacagcagcatttcattcttatgttgtgcttctatatgtaacttctgagcaaagctttctgtgaatttaaactgcatatgcctttagtaaacagcatctcttcaccttcatgattccacaatgttccaaaacgtgtcagtgaagctctggatccttttttcaatagaaaaatcacggcacaattagttataaaagagctttaagtttcccttggaatggatttagttatccttttgcagtgagagataagtttgagttggctctctggaaaaccttccctttacttctctgtttttcttactttaatttcccccttttttttttgaggtatttgttcctcaaaagacatcccctctctttaaatctagttccagtaactacttaatgtctatgaagttgaaatctcctatttcttcatagttgaaattgataggcaatgtagctctttgttagtgtctaaagtctgttttaggatttgatgactaaaagcatactaaagcacagcccttt

SEQ ID NO: 63235 - DNA, 1102 bp, Homo sapiens
ttatcccagaggaacttcttcctaatgtgaatcaatggcccacattgaaaggtgtgctaatggcaaaccaggtaaataattgttcttaacacagaacagaaagatgctggagtctgaaggggtcctgtgcagtcaggcccccgtattgttgaaggcccagtagcagggcaggagaacttgctgcctccccctttcaccctgtcaggccccatgccagtatcccagtggatatgtgacaacactcccttccagtccctcagtctactctaggaagccatccaggccaggtgtgctgagtgcagtcaaaactttgcttcatccttgccaggctctatggtgatgaatcggagctgcacttctggactgtcgctgcccactacctgcacagcttatcccaggaaaagtcagccagcacaacagctcctaaagaagctgctcctcgagacaaactgagcaacccactggatatatgctatgacgtgctctgtgaaaatgcctactttcaggtagtctgcttcacacagcaaaacctttagagctgtcatcttgattacttatatctttgtcaatatcttaaacttgggaaactttcaaactaagttactgttcagtaatagaaataagcccttgaaaattagctgggtgtggtggcacgtgcctgtagtcccagctactcaggaggctgagggaggagaatcacttgaacccaggaggcggaggttgcagtgagctgagatcacgccactgcattccagcctgggcaacagagcaagactctgtctccaaaaaaaaaaaaagaaagaaaagaaagaagccctcggtacatttgcattaaaaaaaaagcctgatcaagatttgaaaagctcatagacagttactgcgttgtttactaaacattaaaattttattattaaacaggcttgtttaatttgtcttacatttttaacttggcttcattttaattctgtcattaatttcctataaataacaaatactttatacacttggtttgaatttgctgttcacatgataatttctttaacctcctgcagaatccttcagtgcacataggtttttcatccggctctacttaagtgtcagt

SEQ ID NO: 63236 - DNA, 1729 bp, Homo sapiens
gcttttcatagcttcagaacaggggtcggcaactgctttctgtaaagggccagggagtaaatattttcagctttgccggccctgtggtctctgttgcaacttcgccactgtagcctcaaagtagccacagacaatatgtaaatagatgtgttctagtctgtcttctagtaaaattttatggatcctgaaattggaattttatataattgtatataaattttattcattttaatcctataagatattcttcttcttttgattttttttttcaaccgcttaccaatgttaaagaccatctttagccctcaggccatacaaagtcgtctgtgggcacccaagtcggaggaagtgtcaccctggggtgatccagagggctttttgcagcaccagcactggatgccttggggagcaaaggacactttctgaatctcgaaccttcaaaactttgaaacttaaccgatattttcctgaagtttcctttaacagtgcattatggatttaacatacatgagtatgtctaagccttttttgaacctgtttacattttcaactcggagagcttctgagagtaatcagttacatctgttaaattacccactgaatgaagaagtattccccttcaattatccccgaaactacaatagtaaaatgtaattcagaaaataaatattcatagtctcaactacttaaagggggtctggggacccacaacatgttaccggttttcattttgctggggctcgcatttgaagcaagggctctagtgaggaggtggtgtagactcagcgggttatttaggtccgtgtgaagccgagttgcctgcccagcacctatagctcaactaggttttattgttctctacctgtcaatagttgatttatgatggattccaagagaaaagctaaggacagcctggggtacatcagacgtggtctcagggaggtcttcgtggaagtcaggtgggctgggtctctgttcaccttctaggggtctcctgtcctgtcccacgtccaatacccacatctcaagagtttgtgtttgaaataaaactcttctcttcccttctttcaggaatacttggacctcagtcagcctctcgaaccgtattcaccttgttatcctgacccaagatgaaataaaacgtctctcttcccttctttcaggaatacttggacctcagccaacctctcgaacagtattcacctagttaccctgacacaagaagttcttgttcttcaggagatgattctgttttttctccagaccccatgccttacgaaccatgccttcctcagtatccacacataaacggcagtgttaaaacatgaatgactgtgtctgcctgtccccaaacaggacagcactgggaacctagctacactgagcagggagaccatgcctcccagagcttgttgtctccacttgtatatatggatcagaggagtaaataattggaaaagtaatcagcatatgtgtaaagatttatacagttgaaaacttgtaatcttccccaggaggagaagaaggtttctggagcagtggactgccacaagccaccatgtaacccctctcacctgccgtgcgtactggctgtggaccagtaggactcaaggtggacgtgcgttctgccttccttgttaattttgtaataattggagaagatttatgtcagcacacacttacagagcacaaatgcagtatataggtgctggatgtatgtaaatatatt

SEQ ID NO: 63237 - DNA, 1063 bp, Homo sapiens
ctgtctcccaggttcaagtgattcttgtgcctcagcctcctgagtagctgggactacaggtgcacaccaccacgctcggctaatttttgtagttttagcagagatgggattttgccgtgttggccaggctggtctcgaactactgacctcaagtgatccgcccaccttgacctcccaaagtgctggtattacaggcatgagccaccgcacccggccacactgtatttcttatagtataccgcaactggtttttaacatcagctatattttctatctgcattttaagaaatgaacatatttcctttttgttctggcggtgttttgaaattagttatttctcttgcttctttcttgatttcagtgtattcatcgagatttagcagccagaaatgttttggtaacagaaaacaatgtgatgaaaatagcagactttggactcgccagagatatcaacaatatagactattacaaaaagaccaccaatgtaagtcgatggcagtaacacagtgggcaggggcgggggtgaggctcagaatgttccaggaagaaaggccgtcaatgttgagagctgggtgggatggctggggacccattcccctgccccgattcccgttcttttgacttactattcacaaactctcaatatgcaaatttagcctctattatgtcaattttagtaaatgtgaaacacttatatacagaataatcagcaaccgctaggattttcttatggttctcatcaagaactttcatagcaaaaactacagcttggaagttactggtttaatttttgcctaataactggtcaaggagcatctgtgtgctagggagataaaggatagaatccaaggagatggcattttattaacggcccagacctgtgcatctcacacattgttcatggtcctcattgggactgatttctgctctattgactgactagtaaaaaccgagaatatcagctcttaaacagggcatagccctattgagcctgctaagataaattcttttaaatatatttagtttttgcattttcctctacatttgcaggggcggcttccag

SEQ ID NO: 63238 - DNA, 1064 bp, Homo sapiens
ccgggatggagtactcctatgacattaaccgtgttcctgaggagcagatgaccttcaaggacttggtgtcatgcacctaccagctggccagaggcatggagtacttggcttcccaaaaagtgagtctttcacattctacttggctgggtggaatccaactaaaaatgtctttaaagaaaacaggcaatttggacatgctcatttgctagatcaagccctcgcatgtcttgtacaacctggaaaatatttattgcgttattcccatttgagtttaatgaactgtttaaaaccaaagcagcctcataaacctatagcatcgctgcagagatgagcagaaaagatacctcttctttgagacaggaccatgtgtgatttccctcggaattcagctctccaggtgggaaatggatggttttaaaggccccctttaattcggatgattttctttctttcttttttttttttcttaagcttcatttattttgtggttactgagtttttgaacatagactttaggtgtttagtgttttgggtttgatatggcattaaatattctaagagtaaaggtcaaacaaaggggtattttagtaaccttgcgtcctggagctctgcgtttattttgcctcgtttggcgggtgaccctctgtggttagaagttggccaggtcccctgaggtggactgcctgcattccaggcgtgccacttaccgtggaacttgaaacatttcagttattctgagagtagttagacaggtgcccagatgtcctcggaggcattttggatgacccaaaactcccttgtcagccccacacatagggaagcggaggggcggagctgcctcctgtgcagaggtgggccttgctcctacctgcattgcagtttattgcagtgccaggaattccttgggtccccaaagaggtgagatcctctggtcggcgtgcaccctctgtcactgggggtctgggttgcctgaagagtcacaaactcaagtctccatggggccatgccagtcacaccaccaaggcctgcggatcactcagagtgcagagattcgagggatggct

SEQ ID NO: 63239 - DNA, 1047 bp, Homo sapiens
ttccactttacatttccaaagacagaggaaatatggtagagccaatttcctaaaagttttcgtagaatttcataagcacagcattgatccatgatccgggtggtctgagaggggatccattatccagggctccagtacaggtgcaggtacaaccataaaggcactaatgaagccagagaggactgtctgcatgtcctcaagtgactctctggaggaattaggacagaaagaaaatttacattgtgatcagatggtatagaaaaatttcatagaaaaacctgaacataggaacataaaatttggatgaaatctggtactgcatggactggagggcagaggagttagattccagtggttttctaatttggtttctgacttctgccagcccccaacccattcctttctaagattcgatactctggctgggctctggctgacttccagccttctcagatggagccaggattacatctgtgtctttgcattttgtatccaggtttcggctgagtccagctcctccatgaactccaacaccccgctggtgaggataacaacacgcctctcttcaacggcagacacccccatgctggcaggggtctccgagtatgaacttccagaggacccaaaatgggagtttccaagagataagtgagtacttctcttggccatgtcccaggatggagactcagctataaatggggatattggattaacattttctttttatgacccttagccacaaaggtcttggtgtgatgatgtcagcaggagtaagattgtatttctaaataaccaactcctggaaaagaaaaaaatggatttaaaaaaaaaaataactccttgaaagcagagctacttgcccctggctggtccccaaagaagatggcatctggttatcattttttaagtgtctgggcaattcagactccgtcaaatggaataaaagtagaattatccaatttataaaacagatctgacattctagcttttggttactagaacaagactgttctctgttcacttctgtggagaaattagatgcagaat

SEQ ID NO: 63240 - DNA, 1039 bp, Homo sapiens
atccagggtggggcttatgcctagtctgtgacctcagtggggagcaggacggattccccaggagcacccacatttaccttctcgtcttttcccgcttgcttctgccatttgcttgtgcaacccagacacttgggtgtgaggatctcagctccacaattaatgattctttagttcccgcttttaaaacattttgaccatacaatgaataaatgttgctcatactatctgcataatgaagtttaggaataactgccccctgccaaaagattgaatggaaggctcaggaagtgctcatgtacgttttaaaagataataggaattctatgtgaaaaatggcccacttctttattttaatactgaaaacaacttcctaatcctaaaatgattttcttcccctaatctattcttgggcatcttcttgaatttccagcctgctttgagggaagtctgggtttacaaaggcgagattcaaagcttttcaaacaggacaggtcctctggttccctgtgagaagagcccaggacccaccctgtgaaagttcatcccacctaaatttgttcatctggactcagtctttgccagtgtgattgaaggcgtttgtaagcacatccaggagtactatccacctgggcagtcacgcaggagacagagcccagggtgggctagttgcctgcttggagatggatcgtggttaacttcacattcttgttctcttgggccaaagtcttgttcatggtttagaataagacagtgttcaagcagcctgtggtcagactaagattgcgtagtcatcctcaaaagtggccttccagtgtgctctgtgtgagtctttttttttccatagaaaccagccaaaggacagtgatatatttaagaaataatcattttatcagacacactgaaatggatcaggataaacaagaaagtaactcggtggagccctgtgtactgccaggtgggagaggagttctcttgtgtggttatgggaaaaggtgtattttctttccattgatgcttcatcccacgtgtttagtgcact

SEQ ID NO: 63241 - DNA, 1088 bp, Homo sapiens
ttcaccatgttggtcaggctggtctcgaactcctgacctcagaagatctgcccaccttggcttcccaaagtgctaggattacaggtgtgagccactctgcctggcccctgtcttgtttttaacagatgaggaaacccaggtctagaaaggttaagtgatttcccaaagctcacacagtgagtgagtgctcaaactgggacagggaccctgacaatctgaccgcacagtcccatgttattgcagttggtcaggatgcagcctgcctaatgcggggcctcatgttgtgaatgatgagcacaggaagggcagcaacgggattggctgttgcccacatcgaaggatgcagagatgccacaaaacctagcctggtagcagaaggaagggccgaaagcagtgatcttgtaagttttcactcattttagaagtcagcatatttcaagcatatgcccttcgttttcttttccgttgttcatgcctcagctcagatccttattattctaaaaaatatttttgttaaataaagtacttcttctagaacataaaagaattacatacacatggtcataaaatccaaatggtctagaaagttctgaaataaaatgtattttctaccccctctctcaactcctaatctctctgcccacaggtgatcactgctaagtctcttatatatccttccagaaacgtttaagtgcccttgttctcacacctcgctgtgggacagctgccttccccacatcctattctgtgagcctcgctgatgagagcggtgattttcagggaggaggcacagaagcccagccatgcctctgcctctgctgggtgttaacgtcatccaggactgcggtcccaagcaattgcttaatcggttcccactcctctattgattgcagcttcctatgcaccccatagtggaatcctggaaactggtatccagtgatgaggggctacgctgcaggccatgcagagagtgttctggctgtacaacctgccagaccctggccatttgcggaagtcgtcccattgctaggcctctttttttttttttttttttgagacggagtcttgctctgttgcccaggctggag

SEQ ID NO: 63242 - DNA, 1026 bp, Homo sapiens
gtggtcaaatgatggacccctggttattcattttcatttgggagtttttgggaagcccaccttgccttgagaatggtcgtcgccttttggttcctttggttgtgctatgatgcgtcagtctggtgtgctaactctatggcctgcttatctgttcctcctcctgtgatctgcaatctagcgcctggaagagaaaaggagattacagcttccccagactacctggagatagccatttactgcataggggtcttcttaatcgcctgtatggtggtaacagtcatcctgtgccgaatgaagaacacgaccaagaagccagacttcagcagccagccggctgtgcacaagctgaccaaacgtatccccctgcggagacaggtaacagaaagtagataaagagtttaaagaaatttactcctcccccatgacccagccagcttgtggatcttgtcctctgctttgatgccatcgacttctgtgagcttccatgtgcgagtgattctggtgtgatgcttggcggtcacccagttagtgtttggagcttggagagtctagtcatggtgcgttgcttggatcaatggggtccagttccaagggcaagaaaggacaatactgtcagaatcagaaaactaatcagcaggactggaaataactggaggcaaatccccctgtgtgtgtttgatcagactcaagtacagcggtctcttcgaagctttagccacattcgtgtcctgtgatctaataccttttttaagataagcatgaacattcgcttgggacttatgccactagtacgaaagagactctaagttctctgacttattttttaaagtcaagatcagtatcttatgccctgggggtgcatctgaactgtttgatttaaactgttgcacaataactttctacacagaattttggcttaacctctttgcaatttacaatagaattgtatgcatctattatgtctcattgttagtagttcacaggtgtggctgtggatttattagtagaatatttgtatggaaccag

SEQ ID NO: 63243 - DNA, 1048 bp, Homo sapiens
gtttttattgctttcatcccactttgtatttttaacgagatgtaaatagagggatgtgtatggaggagcctggggagcggcacctctgaatgtcagatgcacagaagcagtgtgttgcctaccttggggatcggtggcttgctgcatgttgcgataggatggactttcggtttgctttcattgcaaagcatgctcctgccatcttgggcttgatgttatttctgcctcacagagaaataaacatcattgcagccctgttgcctaaacattgctgctgtctgaatctttaaccgacatctctattctagtgaaactttcttgaaattaaacactgtcctctctgatgcatctgcctctttgtcatttcctttgtgaaactgcagagactgtggtttgctagcttatgatgttccactccagttattaattccttgtttttagagtacagtgcttacctgcatgcttattttacatctagtaaaaataaaatagatcgtttcatttttgtgctgttgctgctgagagttttgactatcttgcaagtatttttctgattaaaatgtataagctttcaataataccattgcatccgtttttccttttgttgcgaatctgctctgtgaatatttgctttgaaacaaagagatgtctcttatgttgaagcttgcttttatttgcagtactgcattctgtggtgcctaactggcacttcttaaccagtttgcctgacagtgctagcacttaactaagaatgcagtttgagaaaaacactatttggaaatacactgcttgtagatggatcatcgaggactaagaagaagtcagacattggaagttgatataaaaatgtgctaaattaagtaattatatgtatactcacacataatacctttatgttttttctttaagagaaaagctgtagtgacataacaatataaccggatatgtataaacttaaaaggttattaaagaatattataatctttatgtattatggatctaatggttctatattataagcaattcaatctgtgtatttaatgcattg

SEQ ID NO: 63244 - DNA, 1047 bp, Homo sapiens
ccaatgaagtgttctcaccagctaataattccaaggatcaaaggcattgggaaaagatgaccaacctggggacccacccgacctatccagttagctatcgctcacaccctcctgcccttctctccaccaggtctttccgttgtccaccactggactgattttgttctttaaaatccgcagccctttaatgccgctgtttagacgtaatggagtttgttttcttgcggtgtgttggtggtgggaccatagacaatgctaagaccttcctggttggccgttatattgttctcctgtgtctgttctagcactcggggataaatagttccaatgcagaagtgctggctctgttcaatgtgaccgaggcggatgctggggaatatatatgtaaggtctccaattatatagggcaggccaaccagtctgcctggctcactgtcctgccaaaacagcaaggtaacaatgctttcatttttgtctttttttaaaaagaaagctggatatagaagctgaaaagacttggtgctttgggagactgcaggcagcttataggataactcttgtggccttggtatatttataataatctttcttcggtgatgcagctggtatgatgccagtagccatggaaaaatgcccacaacgttcaaagtgcttgctccaatttcttctagagattagcctccacccccacccagtttttaagttgttccttctggttgatcttgtttaggctgcacatttcccatcattactgcacattaacaccatttaaaacacacgcttccatgcctgtttaatacggggcatttgagtatcagcagagtttgtctccttctacttcaagtttttagggaaatattggcaagatgcaatttgttcaacaaagcatcatttctttggttgcatggttgatccttatgagttgctgttcttgaccttgttgcaccaaatttgaggggagctcatcttaatgaatgtactactggacgctactaaaggcaaaaggttgactttttaggtttgtcatgactcacatccaaatgttta

SEQ ID NO: 63245 - DNA, 1095 bp, Homo sapiens
tttacaagggtcgcgctccggcagtctcctttgaagtcgtttctgttattcatggggccacagtgttatttcaaaggtgtcagccagcaggcttgaggcttttctggcatgaggtcactgacagccctctggacaacacagcttatttattggtctctcattctcccatccccactcctcctttcttccctctctccaccagagcgatcgcctcaccggcccatcctccaagccggactgccggcaaatgcctccacagtggtcggaggagacgtagagtttgtctgcaaggtttacagtgatgcccagccccacatccagtggatcaagcacgtggaaaagaacggcagtaaatacgggcccgacgggctgccctacctcaaggttctcaaggtgaggactttctgaatctaaaggtacccacaactggggtctccttcatgggtttggccacaggttctttgatttcctgttggagttgagagaggatgattctcttttttgactagccagcagagagtgttctaaggaattaacagatcattacacttgctagtagaatttcagaagggaactatggagtaggggaagaactactaaacttggggaagaactactaaacttggagagagaatagttcagctatttatcagccctgagatcgcagacatttaggcttagctgcgcctctataaaagtagagatcgtgatactctgtcccccatagggcggttgtgcagaataaatgggatggagtggatggaaagagctttgtaggctcaaggcattgtgccagtgttgattgttactctgatgttgttttctattaataggacattaggatccaattttagtagccacgttttagaaacaatttggattttttttttaacaaaaacaaaacaaaacaaaaccctgacctttgaaatccattcagaggtgatttagacaataaactctaggtcatatttctgcaccagtgaaatgttgaacaaggaaaatatctttccctccttatttcttatttgcaagcccccattttcatagcatctgcctcttttttagatctaggtttgctcttcaggagactgagga

SEQ ID NO: 63246 - DNA, 1989 bp, Homo sapiens
atctccagacagagccgtgcaccctgagcccatcctgatgaaaggaggggtcagtcctgtcctttcctccaggatagagatttcaaaacttcctttggtagctactgtttaatgagcttttgattgctacaaagcagcttttcattcctgtttcacaacagggatcccggggggcaaaggctggttagtggcagctagatcactccaaacgtactgactggcaaatacagactctcccgcagaactgaccccagcaagaagcctttgggagcaggtggtattctgcgggtgccagctccctggggtgggagcaggcacacgccagcctggatggggcatggtagaactctgcgatgtcagcttttttgtcacattctctgcaggctacccgttgtcctttgccccaccattgaggaaggaagccttattgattgctttcgattcttgcagggggcctgggtgaggtggctggagagagggctaatatttggtctggcatttaatcttggcatttcatttatggtgtgggcaaagaggatgtagaagtgttaaaatcaagttaatatcttacagttttatgtaagaagaggttacctggagattcaggtgaggatggggcagagagaaagctgcttctgtcagagcttgggcaaataaacttgccatgaaatgtcaatttagtgatggcagtaagagtgtgcagtaatgtgctggaacttagcgaggtttctatcagcgtgtgctgaattgaaataatcaaaaaacagtttaataagttgcttatatttggagttttgtggttcttaacattgcaaattctgaagcaagaaattagagtttctctctaaactcatttactcatgtggctttatcaacggctgcctttgtaaaccgaaagacctcagttgggaagttttatgagacggagtcttgttctgttgcacaggctggagggcagtggcatgatcttggcccactgcaacctccgtctcctgggttcaagtgattctcctgcctcagcctcctggtagctgggattataggcggacatcatcatgcctggctaatttttgtatttttagtagagatggagtttcactatgttgcccaggctagccttgaactcctgacctcagatgatctgcccgcgcaggcctcccgaagtgctgggattacaggcatgagccaccgcacctggcctgccaactcttgttaagatgtgagtgtggaatgctgtgtgttcttccccttttaaaagatgtgtctgttggtttgctttcacggattccctctcccttaggagacccggctgttgtattcatggtcttcatgcttggtttgttttcacagtcagagaaggtaggatgctgtagggttctacctacaggtaggatgtgctccttacttagagatttggaagggtggcatcagagaaccactgtgcgtctttcatgatagctggtcaaatgtgggtgtctgtgggaaatagatggccaagggtgtcggtgttgctgtggggaggttgttctgtttcctcttctgagaagagacagatgaggcgatgaggcaatgggagcctcattgctttggcttggagggagaaaatagagcagagctctctagctgggattttgtgtatttgctgagttgcagtggttaattctctatccttgaagcacgtggcacgctcacgcagcctttatgtggtcgagagggtgacagtcacttgaatgaggtataaggctttgccctcatggagttcctcaggtcacattttgaggtcgaagaccataaattgggatggaaatttctagatcttgatggaactccaactttttctctctttctcaaagcctctggattacaggattctctcaaacaaggctggcaggaattctgtccatcccaaataagtatgcaaatctacaggtcaaatggtgccccagacatattccccactggatcagggagattgtggtcttttgagag

SEQ ID NO: 63247 - DNA, 1220 bp, Homo sapiens
ggaggctacaaggtagaattaagctttcagaacatcacatttcttacatttttgtttatttatttatttacattttttttttgcgatggagtctcgctctgtcgcccaggctggagtgccgtggtgcgatctcggttcactgcaacctccatctcccaggttcaagcgattctcctgcctcagcctcccgagtagctgggactacaggtgtgtgccaccatgcctcgctaattttttgtatctgtagcagagacggggtttcaccgtgttgtccaggatggtcttgatctcctgacctcgtgatccgcctgcctcggcctcccaaagtgttgggattacaggtgtgagccacgatgcccagccctacatttttgtttattttttgaagtgctcaaaagttagcaggaattagaaggaatactttaacaagaatcaataattgtcacaattgcccatgtcagggtttgatattaaaaaaaaatattaccccggacttgcgtgtaattttaaagtacaattcccgtttgtgttgttcttcatatgaggagagtttaataacagaagggtcgaaagttgagagtctgttttctatatgctttatagtgtataaaactaaaacgggtgtggagtttgagaagcgtcagtatagtttccctgtcagagcaggattgcatgaatagtgaggggacttggattagagactggagtatgaaatatgatgcattaagggagagtgcgtggagatgacagtggcaatctgctgtcctccttgaaggattcttgagagcacgtcacacaatgccatgaaattttagtctcatcactccctagggagtttgaaattggcagctgtctccctgcagatgcccgcgcatgctcctctagcctttgttcatccacttagcagacattgattgagcaccctgtgtgccaggcacactcctgggctctggggagatgagagggtgaggcatggccccagctccaaggggctcttagtccagtccagcaggagaggcagaggagaactctggcaatgggagggacacaggtttggttgaagttgcaggagcatgttgcatcccatggatgtacatggaaaggtgatattggattggcgtttggaagaataaggagaaaggaggtcaggaaaggattcaggtctgagttggaaggaaagatgtctcagaaagagagagatggaatttccaaattattta

SEQ ID NO: 63248 - DNA, 1020 bp, Homo sapiens
gacatcagattctgtcagcttggtttttggatgcctggggaactgcgttgtcctggttgtcggctacctgcctaatagcaggttaccgtgaaaccatgtgaagcaatagaatgcaacagcaaggtatggattacatgacaggcaggctgagtggttcagaaggattatatgctgtggaccttatgctttgcattgtgaacagtgttcctaactgcccagcgcccatgcagaagggccagggggtagagcacccatgtgatgaatgccaaccaacagtgtacttgccatgccttcaccttgcaagcagggttcttttgtaattagctctcgaatgacagcaactctgcccctgaaatgggtgctctgcagtgattaagggctagtgttagctgtaccagggagatactgctgtgaggaggtgcctctgtttggtgtctgtgaaacattagatgctatttaaagtgatagcggttcttagctggctacttggcctctgccatctgttagtgtgattaggctggtctgattcacaggtgcagcctggggcggctgagattaagcagctgtggtctgtgtggacagaggaatgccacggccggggtaattggcaaggcaggaaaggggacgttgccattaaaacaattttttgccacctcaagtgtcaaatgcctgacccgattaatagggaaaattgcagaagcaccaaattctttgtattttcagccacctggaaaacactcatgtgtccagattgatttctttggtgccttctgattgtctgaaaatgccactggggtgtgtttgtatgttcttctttaggaactttgacaaatgatgctccagtgaccctgtgttgatggtgacgtttttgggcttttttgagttttttttttttttttttttttctccttttggattgagacattgaaaatttagttctgtatcttccagttggaaaaatatattgcaggttattccctctgctgatttgctagattattgatctaattttgttggtta

SEQ ID NO: 63249 - DNA, 1255 bp, Homo sapiens
ggtcattcgtttttcaaagcagttactacttttctttccttgattttcccttttccctttgacttctccctattcagagacataagaatagtagaaccatgtaacatcttggttttccttgtaatcagtgattgtgcttggtttaatccagtggtgtgtgactggggcaattgcctattcttgctctcccggcacattgggcaatatttggttgtcacaacagagggagggggtgctggtggcctttagctggggaggggccagggatgcagagcacagccccataacaaagaattatctggtccaagatgtcaatcatccctagggtgagaaacccggcctcctacaacacacacctcatgctgagtgaaaatgaaggacgtgtgccttactttgtagaccacgattgaaaagggagccaagggtggcttgcttaatgagggccatgaacactgagcgctaacatgggagaggccatttacttgcgaggaagaacatggcgtagcctcttggagctgggcaacctgggtttgaatcttgctccacaacttctgagttgctcatttcacttctgtgccttagtttctttataaaatgggagtaataataataatactattttctggggttgttatgaggattacatgagttcctagttgtatagtgctcagaagagtggttgcttgcaaatgtttattcaatacacaaaatacaatatagcattacttgcattttccaatgacttggctagaatgttcctaaagtgtttgtacatagggtattgggattctctgcttacatggtatattctacatttttcttaaaaggattttagtcaatttggtacatttaaacaaggcctaagtaatataccacacccggctaatttatgtatatatatatattttttcccgagatgcagtcttgttctgtcacccaggctggagtgcagtggcgccatcttggctcactgcaacctgcacctcccaggttcaagcaattctcctgcctcagcctcccgagtaactaggactacaggggcctgccactacacctggctaatttttgtatttttagtagagatggggtttcaccatgttggctaggctggtctcgaactcttgaccttgtgattcacctgcctcggcctcccaaagtgctgagactacaggcgtcagccaccgtgcccagcctaatttatgtatttttagtagagacagggttttaccatgttggccaggctggtcttgaactc

SEQ ID NO: 63250 - DNA, 1028 bp, Homo sapiens
tgtgtgtgtggcgcacagtcacgtttcacgtacaaatgtgtaaaactcggcattcttacaaataaaacataccacaataacagatttttgcaggtattacagtgcaagcacgctttggcaatcaatttaaacattttcttgtggaatattcttccatgctatggtttggtttgtttctaaagccccataggatgtggaaactaagtcaggacagattttctgggggtatcctctggttgctcttccagatacttcctgacttcctggggcttggggagaggtggatgcctgctggggccatttgcagagcaagaacagcttctcctgggaataagcaggcctccactgacctttgttggacgttctctcctctccctccttcccatctgtctccgtcttctctctcccacctttctgcagagccaccaaccaaataccaaatctctcaaccagaagtgtacgtggctgcgccaggggagtcgctagaggtgcgctgcctgttgaaagatgccgccgtgatcagttggactaaggatggggtgcacttggggcccaacaataggacagtgcttattggggagtacttgcagataaagggcgccacgcctagagactccggcctctatgcttgtactgccagtaggactgtagacagtgaaacttggtacttcatggtgaatgtcacaggtgagttggcccgccagcactatgctctctcttctctgtagccattacatttttttggccaagtgaaaaggtagtgagatctctaattgtaattggatgccaggcatacagcttcatagtttttgaaattcttctttgggacctggtgcaccagaaaggccgatcattaagaatgatagaattcttgtgcacaaagtaacatttttcttaagatagtacgcttttatttaagtaaatacatgcttttttttttttttttttgtaccactgacatctctggcatttagaatatagggttgaaatttggatactcaagatttctgattcatttattagagttt

SEQ ID NO: 63251 - DNA, 1051 bp, Homo sapiens
ttgaacctgggaggcggaggttgcggtgagccgagatcgtgccactggattccagcctgggtgacagagcaagactctgtctcaaaaaaaaaaaaaagaaaagaaaagaaaagaaaagaaaaagaaacccagatgttctgtgattatcctctgaaaatcgtggtgcttaaaaaatcacggcaagcatcttccgccttgaagagtaacagtaatagtgacagtcattagcccgacatgttgtagttgatgatcaggttcatcttcgttggctcattggaatcttaccaataataaaccagtatttgggtactcttaccctgcaacagatggggaacaccaggccaaaaggttaagcaggaatggagaggcgtgggaactcagggcttcatcctcttctcgtccagggcagcacccttcaccaggcatctcccatgtccagctccaaataagacacaggtcctcgctgtcccctgtacttccttctagaacagcacgtggtagtccagcagctcagatacccccagtttcagcaagattttggggtttactgattttaggtgaaggaaaggattctcaatgaaaacactttcatttaaaaacaggaaatcatacatcataactcctcctttgccgggagagagatttttttctgcatcacaattgcaaatgccttgcttatcttttttttttctttttttccccctaatggagtcttagagcattcctctgcgtgacatagggacatggttgcaccttatctgagggtcaggatggagcagattggtgtgtgggtcccaggtgccttccctgtgagggagggaagctttgctgcttctgctcagcggctgccctggtgatcaattctggctaagaggaaagtacattccataacatttctggtgacttgctgatcatgtgatgttgtcataatagacattgatcattttatgacccagactgatccaatgtaaattcattctaacatggtgggtgctgtttcagcaatgagttgttggagacctgggactcaaaggacatctggtccttgcct

SEQ ID NO: 63252 - DNA, 1036 bp, Homo sapiens
ctggtacttcccaagtatttgaaacttctgggagaaaattcacgtggatgcaactgagctttatgcagcagggctgcagtagtgtggccacggcagtagaaacgagtgttgagctgtgtcccaggaaggagacttggtgccttgtttgtttaccagttttaggaaacagtgacaaagattggccaatactactgtgaagcttgcttgcttcttttcgacttttaattcatattgtgaaaaatacatggaaacatattctctgtctgtggaagcctctgaaagagcatttgtgcatagcaaggcggcttctggaaccttctccccattgcgttttggcaggagatgagggagatgttgggctgtgcacccctggtggattcgcacaggaaaggtgaaaagtatgccacagcaatgggaaaaagtaaatccaggaagtgctcacatgactataaaaggagttatgtacatttcctggggaattctttgctctttcacagagcaggctgtgcagcctggtggagtcagggagaggttgtccatccatggggggtgaccagagttagggaggcccctttgcacatgcaggcacaggggattctctgattgtcctggctccgcgcagcctggggccaggtcagtacaactgtggggatgaacatggagggctcagggagtgcatgtttgcagggagtgggcagcgggtcaggtcacctgcagcattcaaacccagaagagaagctaagccctgtggacggcaaatggacccaaggacacgggcagggacagagctgcttccactgagccagctgttaggtgcttgtgttcttggccccctggccggggttgtctttgatatgtgtcgtgtgtgctgggccctgcaggctgggcttggggggccactgggtggcctgggaggctaccagtgtggcatttggcccctccccagcgtatggccccaccccatccctgcctctcttcttacttacatcctcctctttttattctccccaacctctttctctcttgtgtgtttatt

SEQ ID NO: 63253 - DNA, 1050 bp, Homo sapiens
attcccattcagctgattgctgccggctccccaggccacaactctgtgccttcaggcgtctgcacgggtttcgagatgctggccaggcctgaacttggtgagcctcaagcagaccgttcaaacccattcaaatgaggaagaccatctgtttcccagtctccagctgctgctgcttcatttgcaaatggctgggatgctgctgaggggatcaggcggggacacatctgcagactctgaaggagtgttggaaccgagatcctgctgagagaagaaaggccgagccctttaaatcaacttgccaaacagtacccccagaaggtcctgagttgagaaagcaggaggcagccttgccctcctggaataactcttaaccttcccttttcttttgtagccttggccactttaaaagtatttctttattcagaaagtgcgcagtgtgggagggcctgctctatgggcttgggggaaaatgtcaaacgggatctggacatctatctgacctttcagggccatacagggcaaacgtatccgctggagtatgcaccatttattgaatgtttacatcaatatcagggaggtgagcttgtcccagcagcagcttctaggagccacaggtaacagtaagtgtggcaaggtgactgtccctgaaaacctgcttctggaatgagtcaggctttagggtatgctctctggaatgcaggccagccgccccaactcgcagtaacgcaggcccttagctctgtggactgcgtgaggcacagctgtggggactcttgcccatggtttggtgtttgcagggttattctcggcatgctgtggggctagggtaagttatccggctcctgagccctgctggggttctcatctcaagggaattctgtggtgtgttactgtgccccacatgcaaatatcagctactctcaaatgtgttggatggatgaatagtagaaggtattttaagaagccacaggcctctttgtaaattaaacaggcatcatacatgggtgttgataatgatgaatctcacaaaatcttcagatgtttagtctc

SEQ ID NO: 63254 - DNA, 1058 bp, Homo sapiens
ctataaaatgaatgtcaagatcattgcaatggttaagtttaggttttaaactctttgaacacccttaaagttcagattttcagttgacagtgggattgcccccaaagatgtgtggctgccttaaggagccttcttgtcctgctaagcctcctggatttccaccaatgcatgttgcatttctacctggctgcaatagacgcacaactgaatatatatcgtggacatttataaatgtttcaaatttaaaaccactcaaatttttaaaagaacaagaatcttctgtgcatttaatctaaattctgtatcagccattcttaaaaatagaattgaataaaatcattttggatggcatgtggtatgctttctggagacataaactaacagagggaacttgaccttgggaggtaggtttgaatctctctactatctactgatgctgtgatttcagaaaagttagataacctctctgagcctcagagatagtatctatcttgaagggtgaatgtgcagattaaatgcaaatgaaatgtaaagcccctactgaatttcctggcccagagtaggtgttcattaaatgctgatttcttccctgtcccacttcctgtcaacatttcctggaccaacaagatgtttactctacaatattaccaatatttcctggaccaataagatgtttactctacagtgtatagtgataattgtctgatgagaagcatttacattaattaaaatgtaaaactggctctaggccctggatttgtccaaccctttttattatcttgggcttttgcaagtcccatggattttagaaatgggatcatcctgctgcttgcagtccaaatggttcaaggttgaaattttttttcccctctgttgaaaaaagtcagttgcagctctgtaataataacagcagacacatacttcatgaggaacaatgtattttggcaaaagagttttctgtttgaagcttcaaaatacaaaatactctgccacattgccattaggcccggcgaagaacattggagaggggttatggaatcggttggggtggggtgcgg

SEQ ID NO: 63255 - DNA, 1379 bp, Homo sapiens
cgcacatttgagaggctgaaaaatggttttatcccacttgggctggagtgatttggcattggggaagattccctgactcgccaatctctttcctttagtgactgcagcagcagcggcagcgcctcggttcctgagcccaccgcaggctgaaggcattgcgcgtagtccatgcccgtagaggaagtgtgcagatgggattaacgtccacatggagatatggaagaggaccggggattggtaccgtaaccatggtcagctggggtcgtttcatctgcctggtcgtggtcaccatggcaaccttgtccctggcccggccctccttcagtttagttgaggataccacattagagccagaaggtaagtcatttaatttcacttttcaggtttgttttgggatttgtctgggggcagattgttaaggcctgttttagaatcagctacccttgcattgtaaatggggcttctaagagcaccagatcgtggtctcttggctcccggcaaggcagagctgatgagagaaggtcctttgccgcagcactgcaggcaggatggtatagtttggtggtttcttgctgtgtgtgtttctctgtgctgggtgagggagacagctgggagttggcctttatccagtgcccgagagagctgtggaagggatgaaccttgggaggatgaatgtcatctctagtctcccccagcatcattcctactgcttacaatgtaaagaattgctattttcggacaagatgaaccactaaaagaaattgccaacatctgaaatgctgacatcttattttcattgtttaaggagaaaagaagtttctgaagtttagcacagagagagaggcttgacatctcagaatttttttttagccattgtaattcataatacttaagcaatgcatcatcacagagtggcagattctagtttaggtaaacttgaaagtgaatgtgccaggggatctcctccagctccgagaacctccaagtatcacagggcatgcgccggtgtcacagctttggaaatttaattttcaaggtgtaagtccaattacgaggactacatgaggctgaattattcagcttagcagatttggaacctctctcccagccctttggagacaacgtgagccaagcctctacttggtgctgcactgaaatctgtcatcagtagggaatattggtagctgagttatttttcgagtggtaatccgagaataaaacggcagatcccagcactcatcgccacttaatgaacctgtttgtggagagtccacctggtgcctgcctggctttaggaacccgcagcagtccgagtggtgtctggggtaagctgagctgctctgggaacacatctcgtgcgtggggtgaatgaacagcac

SEQ ID NO: 63256 - DNA, 1093 bp, Homo sapiens
tacgctcaaattctcctgtttgtattttgtaaaatgaagaagtgaatctaagtaacttaatcacagttgtgcattttttttggttctgttagagaaattaaaacagactgtttcctcaggcccattttaaactgaacttatgctaggaaaccttaagtatggggaaggtagaaagttcatttcatcacttagaaaatatgtcttctcaagaacaaaactgtgctgttacaactcagtgttcaatgtgaaattgctgccaaatgttatgtagtttaatagagaacttgaaaaaataaaacattaaaatggagcttgtgttagcatcaggtatccatttgttcaggacagtcctgttcatgtctgttgtcttggcatagttttttcccctagaatatagtactcccttttactctaaaaaatatcccagtttggacaataaaatacataattactctagttatattatttgctttacttctaaaaatgtaagaaattgaatttttttaaagaaaaatgttggttcctgccttgatctaagtctcatccaaaggaaataaatagtcactagttttttatcttacaactcaggacatttgtctttggttattaatggaaattagtatgtgattactttcatagttatgccacaaatcacattgaagaaggaatcattccgacctctgttccaggacaagagctagaacaatccatttcttgtcctttgatttgagagtcacagtcagggtggcttctgccacccttagtaactcagagcagaggccagccccctccttccctcactttcttttgctgagtcctttgcccacctgtcaaggtggcaggcactgtgctgggtacaggaggacagtcagacatgtcccttcttagctatagtcgagctgtctgggaaacaggatgaaaaacaggagggttattttcttgtgccctctttgtcagctgatcccctcttctgctaccagctatttggccagcaagccgtttttagtccccactttgcccatttttctgttttggttcatcgtttcttaaaagccatgttataaaacatggtagtttgaatcctgttgctaat

SEQ ID NO: 63257 - DNA, 1336 bp, Homo sapiens
ggggggggtcatttaattgtaagttgcacagataatttcatcagcacagataatttctttgttgagcgaacagcagagaagtttaaatacaggaatctgagccttgatgtcaggaactttgagttctaattttacatttagatcgaagttcccttagtaaagaacacagtttctgtctcttccagagtaagttgtgaagtgtgatgattgcttaagaaagaatgtaatgaacgtgctctgtaaagctctgtaataatactagagctgtttgaacttcttcattggcatttttctcacctgccatctgtactgaccttataaatccagagcaaatgattgcttgtatgagagctttgatcttcattttaaagtaatgacatataatttctcaaaccctcaaattaaaccaaaaaatttttttctaggttaatgacattgcttaattttctgaccttgacctgtgcaaactttgaagttagagagtattggggaggaggggggattagataccatgatatactaactgaatgtaaataagtatatttcaactcgcttaccaaatttgcataatcatttaaaataatgcgtgtttttaaaagttcatgcagtccagtgattgtaaattgaactgtattttaatgtctctttttaaaaaacatcctgttcaagaatccattattgcgtatccattgataaaccaaaggctctcttgcaacgaagctgatcaaccactgtgttatattgtcatttttaaaattagggttttggaatatgttttcttaaaacatttaaactgcattcaagatgacaagaaaaagtggaagtaccatttagttcattttcacgttttgaatttgctggtgttactagagtttgcttttggagcatagtcttgactttgtagaaactacagccatttcataactatgtacttgaaaatatttttgaaaacaaataatgctttaaaattgtgatttttcaagaagaagggagtatgcagagtggaaaaagctgtgctttatagtactgttttgtttctagtcacaatactttgtttttcaaaatacactcaaggaataattggtattttaaaaaaatatttcacagaaatgtttgaattaaaaggactgtgcaatactgctgtatataggaccttctgattctgtagttttctgttactgttatataataggttcaagactttaaaaaaaaagtccctggatgtaagaagagttcgtaaaggtttgttttaaatgcccaaaagctggaatttacttaaagtctcaacctttagggacttgtgaataaatcatgtaagctgagcattgtgaagaca

SEQ ID NO: 63258 - DNA, 2713 bp, Homo sapiens
tggtaaactgtatgcccttaggcaatttaataatctcccttgtctcagatttctcacttttaaaatggaggtaataataggacctactagctgtaatgaggattaaaatgagataaacatgctaagaacagccccctattactgttttttggtggtcactagccaaattagaatgctgcatcctatatatgccacaggcttttgtctgcatttacttttatttactgtgatccctctctgcaaaatcgtgcagttttgtttacctccctgtagtctaagtaccactcacagttcaaagtagccctcctccacacagcccttgtagtcctcacggcatttagccgtggctttgtaagacaggcacaggtgctgatgctctcaggatgggttgcattaagttgacatgcttgtcttccccttaaagttccttgatattctcagttgtgcttaattgaactttgaggtctcacagaaccccaccacagaggagatgcctgatccatatttcttaagagtataaacatttttctagctaccacccgttgtctaagtttgggaaaaaagaaggaaagatcaatggaaagtctggaggagaagagaggagtagatggagcaaaaccaaatgaaagataagggggtggggaaagggacgcagtaacttcttcagttctaagatgtgcatttgtttcacaaatcaggttttttgtgtaaaaaaattggcccatgtaatgtattttgttacctccttgaaaagctgttatgaaatcaagagtgactctttcttacacatgatgataccttagaacctgatgacgagtgaccatagggacccagctgactcatatgccaggtaccctggcattagcccctgtttttctagatgtttaggtttcctagaataaccagagttttatagttcccacacctgaaattattagccagcgtctgatcgtttcattctgagtaaagttacacctcattgatcagatatgttgcttaaaaacaaacattaaatttgtcaatcaattttggagtcaggctcagagccaaaggcaatagtattataagagaaagcatatacttatctactctcctctcttccctcaaaagaaatttcccctctagcttttttagggtcagtcagtctagtccctatgatgaaaactgctgaacatcttactaaaagatttcatattcacatataaaactgtttctgtataagttgcattccaattatattatgatcctaaatttcttatcccccaacttacgatagcttcaccttctttttttccttattggtcagttttaaaggttgcatttcttcttacataatacttagagactaaacaaattctccttttataaagttgagaaggtgactgaataatttccatccattgaatagacattcaagtaaacattcatgttaatagattttaaaattattttccagaataaatactaacaaacatggcaaaaaagatttaaagtctcataatgaccatttttgtcaagaacatactgtatcctggtgagcgatgaatatattgtatgttcttttcctgtaactagtaggttacatttcttatggcagtagctttagctcttaacattgtttagaattcatttagaaagaagtaaatttctttgagaataagtgctttgaagaaattgaagatctttttttcatatgctgaatctgtggaactttcaagagaataccacacagttttatcagtattgaatatcacagtccagacactatttgaaatcagacttatatcctgtggttttaggaaattaaaatgcagttacatgctggaatgtattcagcctgctgtgaaacatggtcatttgaggtttaaatggcaatctgtgagaaacggttctcttctctggggccagttttacttttacatgacccaaactttgactcagaaaatagagcttaatatgggcaataattgttgttcgtcagcatggtgcttttttcactaaatcttgtttctctttccagttgttgagtagttaaattactctgcaaaggcacagttgatcactataggcttcagttaaaccaactgtggcttcaaggtgtgtcactggccagtgttaaggaaaatcacgttttccccctatccttttgtatatactactttgcggtactgtggggggagggattgacaagctgcaataacttggaaaattctaaagaaatccttttgttcttaaataagtactttgtttttcaatgcaggacttctgcctacttcaaagaaaggggttcaaaagtttctcaaatgatttttaagtaaaagtctgttagattttttaaattagtaactgaatatgtatagatttcaaaagttctatacacatatatatatacacatatctgtgtgtatttttttaaaacctaaacgagaatattctgcatccttacgttgtcatttttacttaatactttgtgttacttcttacttttgataaggtagaaacttgcttttggtaaaaaacaatttgaccattaatttggtcataagaaaacaaatgctgctaccctgtgatgcccagtgtctaataaagattttttttttttttgaggccaggctggtatgatcttggctcactgcagcctctgcctccagggctcaaacgatcctcccgcctcagtctcttaagtagctgggactacaggtgcacatcacca

SEQ ID NO: 63259 - DNA, 1029 bp, Homo sapiens
gaaactatgtccaaatccttaagtaattacattcttcatacaaacatttctcattttcttatactagctgaagaggcagggtagctttcaaccccctgtgttttcgtttgtgtgatggtgactttgaattgagctttaagcactttggtcatttaactctcgaccagcttagtttagaaagcataacatttcaaagtggtttatttcataaatctcaattctttgacggcttgtgagaatatctgaaacactgaaatgagcctgtacttagaagaaaaataatgttttaacctagtctaaaaacgtgatttcagatgatgagcagaagttaaaatgtatgcatttatggtcttcgagtgagataaactgagtatttaaagagttaaaaagtgaaatatcattgtatgagcaggtgttaccttcttagagcactgtgaaaatttagaaacttgggacagttgtacactgtcatattttttatgttttatgcatacttcatctttatccagctttatcactcccagtaggttgtgaattatcgagaggcatgcatttgttcatctttttgttccagcctttagtgcctgttacatagtgaggatttatgtaatgttcattgactaaatattctttttttaaaaaatttttatttttattttttttgagacagagactcactccattgcccaggctggagtgcagaggtgcgatcttggctcactgtaacctctgcttccggggctcaagcgattgttgtgcctcagcctccagaggagctgggattataggcacgtatcaccatgcccggctaacttttatatttttagtagagatggggtttcgccatgttggccaggctggtctcaaactcttggcctcaagtgatctgcctgcctcggcctcccacggtactgggattacaggcatgaactaccgcccccagccgactaaatgttcttgatggtcagcatcgttgttaaatctaggcactggattcaggtggctgttgatgaatctgcgtatccgcaa

SEQ ID NO: 63260 - DNA, 1124 bp, Homo sapiens
acagttgtttctcatttcatctcctgtttggtgaaattttgatggacaggtatttgagagctcaggagggagacagctgtatgggtcttggatctgtatttgctattggtgagtgcctgtttttttttttgttttcctaaacatggtgctacttggcctgtaagacatattgcaggagggacctgttctgaggaagctccagctgctgcttcagagaaagctgattctttcacctgtgcattctaccacagcttgttgacagctcttgttgctgtcctcagtattgctggctgctccagctccttcgtgcttctgtagcagcctgtgcccaccacccgttcttgatcatggctgtgaacgttattggggccaactgcctcctcttccccagcagagaatgagcacctcacaaggcttttttcgtcttttcctccttgatgtcaagcggagtccctgtgtatattgaactgagttgtgatttttaaggttttcggaagttattttgaaaatacatttaaaaattgtgcttttgtttttttaaggtttaggcaggaaatgagaataggaatagagtctagctctcagttcatcactactattttatcatcttattgttttatctatacagtagaagtaatgtctgtcttcattacctttttttttttttttcttgagacagagtcttactctgtcacccaggctggaatgcagtggcacgatcttggctcactacaaactccaccttctgggttcaggtgatcctcctgccttagcctcctgagtagctgggaccacaggcgtgtgtcaccacgcccaacaatttttgtatttttagtagagaaggggtttcaccatgttggtcaggctgatctcgaattcctgacctcaagtaatccacccatttctgcctcccaaagtgctgggattacaggcgtgagccactgcacccggcctgtcttcattactttttaaagttattgtgagatttaactcagacaatgtgcagaattattatgaggactatgttcttaacaaatacagagagaagtaattattgtctttgttgttacccaccaaagtggcattgttcaactctcctaacagatgaagaggccctttcagaa

SEQ ID NO: 63261 - DNA, 1016 bp, Homo sapiens
agtactattattattttacaaacacagattctattgggatttgtaatatccagactcatttaagagcattcatgaatttttagtgatttatctcattgtaatttctcatcaactgtaactaaaattacaaaaggcccatgtttttttttttttttaactttaaaaagggatcttcctactttccttatagatattggagagccagtaagaggttttaagtagggaacttacatgatcagttctctctagcaggagtaggaggatggatgaattcaaaggagaaaacttggagtcagccccctcactcttgtctaggtgagggtggcctcagctagggtaatggcagaaccagtgattctaagtgctgttttccaagaaagagccttaaaaaagcaaataaacacctaaattggttcttcttacaaacatggtgaatgccaaatttatatatagacacatatatgaatattcatatgcatatttaatctttaacagaaactaaagaggcttagagtttttctttctctctttatattatcttctttgtcttcatctttcattctatgtcttattttaaaaatccttttcaacttacgacccttcagtttgaaattaaatttgggccgtaagttgactccttgaatctttgcttcacaaggtttctttgtcttttttagaagaaaaaagattaactcagggtttccaaaataaaagcaaagattgtgattaaaactgaattagaatcttgattctctgttatttgctaatagtaaaataaatagctcagtcttaaagaagctttaaagtaagtcccggagcctttgagaacgcttggattttaattaaagaaatacagaataccgtcactttctgtttgtcagtggaaaaaatatgtatttttaaattttcaaagcttagcctagcagcacatggagtacatctgttggctttcagaatttggggaacacaaatggattcagatgtttaggtcctttgtctttactggtctcagctca

SEQ ID NO: 63262 - DNA, 1028 bp, Homo sapiens
gaatgttgaaaaataaaaccaatttgtttctgaggggacagatcctaaatgattctaattaggcagatctttataaacaggaacataggacattgctgacacaatttaggtgttcatacttatttctgattttaggttgggaattttaacagaaaaagaatattaagattgtggttctaatcttggttttgccagtaattagccttgatcaagtcacttaacttttctatatccctccctcctccttttaaaacatatttaaatgcaactagggaagtctgaggtccaattttaagattctgtggttctctctttttaagaaatacgattggacagaaatcagcttaactgaataagtatttattgagaattcggtccatacaaggaattcttcatatgcatagggaacgtaaagaaattgatgtactcccagctcttaggaaactccaagtttgaattttaggtcagggggtggaaggggaggggtgatgtaaaaataagagaaacacagcatataagcagacaactccaatagattgtattaagttctagaataggcctctgtggaaatctagatatctcctaaagacgtcaacgctgacccttccaatctaaattagatttccccattgtattggtatgctttttcttcatagcatttatcatactttgtaataacatttctgtatgattatttccttaaagtttgtctccccttttggactagaaagtccctgagaactgaacctggcagtgctgttgttcaccatggcatgcccaggaccttgctaaggaccatgcttaagtccttagtatggaacgtggaagacggtaggcatttaataatgagtcattgaatgcaggactggcagcacaggggatggttcagcctggggatgggagcagtgggtggtgaggtgaagcagagtcgaaggaaagcttggtaaagtaagagtaggcagtttttaggttgggtctcaaaaacggagtaggggccaggtgcggtggctcacgcctgtaatcccagc

SEQ ID NO: 63263 - DNA, 1446 bp, Homo sapiens
gaggattggaggttctagtattataattttccattttagtggggcagagatgtttggtatgtcctgtgctcatgtgcttcaatctcttagaaccaagctgatttacccaagtttacgtgcatatatatgtgtttagaaattgttgcctagtatcctactttgctggtgatgttagaatgaaagccagtttttccacccttcctcatcccgccaggatgctccatcacagcttaggtcttctttccttcttatatctctatctgttctatttgttcttacgtctttatcttcattctataaaataggataactgtagaattttttcatacttcacactttcagatgccatattgtccaagtttgtggcagtagctaatgggaagtgaccttgagtaacacagtcatgtgtatcttggatatgcagcagtaagttggaaatgacagtgctgagaagtcatcgtcaccagcttcctccatcctgccatccagtcctgtgtccagcctcagccatagtactgctcaaggatgatttacattgtgtgcgaatcattttgctagaaaatctgtggtgtttcatatagctctcttaaatccagattcctttgcttgatctttgagggttcccttttcttcctgatcccttcctgtctgcctttagacacaccattgcccaatacaggcatcttcctttcattcttttcaccagttcatttctcctctttctttgacattccttcagacattatttagtcaattgagaggtgtgcatttgtgtatatagtgtatgtatgatttacgattgatctgtcagccctgtagtgatttgcagtaatcctcccatttttttctgttgtgtttgtcttatacagggaagtccgtttcactcagatgtccgccatgcccacaccccttttctgagggacactgctattcccatagactctgctgaagagattagggcttcataaacatggatctgagaagttttgaattgtaggcagacttttgtacacagccacgtttatgtcaaagatagagtccctgggttactttcttctggttttcaaaggagtctgtgaatcaaaaggtatccagatgagagagcagggagctgggaaggggagcaaaagcagagccagtgaatagcagatgaaaatacaggctggggcctcctgctgctgaggggacataaataacctcctgttccacctgcttgccagttcttgaattatgatctcttatccatgaggtcttcatctagcctgggtttcctcctcttcctagatagcctggaattctctggaggcctgaccctacatgactaatatttctgtcctcatttccttatgggcctccctgtaatgttatgtttccctctaacatgagtatgtgctgcttactggaagcacatgagtgaatttctttgtttcttcacccaaagagcca

SEQ ID NO: 63264 - DNA, 1038 bp, Homo sapiens
aaaaattaccacaggagaatttagtaagggatttttgatgccccctagaggtagtgggaggtaaaagaattctcatggtcatcacaaattcttatttagaacactgtcacatgtggggaattttgccacaccagagtcaaagcagttctttactgttctaagcttctcattacagatgagaaaattgaagctcaagatggttagcttgcccagagtttgccttaactcacattttaattttacccacgagaagagtttgaacttaagaattgaaattcatgtaaatggcattgcttatcagatatatgataaggtgtataaaactttcaattttggagtatcctaaagcacttgccatgttaattaaaggtaagttttaaggggaattcaagtacatttaatcgtgtatatttttctgatcctttgtctaatctctctctttacaatgaactagaaagcttgatgtagtgcctgattcccaaccttggaaaagaatcagtatctgtggagctttctagaaaatgctaatgtctgagctctaccctggcctactgaagaaggaaatgtgcttccttctcttgcatagcccatgctctggctgctgggcactatctgtgtgcacggaaacttttctgcctccaagctctgtgtgttgtcttgcactgagatgtttttcacttgcccctgcgtgtagaagtacgaactgcttttccagaccaagttcatgcacaggttttcccaggaagtcattctctgtgttttccccacttcaccttcaccttctctactccctacattctaaagctggaggtaatctcttcacttccatgacctcttctcattatttgttttgttttgttttgtttttgtttttttttgagaggaagtcttgttctgtcgcccaggctgtaatgcagtggtgcgatctcagctcactgcaagctctgcctcccgggttcatgtcattctcctgcctcagcctactgagtagctgggactaaaggcgcccgccaccgtgcctggctaattttttgtatt

SEQ ID NO: 63265 - DNA, 1015 bp, Homo sapiens
gacctttatctgtactgtactgtcgttttttttccccttccctttgcccctcccccaagcttgcaaattccccatcttatcatttttcaactccagtaatctctactggactcttaagactagatttcatcattcacccacctaccccatagcagtttacatttcttcccagaactagtctatctcctgtgcatacattccatgagaatctaattgacatttaacttcttgtgtcccaggtggcaaacaatgtgcctgctacatagtaggtatttaatgcttaatatacatttgttgaactaatgaatgaaaatactaatgcagagagctgacgagtatgtaggatagtgagaaatgccttctttttttttttttaacaaagatttgttgagcatgaatgggatggcttcccctttacaaataggttataacttagtaacagatacgcagttctaacagaatgtgataggtattgtgactgattatctttgagtattgataaatactctgatagcaaagggaggtggtgacacaggaatgtgtaacagtttggagaagttgcttgacttcatctggtctcagtttttgcaactgtaaatgggagtaatgtagaaattagacaggttgttatctgcatttcagtatagactctacctagttgggtagcattcataaaatcattacctgagcttttgttgggacctgtcaaggctctctctgtttgtatactgataaatgacatccaaatttctaaatgcctgctcttgttgttaaccagacttcttagattagtttagatgctggggaaaaggaaaggcatatattactgaataccaatactacctctctctgaaagttcccagaattgcggacacttgtcttttacttagaggccaatggcagagtattagtccgttttcacgctgctgataaagatataactgagactgggaagaaaaagaggtttaattggacttacaactccacatggctggagaggcctcagaatcatagt

SEQ ID NO: 63266 - DNA, 1115 bp, Homo sapiens
agagtaaatcagaaaatatacatatgtccacacatagaaatatgacttaacgggggttttcagacatgccacattaaagaaaaaagtgtaattgaacccctgtgtacccattacccagctttagtaattttcatgcatttatttcatctattccttcattgccacctccaccctctcttgaattattttggagcaaatcaaaagtatcacttaatctgccaatattgtagtgtgtatttctaaaagataagggcattttgaaaatgtaatcacaatttcatcatatacctagaaagtattagcagcgtttccaaatatcatctgatcagtgttcctatttcctgtttcctttattgtctcataatcttttttacagtcaatttgtttgacttaggactcagtaaggttcatacattatatttgcgatgtgtctcttaaatctctttaaatcaataaatccccacccccctcccccagccttttttctttcttacaaaggaataattcacaggacttggtgattaattacatttggggatgattatatttccaaatctttgatgttaagcactgaatgactggggagatggttcgatttcagaaattatggattctgaaagtaacactggctttgagagaccagtgaaaaagcagtgccttgctggttttacattgacagtccaggtaagctgatcaaggtgtcctggcatttggagattttcttttgagctcatatttcagtgtacattgtagggagataacccctgaatttggttatcttcaaaaacttcctttatgcctgaattactaattcacttgatgggccttaacatatgttctgtacagaaggaaaagtatgagcatatttccgttttgcctaaaaataatgatttgcttacgtttttactagtgttttatccttctggctcattttcatctggtactagatctaaattagttcagagcagaaaactctagtactcaagatactttaatgtatttataagactcaaagaaaactctggctgtccttatattaatcttcctttatgtagtacacgacccattcaaatgaagtattttcatactagacttaaggacttgcacagatttca

SEQ ID NO: 63267 - DNA, 1048 bp, Homo sapiens
ttcctgggtgacttcacttagaataatggtcctcaactctatccaggttgctgcgaatgccattattttgttcctttttatgcctgagtagtatagaaatggaaggacatagtttaatagtgattttcttatcctgtaaaatgctgtatttcctactgtcaagtattaaaacaagtaaattgaagaaaacataaattgatttctctttttgaattttgtatttagtcagtatttctatgatgaaaaagttttgcagcttaatatagggtgtgactagggatgatgatggaaacaaagaggaaagttaaggacttattaacctgaggaaaatgaaagtatatattaattataagattattttaatattaaaaaaatggctgtttgtgcctctgctttttcttaggcagagactccccctaatgggccagattgtggctatggctcctttcaccagcagtactggcttgacggaaagatcattgctgtgggggtgattgacatcctcccaaactgtgtatcatctgtgtatttgtactacgatcctgattattcgtttttgtctttgggcgtctactctgcactacggtaagattgctttttgccgttattgtagtgggttatatagaacttcaaataattactcatttgattatatttaattatgtaacagtagaagtcctaattgacagtgtattataatgatttgttgctagtctcttacatagaatacatactactatataataggtaataggtattctatatgagttaaatactcctatataatatatacttatatataatttgtaattttcatttaagaatatatttaaagtcacattgaattttaaaataaacatcatttaactagtttataggaaatatacatattatataagtatatagttatgtaatatataagtaaatattatgtataactagtatctataatctataatctctagtacttttatattgtatttataaggtactatctttagaactgatgccagtgtctgatggtaattctctagctttttaaggtatc

SEQ ID NO: 63268 - DNA, 1427 bp, Homo sapiens
cctcagcctcccaagtagctgggattacagacacctgccaccatgtccggctaatttttgtatttttagtagagaaggggtttcgccatgttggccaggctggtctcaaactcctgacctcaagtgagctgcctgcctctgcctcccaaagtgtgtgtttctatttttcaaacttcggtgaagtgtttcatgaaactgttaaaaaaaaataaaaaagcaaaacagttgcaggagtgagttattttaacacaatgcagactttgtatcaggtgcctaaaaggattacctttgggtgcctccattaactgttatttactaaaaattcgggacattaattgtctcatcatagatttttgtattgtacaggtacaatgtgggagaggtattttcagctgctttggaagagaagagaactcaggttctgctctcttaaagcccctgaagactttcagtcttcctatctttgaacttcgtagtaaatcccctcaaatactggcctgatgcctggcatatgactctccagtctcctgttcttttgagccttcactgtgttctgggcatagctaaggtacatagaagcaggtgggtaaagagacaggtctactttatcacagtaaatatgcacccattttgggagcagtttggctggaagccagaactagcctattaatattgatgacatttctacacagtgcctttggtattataccacataggtcattaatcacagaagtcattcctttcctccccaacatttaaggtggtttttcttctgtataggtagaggtgaaatttattattattttttcttgttatcagctaaatccttgaaattgaggaattagttaattaattctttcagatatccaaaatatgcaaaactgcagactggtaaagataaattactaaattttgctagtcacatgacagatttatgtatgaggaaatgaaagataactgctgtttaagtaactttgctgttaagttagctactcatgtaattttgtagactccatctcaaaaaacaaaacaaaacaaaaacaaaaactgacctagactttttatagtctgcaaagtgcttttatttgtatattgttgtttctcacaactaatgacagttgagactgaccggtagtatgattcttgtttgaaaaatgcagacattgaaacttttattttttatgtttttattttttgaaacagggtcttgctctgttgcccaagctggagtgcagtggcacgatctcgcttcaccgcaacctctgcctcccaggctcaagtgatcctcccacctcagcatccagagtagctgggagtacaggcatgtgccaccacacctggctactattttgtatttttagtagagacagggttttgtcatgttgccaggctggtctcaaactcctggactcaagcgatctgcccgc

SEQ ID NO: 63269 - DNA, 1030 bp, Homo sapiens
cgtggaacccaccgtgtacatgcctgaaaaggggaggaaactttttcctgggagcccatgggttacaccaagaacaaaggcttctgtattgggccttgctttcttacctgtgcagctgcagcccgagttttcgccaggctgctctatttgtgcctgcagcttgattttttagggtgtttctgtgtttgaaggagttttaccaaagacccatcctaactgtctgcctgaccgttttttttcctttctcattactaccatccctggggataatatatgggtcacgagtgaatcagaaacacaaaggcacaaacttagtggagaagcagaaaaatacatagagaaacagtgagcaaagttagagctttatggctgcatgagcatctctttgggagccaagaaaagttgtgttaggcttaacagactgtgaggtgtgtttctcatttacttagctccatctagtctacttgagcttctcagtggatgacctccagaactgctgactataatttttaaaaagataaaattgtgaccttcatgcaaatagaggacaaacacatgccaaatattgactcagttagtgcaaaaccagtaaggcattaaaactggtacaaagaacatttaagaatatgtgcagatattaagatatatgcatgtgaatgagatgagattgctagattagataaaaacaactggttattgtcttatatggtggtaaaccatgtaagggattatttgttccccacccccaacagaaatctacaagttaacctctgcacctgcagagttgtaaaataacccagtcaatagaaaatcaagcctagagcttcactgaaagaatacccagtgctgtagtctgaatgttggtagtcccccaaaatttatatgttagaacctaatactcagtgtcatagtattctaagaggtgaggccttttggaaagtgattatgttatacatgctctgccctgaataatgggattacgtgccattataaaagtggttgaagggagctaccttcccctaccatcatg

SEQ ID NO: 63270 - DNA, 1049 bp, Homo sapiens
gaacgtctgcacgttcaacactagccaatggtcatacatcaggggtccccagttcccagactgggaccagtactgctctgtggcctgttaggaactgggacactcagcaggtgagcagcgagtgagcgagcattgctgcctgagctccacttcctgtcagatgtgctgtggtattagattctcataggagcatgaaccccattgtgaactgcccatgtgagggagctgggttgtgagctgcttatgagaatctaatgcctgatgatctgacttggaacagtttcatccctataccttccccttctcccctctgacccttgtctgtagaaaaattgtcttccacgaaaccagtccctggtgccaaaaaggttggggactgctgtcatacattagctaatgagctctttgggaactgaattttaaattttttaaattttagttaacttaaggctaagtggccacatgtggctagtgactatactattagggcagattggaacattccaattaaaagtcagagattgtcaggctagataaaaggaaaaaatcaacatccatcttaaatacagagacatggataggttaaaagtaaaaggctagagtaaaacactactatacgaatacttatcctaggaaagttggcttatgcctgtaatcctagcaactcaggaggctgaggcaggaggatcagttgaacccaggagtttgaaaccagccagggcaacataatgagaacccccatttctaaaagaaaaataaaaaaattatctgggcgtagtggcgtgtgcctgtagtcccagctgtgagagagactgaggtgggaagatcatttcagccttgaagtttgaggctgcagtgagctatgattgcaccactgcagttcagcctgggcaacagagtaataccacatctctaaaaataaaaatgaaaaaaaaacttaagaattttaagtcagagtggctgtattcttatcaaagtagacttcagggcggctgggcgctgtggctcacgcctgtaatcccagcacttttggaggtcgaggcaggtgg

SEQ ID NO: 63271 - DNA, 1016 bp, Homo sapiens
tctgtggggctgacccttttacattcctgtaagctgaagactaatagagctcattaagctttatgggaaaagagcttttatcacctcgtcaagtcaggcaacatatttccattagatccctaatttcgggtggctctgtagctgctgatatgtactcccctgctaggcttacaccggaccccggccttacagacatttttattgacatttctaagtctgaattacattttgtgtggcaccacttacagatgtcttcaattaaatgtgggtaaataaaagggattatatatcagagcccgaaagattcttgaatttctcatctgagtcaaactttgccagctagtccagtagggcacagtctcattgtcacttttgtaggtagagagctataggagaggcatttataacaaaagttaaaccaggtgtgaatgtaggtcacctaggtttctcttcaggtgtgtccttctgttccttcatttcaaaattttctgtattaataggataataacttactgataagttagcacctctggtgtacaggtactgtgctttccacttcccttattttaattcttacagaatgtcaatgaggtagatattcccagttttcttatgaagaaaattgaacccagagaggtagattaggtaggtgctcaatatcacagctactagtatgtgacaataatcacaagataggaaggaaatagaatgtggttaagattctaacattacatgaagtgatatgatagtatttgaaagaagaccgtgattagttagggagtatttagtaagccccagagcagggtttctcaaccttggtactatcagcatggtgggctggataattctttgttgtgaggagctgtcctgcacattatgggaagcttagcatctctggcttctgctcactagatgctagtaggactcacccctctgagttgcaacaaaatgtctccagactttgccaaatgtccctagggggacaaaatagcttcctgttgaaaaccacatcccta

SEQ ID NO: 63272 - DNA, 1484 bp, Homo sapiens
acattaattttctataatctttgggttcactttaagtggatttactggaaaattgtataataattttttctttttctctgtgttcctttttgccgtctgtttactggatgaaatggattctgttcaaatttgactgcagttcacaagattcctttgcagttcacccttggaggtaagagttactcactgaccttaatattagaattggtaattgaacaccattgttgatatctttcattaggcatttatttgataatttaggagtgctcattttggtgggacacatatattcttcaataacagtaatggagtgagttactgcaggctttttttttggataaaagtttctagaagttatatcaatagcaattcactttcatgacaggttattgcctctttttaagtatattttctttctgaataagtagagagaaatcagtccttcattttaaagaggcttgttgtatcttcattactcctgtaactgtttatttaacagcagccttatgttctgtaaattgccatggtattaaaagagagctggaaaaatcagaggcaaaggctgtcttcaaggaagtttcagttagagagaccactttaaaatccatgagttgacaagagaagagcaaagttattgaggtgctgttatagcaaggcaatattctgggttcttcattcactttttcatttaatcctcatcatggttttcaatgtagaactgagaatccagtgataaaattgtgagataaagaaaaactattagatgtttagagaactagatatcgttatgagctgcatttgcagaaaaacttgtagatgatcatcaagacttggaaaaggaagtagagaaagggtggaagcagagttatgtgaagaagtggtgggacttagaaccgaaaccgggtaagaccttgccttcacttactagctatatgacattgggtaaatcacaactgccctgagcctcatttttgttatcttttagatgcaaataataattcctacctctcaaataagtgatggaaatgggagcagttataaactgtgctagtcacatcatggcactattttgtgttctcctcttaggcttcagctccacgtgatgagactctgttccttgccttgcacttgtccttccctttgtgcctattgtttatttcattttatgctttcccaacttcttcaaatcatattcgtcttcagggttgagcctcaatactgtgtccttcctgagaccatttctgcttttataacattttgtttatttgattattgaaactattattgctgataatgtggtgtggcctacactggcgcattgaaaacgtgtggtagccagcctgagtggtcaccaggagaaatggaccagaccagagagggtagtcccatccaggtttggtcacattgtctgagtatccaggatcaacggggaagcagagtggtatagtggaaagagtctaggctttgaaatgagagaggcctga

SEQ ID NO: 63273 - DNA, 2477 bp, Homo sapiens
aggcgtgagccaccacgcctggctaattttttgtatgttttagtagagacggggtttcaccgtgttagccaggatggtcttgatctcttgacctcgtgatccacctgccttggcctcccaaagtgctgggattacaggtgtgaaccactgcacccggccttgttgtcatcttttaagatgttttgaatcttaatgtctaaggtgccaaatgtaatcagaagaggtagcacaaacaatcctttctgctacgttgcttgcaattgggatagagaatagctataaaaaaatgaatttagggaattacttgaatctgccctttttactccccactaataggttaaataagatcttctcaaaccttagcttccactccttgttaaatacagatttaattctcattcttttgatgactttttaaatgggcgctagctgtgtcttttggctgctttgaaggttttatttgtctgcaatgaaatatgaaacaataaaacttttttcttttgtggaatcaaattaatttcttagagttgtagatttatcagagacattctttacataaaacctagtttgcactgccttagaactaccagttatttatagtgtaaatatgtgccagaaattgaacagggatgggaagggagtctaaaatgttaagttaacataatttagagtcgtaactgacttaaggcttccaaattcctgatagaatttagtattttacaatgaggtgtaatttagattgataattgcaaaatttttaaataaaggttttattagattataatctaaaataatcagacctgtcccctgacaaattataggacagtaagtggaagtagggtacaataagtgaaaagcccaggaaatataactggaagtatattttgttaatgtgaggaaattttggatatttgatatgactagttataagatttggaatttcactttggcaaatagtgacaccttactgatgttccttgggttaggaaaaaaaaatgttatttatctttgtaaaaaatgccttttggtgttgagtgtttcctttttctttaaaagataggaatttaaccacggttacttattaaacaaataaggcatttcaggagcaaagtggcttgaattatctgttgaatagtttatattacaaagagaaaataattatcatttttctggtaccttttttttttttttaacttaccaaaaaggaagtcattacatccaaattgctaggatcttttgacaaaattagcagtgtattttctttggtccttattccccctacccctatacttagaaaaagaacttactgattgtaactaataggaggtctaactacaattttgtgcacttggaaaatggtttagaaaattttggtaagcattaagtgcttctttggcgggaatgagaaaggattatgttatgagtcaggctaccgatgatgaatagaacaatggtaccaggcttggtaaatgagaatactttaagaaaagcaaggtcagtaagaagctgtggagcgtgagcactgtctgtgtgtatcctttttctttttagaggcctagaggattttgaaaatggtactgatgccttttatgcctggattctaaatatagaccataattcttcagttttttaaaaaaaattcaagacttgacagaataattggcatttagaatttttataaattttatcaagtgaatcaaattgacagtgttattaatattgttacaggtaacttagctgttaagtttaaaaagccaaatatcatgcaggttattcctttattgaactatgttaaatcaagatactcctagaagtaatctttaaaagtgggtacataggaagataaagaatatggctatgttaacctacgattgttattagaatgagaaaattatatgcccatctgcagaatcagatattttgtaaaacatattacattttttatgttttcaatattacgcccaaatattttgaaaaggatctttctcttaactactgttaactttacccattatttattattaagtagtcctattaatatagtcatatcagacaagtgatattaatgtgtgcaaccatctgcgtgcagccgtagtcttttttttttcaatagactttactttttagtagttttaggttcacagcaaaattgagccatagtcctttttaatagtaatcagacatcatgatagtgtttgttaaggaatctatttctgctttcaattgcagtgtatatagaaaatgtattttgcagtctcatttttttataattgttctttcaaagtattaccatttctactgaatataatatgtacagtttcattatgaaggaatttactaagtaattaactgaagtgaaacataaaaaaaaatgggttttactgatgctctaaaagagagaaggcattttttgaaatctttttcatgtcgtgggaataggagtgtcaatgtgtgtcttgtgatttgttattctgttt

SEQ ID NO: 63274 - DNA, 1246 bp, Homo sapiens
cctgcctcagcttcccaagtagctgggactacagtcacgctctagtgcctagtttctattaaaatacgtgtatttcttaattgctttacctagaactggagacaaaggagctataggtgtcctgtttttttattctggtggtagagcttcttgttcatacaggagcagatctctcgttttgataagttagctatattggggtactgtaatccatagcatactttgtgctcgttacactaacttataaaaatactgtatgcaagagtctgaagaaatacacaatgcccagcagagtgtctggaatggagtagaagcccagtgaacatgttttgaatgaatgagcagctgagttgactacttttaaaaaaacagctggagagagaattcagttgttgccaaattgaaagctacttgggaagaaaatagtgttcttgaaacttgtgacatgaagcaaaaaggaaaattcaaatgatgtcataagcttttgacagttgttctactataataagtaaaagctgctcttaatttcctgagtgagagtgttgagcaatttacatacaatgagttaagcacattttagtgagtgcaaagctcatgtgatagaaacaactttgctgtgagtgccatttgtctttagcttttgtattttaggtctgtttttcacattaaaactgaagagcatcaagttttatgacctcctggtaatcacttgacaagtgaacaatagtaccttttgatggctagtctaaacaaggaaagtttgtattttcactatggtcattcattatatatgccaaataattttaagtaactgcctgtatgattaaaaagcagttgattttcatctagtcagtagtagttaattataaaagtaaaacatatattacatatggttatttatccagagtataattctgcccttaagaatatgtaaaaatagggaatatatttgtataggtctctaaatatttatatatatatacatatatatgtatatatatatttgtgggcttttatgtgacatttattccagaaatagctcaaaattttgtaatggctttcatattactttttcctggactgtggaagaatgtgattcttctattcaagcagtcatataatcatttaattcggggcatgttccactcactgtggtagatactagggatgcatagatgaataagacatgtttggttcttgtatgttttagcccacaaataaaatttaaaatataagtgtcatttca

SEQ ID NO: 63275 - DNA, 1038 bp, Homo sapiens
aaatgaccaaagcttttcagtcatttactattggagagagacactgttatatctcaagcatgttcctttttggggagatccaaaggggtggagtcaaaactagcactgggaacattcatctttctttccttccgtttcttctctcccttccactcttttcccttcctccctctttttcattgtttgacataggctcttgctgtgtcacccaggctggagtgcagtgtcgtcatcatagctcacggcagccttgaactccagggttcaagcagtctctcctgccttggtcccctgagtagctggcactacagacatacgccaccacacctggccttttttttgagaggagaccttgctgtgttgcccagcctggtcttgaactcctggcctcaaatgatcctcccaaagtgctgagattacaggcatgagctactgtgccaagccaacatttaactcaaagttcctttcggtcagtaacttcctaaaacttgtctcagatcacaaaatcataccatcatacaacattggaggtgaaaggattttaggattatatagatgaatgtctcatatttaaagaattaattaatttgcctaaggtaacatgagtagttagtggcagagcaatgtcctgaaattgcagtgcttttttttttttttttttttttttttgagtctgggtctcactgtgtcgctcagactggagtgcagtggtgccatctcggctcactgcaacctctgcctccgaggctcaagcaattcttctgccttagactccccagtagctgggattacaggtgctcgccactaccgcccggctaatttttgtatttttggtagagatggggtttcaccatgttggccaggatggtctccaactcctgacctcaagtgatccacccgccttggcctcccaaagtgctgggattccagtcgtgaaccaccgcaccccagtctgcagtgctttttatactagacatgatgttgccatttgtaaaagttaaagtgggcctcagtaaaatatggagtgattgacatcag

SEQ ID NO: 63276 - DNA, 1588 bp, Homo sapiens
gttacttgtactttttgaatgtaatgatactcaggatgtatagagatcttttaccactgggtgtcgctctttcttcatagaattacgtctcacggcacacatgtccagtttccagctgttttcattgcattgcatttgactgttttactgttctgttttgctaatacattttaagtggctagtaaataatgttaaagtaaatgttagccattactgcgtgcaattactgttttaaacttatccttattttacaaggttacttgaccaagatggtgacattgtaagatttgaacaaaggaaatgtgacttcagagtcatggttgttaactatgctatgaagtaggaaaactttatgaggtctttttaactcaaacagtcaagttttaagttgagggttagcaatgatgaatgagtggccaaaaaatgtattcatatttttagtctttcttagaattactggtagttgtgcacaactagagggtatttatttgtgtgtgtatgtgtcgtgtgtgtacgagtgctggaaatactctgccagtttacagtagaggcaggcttacataattcagtcatgaaagctgaggcttatagtttagaggggatcgtcctcttcttaatgagtctgtaagttacaaaaataacttttttctttatttactaactggttggtttttaatattaaaatatttaggtgctttaataattgttgaaacttggtttcttggatgggagttactcttaatgcatattccacagaatgaataaatgaatgaattagtaaacttgtttttttaactgcttctgaaggtgagggtggtgagatcatctccaccaagttcgcagttcaaagccacacttctggagtcttaccaggtctataaacgttaccagatggttattcacaagaacccacctgatacgccaaccgaaagccaggtcagcaggccaagtgtaattttcctgtgcaaacagagctttcccttccacttaatatcatttaatgaaatcttggtttatttgtgctacattttatttgtgttcaatttgcagcatatctgcaaagacctaagactgaattaatggacattctgaaagtgcaaattttacctagtgccatgttaagtaccagccatgtataatttcagagtcaaagtaacatgtaaaattatttaaagtcactattttagatgcatttatctaaaagatagtaatagagctctaaattaaaatacctgtgaggaaaactcaggaaactatatttttatggtagatacgtactttgcctaacatgattttaatgctttatctgtatttgaaagatgtatgtaggaataattgatcccagttaaattattctttattaatgtgctacccttgcacaattgagtgggactaaaaaaggaagatagtagaacattttaatagaagaactcatatgctaataattttgtaagttaaatgacccaagaaaaatctgtaaaggaaaaaagcttaaaacacttagtataagtagaggtggcaaaagtagcgatcatcaccatgattaacaacaatattgactctagtttatgcagaaaactacaattag

SEQ ID NO: 63277 - DNA, 1072 bp, Homo sapiens
tgtccctcagaaatgttgggcagagatagcagtgtccttttaatgcagcaggtactttgatttgattgtgttcttcctcacaaaggcagagaagtggatgaatgtttttttttaaaaaaagatatttgggccgggcctggtggctcattcctgtaatcccagcacttagggaggccaaggtgggtgaatcacgaggtcaggagtttgagaccagtctgtccaagggagtttgagaccagtctggccaacatggtgaaactccatctctactgaaaatacaaaaattagccaggcacggtggcacacacctgtagtcccagctactcgggaggttgaggcaggagaattgcttgaacctgggaggcggaggttgcagtgagctgagatcatgccattgcactccagcctgggtgacagagcgagactctgtctcaaaaaaaagaaaaaaaagattttcagcagtaagagccaccttggaaagtttctgtgctatttactttctctagcaactcccacttctaaggtagaattttagatccacttacagctctgtatcaggatcctctgaaacatctaccccaaagctagcctaaccattgaaactctttggacttacactgtagaatctttgagacatgtgaaaaaacttttctagaaccaaatgtgattggtctaatattttaaaattctttttaggcaaaggggctgatttgagtaagcctccatgtcgaaaagcaaaggaaatccggaaagaaaggaaaaggttaaaactaatgcagcagaacccagctggagaacttgagggtttccaggctcaaggtcacccaccatctttgtttccaccaaaggctaaatccaaccagccaaaatcactcgaagatttaatttttgagtctttaccagagaatgcatcacacaagttagaggtactttggaggacttttgttgtttgttttattatgatttttttttgtttgggcatatcgtttatttttatttgaagttctaattagttgatgtttgctagttaaataatgagaatttaaaagaaattaaagagaactgggaagaa

SEQ ID NO: 63278 - DNA, 1088 bp, Homo sapiens
ggaagcttttctatcctctgttctacatttcatagtcagtttggctatgtgtctgtttttatccatcacagacaaactggaggggcccttcttatctgggggctcgtcccatcttatcctttagttcaggggaattttcttaaattttttattctatcttttcacctccattttcttttttaatgcctttatttagattttggaccttttaaactagtctctgactttaccttttctcttcagtttttcatcttttttgcagaatcttctggaaggtttcttcaacttcagttttcaggtcttctacttaatttttacatttctcctgtcatatttttacttttgaagttgtttttgttctcagactcttatttgtttatttaataacaccttgttattttatggatgtagtggcttaataaacgagatcttcctaaggatttttttaaaaggttctcttctttctgtcatggtctatgtcctccaggttactttctccagtttgttcggtacctatcttttcagtggaggctcttctcgagtgtctggtgattctgacttttcagtgttccattggaaattccgtgtacctgatgggtttggtttactgtgggtcttgggtgtttctcggccttgtttactgtgggtgatctggctgggctcttctgttggggaatccctgatgttagtatttttaggtctgatcacattctggagagaaagtatttcataacctgctgttgttctggacctgggttggtgatctcaacatgtactgtgtacacttttatttaagccgttttcagtagtaccgctgctttcagctgtggcttgcatccatcctgtaagaggctctatgttactctttcctgcaagtttgcagttttctgctgggttgagtagggagtcgtctagtcatctgcggatgggagaggggatctgacatctatcctaactgcttcgaaaacaagactttgaagggatctttctatttttagacctaactttcactcatatttccagagctatgaggtgtcaccaatccctaagacttttaagggtaatatagagaaaattggctttttttt

SEQ ID NO: 63279 - DNA, 1129 bp, Homo sapiens
agtttaaaatgactcccaggtctctgacttgagaacagaatgaacagttctgttagtaccatagacctggaatgcatggaaagaagcgggttagttttggggtactccgtgctggtgcatgtggaatacccaagtgtggttgtcacaggcatcacatacatgagtcccacagcatcgtgggcatttctctcattgcccttgtggtattggggattggtggcaggtgaaggcagagcaggggtggcagatgctggtgagaggggaactgagatgattggccgtggggtacacaagtaaagctttaggaaataaaaggcagggttctaaactttgctacacgcactttgaagattatttggcttatgaagagtaattaaacctacatgcatttctacaatgttgattagatttttaaccttaatttaatgctcctgtgctaggctgttttggtgcaagtgaaaaatatataagacattaacaaactatttttataattttagaagtggaaaatatgtgtacaaacctgtcatgaatcaaacatgttgtcctcagtacacaataaggtaagaattttaattagtagaaagaggatttatagtatgaagattgtgtataatattttagtagtctcttgtgcttttttaatgtttatttccgctctaggtagatgtcctttaaaaggaaaagtaaatgagttatgtcttttcttcatactgatgctgtatttatgtgctgatcagtaggttttagtaatattgtttgattggttcagatataaatatgtgaaaaaaataccctcttaatttagcaatcttgtcaatgaatgccatgaaatattgggaaaatgttggtaaatattcacattacttttggatattaaatattataggacttagcttagaattttctgcattctggtgtattgcttgacacagtgcttgtgttcaagcaatgctacaggctcctataaattacttggtaggttcacgttctcatgttgtgggattcaggaggacaagagagacctcgggttaaaacaggagaaactttattgagtgcacttaggcccagctgactcaacgtctaaaagactgggcccggaacaaagacttttatacacagttcacag

SEQ ID NO: 63280 - DNA, 1028 bp, Homo sapiens
ctaacagctgtgaagtatgtacaaacttttcatttatccaatatgagtgttttggaattttaacctaaacactcctatttttttttttttttttgagatggagtctcactctgtcgccagggctggagtgcagtggcgtgatcttggctcactgcaacctccgcctcccgagttcatgtgattctcctgctgcagcctcttgagtagctgggattacaggcgcccgccactatgcccagctaaatttttgtatttttagtagagatggggtttcaccatgttggccaggctggtcttgaactcctgaccttgtgatttgcccgccttggcctcccagagtgctgggattacaggcatgagccaccgtgcccggacacacactcctatttttaaacctcacactttgaatttaaaaaagaaaaaaggttaccctgccgtaattaacacactacttattttttcaggcatgtgggcacattccatgacagtacaggattatcaggatctcatagaccgaggatggcgaaggtaaagcttccagatacaaagagacttcctactgttactcaggttcttgaaaaatacagcatgcctttgaaatgctttcctgttggaaagaggtttaagaaaaatttttattatattcttttatgtagtgattttttgtctcctttttaaaaaactttgttaggaaaatgtcaaatatctataaaagcagagagtacattagaatgaacctcaagtacctatcactaagcttcagcagttattaacgttctgccaatcatgtttgattctcctgctccaccttttaatatttaacagcaaattacatcagtaggttattatgacatttatcctatcaatagataggcaataagtatgtatctctaagagagaggtctttttttctttttaacttatccacaatgctgtatcacaccttacaaaattaataaaaattctttgatgttacctgttacctactttttattagattttccagattgtctcaaaaatgtcttctt

SEQ ID NO: 63281 - DNA, 1315 bp, Homo sapiens
tctaccgctgcggctactgcaagaacgagtcgggcagccgctccaatggtgagcgagccgggccggcgggcgtgggaagccgggcgcccgggtctcgggatcccagggtcccccagcgaggacgcgagggggccggagcccctggccccagtgccacggccgagacggagggggcactctcgggagggccgcggcgccggcttagcggggcagcttcgcggtgcctgttctgcaggaaaatcctaaccggtgcccgtactctcgaaatcgtggtggtctccccagagtcgggagacggacgcccgtctggggtagattgtgtgaggtgaaggacggcgcgcagtgccagggaacgccccagagccgtagttaatggccggggctgaccggtgggtgctgcggtgggagcgtcccgggagcgagggcgaaacgcggtgcagagggagctgtgggtgtgcacacaggtgccggtcatgtatgaatcagacttccctggacgaatgtacaggaaggatgagccctttgcatctctgggttaaaaaaaaaaaaagttaaaaaaaaaaaggacaagaaactggtgaccgcggtcgctaccggcgagggattctgtttgtcctgatctgtttgaaatttttaccatttgcttatatgccgtgtctttcctccacccacccggacgacagcaaagccagcccacaagtttgttttgtttttccatcgtgattcagatttctttgggggagatttgttgctggtaaacaaaacatcgtgtttatttcctctcttgccatgcatttgccaatatagaatgtagactctattattttaatagaacagtctagctttgtggaaaacgagattcgcatgaaaacacacaggcattttccatgaaaaaggtgtaagtggggaatgatttggtcgataacggtgtgtgcatttgctccttcattaaaagtgtttattaagtgctacttgtgggcagcggttttgagtagacagttatgcaatcgttagaagtgaggattatgaagactaaatggaaaaatgcttccagtttggacttaaacggagaaaatcaacaggatgcaaatggcttatgcgacatgattacagttctgaaaggaagaaggcccggaagtacaccaaatcgtgacagtggtaatatggccttagagtattgtggatttctaccttctctttttcagaatttttgtattttggctataatatttatcaaatcaataagttacattaaacgtgcctaaaattaatattttaataggtcattacttatttttttccaataattgtgata

SEQ ID NO: 63282 - DNA, 1069 bp, Homo sapiens
ctgtctgatttcctgacatagaactgcgagatataataaagtggtggttgctttaagtcactaagttttagagttgtcacacagccagctgaaacacttggaaatactgtgcttgtggcttttttaatttttgccagtttgatgcacttaaaaaaaccaggggagtatatgttttattgcattaatgattaaaagtatgctagtctaaaaaatataaaataatttaaaccttatttttttctagttgacttctcaaaaatggtggcatactcaagagctcccttcagagtggtttcttaattttatactctcttttttcttatttctccatcagaatcatcactttcctaagtgctttctggtaaggttgcaaaattggataagctgtgacccattcaaactctttcaccttctctttttccacttgagattttaggaaagatggaacggggctggagcgcttctgagcgtgtctttgctttgagttctctccctcagatcattcggtcttggtgtcccttcatctgttcctttgtccatgccaccttgtgcttactggtttcagttttgtgtgttttctggatattttcatgctttccatccttttcccgtgttagtattttaggggaaagtatttcactgggaattctttgagggagcagtcggtgtttgtggtctctgaggcctctggtttgttcagcctggtatatgtttctttgtaagactcagttccctctcaggcactagatagtcccattttttagtatcttctgttttctcacgttgtgatctcttttcctcttcctctattttagtttcccattttggaaccatattgtatttccatgcttcttccatcatcatttcttgatgctattgatagtagtacgcctctgctttagcaaactggaaatcagaagacacggccttaagtttatgaagtgtttcattctcctgctgaaacttgtggactaaacagtttcctcacttctgaagaatggacaccacctaggctgggcgtggtggctcatgcctgtaatcccagcactttgggaggccgaggtgggtg

SEQ ID NO: 63283 - DNA, 1079 bp, Homo sapiens
accctgtgtaaataaaagatactagggaagtcttatctatatcatcaccttattattgctatggtgtaatttgattttctgagatactgaattttctgagtaattttttccatctagtgcgtataggtttgagtcttaaatgtttgtcttctcctaaaatcatgttttcgttttaggatggttttgcaagaataagacttgaccaagaccgactgccagtaataggtaaatgatactatgtttggaaaaattagttttagagaaaatatatttgttagtagaatttaagtattttactaaatgtaaatgaattttcaatgtagattaacttttacaatattgtatcttgctcaactacctgaagatactgaaaacatggccagcgtctaaaattttgatggattcatctatatcattgattcaacatctgctgtaaatattaacaaagaaatgatataatttccctcagatcttaatttagaaagttggtgattgcagtcatttttgtagtatccctctttctaatcacgttttgtcagatgccggcaccttcttttctctttgaggttctatgaatctttcattcttacctgaataatttcacactctccattactcatgtcctcctaaggtctcctgtggagagtgaatatttccatcgcacttacttgctactttcaatgttctcaatgtcctattggactcactagggcttagctctgtggttgacacatagatatgcagattttcaaatgtctggaatgtgttactctactacatgttttttgaaatggaaacagatggaatgactggctactgtaataatactacagcagctccataatgcatgaaatcctaaaaagtatgtaatattataagtatcttttcaatacaggtttcattgctattattcatcagtttccgtttagattacctgttccgatttaataacctttgataaatttgaaaaatttgtctttcaaacagagcctgttagtattaatgaagaaaatgagggatttgaacataacacacaagttagaaatcaaggaattatagctttgagttaccgtgactgg

SEQ ID NO: 63284 - DNA, 1105 bp, Homo sapiens
gatgtcggctcactgcaagctccgcctcccgggttcatgccattctcctgcctcagcctcctgagtagctgggagtacaggcgcctgtcaccacacctggctaagtttttgtatttttagtagagatggggtttcaccgtgttagccaggatggtcagcaagaccccatatctaaaaaaattttttttaattagccaggtgtcttagacaaggtagaatgaattaaaaaaaaaaaaattagccaggtgtagtggtgcacgcttctagtgccagctactcaagaagctgaggtggtaggatcccttgagcacaggagtctgaggttacagtgagccgagatcatgcaactgcactctagcctgggtggcaaagcaagaccctgtctcaaaaaaaaaaaagagttcgggtgtgcaagagagaagaaaaggagtttgggtgtgcaagagagaagaaaacgttaataggccagtaagtaggtctgtcagcttgataatgacttttttcagttaagaagaatggaagaatctcatcaagaagcaacagagaaagaagtagaaagaatcttgggattgttgcagacatattttcgagaagatcgtaagtgtaacaccattcaaagtggagcaatttgtatttatctgttcactgaggttacttgtatttaaaaggcaatttcagctgtatgtaatatttgaataaatacatatgcattttatgaggattcttctcccctttagaaatttcatgtgaaaactttgaagttaacgttttcatttttatctttaaaagatggggattttttttgttacaaaatgaaatatgccattcaagtgagaaatgtcaaaagtagctgttccacctcccctcattataaaatgtaatgtgtatattttcagattattttatcagttttatacacacctacctaaatagtttgttttggccgggcgtggtggctcacacctgtaatcccagcactttgggaggctgaggttgggagttcgatacccgcctgaccaacatggagaaacctcatctctactaaaaatacaaaattaaccgggtgtggtagtgcattcctgtaatcccagctacttgggaggct

SEQ ID NO: 63285 - DNA, 1050 bp, Homo sapiens
catggctgtgacttgccctgttatcctaagacagatgtgttctgtagtcctgggctgggagcctctgccttggcctccccagatcaaagtcttctgaccccactggagcttccccacatacatgttcatccttcccctgctcttagaagttggctttgcaaaacaataggttgggtggtgggaagatgtcacaggcatattcactggcctactttacagggcagtatgtaggtgtctgaggaggtatctgtggttgagtaaagctcctaggagttcttttagaaatacaaagaaggcagaaaggctgtcacaaaccttatcaagagtcttactctgatgtcagcttgtatatcactgatgtctggtctgaatttgactataccatgcaaactacttttagttagtaaagttagtttgtttaacaaacaacaggcaaaaaaaataaatgaaagcatacttttcattaggttgggttcaatatacggagagtgccctgtgccaaagccacgagttgatcgtccaagaaaagttcctgtgatacaagaggagagggcaatgcctgcccaggtttgttttaaaatgttgcttttaaaaaaacacattaaagttaaaatagctgttaaaataatgtgcatgcaatttggccattttttctaagtgtgcgggtctggagccaggttttgtcacttaaataatcattttatttaagcctttaagcattttattggattggctgcttgtctttgttttaactcatttctctagttttgatcagttctccgaagccagggtcaacctcagcactgtcaacatttacggctggataatgttggtttggggagctgtcctgcgcattgtaggatgcttagcggcatccccagcctctacctgttatatgctaatagcccccccgacccctgagttgtgacaaccaaaaatgtctacatgtgacaacaaatgttccctggggaggtggggggaaagtcacacccactcgagaaccactgtttctaaaccgcccttttgtattttgctattttatgttcaacc

SEQ ID NO: 63286 - DNA, 1144 bp, Homo sapiens
ccagcgtggagaggaggaggagagaagcgggagaaggccctctcttccagaggctccttttcagcactgccctccacccgcagtctgtcttccccaggatcacatggaattgttctataaatgtgcattggcttaaggttgggaacgccggcctgggaggcagtggcgtgtaagcaatctgacccaggccaggcagcggctttccagaaggctctgcagcccagagggagagggtaataaggagcagggagcctgcaggtgccgccagcctccagctctctgtgcttctcactacacatttatttgggatccgaagccagtgtcaactaccttgggctgcaatttgatttacttgacttatattttggctgggacaagccacttttcaaaacaaagcaaccataaaagaagaaaaaaacaaggcataaaattagcagtgcttctagtaaatagggacaggtcatcaccagcctcagctgacagtatcaagcagtccttttcaaacatgtcaatatgcctcctttagaaagggagaatgagcagttagttaggcgagttctaaacagcatgtcacctacagtttcatcagtagccagggaattaaagatgcaatcatacaatgggaaacgaagcggctggagaaagggtgaggagctctttatataccgtcactgaaaactctccaagatacatcaagtgaaaaatattaagatacagaacagtgtgtatgatatactattgtttatgtaaagaaaaaagaaaggggctgggtgtggtggcttacgtctatataatctcagcacttggggaggccaaagagggcaaatcacttgagctcaggagtttgagaacagcctgggcaacacagagggaccttgtagagtctactaaaagtacaacaaaaaaattaggcaggcatggtggcgcacgcctgtagtcccacatacttgggatactgaggtgggagtatcgcttgagccagggcggttgaggttgcggtgagctgtgatggtgccactgcactgtagcctgggtgacaaattgagaacctgtctccaaaacaaacaaacaaaaaacaaaaaacaaacaaacaaaagccccgaaaggaggatatacatttatgtgtaaatactacattataaag

SEQ ID NO: 63287 - DNA, 1018 bp, Homo sapiens
tgacttctatcaccattgattggttttgacagatcttgaactctatataaatggaagcaaatagtatgtatgctttgctctctggcttattttatacacggatacttgttgatttaaaaaaatttttttattgtggtaaagggcagaacataaaatttaccatcttaaccgtttctaagtgtacagttcagtagtattaggtataatcacattgttgtttgaccagtgtctctgtagtttcttagctgagaagctggcatcattgatttgagaccttattaaaatataggcattttagtgctataaatgtcactctgagacctgttttaactgcgtcccacaaattttgatatttctgttttcattttcattctgttcaaatactttacaatttccttctttctttcttcttttactcatggactattcagaaatgtgttattgtttccaaatagttggggattttccagatatctttctgttattgatttctaatttaatttcattgtagccagataagatactttgtataatttgaatcatctcaaatttatgcacagaatatggtctcccttgtacgtgttccatctgtacttgaaaaaaatgttattttgctattattggatggtgttaaaaaagtgttaattaagtcaagttggtcatagtgttgttcacgtcatctgtatccacactgattttctatccacttgttcaattattgagagaggggtttggaaataccagactataattgtggatttgtccattactcctttcagttctagcagtttttgcttcttgtgttttgaagctctgttatttgataaaaatttttagaatttttaatgtttattttagaatgtataaaattttagaatttatatggataaattgaatcctctatcattataacattatgttctttatgcctgtaatattttttgctgcaaaatctactgtcttaaataatatagacacaacagcctgattagtgtttgcatagtacatcttccccttc

SEQ ID NO: 63288 - DNA, 1044 bp, Homo sapiens
gcacctgtaatcccagctacttgggaggctgaagcaggaggattgcttgaatccaggaggcggaggctgccatgagctgacatcatgccactgcactccagccttgggcaacagagcaagaccctgtctcaacaataaaaaaaagaaatcaattatttttctttataaatgctccagtttcatgtattctgcgataagcaacagaacacagactaagtaagactgactagcctctgagaactgccaactcaaataaatgttaacagaggcagcagctgtggtggagatgagaggattcgaggactgaaaggtgatccccagctccccacattcctgcctgggccctcaaattagagactttcccaacacttctgagttctcagtgaagtatgatgcttctgccatattctttgcccccttatggtcacgtccattggaggagatttctccgagtggtgatatggggagagccagcccccgtgagtccagtttccccatgggtggggttaaggtgttcgaggtccttgagatgaactaccacaatgcagccccttctcctctcgcagctatttgccacgtgacgagctccctgggccagccttccccatccttcatggcacctgcactgatgcagcttgggacttggtggggaaggatggttcgggggtaggtaggaggattccggttttggcatcctgcagcctaaccttgccatgatactgctgactttctttctttctttctttttttttttttttggcagcaagatttattgtgaagagcgaaagaaaaaagcttccacagcgtggaaagggacccgagcgggttgccctatactgttgactttcttatctttctctgactgtggcatctatttcataatttagagtctggtggaaagggttgcgattaattagctccccaaaccccaccaacatttaggatgtccaaagtgctctatttcctcacacattctgagggcttgtcaagatctgaattggcccatgggatatgttgtgcgaatgacttcttcaggagaaggaa

SEQ ID NO: 63289 - DNA, 1009 bp, Homo sapiens
gtttagtacatggcaactctctatctttacggctttgctttatggttttgccgactcctgaaaacctggtcgtgcaggggccatgtttgtgttttctgtagctggcctccttcctccctttaagcattgcatgtgtgtgtgtttccagaactatgcatttaagaacccatctgcatccccatcatctgctcagaccttggttgtggcagatgaccccctgccagcccctgcccatgcttctcccttcactgtgctgtgtacatctggtctgtgatggaggctctagtccctgggccctccctgacctccacacagaggcagtgcccccagagggtgaaaggcttccattcggggtgctggcctgcggattctgagcagaggctctatcccacacatttcaactcaatctcgaagcataaaaggatattatgtaagcttcaactaatgcacagccctcaacagatcagttcttagaatttttcctgcccttaggcagatctgctcctggtgagcagctttaatctggctttaaaaattacttctgatggataatcaaagagattgctggtacccagcttatgctaaataaaccaatgtctgggttcttatttgggaggagttgttgtgtgtcccatactccatggaaaatttgttcctggttgctttctgataagaccgcacaagtttacaagatgccaaaatataatttatcatcttgttccagatggtaacgacttcagccagcctgaagggaagccacatcctttcctaagttggcagttcctgtcagaggcgtggacaagaaagtggcttcgtttctttccagcttgataaagccgacataaataggagcacttcatttctgaattacacaccattactcttatcacatactaaactgtttgacttcagttaatgggtgggacataatgaaatgtaaagtgcttgttacaaggaaaattgccaggtccagatgctgagcagcgaagggtgggggaggaggcatcgg

SEQ ID NO: 63290 - DNA, 1042 bp, Homo sapiens
cagcactcaagtgatcctcccacgtcagcctcctgagtagctgggactacaggtgtgcaccaccatgcccagttgattttcatatttctttttagagatggagtttcgccatgttgcccaggctggtcttgaactcctgagctcaagtgatctgcctgcctcagcctcccaaaatgttgggattacaggtgtgagccatgcacccggcctcttcctcttcttataaagaacaccagtcctatcagattagggcctcactactataacttcacttaatcccaactgcctccttaaagtgcctgcctccaaatacagtcacattggggattagggcttcaacatatggatttgaggggggcacagttcagttcatagcacatattttaaaaatttaacaataatgcacttcaccatctcactgtatgcatccctcatgtatgaatgcatgtgcactgcctggtgtggaaaactggaattttggtagcggacattgagaggagaatctttccactagccccctccagaacgctgtgggcttatgtgtgtgtgaatatgtgtgcatgtaacaaacagttacaaaaagattccataaattttcctttgatatttcccctataataactttaaagaaaatggtaaaagctttagaaaaaccatacttatgttaactttgtcttgaggaatttctcttgttaatagaatatatatgatcataacaagtatatagaatcacaattatgtaaaaataacaagaattgtacccccaaacaattgtgtaggaaaaatcaggaaattcactagaactctgaaagtggcaagcatgtagcagtattttttctgatttttttttcctacattttccacactttgtgttggccacatattatttttaaaattaaaaattgcacagcattgactaggcgtggtggctcacgcctgtaatcccagcactttgggaggctgaggcgggcagatcacgaggttaggagatcgagaccatcctggctaacatggtgagaccccatctctactaaaactacaa

SEQ ID NO: 63291 - DNA, 1082 bp, Homo sapiens
tgggggtctgtgtgtcccccactctgagaaacaggcactcttctcactctgagaagcaggaactcacaatgcatagaaatgtatagaatgaaatgtacagagagtggctgtgcatttctgtacattgtatgatcctccctgtggaagagcctgggactcagagacagcctcatgttagtttcaggttgttctgcagaaggtgcttgaatcaatttcacctacgtacatatacaactatcttccctgttagtggaaggtctagaatttggcattttggttacatagcactaatgttcagatgtgtcgttctggattaatcttggatatcaccaagcttgtcgttgctgaatatgtgtttaaaaggagtcgttctctctttgtctctctcttttttttttttttccatttagggaaatggttggaaaggtattttcaagtattagtggattttaagaggatcaaattgttcccagatgcttagggtctttgtgtaaacctaggctgaatggggaagggcaattggattgaaaagtggagggagggaggacagagaggacagctggcctcccattaaggaagccctggctggacctgaaagcctcactggagccgcttctctcttgtcctcccatgcctccttcccatttggtctctgtttcttccttttccctccactccgttctaaaattaccagctgtgacaccatgttttcaagtttaagaataagcttttagaggatggctacaactgtataaattaaggaaaagagaaaacaacattgaagcatggttctcttagcagataaagccaggacaacagacctcacccccgattttatatgacataggaaatcgacacttggtaatgtcacttacagcaatactcttctcagatgggaggcagttaagttagacagatgcattcacatctcattggcctcttattggcttcgttaccttggataagctgcttaacttttccatcctcagtttctctctctataaaatgggaagataacatctctcttttaggattggggttaggataaaattggaatgtttccaaagctcctgggataatgc

SEQ ID NO: 63292 - DNA, 1026 bp, Homo sapiens
ggcccagactgtaaagacataagaggcaggaactccagtgtggctgagagatgttggccagacccatgtgcccatgtctctgggtgacccctctgcctgccttgcccctccctctacttgtagcctgtgatgggaccacattctggttcaagaggctcagacaaacgttgttctgtgaagccttcccgacccttccactccccaggagtacccctacctcccaccagagtagcgaggttcctttctgtagcctgacaataattttaagacaggggcaagtgtattacagtttggtgaatcagattttctcatttgcagaagagattgggtgttttgagctggacagatctgggttcaaatctgctgcttattcattgtaggacatttgtcatattagtctcatgaggtctcagtttcctcacctgcaaaatgagtataaaattaatacttacctcatgaggattcagtgaaatagtgcactggaaatgcttgaccagagctggcacatgtatcacccaaggaacatctatcactattggaaggagtcccctgcaatggcagggactgtgcctggtccccagtccttagcacagtgggctgcacatagtagcccctcaacaaatgtttgtagaatgattgtgtttagctgggcagggtggctcacacctataatccagcactttgggaggccaaggctggaggatcacttgagttcaggagttcgagaccagcctgggcaacatggcaaaaccccatcttttttttttttttttttttttttttgagacagaatcttgctctgtcgcccaggctggagtgcagtggtgtgatctcggctcactgcaagctccgcctcctgggttcatgccattctcctgcctcaggctcccaagtagctgggactacaggtgcctgccaccatgcccagcttttttttttttttttttttttgtatttttagtagagatggagtttcaccgtgttagccaggatggtctcgatctcctgaccttgtgatctgcctgc

SEQ ID NO: 63293 - DNA, 1004 bp, Homo sapiens
gccaaaccctcacactactgcggctgatccatcaaatagtttatttttcacctttgccctgatgtcacttggacatctgactgtctcctagagaaagttgtttttctgccagagaaggtacagcaggcagggcattgcttcctatttagtcgaaggcttattttaaattgggactaggccaagttcaagtgcaggagcacactggcccctgggagagcctggccaggtacatttggcttgtgagaccagccgtcagcactttggctcatggaacacacgtctgtccgagcagtgcagacctggcttgtgtgaactgggctctgtgtgccctcagggaaaatgccgaggccacatctagaaattctggctgaggctgagagccgtgtgcagagctgcccccacacatttccttgtgtatattttgggttcaggctgacatttcctcttagcatgggtggaggtaatggctgaatttttaggaggcttgaatcccttctacaaatatgcctcctcgccctgtaaccaagttttgctgggttgcagttcaggaatgtatcttgctgcttgtacagcccatcatggaatgtgaggacttagctcagaagactaaagcactattccttctaggaaaaagaaaaaaaaagaaagaaagaaggaaagttcctcagagttcaccagtgaaatggatcttatgagtgtgagggctgaattcctatgatatggctgggttcctcatgtcatattcccctcctgacatgtctagagtatataagaaataacccacagtttagctgtggtcactgtagactggttaggagtttgagttctgcacacacagagcctatgtatgaaccgtggcactgctcagtgtggcctccgggtgagttcaccactcaaagcctgcttcctccattgccagctaaggacaacagcagtacctgctgcataggctcattaagagaattaaggcagagaagagatgggagccacttagcagagggcca

SEQ ID NO: 63294 - DNA, 1050 bp, Homo sapiens
caatgtctgtgaagttatgagttggtgtgctcatggcatctttttcctaatatgtaaatgcataactattgaaatactctaatctgagaaatcctaacgtggtaacactgacttatcctctaaaactcagcttaactattccctcttctggaacatctccccttacctcttccaacgctggttaaaatattcctttcccatccctgtcatgtggtagccatcgttatctgatgatagacgtaagcataagaaccatgttgcatctcactttttaaccctagtgctttgcacagggccaggatgtagcagcacttgataagtgactttgaataactagatgaaactcctttagtctagggaagttcatgctgtctggcatgcatgggtgcccctaacaggacgctccgtgattctgtgaagatagtgtgctgtcactcagggcgccagcattccgaagcttctctttggatgcccatcaacaaatcagatgtatgaactttgatttagactcccagctcccagcaaggaaccagtatgctctgtgtctggggagtgtttggcctctgaccttccgcatcacatattgcctgtcagttacccagccagccttggatgcttccagtctctggcctcatttcccaggattgataagggatgaaattgggcattggcagtctgggatggagggggaagtgatcaggggagaggcccttgatccagtggggcagaagtgagccattcgatggaatggaggtttccttcagcctcctgaagttactttccctaatatacatcataacctcaggttcttcctgctctgaactctgactgtacctggtgtctgctggtgttttggttccgtattcctgcttcttgcctctccagcatgtgcctgtctttccacgtagcgtcctgtcttaaacactttttttttttttgagatggagtcttgctcttctcacccaggctggagtgcaatggcacaatctcagctcactgcaacctctgcttcccgggttcgagcgattttcctgccccagcctcccaagt

SEQ ID NO: 63295 - DNA, 1966 bp, Homo sapiens
gaaggaaatcggagcagcaaataggccagcagccaccctccttgtgcaaatgccacagcaactcagctacccagagtcactagtctctcatcaaaagttacatcccaagcctcagaagtgtgatcatggaatatgacctgcttgtattatagttattcatataccggtgttatggaactgccttatggaaatcttcaggtcaaatgctgccgcctctgtggaacctagacaggattagccccttgtctctccgttccagccgtcctcttttctctcttaaaaaaataatgttcaagaaacgtgcttgaacatttaaaatattttagcaagaaggaaagttaaagatcaaggtttcgttttacagatacgaaaagagagactcaaagaagtccagggtcttggccagggccacacatcaaggtaggactccaaccccagaccgcagacacttgccctggtgttctctgcgccaagtcctgcggcctcgttggttttattcggctttgtatcctggttatttgtgtttgatgcttttatggagacagacactgcttgaggaaggatatgtctggttcacaatgccacgccacaagagtaacacagagcctgggaggtagatggtggttgaattgaatgacacagcccccaccttcaaggaggtaggtaggtgagtgtgtgtgtgtgtgtgtgtgtgtgtgtgtgtgtgtgtgtgtgtgtgtgagatacctgagcatgcacatatggggcaggctttgtggtgaaggataatgccccaggaggggatgtctggaaatgtgggaggatatttttggttgttccagtgactagggagggaactgctattaggaggatatttttggttgtcccagtgactggggaggatgctattggcgtctagtgggggagggctagggtcactctcatgtgagagtcctgcacagcagagaattgcctcaccccaatgccaatagcatctcaatagaggatgctgccaggctttgaggaatcatgagagacagttctaattgggaggatgaaagaaagggtctctgggcttgcccagctctgggctgtaagcgtagatgagactggaagagaatgagggcttgatggggagcacctgtgtgtgtgtatgtgcatatgtgtacatgcatgtgtgggtgtatttttttttttcaggacttggttccatagccaaaagcgaagcgttcttggatttactgtagctggggtttagcaggtccttgcaacttttgcacagatgatcaggaggtggtttaggaagctggcaataaaatcagtaactagtgctggctagaggagcatagagatggctgcagggctgggtgccctcatttatccccttgtgaccaaggtctgtgaaatccattttggtggctagctgtgttttttttctgcctctcccctattgaggtcgcagtccttggttcataaccccagtaatcatgttcacatcaactccctgcgatgacagaacatgttgaggattatgaaatcattcaggagaaacgagaggcctgagaaggaagacccagggaaaccaaagtttgcagagcaatgcatctgaaaaacagaggagcaagtgaaattctccagggaatgtagagcagccgaccctttgtaatggaggtgtcatttcagatgtgttgagtgtcagctctgtccccatccctctgtccgctatccacagtgttatagagtttcagtctgtcactttgcaagtgtattcatggctgctaattgagataaagcaaagtccccaagacttattttccttaggttggggaagggcagtattgagaaagcccagaatttatagacaaagatcctatattggagttcttgccctaccccttaccagctgtgtgaccttgagcaagtcgtgacgttgtgaactgtctgagtcaccttccttctcgtggatggtggggccgcttatccctgc

SEQ ID NO: 63296 - DNA, 1024 bp, Homo sapiens
aatccagaactgtgtgtgtgtgtgtgtgtgtgtgtgtgtgtttgatgttcaaatagtcccagatttgacagtggcagccccttttaggtggttcttatgtcctttgacgcgactcccccagctgggaagtaggtacgtgtatgtacacatgcatgtgtgcacacagccctccacaactagttctggatttgtctgattcctctgattgcagccctgccctgagggatctctggagtccaaccaccttctgtatatgcaagctcctctctgattgtgagaacctggctcctattatccttgatactggatactattctttgtaataaataacaaggggaagggaacagaagcctttctgacagaaccatcctggagagagggagggagaagctttttttttttcatctggaaagccctttgcacacatcggcctattgaagcactttgcttgattcagctattctcctctcaggacctgcctggatcatcccagcctgtagaatcctgggtttctgtggcagtttgttcttctggtatcacctgctatgctctgaatgtttgtatccctctcagccccgaaattcctgtgttgaaatcctaacccctaaggtgatggtatgaggaggtggggccttcgggaggtgattaggccataagggtggagcctttgtgaatgggattagtgcccttataaaaagaggccccacagcactgccttgcctcttctgccacgtgaagatgcagtgagaaggagctgtctgtgaactaggaaggggtcctcatgagacactgaacctgctggtgccttgatcttggacttcccagcctccagaactgtgagcaatacatctctgttgttcataagccaccccatctatgagattctgttgtagcagcctgagccaatgaagacaccacccttcacagttctcctttctttggactttcagctcctcgggcttgatgagcctgtcacccctggagtgtgtgatccccatggaatccatcccagtgcccgccttgg

SEQ ID NO: 63297 - DNA, 1052 bp, Homo sapiens
actgcaaggcagaaggtggcagggggaggcaggtgagtgggtaagtagaagtgacagctgacggcctgagagcgagggacaaggctgagtcagagttctcggtgatcaagtagtctggcgctttcacttttacagacagaaaggctaaagctcagagaagtcccctggcttagatcccatggtgggcctggactggaatccagtcccctcaacttcacatacggtggttacatttggtgccacagcactaatgtcactcacttatgtcatagttgccgaggacggctgagtgtcattgagcaagtatttaattatgttcaagatcctctgtctcaaaaaagtcagggaagtgtttatgatttgaaaaataattccattccaaagagtttaggtgaaaatgccatcacgtagaatatgtgggcagatatcttttattccagatcttctttgctgggacctcattttccagtggtgcctaatggacgaagcctggccgcgttcccgccctggaatgaggctgacaagcctaggtcctcccagtggaaaatatgagtacagaagtggggaaaagacagtggctttctgattgtctccatctctgaaagctttcactgagttatacatggaagttgttccctggcacttaaaataacttcttacatatggtttctaatttattttacttacaaaagtagtatgtgttcagcatagaactagaaagtagatataaatttcattaagaaaaaacacaaatgatttcaccaccgaaagagaattaccgttaacaccttggcaatacttgtccaaattgcttcattgttcaggctattatgcttgcgctgtctctctctctctctgtcacgtgctcgtgtgtgtatgtctatacatagactgtatagacacacatacccatgtatatcattgatacacataaaatgtggatcatgctgctaagttttttcaacctatgttcaattaataatggacatgtttgcatctagatacatgaagatctatcttattttaattattattattattattattattat

SEQ ID NO: 63298 - DNA, 1059 bp, Homo sapiens
taggaattggtgacttggaaacctggccaagggctgtctggatagacgcgggagaaacgggatgggagaagcagctgagcttcttgcagggaggaggaagccggatccccggtgctgggcaggaggcccaggagacaccccttgagaaatgctaccctgagctgcagactgtggcggctgtggcgttggctcttcaggctttcctgtgaggtgcccccacactcccggccccacccgccctgggcagctgccccaaattgctcccttccctctgtcaacacttctccaagactccagagtttttcctgcgcaggaggggaagggcagaaacctccccattccctccacccgagttagagaagtcagccctttggaaaacatgatgcatcttcgctctggagccagttcgccagtccgctccccagcgcggcactttgccttgtaggcggggtgcagatgagcctctctgcctcactagggaaaggggctgggttgttgggctgagggtctccggggattagactctgcgctgaccaaactgggctctcgtggcatcattccttggttacgcaggtcaagtttccattgttctcttgcctctgaggcccactgggtccggggcagactgagcataactacgctgagccacgtcaccggccggtgagacgcgcggaggcattgatgggtcccctggttcccgctcagtctccgaaatgtgagctgccgcggagtgggtgctgggctgtcccgctggcttcagcctgaggagcaggagcagagggcgtcagttagatggtggctccctcagttccgtgggcccaggtctgcagttcttttcctccttctgggaggggaggggaaggagagccggcagcagcggggctccctggccctactctgggggcacagctgggagaagctgcaaagcttcagcttgtgacgccatctgggcggcagtcccacggcccctagagcagctgggaaggggatcccgccctgaaatggggctcagggaggaacatatgggcaggcatctgtgagggcgtggctggacgtgct

SEQ ID NO: 63299 - DNA, 1106 bp, Homo sapiens
tgtaaatatgccatgcatttagtttttgccaaactgatgcctaatagcctctgcaggctgttaggaaaccttgtcatgcctgtgtccagctctctctcacaacgattccttaagctcagcaaagatgaagcaggaatttggtcagtctgttgtcacgggaagattttcttcccatgtacacatcaactgctgaagatctgagaatttaggaaaactaatctcttatcctcagacacaattgtatattaattgcagctggccacagttaggcagggtgtagagggaattatacagacagggcctctcggctggttatggaaagagggaaatatttttaggacttgcaaacacgcatgcaggcgcgcacccacccacgctgacacgctcattcacttactctgcccacggactttatgctatcaatagatgctcacggatgctatttctggcccggctttctggatttctgttccttcatggaggcttgagtcagcagttctgagcctcagcgcctggtttttgctgcctggctcacaagaagggcagccctgtgccagcttctgtctcgactgctgcgggcaggcgtgggaagaaatttaccccagatgctgcacattcaccccagggcagtcacaggtagctgctgtctctgttcaaaatgagggaaggacggagaggcagggaagttctgcatttgctttctgtgctttcgtctcggaagcatctccaccaccgggccactgaggggagcccctcccaccacagaggcgcagatccgcccttctcaacctgcctctccagtccggcctcagaaaccagctttgctgttgattttggcagctgggagacgccatctctgtttacacccaaatgttttccttaaaaggccttttattcctagtacaaagtagcctctagaaccagtgactttaaaccttagaggaactccgtggattaacacatcaacattcaaagcaaatgcgacatcaaacctctttaaacaagaaccagaacgtttttgtggtgcttactgaattttctgttcttcttggaaatagtttccggagaagaaagatggataacattggttatgtttttgatcctag

SEQ ID NO: 63300 - DNA, 1025 bp, Homo sapiens
gtagacttttttttttttttgagacagagtcttgctctgtcacacaggctggagtgcagtggcgtgacttcggctcactgcaagctccgcttcccgggttcacaccattctcctgtctctgcctcccgagtaactgggacaacaggcactcgccaccatgcccggctaatttttttgtatttttagtagagacgaggtttcaccgtgttagccaggatggtctcgatctcctgaccttgtgatccgcccatcttggcctcccaaagtgctgggattacaggcatgagccaccatgcctggccaacagggtcactctttcataaacagttctgagggcttctctcagttctttcatcttcacgttctctctttgaagccaccttctgtcctcatcctggctgagtttctcttcttcagttgctcacaggtctgactgtgccagctgccctttcttacagctttggggtaggttttgagcaattctctggtgtcactttaattgactccatgacatcctcctccttcttccaggtttgcagttttgctttctggtttttggcactgtatatttgctccttcaatcagcaagagactgccaaagactagacttgtgaggacatgactgggcacagtgtctcacgtctgtagtcccagcactttgggaggatcacttgagcccaggagttcgagaccagcttaggcaacatagtgagaccacatctctacaaaaaatagaaaaaattagctaggcatggtggcacacgtctgtggtcccagctaatcaggagactaaggcgggaggatcacttgagcccaggaggtcgaggctgcagtgagatgagattgtgccatcgctctccagcctgggtgacagagtgagaccctgtctcaaataaaatacagtaaaatagacttgtgaagacaggaggagcatacgagggaggatcaagtctatacatggttgctttgttgatgacattgtcctaatgctgccctttgtgttctcttatgtaaccttgttacca

SEQ ID NO: 63301 - DNA, 1095 bp, Homo sapiens
taatttgaaaataaaagtgagtctcgactggctgtgagattacaggtggctcacacttgtaattccagcactttgggaggccaaggcaggcggatcacttgaggctgggagttcaagaccagcctgggcagcatggtgaaaccccatctctactaaaaaatacaaaaattagctgggcgtggtggcgtgcacctgtggtcccagctactcgggaggctgagggaggagaattgcttgaacccaggaggcagaggttgcagtgagctgagatcgtgccactgcactccagcctgggccacagagcgagagcgagactccatctcaaaaaaaaaaacaaaaacaaaaaagaaaacccaaaaaacaaaagtcagtctcatctgtgtttactgacttcttttctaggacatttgggttacctccctgggtctaatagtaaaattcccagtcttccacctctgtcataactgaatcaacagggtttttcctgctgaagagtcacctgtagagctgtccttgcttgtgaagaactttgaaaggttccaggtgtaaatatggtgaaggtggtagaaagagatgccgtaaatagatcagccctttgcaaggagagaacaagagaaccttctggaaaagatggggcttcaccgaagcttgtacttaagcccaagaaaccacttagactcccagaggtgagcaggtgagatttaatgttggcatgtaagaggttaacagaatatctgtaccgctgcaaataaacgaacacaaccatcttctgccttttctctattcatcataagacagagttttgccaggaccttctccccatcctctgaggtctcgtgcggcatgtgtttatggggctctggctgtgcttggggcaccctgcatggctggagagtggagacaccagacacagacacacctgagactcttaacaaggcaagaaagcgccaaggcatcaatatgcaggcagccgaggggatgggaagaaagaagtctgggggctggcagggagcagacccctccagggagctgggggagctgggatgtgattttctggaggaattgagagagatgcagaagttgaggagggggcag

SEQ ID NO: 63302 - DNA, 1025 bp, Homo sapiens
ggaccacagttatgcaccaccacacccacctaattttgtttatttttttgtagagacaaggtctcactatgttgcccaggctggtcttgaactcctgggctcaagcaatcctcccacctcggccaccccaagtgctgggattacagatgtgagccatggtgcccagcccctctcctggttcttgattgtgtttttgacagccgtgagatggtgttgtcccactaagtaatatgccctgtcactacatcataactttgcagttgttgggattctacgtaaaagcacttcactttaatgctgccttaatttcctttatggtactatacttggggggaaattttttcttataaataagaatcctggtcctgggcattcatagatggtatttaatttactttttccaatgcccttgcaaaatagatgcttttcctcttttgccagctgaggaaataaggttcagtatggttaaacagtcggctcaggccacacagctaacgagggagaagtcaggatttgaactcgagtctcatttcaaaccctatcttgttatcgcagcagaacctttacctattaaggctaaggacgtttagatggctttgtgcttttgcacctcatctgaaaaatgtttttaaaagttggcagatgagttctaattgtggttcctcatttttttcctcatgtattttctgagtacgaggcttggctgaaggccagttcctaggtgcccagggaaagggccactttcttcaaaacagtagtagcccaggttagagcttacagatgtttcagctccacgtggtaagcttctttgggccctcacctgcatatggagccgaagaggtctgttttctgacagagaaacaaacccccagggtgctgagaatggtgacaggatgaacaggttgcaggatccttgccaccaagtgacatccaatgctgacagtgagtgacggcttccccgggaggtgctttccagagcacacctcgtcacaccaccccgacagccaccttccccgcaagattga

SEQ ID NO: 63303 - DNA, 1061 bp, Homo sapiens
ctgccataggccagggacagggatttggctgctgatgggtgacatgctgccagctacagaatggggctgactgggcactgggagcttggtgatggggtgtcacggacattcctacaggcccagcccgtgtttagaatcacagagctgagccgatgcatgtcacggagaactgcctttgccctgtacacgcatgctgcattaggggcctgccttgggcggctcagctggccgcgcctctgcttgtttagggtgagcctttgcacagggcttggctttgtggagctcatttggtggccaaagatggtgttgcagccccagcccgctcgcaggcccagtaccttttgctccctagcttgccccaggccctcagactgtgcggtgcaaaggtccttggaggctagccccgggctggctgtgaggggagagccaggtgccgcagctctccctggtacagacttcagctgcctccaggacccggggcctgaaggaggcagaagccggcggtggaaaagggcgcacgtctctcccagcgtcgctcccgctgcccgctgcccactgcagcctatttacctgttcctccagccatccccttagtcctgggccgggagagaccatttcctccttcctggagggatgagccaacagggctgagccccctactctctcggtggtcagcccgcccgaccaccacgcccctcctttctagggccccagctcccgggccgcggctcgtttgcatttcaaagctacacaatgcgggcggtcccggcgaggcgggaggggccggggcagagggagggtcttcgcctccccacccccagccccgtttccggagcccgcgatggagctttgtgaagatgcaggcgttggggctgctcggcgatgatgacatcatcgtgtcacacacaggagccggctgccggggggtttaagagaagagcctttcggaccacaccggcgctcacgctcatacccgcacgccccgggcagagccgcgcacgccggccacactcgggcgcgcgccggccacactcgcgcgcacacatacgcggcgctcgccc

SEQ ID NO: 63304 - DNA, 1050 bp, Homo sapiens
gtaaagggccgaaccgtcctgtcattggtggaggcagtgcttgactgtgcatcgatccaggaatccgatcttttctctcaaccacagagctaacgtgctcagaagtggcctttatcctggccgagtgtttattagaattcacgtttctgttatggtcgtctccattacctacccaggcatgtttggacgatggggcgtattgaatgggtctgccggccgggtcgcatttcagcaactcaggcttgtatccaaagtggacctcccagcctcacctgcccccacttttccagagagaagactatgtttcagagaagagtattttctggggacttgggggtaggggtagtaaagtgggttcttaagagtcatggatgtgtagattaaaagatggtggggattgatctgtgtgttgtaggagggatggggccccggggggtacttcctcactggtccctcgacccctgggcttcagtgaggagctggctcggcgtagtgatgtaatgctaggctgagcctcgtggttttctgggctccagctctttagcagggagtcattcttccgagcaggtgtgcacccatcatttgtcttcacccctgtagcttgagaaagcatcgtcttacaatggaggcacatcgcgtttgaggattttctttttaaatgttatgatccttgtgctgtgcctgccttgtttctcatgcacgtgtagtgttgctaggtgcatggaaatacaactcgagtctaggcagaaaagaaccactttaacctattttttgcaagtccctatagtggaattgagttaatcagtgacaggcactggccaactctcacggctcagacctatctagtgaagagcttaggaaacagaaaggacaatgtgactgtacgtttgggaaaatgtgctcctcagtcattggaaattcagctcgccggtccctaacgtccccgccctctttttcagctgagttaataaatgatcagtgttccgtcagctgagggccgagtttagatagcttctgttaggtagctgtgcctttttggataaggtccct

SEQ ID NO: 63305 - DNA, 1145 bp, Homo sapiens
tgttgtatttagagcaaaggctcttgtttggaggcagtgctccatgaaggtaggcctggttctatggaatttccagctctagctgtcatgaatgggctggttaccttgggcgagccactttagctctctgggctttagctgggataagtgtgttggaataggatatgatctctaaattttcttccaacttccaagattttatggcctttgcaatttattatttcaagcccttaaattatctccagtaaaacttgagcaaatgtaaccatttaatgatatactgggaaccatatctatagtacctctttattacaagatgcttatgttttagttagagatatactcacatgttcacatatgggtgtatatatgtgtgtatgtgtatattatgtatgtgtgtggatgctgatcttaaactattttgttgtcgtagttcatagaagtaaaaacctgaaaatatttaaaccagatcacaaatacagggaaataggctcttagggtctgcattttccagctacctgactcttgctttggggccaatttccacgcccttctttcacacggtgtgtcagctgtggaggtgtttaattcagcattgtgtggagcagagcttttccgactgtgctctgtgggactctagagaccaagaaagtacttgaaaaaacgtttttaagccgaactagtacacagtcgaggagctcggcagggtcctgttttcgtggccagcacagtctgtccccacctggggttacgttgttccctctttcctgcttggttgtacacaccgcactgtgtgctattggataccattagcacattgattgcctggtacggatagattaattcggttggtacagctggttgaccctcctgccctgtctgccttattaaaaattattgcatgaacacaggacaggccgttaaaaatcaggggctgtttgtgatgactcatgggtgcatctcaggactcttcccagtgatgtgcagcggggggagaaaccaacgggcatccggctacctcatgtctccagcccccagtgtcaggtttttgagttcctccaaacaacttaattgctctcgatgatggaccttatacaagcatattgtaaattgctattacattacatatcgtaaaatgctattac

SEQ ID NO: 63306 - DNA, 1098 bp, Homo sapiens
tcactgtagatgtggccactgtgggcaggtgaggtggccgtcctctcactgtagatgtggccactgtgggcgggtgaggtggccgtcctctcactgtagatgtggccactctgggcgggtgaggtggccgtcctctcactgtagatgtggccactgtgggcgggtgaggtcgctgtcctccccgtgtgaacacagccactgtgcgcaggtgaggtggtcgtcctctcagtgtagatgtggccactgtgggcaggtgaggtcgccatcctctcagtgtagatgtggccactgtgggcaggtgaggtcgccgtcctccccatgtgaacatggccactgtgggcaggtgaggtggccgtcctccccatgtgaacacggccactgtgggcaggtgaggtcgccgtcctccccatgtgaacatggccactgtgggcaggtgaggtggccatcctctcactgtaaatgtggccactgtgggcaggtgaggtggccgtcctctcactgtagatgtggccactgtgggcaggtgaggtggccgtcctccccatgtgaacgcagccactgtgggcaggtgaggtaactgtcctccccatgtgaacacagccactgtgggcaggtgaggtgcccgtcctctcactgtagatgtggccactgtgggcaggtgaggtaactgtcctccccatgtgaacacagccactgtgggcaggtgaggtgcccgtcctctcactgtagatgtggccactgtgggcaggtgaggtcgccatcctctcatgtctcctcacctggctctatgcaggccccaaactctccatcgtccttccagcctgggatgaacggggcttggatctggtggctgtgaacccatatacccctggctcgatggccagggcccccaggtgcagtgccagcctctgcctggactgcatcagaatctccagtggtctcacctgttccctggtcctgggcccatgaaacactcacattgtgaagagggagcagccggcccaagagggcccgagtgcctgtggcagccagatccaggcctgaaaaggctcggccctcagcttgctgtgtgctctggtccgaatgtgtgtgtccccg

SEQ ID NO: 63307 - DNA, 1051 bp, Homo sapiens
cctgggcagcatagcaagactgcatctctacaaaaaatttaaaaactagccaggtgtggtgtcacgagtttggctagccacttaggagggtgaagccagaggatcacttggagttcaaggttgcaatgagctatgataacgccactgcactgcagcctgggtgacagagtgagaccctggctcttcaaaaaaaaaaaaaatgacgtgtggcatgctctaggtggagccaggatcagcccagggctgctgaagtcccagctgtctgaaccgcccgcacagcacagtggggctgtcactccaacagtgctcctgggtgccttcttacttcttaccctacctagcaaagcctccccttaggtgctccccatcctcactatggctctgtcacttagatgctcacgaggcggactctgctgggaacaatttggtttatgtaaagacactttaatttcttcatcactaagtgagttagcacggtcagtaactgtccccacagtgcctcgacggcacttttccctcttggtttctgggaattgaacagaagtttgagagcagacatacgagagcaagatagacctcaggaagcagaggagcacagccccacccggtgggggttcctggggtctctgtgagatcctgaacacccactggtctgaggacagaaggcagccatggcacgggcctcctgctctcttgctggtcggttttgggtttggtttcttgagctgtctgttttggaccacatcagaggagggtgggcaccaaaggacagcctctgcctggtacttctgcagcactgatgcctcacgcctctggggtaaaaaccccacaggaacttggagctcaaaggcccatccaagcttatcctcaaagctgactcatttttgtggccaaatactaaagtgttacccactggaggtttaagaatgaggataggcccagatagaagcagatgaggtgagatagcccagttccagacttcccgatgaggaggcgcacctgtggcacctgttacgatgggggccctgagcccccaccccagccctgcaga

SEQ ID NO: 63308 - DNA, 1040 bp, Homo sapiens
ttatttgtggaatgaacaaatgaatcacacagttgattgtgtctgcattggtcttcatgcagatatgccgtgtggatgtttagaaatccagtaggggagcagggaggctgggtgtggtggctcacacctgtaatctcaacactttgggaggctgaggcagacggatcacttgaggtcaggagttcaagaccaacctggccaacataatgaaaccccatctctactaaaaatagaaaaattagccaggcgtggtggcacacacctgtaatcccagctactcgggaggctcagacaagagaatcacttcaacctgagaggtggaggttgtagtgagctgagatcgcaccactgcactccagcctgggtgatggaatgggactatttcaaaaaaaaaaaaatgcagtaggcgagcagggaggacttcgaacccagttggaccacaggagcccttctagccctgtgaggggccccgtggagcagcctgctctggtaaccaacacaataagacagccgttcccaaccagggaggattttgcccccacaagggtacatggcaatgtctagacacagtgttggttgtcacagctggggtaagggtggggcctactggcatccattgtgtggaggccagggatgctggtaagcatcctacagggcacaggacagcccccagcataaaaatctgactgcccccaaatgaccataatgccaaggataagaaaccctgcagcaagattaggtttcctggttcatgatgagctaatgagagcatgtcagttctaaagaggaaagccatgctaagcaggcagggagctctttcttctggaggaagcaatgagcagatggttaagctcattgttgcgtgataactgctgacatttgaagggcctccgaaggcttccttctgcaggctgcagaggcacgtgtaacggcctgagagggagagggttggtgtttgtgggccttgacgacgggataggctgaggctcgtgcttcctcctgccaaggcccatttgaaagcacctggtccccctcagcat

SEQ ID NO: 63309 - DNA, 1039 bp, Homo sapiens
gtgagaggcttgaaaccaggactagctcatagatgtgcttccaaatgatgctttcaatccaagcgtttattgatcctgtaagaaagtgtgaccagtcaagggggaaacaaagccaaggccagttcctgaactcaagaaccttgaagttttcttgtgttgtgagctgagttctctgccaggtactccaggagaaaggttgctatgagcaaagcttggtaagcactctgcagaatactcactgcccagagatttgcagtcgggagcatgaattgctctgagaaaatcgacaggaagagaccagttcaggggttaattgtgcatttcccaaaccttgtttgtttgttgggatgagagatagggctccctgatttagcaaatgaaaatacagggtgcccattaaatctgaatcttagataaacaaagaatcatcgagacatgggacatacttatattaaaaaacatgttcatttatctgaaattcaaatcagctgaacatcctgtcctttgtctggcaaccatgccggtggcagaaggggactgggggtacataacacctgtcacgaggcacacattggaaacgctgtcccaggtcttacctgtgccagctccgtttactcctcattctgcatctcccagtacttaggcctgcagaccgctttatcgtgtttgccctcttgtccaatgacacacttttagttttctggcatccttgactgcctggagcagctgtgacctcagaaatgcatgaaagatgccgctgggtgccagcagaacctagagtagccaagccaaagctggggctggccggatccccatgggcagtagggtggtggcacctttgagcatcatttggccaacatttgcagcatctgcagcatgtttgggaaataggagcaacctccttgactggcaggggctgatgaggtagaaaagctgagaggaggcagctgggagagcagtgagactaggcaagaggcagggccaaggataggcaggcaggactgaaggagaggttacaggtgatggctggagcggcagg

SEQ ID NO: 63310 - DNA, 1100 bp, Homo sapiens
agtccacggattccgtccccatctctaagtctacactgtcccggtcgctcagcctgcaagccagtgactttgatggtgcttcttcctcaggcaatcccgaggccgtggcccttgccccagatgcatatagcacgggttccagcagtgcttctagtacccttaagcgaactaaaaaaccgaggccgccttccttaaaaaagaaacagaccaccaagaaacccacagagacccccccagtgaaggagacgcaacaggagccagatgaagagagccttgtccccagtggggagaatctagcatctgagacgaaaacggaatctgccaagacggaaggtcctagcccagccttattggaggagacgccccttgagcccgctgtggggcccaaagctgcctgccctctggactcagagagtgcagaaggggttgtccccccggcttctggaggtggcagagtgcagaactcaccccctgtcgggaggaaaacgctgcctcttaccacggccccggaggcaggggaggtaaccccatcggatagcggggggcaagaggactctccagccaaagggctctccgtaaggctggagtttgactattctgaggacaagagtagttgggacaaccagcaggaaaacccccctcctaccaaaaagataggcaaaaagccagttgccaaaatgcccctgaggaggccaaagatgaaaaagacacccgagaaacttgacaacactcctgcctcacctcccagatcccctgctgaacccaatgacatccccattgctaaaggtacttacacctttgatattgacaagtgggatgaccccaattttaaccctttttcttccacctcaaaaatgcaggagtctcccaaactgccccaacaatcatacaactttgacccagacacctgtgatgagtccgttgacccctttaagacatcctctaagacccccagctcaccttctaaatccccagcctcctttgagatcccagccagtgctatggaagccaatggagtggacggggatgggctaaacaagcccgccaagaagaagaagacgcccctaaagacgtaagttcaggggtggaggtggtaagga

SEQ ID NO: 63311 - DNA, 1007 bp, Homo sapiens
gactctctagaattcacgttggaaacttgatttcaagcctggaataggagaagtctgcaatggctagactgcaaggccgtgctctctcatctggaatgagagccaaccttagccgccacctcttccttctccaagatatgttctgtgtctcataggcgtccccagtcactttcttgtttgaatattagagctaacaggggtcagggaagtttacccaactgtgtcctcacctctagtgcagacagggactttggcgtggaagaccctgcgtgggtctgacaaagctcttggggcaccacggctttgtgggatcattaggatcaagagaggaagctgttccccagcagctccttccaaaaagctggggcattgccctacagcggtggccgccatatcctaacccattaataaccagttgtctgcagatttatcttttttgtcagttccttctgtctgtctctctttttctttgtcttcttgtcttaggatggttgaagatgtgatgtctgtgtgttctctgttgtaagtaaatttaatgcaatctgcctcttatgccaaatgtgcttatttttctgccttttgtttctgcttccaagccatttttatttcccctctggctgctactgatgtgtttctgtggtgggcctgcgaatgatggggcatggggctccccagtagcaaagattacttttctgtttcatagtgatttgcataagagactgcttggctgtgaaaatgtgattatccagcatctgcctgcttatcaggaatggaacttttttccttcccttgcatattggatgtcttcatctgaaatcaaacattttttttaaactcttcattacattttttcattttaaactgggctagtgggcgattgctttcaacactactgtggcttcacgttaaaataactgtctggtctaaccacaggcagcgacggccacagcttattcttgctaacatgtaaagcagaaatatttgggccgttccaaattgaggcccac

SEQ ID NO: 63312 - DNA, 1461 bp, Homo sapiens
ctgcgattgcactgttttaatggcaaatattataaatgctgtaaatagccatttatttttttttcatgattaaatgccattgttggagtgatttgagagaacacaaggaaggaacttgaatgccaaattgctctgcccacccagttaacatgcaaagcaggggagggtggtgggatctaaggagagggatcaccccccaaagcctttgctttgctgggagtgggaccaacccatggaggggctggagacggggcaggggccagtctacagggtggaaagagcccccattctgactgtggaagtgacccccagactgctcggtggacttaatggaactgctcaggctaaaaggcatccctttctcctgggatctgcttccttgacccttcaggagtctgatttggtggtttcctttgcctctcagccccgctattcatatggaggagaaaaagggagagaagagctgtgaatcttgtctgtttaccatggttaggagaagacaaaaaaaatcatctctcccctggccctacctttagtcaggattccacctagaagccttcagagcatgggaatccattgagctcaaagatcctgtgatagggaggattcaggaggttctccttgaggaccccgaactttctatttctgcgtggcccccttcagttgttcattaagtgaggtgtcgccttgcccgtctgtaaattggtgtcctgagcctagagcccctcccctagccttagttgggttcagatacccctggaagaatccagataaattaatctgctcaccagaaatttgctttataaaatacgaacatttagttaaatttagcttcattttctgggtcattctccaaaatggcatctctttaaagatctccagcttgatggatctttcccttgggggcaaaaataatagctgttaaaaagtgagagtgggtagccggcgtggcctctcgctggtgctggagtgacagaggtgggagggtggcctgggccagatggctccgcagaggcagtagcttcggtccgctctgtactgctctggagtgttccgtccctctgcttgttgtgtttacgttttccattttgtttccagtgacacatttagggtgaaaaagtcgccaaaacggtctcctctctctgatccaccttcccaggtacagtgttcctttgatcttgatggttttatgccccccccgggggaggttttcttcgcttgttgacaaagctttgctttctgctcatcccgggcctgtttccaagaccctcttcttgcattctgtgtggagggtccctcgatgtttgcttcacattgttttggtcccttcactttgcggaagatcagagtgtgtcccgagagtgggaagacgttcaggaaaaacattagttgggctctggaggacccactctgctccattcaggccagttcatctgctgtgaacttctaggactgtcgaga

SEQ ID NO: 63313 - DNA, 1020 bp, Homo sapiens
gataagatccccctttttctgcctccagggactgatgagatgcttgtcaggtgattctggtgatattgatgtgcaggcctgaagcactgtgtgagcctcgcacagcagtcacagtcgtaaaactagcaggaatgctcaagtaactaagacacaaaatcctgattttttttttttttaaattcatggtcattccctgaaacaaaccatcataaaaggagattcatagagggaagaatctgtgtgtccatctgtttccttaatggaccatttggagcagagtctgagaagagcatgcagaggattgtgaccgggacctgtcctggctaatgggtccccagacctgagggtgggcacagtttctgaccaagagtctgatgagacaagaaacagtttctcttctctttgcaggaccccaccccagctgctacaccagaaacaccaccagtgatctctgcggtggtccacgccacagatgaggaaaagctggcggtcaccaaccagaagtggacgtgcatgacagtggacctagaggctgacaaacaggactacccgcagccctcggacctgtccacctttgtaaacgagaccaaattcagttcacccactgagggtaagcaactctgtagccagctggacccccactctgcctcggagaatcctgcccctagggagccaaaggccaggagagaaacttctcagccaggtaaccacgtgatcatcattgtgagatcgtctgcacgtctcccgctgcacttgcagctcaggctgtgtttgaaaacagcctgagacttgaaagcagctgtcccttgacccaagactcctgctaagagccagcacggtgccctctaactccacctcaggactccatcgagtgggtcctgagcgcccactcgagctttgcccatggcttatgtcccctctgtgattttgataaacacagctccaagggagtgtcattcaagtcaaactctcagtgtaggtcactgacctggactcgcttggtgccaccgttattcctag

SEQ ID NO: 63314 - DNA, 1097 bp, Homo sapiens
cacttagaagggtgacggtggggaagctgggagcagcctccctgtctctttccctggactcttttcttctcccctaatataatgtcacttaggttaaaagttccagaaatactagccatgagcaggaatatatctgatcatgctcctttacatttgtgttacccatcgaagggtttttatcttaaagtatttcattttagcctacaaaatataagcactttgagctccacttggaagataagtcaataggcaaggagatatcaggcgagttggcttccctgatcctagcaatggagacctggactcagtggcatccttctggcttctgcatggggctctttcctgttcctagcaagcccccagcaattagagacagacgaaagcagcattgaaggcccctcgctgtgcagtgcccccatatgaaataattaccaaaagcagccctcagaaacgacaggacccgtgaacgatgactgagcctcttcagctaggagcagccacacacgttagcaaggaccatctcctccagttgagaatatgatgtgccacttggtgtggtgacatcacccttcctggcctgccagctgtgtgtggcatggtgtgaaaatagggctgaaattggatgtggtttcacccccatgcctgccctttgaggcttaggatttgaagcagatgagtgaaattttgaaaaccaagttcaggaagatgttttctcaaaatagcagagatcacccaagatgacaggaggaagtatttattttttttacatcctctccaggtcattctgtaaattataaatcaggatcccaaatgaccgtgattgcaacaagcagggcgtgttctgaagcagcatctccaggcgtctgccactcatctgggattgatggggaggagtgcgggccttctgaaaccaggcatctcacaaatgcaaacactaatgtgggtgtcagagtaccccacttttgcaccgtcagttgctccttctgaagggaggaatggggacacaggacagtgggaagggacttccttttggcaggtagcagagaaggcagatgagtgagctccgtgacctaaaactcacccagattcagccacca

SEQ ID NO: 63315 - DNA, 1059 bp, Homo sapiens
ttagtttccaggtactcgaggcaggcagtggtgtttgccgtctccattgagtgtatgggattttcaccaatcaatttgaaacaggtcatttctccacccattggactttactagtctttgagtttgaaaatagatttggaccagccctgaagacactggtagaaccctgggaaaggctccaggtgacttacaaagcttctcttaaccagcagcgctgaaggaacaatatcgtccttccctcacttcagagggtggccagagctgaatacccagagagggacaagtaagggtccagttccaaaacatcatgaggatgtatcatcccacgtgtctcacctgacagttacagaggaaacccgcacccagaatgcacgtgctgtcttatgggaacactcagcgcagagtgctcaggtctggccacacttgggctgtgcttggtcgtgccatggaattcctcaggactttctcagcctccctaatggcagaagcccctttacagcaagacatttaccgtttgtctgaaaatagccgaactgagccttttcttcaggctatatgagaagtctctagacagtgggcaccgtcagaaagcccagagccttgtgatagctcccaccctgcctggctcagatcttcccatttttttcctctggcactaacctcaccttttgtttttttgtgtttgtgtttgtttttgtttttgcagagttggattacagaaactcctatgaaattgaatatatggagaaaattggctcctccttacctgtaagttcgtctgcctcgggccacttaggggactcgctttcctgccttcaggggcctcctcccctgtgcagagtgtctctgggagctcagaccccaaatcgagtgttttctgtgtacacagcttcccgggtgcacagcagtgatggactggggctggggggttgaggtttgtactcaatccacttcgtttgacattttcagggagaaaatgatagaatacaattagacgtcctgcagaattactttcctagactgagaaagagctagagatttctttaaaaaaaaaaaaaa

SEQ ID NO: 63316 - DNA, 1197 bp, Homo sapiens
gtggagggggtctttcaaggtcttcccatcactgagagatgccagtcccacagcccctgtttctagtccagctgagttgctctccaggccctgcccctgccctgggctcattcagctatggtcagcccaggtctaggctcttgccctacctctctgtttatctgcagtggccagcacagctcctggcccagagagcgtgctcagtaaatgttggtgaattgaacaaagtccagctcaccaacgccgtggcgtcttctcccctggccacgttcctacttgaactcagttgtactttctctgcatcctccttccctcctggcctccccacctcactcctaaccaggccccacttcctcctctcttcctggtggctccagaacaatgaaggcttttccctgatgggttatttgttctctgttgaagagtgctccagttttcatctccgttgcacgttcaggccaactgtacccaagctgatatgtgattttgatccctgcagcaggacgacgatgccccgaagaagcaggccttgtaccttatgtttgacacttctcaggagagccctgtcaagtcatctcccgtccgcatgtcagagtccccgacgccgtgttcagggtatgacttccatgatgagagagttacacatcatgctggatgttctaaagcctctgagcaccttcatgctgttattttgacttcatttcagtgcatagattcaggcggctgacatgccacatattttttttttttttaatagagacagagtctcaccatgatgcccaggctggtttcaaactcctgggctcaagggctcctctcacctcagcctcccaaagtgctgggattataggcatgagccacaatacctggccagcccacacttcagtctctctgaatgtccacagggacataaacgcattggttttgttactggctaccctttggactaaagtgaaatccttcagcagttgactgtgtgtcccactccctataatctcgcccagtgcacacacactttattccatcatttgtctaaagggggacactgtggcccagcattcaaagctcgaatcccacctgtaccccctcctggttgtgtgacctgaagtgaggtacttgcctctcctgggcctcagcttccttgaatgtaaagtaaaagtaataatgaaatggaccttgcagggatttgatgaagat

SEQ ID NO: 63317 - DNA, 1016 bp, Homo sapiens
atgtttgcatttatgagggctgatgtttggagcagtgcattgtttgatcaagtaagtgtgggcattgctgtgagatttggaccagcctatttttgtctgcctgcccctttaagcaggagtaaaagtgcttgcattgacttctcagacttacaaaagagactctgcaggctgcccagggtggtgagaacaatgatgatggtggttatgttgttaaaacagtagtggcaccaggtgacaggtaccacattaagtgctttacaggcatgcagcatctcatttaatcttcacagagaggtccattgtctccatcttatagagaaggaaatggaggcacggtatccagtcactttcccagagtccacaaccaagcagcgggtggtctgctgaactgcagagctcgggtctgtagccagtggcatctgtgcttctgcccctcccttgtcacttggtcctggggtgactgcccagcctagaggctgcatggccactggagacctggctcatatccctctggaagtccaggattccttgtgatattgacttggtcagggcatcctggttgatttcagtgggtttcccaatgagaagactaaagaaagatgccctttgcttcccccaggtcaagttttgaagagactgaagcccttgtgaacactgctgcgaaaaaccagcatcctgtcccacgaggactggcccctaaccaagagtcacacttgcaggtgccagagaaatcctcccagaaggagctggaggccatgggcttgggcaccccttcagaagcgattgaaattgtaagtggagttggagggccccagatcacaggggatgaggtgtgggccagctgcgtattgtcaccaagaaggccaggccttcagagcaacactcacctggcacctgccatgggtcccaccctgactccctgaccacagaagccaacctgggaaatcccataccatgaggatgaggggaaggttctctattcccaccagtatggttttgcatttcccacttaagta

SEQ ID NO: 63318 - DNA, 2061 bp, Homo sapiens
aattagtctagatgaaaccacaagtaatggcagctaattgatactctctttagcctcaaggcaaaaatgtccagcaaatggctgcatggcccttgcttggaatcaatatcactctctgttctcctctatttttcttgtgtgtcctcctctctgccggctttcagacagctcccgagggctcctttgcctctgctgacgccctcctcagcaggctagctcaccccgtctctctctgtggtgcacttgactatctggagcccgacttagcagaaaagaaccccccactattcgctcagaaactccaggtttgtagcccacgtgtgaccttttgggagtttgtcaaaacctcagtagagaatgaacccccgaggcccaaatgaaataaggcaggatttgatgaggaactgccgagaacgttcccagtgacatatcttcccctcaaaggatggtatatgtgacgttctttccccacgataccaaagtgatgtaaattgtgtgattacatattgaacaaaccatttctatttcaatttacaaactgggcccaaatagtcattatttagaagcattgatagcccccaaagcagtttctgtgatttattcactgaaccaagaatattagatcaccactgagccaagccgtttatatatacgtggctatctcagactcccagtgagataacatctgggctcagtcttgcatctggaaccaaaaacaatgatctactctgtgctttaaatttgacaacttaatttgatatcctctagactagggtgttcagagcaaacctagagagattgttaacagccatctgagagatgcagctccattcatggaaactattggccaactttaccttaagaaagaaaaagggaaagaaatgaaagaaaagagaacagtaaaaattttgatcccattttgaaaatcatttcgtattcaactgcacaatacttcctgacaatcagaagggtgatttttagaaaaggaaattaaatgcttatttcatgatctgctgaggtgctaattgtgagagaaaggcggagcgcgtgtttttcccgagtgcctgtcatgacacattttcgtggcacgttcatttctcggatgtggaaaccattgacgtctgtcttgatgcatttccctgcggtttgcccacactccctgtgggcaggaggagttagagtttgccatcatgcggatagaagccctgaagctggccaggcagattgctttggcttcccgcagccaccaggatgccaaggtaccggtttgctgctgcgtgcgccacctcctgagaatgtcatgtgtgccgctggggtccagaagctgctttgctaaccatccgccaggcgggcatcatcggtgtccagcaaagagtcgtttccaaaaagctgaaagcgtcactcttgcataaatacacactgagcacatagctaagatccatttaagtcgataatgctaaaccgcgggatagtaatgctggttaaatgagagagaatacagagaccaatgtatgggtcagtagggtaaagaaggctagcctaagatggcaaagttggatagaaaactggttagcaccaattcaacagagcaaaacaaaatcatgacctttgagggttttttttttctacagataccatttgcttctctattgagcaaacataatttgcaacttttctattttctgcaagttaacatctgactttgttgagacaaggccctaatcaataatacatagtaagtgaaaccaagacatttgataatattctagaccaggcttaagcaattctttctgtaaagtgcaaatgataagtatttccagccttgtgggccgtactgtctggcactgttccaataaaacttttatttgtctgtttgtttgtttgtttttttacaaaaaacggcagtgggccatttggcctgtggagtttcccaattcctagttttagcatggagtatgacattgacagggcatgcagaaatcttttcgcctggcttccaagtttggggtaacttttattaacaatttgaatgagttgctgatgacgtgcagaacgtgtgtt

SEQ ID NO: 63319 - DNA, 1038 bp, Homo sapiens
agctgctgttgttagctgacacttccctcttgcttctgttacctgatcaggtgctcccagcatctctcctcggtgggtggatccgggtcccattttacagatgggagatggagccacttgacagtgattcaccagcctgttggggactagaactcaggtctccaagtgagaggcccctcgctgggtgtggtggtacacacctgtagttccagctactcgggagactgaggtgggaggattgcttgagcccaggagttccaggttacagagagctgtgatcacttgattgcactccagccaaggtgacagagcgagaccctatcttttaattgaaaaaatacaaatgggagcccctggcctgcctgcctggagtaacagctcatctgcaggggggcagtgaggtctgtgtctctcatccttggtacaagagtaggagttccggctgctgctccagccctgagggccccgcagtgaggtctccttggccatacccaaaagagagacccctcccagagacagtgggtgcttacactgtgggtgtgcaggctgggaacagcgagacccaaggcagggacaagaatgtcaatacagattggggatgtcctcgttcttgttgccaaaccataagcttaggttgaatttccatgaaagcgagatttttagaaagcatgaagcagtgaggattttccccccactagatttatttctagacatccttggggcctaaagacagaatgaattgcatgcagtttggccactgtaagtaccatgtattcctgtccagagtttgaggtggaattgagcatgtttggtgagtagctcagggtggatatggagtgtgctgagtgctttggtccccctgccacctcctttggagagcggccagagatgactgttggcaaataatggccaggagttgactttttgtcaattacaggctgttctcagaatatgtgccccaattctgagttagaaaatagagtcatgtgtgttcatagtatataggtcggagaggcagcccaagccacctcttttatt

SEQ ID NO: 63320 - DNA, 1023 bp, Homo sapiens
gcactctagtattgataactagggtagaggttcgctgggcagccatgacagcgccacgaggttaatgcataggactgagagtgtggttggtttgatgtttcttttgcagtagaagtagactgacaacccggctgtgctggtcagtgatgctgctaacaccgcatttcaactgtgttgcaaattgccgagcattttgtgcaaagggaaaaagaataaccacagattcctcctcctcacctgtgggaggccagtatctgtcctccacaaaaggctgtaaagcctcaaccaacatcagttgggtgggttggggtggtggatcatgccacttgttcagggtctaatcagcagatgtggatattgtcattgacccagtttttaattttcccattaacgtaacagacttcatggcaacagaactcttacataactctaacataactccaacataactcttacatccagagactctacctagccaaaggtgatattggttgacaactacagtaggctttaagctttgcgtgactcacatcctttcaaacagagctaaacaaatgcccccaaaatggaaatgtaaacagtcttacaaaagtgatcaaatctgtggttattcaaaactaggaaaacatagactagaattcaacattattcaccattgagatctcattttggaagtggaggctgctgaatagtgccctgggttctcaggcgctgtgcctaagtggctcagtgagtgataaatggcagagataagcaggtaccagacatgctggactccaaggcctcggagcttaaggggcctctgccattagcccctttgtctgcctgcccaggtgcagaatgatagatctccatccatagactggactcggcatttccctgttcatcagtctttgcactttctcatacttttgatgttctttgtttcaaaaccatacaattggcccattcatgagagggtgagtgtaatcctctttgtcgtatgattaatgctaactgttttttttttaattaaaaacgatt

SEQ ID NO: 63321 - DNA, 1069 bp, Homo sapiens
tgccctccagatcgccagagcagaggtatcgtggcatgtggtgtaattaccctcttcctgccacttataaatacgtatgctcgtggtccacaaagccagagtctttggagacagactttgtcctctgaacgctgcaggcaaagatgtgtggcacaccatgcgttttgatcttcctagacgctatcgtgtaatgggccttttggccttgttgaatttacaacaaaaagcatgcccctttcagttgctccccagtgggcactgtgaaagtctgatatctggctgctttcttttttatgctcggggaagttctctgaatgtaattatggtttgttgtaggaagttttcattccacatttattcaccgtctccttttcttgatctatgaattgctcagagctgaattcactcatttggggctaacctttctcttcttctctctgaaactagatcataaccaaggagagagaggtctcagaatggaaagataaatatgaagaaagcaggcgggaagtgatggaaatgaggtcagttggggagctgggccttcctcgtgcctgagggatacttacctgtggtttaataatgaccggagctggtgtggtccacagaagagtgtcttctgtggaagttctctcttctttattacacacagttcatatttttctaaaagtatttttactctattactattactaaaatagcatgcacatgaattaaagaatgcattcaaataaatgtatgtacaatgcaaaacagatctccccactcagcctccagttccacaactcgcaggtgactatcttctgtttctggtggatccttccaagaattttccatttctcatcacaaatgtaacaatgagtgtaaacagcctcttttttctccaaaataaatgagagcttgcagtatacatcattctacactctttttaattaattaatttatttttttgaaacagagtttcgctcttgttgcccaggctggagtgcagtggcgccacctcggctcactgcaacctccaactctgccaggttcaagtgattctcctgcctcagccacccaagtaact

SEQ ID NO: 63322 - DNA, 1045 bp, Homo sapiens
ttttgtataggcaggatctggctgtgttgcccaaggtggtctcaaaatcctagccttaagtaatccaccagcctcagccttctcaatacctgggactgcaggcatgcaccactctacctggtttgattttttttcttagtgggcagtgagggatgttgaaggctttgcacaagggagtggcatatttagagtcacgcaccaggaaaatgagcgtgcagggcgagggctgacattgaaggtgaccctggaagttggggccctgctggacatgggtcaggctgtggcgtccagctgtgtgagatggaaaaccattctgttgtcatgactccaacgtgtctttacttctcttataggaaaatagtggccgagtatgagaagaccatcgctcagatgataggtaggtgtcctgacctgcgggggctcaggccggccccgatgtttctgaactatgaggaggccttggaagataggaggctcagagtgggtttctggtagagcgtgaagcctttcagggaaggaccagagcattccagaaaatatggctttgccccaggacagagtctggggcttcttggtaacacccccctgaactgtgccatagcattattcacacccatggaaagccatggcagtcacctgccagccaccatctgactcagccaaggactctctactttgtggggaaagagattccttttgggtgggatatttgggggattttttcttttcgcttgtgggagataataggaatcaaatccctagaccctaacttagtttagactcaaatgacacctcagcctttccacaaggacccagggacaaggacagtggaccacggcgtgattgtccgcctccttcctcccgtgaccatggcaggccctgttcactgaccccagcactgtttctcactgagattggacgctgcctcggaatccttcttaacacggcgtccctggcagccagtactgagaaatttgctttggctcacaataaaagaaggcctcaagttataagctacacatccctgggcctttttttcttttct

SEQ ID NO: 63323 - DNA, 1141 bp, Homo sapiens
gctttcacagatgctccacaccagtgtgacatcagtcctgccgttgttattcatttgcatcaaatgttactggagagatatgttttgttaagctcacatagtgactatttagaattcagaagagagagagacttctgtgctttctgcattccaggttgttgcaattgatttttttctgcttttctaacaactgccctgattatctgttttgcttccattttctgttgcttcttgccctttgcttgcaaaacaaacaggcaagcctggtaagtaaacgcttttccccctaatttgacacctgcccattgcaaccctttgtttgtttgtttttctatttttgttatttttgctttgtgtattgctgcattccccccacatgatttcatgatgttttgcctgaaaaagccagaaaagtcttcaggagcattgttttgttgttgagtgtagggtgtctttctcctgatttgaagaacctaactgcgtttgtcatgtacaaaaggatttgtgaagcattcttgcctcccccgtctcctgggaacggggtaattctatttttaaaaagggttaggttgagaggaaaggaaacctgaggcaggtgaagtcttggatccaggaaatcagatggacttggtttggtaaacagctcctttaccaagtcaggtgaaacatacacatgggctcagatcagcccagaatatacaccatacagcgtgctgggaactaagaaagcagccagaattccaagaataaaaacaagcatttgattattagagacatgttgaaaggccctttcttttaggagtgtgggtgtggcaagcaggttgttggcgattctatgttaaaaagctccctcttcgcaagccactgtgacactgttgctctgattccaggggtcacagagtttattatggacaatgaggctcttaataatgggttaccaatacgggactcttcctccttcttgggggctttatatacattttctcatttaatctcctgcaaatgccaggagatacaaatactctttcttcctattttagacaaggaggctgagactcagagagtttaaaaccctgctcaaggtcactcgtatggaaagtgtcagagtgagagctcgaactcaggcagttcagaggctcct

SEQ ID NO: 63324 - DNA, 1679 bp, Homo sapiens
ttttctaagcagccataaaaaaagaacaaagtcatgtcctaggtaccagcatggatgcagctggaggccattgtcctcagggaattaatgcagaaacagagcgccaaacactgagcattctcatttataagagggagctacacattgggtacacacggacacaaagatgggaacagaagacgctggggagttcacagtgggggtagaagggagacgggttgaaaacctgcctttcaggtactatgctcagtacctgggtgacaggctcattagaaatctgtaccccagcattagtcacacagtatggccatgtaaccaacctgcacatgtgccccaaatctaaaaatatacattttctagatatttggggcagattattagcttgggatggccaagggccggagaggtggggcagaggacaatggttcctctcaccaggatcagccactcggaactgagccaacactgaattaatattgtacatcactgagaagctaaccttgacggaaatagctccgtgtttcttggagttacaacacttgctgtatcgaagacgctatctgtgcctgcgtgaatggaatttcagaggagatgcttttttgggctctgggtttccagatgtgttaaggatctccaaagacctcctctctgtcctgatacataggagggcccatccctcacagcccagacctcacaccctttaatcgtcccaacgcaaaattcactagcgatgtcttcttttttactttacggatctgtctgcttgctgtcaacaaccacatagaatcaccagggacaccaatatagacctgtgaaggggccgtactgatcaggttaaggaatagtaatggctcatttctacctcacgcgaggctgcacaggcccgggtctgggaagccagggctctggtttttgttctgttagagacagtctgggagggctctggggcgtgggttcgtcccaaggaaaagctggggtttgagatgcccccactggtgaggctgagttgcatctgaggcctcggctggccccagagacccagtttggactttctgggctccatcatttggctcctggtctctcctgccagaggacgaacagagagagaagtcagtctcccaccagacggtgcagcagctggttctggagaaggagcaagccctggccgacctgaactccgtggagaagtctctggccgacctcttcagaagatatgagaagatgaaggaggtcctagaaggcttccgcaaggtagggctgagtttgggggccacggaggaggaggatctgattgggagagattgtgggagcactgggagggggtaggattccagaagttggtcttgagccacctgcgaggagggggtccatgcaggctggggaggcagacttggccgcctggggttacacctgcatccgagagttcctggggttcccaccagtgctgggcatttgttctcgtgggcttgacgcctgtcctctgccctgctgtgtcagaatgaagaggtgttgaagagatgtgcgcaggagtacctgtcccgggtgaagaaggaggagcagaggtaccaggccctgaaggtgcacgcggaggagaaactggacaggtaacatttagccactgggggtggctcccaggggcctcccagcagcccttttacccaggcaggctgggacctctg

SEQ ID NO: 63325 - DNA, 1867 bp, Homo sapiens
agaatttattcatattacagatcattattttcattcttttttttttttttttttttttttttgaggcagggtcttattctgttgcccaggctggagtgcagtggtgcagtcatggctcactgcagcctcaaccacctgggctcaagtgatcctcctgcctcagcctcctgagtagctgagaccacaggcatgtgccccctaccaggctaatttttttaatttttgttttcgtagagatggggtctcactttgttgcccaggctggtcttaaacttctgggctcaagcagtcctcctgtctcagcctcccaaagtgctgggattataggtgtgacattaatttaattttttacctttcttcttaggatgaaaaagacagatggctactagacagttttaatatcaaaattgcattagaaaatagtttggaatatgcatatgttcaactacctgttttgtaggctctgatgattgttcttagcagtatcctcagaacgacatatgcggtcacaactgtcaagtgcaagtttttgctcactcacccagtatttattgagcatcattatggttttagtgttgagtgtgcattttctattccttgtctcttgataatctatgtatggcatatttggtgacttgaaaaatggaatgtttcattaaaataaagatcatactagaagccaggcatgttggcatgcgactgtggtcccagctattcgggaggctaaggtgggaggactgctggagcccagaagttcgaggctgtagtgcactgtgattgtgcctgtaagtagccagctgcattgcagcctgggcaacacagcaagaccccgtctctaaaataaagaaataaaaaccatacttcacagtcattttggctattgtagcagttgaacatacaatgtttcttggtgagaaatgtagcaatgtgtgtgtttgagatggttcccccatttccatcagggtttgatggtgtttaaattgcattatcttaaactgaacttccagaggaatgaacaaatcacacaggttcttccctgaaagacctgagtgatatctaggggatagtcccatcttaaagagattcagaaacatgattcacccagacaattcttgaatggaggcgctgggcatttcgcccaatcagcgctctgtaaaggcttttgctccatgagctgagctttatgatgaggcagtttgcttagtggtggctgatgacgccaagagagagcttggaaaacctccgggaatcactttctaacgggtctgctgatgcctcttagccatcagtcactgtacataacgttgtttaacagttataatggcaaagccatataggagctggggcaacctgaatttgtgttccaggcttgccacatctgactggctgtgtgaccttatacacaacccttaacttctctgagcctccatttcctcactgaaaaatgaggataatactggcttccttgaaggcactattgagggaaccaggggaggccagagtgcctgggatgtcttcagcatggtgagcagctcacggtgggcactccaataagatggaagatcaccgttagcagccccagcaggggccatagtggcaatgagagttttttttttctttcttttttttttttgagatgaagtctgtctctgttgcccaggctggagtgcagtggcgcaatctcggctcattgcaacctccgcctcccaggttcaagcgattctcctgcctcagcttccctagtagctgggattacaggtgtgtgccaccacgcccagctaatttttttgtatttttagtagtgacagggtttcaccgtgttggccaggctggtcttgaactcctgacctctggtgatccacccgcc

SEQ ID NO: 63326 - DNA, 1035 bp, Homo sapiens
gcccaagccagcatgctgagtgttgttacatctcatcacttgcctagatctttcgaatttgtccatctctctttgctgttcttgctatagccttcgtctaagcccctgtgatctccctccagtcactgccaaagtctcccagcctccggccctgctctgctcggaggcctgcctcccacaaaatgcaaatttggtcttgtctctctcctgctgagaatcctccagtgtttccccattgctcttgggggaaagcccaaactccttagcacggctaaccagctcctgcatatttctgcagcctggtccctcaacggtccccactccagcccttctcagcagcctgcacctggacctgccaactgctgctttcatctcttgcatgcactgctccctctcccaaatgctctcctcctcgcctttccccttgctaagctcctactcattcttcagaataaacttcattgccgctttctctggggatgctgggccagtggctttacccctgcccgtcctgggattttccccttaaaactccttctggagtgtcttgtggctgcctgtttacttgtgtatcctctgcaagacagatacggcatgtgtttactgctatgaccctggcacaagccatcatgcaggtgctcagcaatattcattaatgaatccatgaccacatagataaacaccatggactcatcgtgttaagccaggaagtgaaacaaaatttgagtcacatattcgcagcttaaagacagtcatcccagaaagccagccagccaagagacatttgtgaccacagctgctctgtgtcatgcagtgtcaacttcaccacgctgtctccaacaatcccaggagaccccatgggtcagggtgcatgcaggaagcatgggtgggagcccgtgtccagaatattgccaactacgtgctgccctttccaaggggggaggatggctgccaatgactcagcctaaggcaggcagtgggagctggacttgcttattcaacaggagcagtggagatctgacccaagccaccctc

SEQ ID NO: 63327 - DNA, 1058 bp, Homo sapiens
tcaccatgttggccaggctggtctcgaactcctgacctcaggtgatctgccagcctcagcctcccaaagtgctgggattacaaatgtgaaccaccgcgcccggcctatagacgcatttttaaatacttatttactttgaaatagtttaagactcataagaagttgcaaaaagagtgcagagttcccacgtatccctcgcctaacttcccccaacgatcctacatagccctgtgcatggtcaaaaccgagaaactgatgctcacactgcattttacatatttatgacctcccccatcctttctcttattaggctttgagcagtttaagggcagactgaacctcagtcatttctgtaacccgagcacctggagcagtgcaggcaggcagtgggagtgccacctgctgcagggtgaacatgggactgaggtgtccctgtggtggctattgtcactctgccccagagagctccactctggggacccctgccaccaaggatttccaggaggaagggaaaaggtagcccaattcattgctagccaatgccatccactcagtcatcctcgaatgtgagctacagagtggcactgctctcaggtctccagaggtgccccacacccttggcacaaaagccaaggccccactagcagccccaattcccacatggcctgcaacccctgcccaccgctctgcccatcatgcccccacctagcccctcaccggcatgctcctcgggatggtgtggggcttccgccctcccttcctcatcgggggtcttctcacatgtccctccccccgagagggctttcctgaccccaaatgtaaggtagcaccccactcccctgctaactgattttattcttcttcagagactaatttgaccacgaccttctatttactactctgtgtccctgttgtgcttttcccccaagcagctcagctgaggtggttcacttgccgctccacccactgggcccatcccaggctcacacacactggtgctagtaaatatcagctgaatgaacgcagcacatggattccatcaccagggagctcaaggt

SEQ ID NO: 63328 - DNA, 1017 bp, Homo sapiens
gcagatggggtcttgttaccaccaacaaccacatccctggagagtagcttttactgagttgcattttggtgtgccgcttttgccaaaaccaagaaaaaaacattataagatttattattgcatttactctacagacattcttgaggacattgaccattaggttgcttggggtcatctgctgaagacatccacagttttcatactaatagtagttgtacttctcccaagtgaattgttttttaaactgttatctagtttgcatcgaatatcactgatcaagtttccctttttatctgccgctagcaagttcagagctgaatgtatggcctatcttaggaaaaaagtgtggttattagagttagtatacaatggtagcttctccatctttttcttcctccttaaaaaaaagaaaattggtgttctgtggcttcatttcatgtattcatggaagccactcaaagcctttactagaacaaggtaagaaatgataagtgaataaataatctggtcatggccaaggcactctacccccttgtgtgctaggatcggcccttcagacagggagactgactctacccattagaaggagttgtcttgagtactggggaaacctgtactgagtaaacatgaggcgctgctgtcatcccctgggcattttgccttctaagactgctgagtcctgtcaatcctgcatcttggctgtctcttgagcgtgcccctcctcccgctcccacttcccctgcctagttcagaccctcctggtctctcggctgagcctctgcatagcctctcaacagccagcctccctgccctgcagcctcccacatttataccacatccttcacacaggaggggctcagcctaaaccacagaggctctgccactctcccctcccaagcccaggcttcctgctctgctgactgaaccaagacctgctcatgtggctacaagatcctgcataacctgggctcatccaaacctctggccattgcagctgcattgggtcttagtggccag

SEQ ID NO: 63329 - DNA, 1056 bp, Homo sapiens
ggcttggggaaatgcatggcgatgtgaggtctgggacaaatcaacgtagattcgaaaagaaaatggaaaagctgtggtggtgagaaacacccctgtgcctgccactccagggaagagctgtggcgtctctggctcaggagtgcaagcaaaggccttggaaacagcaactttggcagggggcccacaccttaactcccttctcctcacttgcttcttccatattaaaaacacagctctaatgaatcaccacattctagctctttttcctatctcccagtgctaagacgtttccagtaggagagctgacctggagccaaacagcaattcctcctggtgtgcatgactcattggaaaaagtgtctcataggctattaaaagagtgggggagggcgggtaaaacatttgggttcaaagcaaattatatggaaactaaacacagtacatataattccgacactgaatgctgctttcctcaaataacaagacagagaaagaagtgggctctttacttaacgcagcgcacagatgttctgttccagaaatgaattacgtgcttcaaaacaatgcaaatgaaacttggcttaaacaggtcactacgtgaagacgtgtttatctgctaaactcacacatgcaaaagaaatgaagcatctttacttccacttccttaaactcgcctcgtcatgcttggaagccctcattcctgaggctgtggggaccagaaacacaaacctaacaaggtaataccaccagttacttccacagaaaaagtgagttttattcaacctaagaaagctgatttttttttttaatgaagttttaaaggccagggtagtgtggtcattttcctgaagagaggagtaccttttgcctcatgcctgttactggacacagcaagttcccagaagcacctgattatctcatagtacaacacctacatgttgtttacttttccaggtaatttggtggtttgaaagcatcctataatcttaggccctattaaaaaaacagtgccctctgaatgatgctatgaaaaattatatcactgatggttttccc

SEQ ID NO: 63330 - DNA, 2231 bp, Homo sapiens
tggggcagcgggagggggcggcgtcttcttcccgtgggtccccgattgttttcccgacgtcagccctcagcggcgcccggcgggggagggcgggaggcccgcggcggtcgcggggccgacgagctcctcggcgtctccgccccccgagaaatcccgctcggggcgcggtgcgcgcagctgcccggggattcccggtggcgccggtcggagcgcctccctccagggctgtgcccgcggggcgcgcgtccccgggcatcctttcctggtgtttaatgcattttggcttcaggacttgccgaggccgaagccggctccgccctgggccctgaagtcgggcggtgtccgcgatttacctccgcaccttcggggcaggtggccagaggcagcgttgaaagcgacttgcccaaggtcacgcaggtggcaccggggaggcgaccagacccaggtctttcgacgccgaggccagctgccaaccgcagagctttggggccgtcttgagtggtttgtggtttgtttcagatgctttctattgacctcctggaaagaggggaaagtgtgtcataatgaaagcggtcctgttgcttatagtgtttaccgcctttggtagaattctggtgaggctgtgcccccgcgcagagcatctaccgtggtctgggcgtataaataatgaaactcctttgctctctgggggcagtacaagaagaggttcaaggaacaaataaatatccaggcagtttctgcgttttcctcgtctgtttgtttcaccttccaattctgcagtactggttttcttattttacaattgatcgttgttttaataagattttctttgttttaatgaagtcattgccccttgtgagttagttttctaaatagaaaatcttatttcctgtgtgtttaatgactggaacaaatagtgcactatgaggtttacaccattgtctttcatcttagaactcctgatcaatctgctttattttcccaagtactcagcttgcatactttctatgttaatttgatgccactgaaaccatttacagcaaagtttgggtaagagttatgtgattgttttgtgaaactgtgtttttcttcacaatctgaagaacttgaagacccgttatattaaaataataagatttattctgatcaaaatacctgtttacttttcatgctcttaatttttcctgttgacacacttgtggcaaaagaaatatttcccctagtggagttaaagtattttttatcttggccaattttcccaaggaaaattgcattttagagtactgatacatttaaaaaagagtatttaagtttgacagaatttgaattaataaagtagttaatttattttatactgccgtaaaccttacactgtatctactgacagttttctcttgtagcgtatacctgtatcaagatatatggctgtgaatttagtgacattaagaagatatatatatatatatatatatatatatatataatataaatatatgtgtatacacaccgcgcgggcgcgcgcagagcttccaatctttatcttgttaattagtattttcattgtcgctttgggaggggggaaagtagcaggtttgtatctttttttctccccagttttagcagtgtaacaaaataggaaagatggtgtgtaaaattgagtttgtcatagactaggagagacagtgaaacaggataagtatacaattgtgaggaaactgccatgagttcataagccggaaggacctttttagaagtgtttaaggatgttaagaatagcattggattcttttctttaaaagtcattcaagtatcgtttgctaacatataggatatgacaatattgaccactcctaggaagatacttgggaaaggtggaaacattttacatttttatggggacttccccccacaaaaaacatttaatggagatttaaacaaagtggctttttgacttaagcctggaagttctttattattattagtcatgctgcaaatcccgaagttattttaattgtgtgataatttgtaacccagaatgaaatctaataaatagtttattaatataatttaagtcatactttgacattgacatattgcttgatgtcaagtcattattgtttaaataacttatttgagaatggggaagatagttttctgaatatagtgtagtaattatttgtgacaatagtaacattgcttttattagaaaattttgggttgatataactaac

SEQ ID NO: 63331 - DNA, 1211 bp, Homo sapiens
ctgactctacagatatttgatcctctatgtctatatatcctcagctttgtgtttgtcagtgattgtggggcaacaggactagtcccactcgacatgttttaacaaataatagtgaagtcttgtgggcctgttgaggtctcactgtacagaatttaatttttctttgctttttcttatatcactcaggctgtttctgtgttttgccttattttttggcttcctggttcctgactgatgaggtgttaactgtaattatgttaatttatgactgatttgtaagatctaactataccttagagtatgagtaaagctgaaggagaaatttgggttgggaggcatgttaataatataattgtgtctggttttgcctcatgtaagtttcactaaaaatataaatttaagtggaaatacagtatttgaaactttttccttccattatttaaataaatcagttaaatctggtaaatgattcttgtctgatgaggaagaaacaactttctatctggaaacttaacgttaatctttgatgcagtaattatgggttacttcatccgtcgttcaacaaatagttactgagggtcttgcatgtgacagccactgtgttaggcattggagaaacaacagtaaataacaaatccctgctgtcatggagcctacattacagtgtggggaaacagacaagaatcaggtaaataagtaaactgtatcattcattagataatcaataaatgctaaggagaagaataacatggggaaccaaggtggaagtagcaaaacggtttggaggatttgcaattttagataagatctaaaaggcagtgttcactgagaacgtgactttgagttacaagtccccgagtgggaatcttgtctggtgagtccagcggccaaatgaatgagtaaggtgggtattgggatggggtaacagggcagacgaggcttagtggtctttatgagggctttggtttttaggtttttactttgagtgagatgggatcccattgaaacaggttgtcaaccttggccgaacattagaatgattggggaagctttaaaaaagtactgatgcctggatcccatcccagaatttctgatttaattggtcggcggtggtgggggaggtggtgttttaacgtaggcatcaggaatttttaaaattcccaggtaattctgataagtggccaaggttgacatctattgcactgaagagt

SEQ ID NO: 63332 - DNA, 1057 bp, Homo sapiens
tactggataccagagaagatagtttcgtgtggtacatggataatccacaggtttgtaaaatcccaaggattatcttttaaaagcacagaaagttgtatttaagtatttaacatactatacaggctttagatttgtcttcttaagcagtatatttttagatttatttctactggctgtcctctctgccctgcacccctgacctctactgttttgtttgaatttcagaaggtgaaactaagtttatttgataaaaattaatgcttctgtatatatttttccctcgagagagaaatactctctctggtggcaaattaggttttagaaaattagaacttgagtcacagaaaaaaataacaattgaagctgtcccaaaaataagaaatactttttttgtaacatgtatttcaaacaacagctaaaataaagaccagggatagatgattttcttgcattaaggaggcttaataccagggtccctttagtgagattaaatttaggtttaagatgctgcatctaggatagagactattatttttaaataaataaatgacttaaccacatgatactcttgcacatatgtagtccttttattttgtagtgtcagatttgagtcagtcattgtaatgccatccatgaactgaaatgcagtttgattttattgttgccttgcaaaacacaggggtaaatgctacaatttaaaaaattggaatcccagccttaagaggcctgagattagatatcatctgtgaagtagttttaaactttcaactttctctacttttttttttttttttttttttttttgagatggagtctcttatcacccaggctggaatgcagcggtatgattttgactcactgcagcctctgcctcctgggttcaagtgattctcatgcctcagcctcccgagtagctgggactacaggggtgtgccaccacacctggctaattttttgtatttttagtagagacagggtttttccgtcttggccaggctggtgttgaactcctgatgtcaggtgatcctccagcctcagcctcccaaagtgctgagat

SEQ ID NO: 63333 - DNA, 1070 bp, Homo sapiens
gtcaagtaacaaattttgaatctcatttttttccagtcgaacctgatggtaatcatactagtccacagaaactgcgtattttgaatattgtttttctctcagctacttaaatttccccatagtgtactactattactgtgacactttatgtcatgctttggtttctcatttgtcttccttccacaaaggcttagagctctattcagcagttaaaataataggctcatgaaaaactgaaaagaaataaattattacccttaaatggaagggtaacagtttttgaaaaaatcactttggtggtagttagagattcttgaagacatatttacatttcttttccttctttaaagttaaaaaccaaaaacccataaatctaaaacgttatacataagaatacaaatagctttttaatgttatacattaatgaattataattttattttatatgcatatttactattgatgatttatatttggaagcttgtacgtagtatatagtttaaagcagaacataattaatggagttttacaatatataggtgtgaaagtttttaaaagatctgtccctgtcaacaataagcagttcatgtttgggactcttaagtctttgaaatgtctaggcttccagttacctcctaatcattcattagaacaagccaatagatttttatatttttaagtacgttattataaagtcagttgaaaagttgatcctgtcttatctccagcagaaataattttcaaaatcaactaaaactaatgttttcatttttacttctgaaatcttctatcagtcttttatcagtcttctatcatagaaatgaaatttatattcttgatttgttttccccagattcttttgtctggttttcctacctctatcttcctcttctataatcccttcagtttattataagatatattataaaaagagcataattttgattccagatctgctcataagccttcttcgttggcctcaaattctctacgatataaattctttgctacttttttatttaggtcctctatgattaggttctcagttcaagttttcagaccaccatttt

SEQ ID NO: 63334 - DNA, 1031 bp, Homo sapiens
gatacattttctggggaagcaacagtgaggaaggaccaaaaacagggactttgtttgcatatctgtatcagaaacaacctctgttccctacctccaatcgggcagacacccttcttctgtcccagcaggtaatgggatgtgtggtgtctccagaaatagaatcagtgaggctgtatatttaggggcactagtcccagagaacgaaaggaatgaggcacgaaactgaaaataggaagatatcttaaatgaaagtctgcacaatcagtgcaaccccagccccagagcactgggcagccaggtttaggtgagtaagatctgactaccctagagaaaagatccatagatactgactgacatctgggcatttctactagaagagcttgccatagttgactagtaaggtccacaatcaacagccctacgacaatgcaagagagcttttcatcagtctttttagcactttcttttaaaatatgaatagacagcccaggattactgaacatttgatgagagcggattatcaaacaggagaaggaacatgagacaatgcaaaactcattttgcatttctttgaaaaagtcaaagaaatctgaaagtacaacaaaggtaaagatagataatggaaaagagataaaaaccatcaaggaagtccaacatctgatagagactgagaggacagaggaaagtacagaatagagaaaacagagtggggaaaattgacaaagaatatgataaaataccttagaacctcttgatccaaaaccgtatattcataaccagttgatctcaggttgtgagatgatttttgtttgcagttaagctaatgtttatgcttcaagttttatccattttatgtattcattctaatcataaagatttgaagttaaatactcaagtggaaaagataggaaggatacaagcttctagggatgcatgtattattcacaatgaaacccttgctttagggtttttatggcaacttagcagtgtcagagtttttttttttttattgttcaaagattttatttctt

SEQ ID NO: 63335 - DNA, 1107 bp, Homo sapiens
gtggagaaatatatgtatatgatgtttcattgtgatattttatataatttcaaaaaccggaaatagcctaagtgtctatcattaggggattgactaaatgtattgtggtgtatccatttaataaacaaaatggccataacaaaataagagttttacctgtgttattgtgtgataaaagctgtattacatgtggtctgatatattttgtcaaatccacgagagtcacggtgttgaacttagcaaggtttttcagctactgcaaacataaatttagaggtaataagtacaatatttggtgtgttatttttttctgtcaacagttatgaatgcaggaatgaggaagtacttcctacaagccaatgatcagcaggacctagtggaatgggtaaatgtgttaaacaaagctataaaaattacagtaagtatatgtatttttttgaaaaacgttcgatgtctggaattaatcttttcattttgaaaatacacctaccaaatgttcccagcttaccaacaggtttcatactcaagctttgtttaaaagacaggtgttcagaatgtgaatatgttttcttgtacttggtgactgttggcactttaatcagcccatgattgtctttttaacttatgcacctaataaggagatatattactgcagatcttaatcacttcttgcaacgtttctaggagaaaatgcgcttagcacgtagagttctaccgggaggatatatatttttcttccaatatagtgtaagagatttcctgtcacctacctggggaataggcacttctctcttctaagccatgactgggattggggtcagatagggaaagagttgaaaacaggagcaggacaaggggagatgaaggctgaaaaatgagggttagggataggaatagtgtctgaagggttgcggcagccagagggtcctgtccatgtgacccttgagaagtttgtctcaggctctaaacttcttcccatgtctgatttttttccttgcattccagggcttggtacccttgccctcctttcccatgctacaatttcttgcttctaatgtgtgcttcttttcttttttggtttcctgatgaatatttattgattattaa

SEQ ID NO: 63336 - DNA, 1107 bp, Homo sapiens
gaacagcttgttaccacatgacagaaaacgcctacgcaccgcatctgatctgtacatgaagcagaagttattttaggtttgtgcagtgtcaggaaagcaattttttaacctgattcagacatacatattcttaaaagcttttagctaatcattttaactcttctaataaatattccctgcttgaaaaatttctttagaaagataatatctcgtaactgtactaaattcatgttttaccatttgcaataacaagcagcactggtttcttagtgctttaagagaaaaagtagtgaatggtctcaggctttttaccattttggggggtcttgaattgctatgtctgatttatcaatggtatgaaacagtcttatacaaatgacactggtaagcttttcagcatgaaggaaaaacaggttagagattctaaatagaattctaaaaagacttctaagtagcttttgtggtcttgcaattttattttacctgttgaaatttttatagtttttaagataaatttgttggtaaatgattttaatgtttttataattcacatttggaaaatataaatacatagaagttatagaaatccttattacttaataaagtggttataactgcattaaagtgagtatagatttgatagtacttattaaaaataaacttttgatagacacacatttaactcataggatagcaatgaaataatttcctatgctttaataagatgctttatgttaattttattccttaaaaatatcttaccagtttcatgtgcattttatacatttaagtgtattaaagtgtggaatctccaatttgttatattttcctgtgaacattgctgatgatttacatgtagattatttgaaaacttaaaatgtacattttgatgtatgtacttaatacataaatctttctatgggatcactctcattttggtcaactctaatttagtggtctgctaagtactgtgtgatatataaattttaaaattttggaaatccaaaattagagtttggaagtgtgtggtttcaaaatagaggtggttagagggcaatgggtaagggaatgatgatttttaaactatttcctagttataatatcttg

SEQ ID NO: 63337 - DNA, 2017 bp, Homo sapiens
gattcagtgtctgacatgtgccaactgcccagtgagatcacttttctgattttcattggacagttggatggtttggggcaggggtgtgtcctgaaaatgtctatcttaatggctgaatttagaccaagttttacagaggtacatattgtttttagaggagttatccatgttcatgggtattttgcttgaacttttcttgttcttagggaataagatgattacaagttagataatttttatagtaaaatgcagttctaagttaactactagcatttgattttattataaagacaaattagaagcagtgagcttaacagcataagcaaggacttttaatatactgtaatttaagaaaaatggaaaaaccaatataaatttcggtattttttagaatgattttaaaggtttttcctaataattcccaggtctgactaaacttcttgagagaataactgctagttttcttatgggtcacctcttagcagcacctctcattttatctagttgaatagattgttttctctctggtttcaggttctcttaatgctagttgctgttcttctcaatgagataactgggccatattttctctgtcagaataattgaaatatatggtgctattcattagaaaatataatgggcttccctagcaaatcattccagggtatactatcctaattttatttgacaaggaaaattctcttcattattttattgtctttaaaaagcactccaaagtgtgcaagttcttagaagaattcaagaggtattcaggattctcttctctttcctgttttctctctcttttgtttctgcggatgagggcattgtagtatgaatacgaaccagaggctggaggattgggcctggggcctgagagaaacctcttcaagggaggcaggtggagaaggaagggagagggagttttagaagtcacttaagagacaagtcatttattatatccataaattacatttgtgtggattgggacttactgtagctcagcatcctttcatatacacatggaccatgtttgctcaatattttgcagaaagctgctttgcaaatccttatctgcattgtataccctcttttctacaaatctggtgggagtagcatcgtatggaagaagagcacaggttttagagcagtgtttctcaaagtgtggtttatgaaactcctgcctcaaaaatgtctggtgttcttgcttaaagtgcaggtttttgggctgcactatagatatgttgagtcagaatttctgggttcgaagcaggggaatctgaagttttaaataatgttcctgggtgatactttatgcactctaaagtttgagaaatcacactgctttggaatcacactaataaacggtttgagcctttgaatacaatgtgagtggtgtcctgtagttctaccagtactctattaacaggaattagctatatgacaagcaaactatttaagttaaatgtttctacaccactacttcagtgattgtcagtagtatttgtcatagtgtttctgaaagactgcaaggttccacgtgccctttaaatcattggagaagactaaatcatgttcaacattataattgatgctgagcagattttattacattttattcacagccttaaaaatgtataatttaaatacagactatgtgctaaacagtctacagatagaaataatgattaactgagtaccttatttactgaatagatcacataagaaaagcaaaaatatatgttaaaaatttatgatacctctgattctttcatccactttagtgaggtgttaatgtgagattctgctgttaccacagtcattgttttcctgtacttgtgaacgatttatcattgatccaagtattggaattccttctttaaatttctaatgaaaagttttgttttgaaacttctgatttgttttaagaattttgctattcttttttctgctgactttggattcatccattgagtctttcaacatttattgaatacactatggttttggtaatagt

SEQ ID NO: 63338 - DNA, 2106 bp, Homo sapiens
tgatagctatattataaaatattattctaacagaaaaattagtgtgataacttaaggagtacatacatggactataatttttatatgtatctgtcaaccgtatgcaaacggatgaataattagaaattctgcgagaaaacaggttcacatgtataatgctggttgcaaaatgattcattttatttactatttcaggtaccaaagcagtcagactcacagcctaattctgataacctaagtcgccatggtgaatgtgggaaaaagcaagtgtcttacagaactgatattgttggtggcgtacccatcattactcccactcaggtaattaagtaactcttctattgtgtgagggtctaattattgtatattgatttttatattattaaaactaaaacagtgcatctttgcttaattggtataatatacaattactataaaatatttttgtttatttcaaaagtatttattataaaaaatttggaaattacataacatttaaaacttctcatgatttctctgagcctttcttcatgtacttttcacctcagaaatggagatatgagttgtatattacattttgtaaacagattttttcacttgtatcatgaacattttccaagtcatcagaaatccttttatatcatttttaatgagtgcatagtagttcttccatggatttaccataaattacaaatcctctattggacaaatagagttccttttcctttttgtttcttttactttataaacaatgctatgatgaatattcttaaaggagaaattcctagaaataaaattgctgagtcaagagtttgcaagtagtaatttttaaaatctattttttctacaacctggcctaagtgagctaaacagaagactggaattttaactaagttatatctcagaagtactaatatgctaaattaagtctttatttgagttttaggaaaaatataaatttacatacaatttttgatgaaattaaaactcttgtctgagcttgaatttcttgttttgctattgaaaaggatgaatttgtaatggatattaagttactagtagttgagaaaccaagaattttaaagtaatcaattggtattgccaagcttgggtattttcattaccagtgtgccttttgaactcaaaagactttgacactttataaatcttttaaatcaaattgtatcattccccacatttttcaggtcttttgctacgggagggtgattagtgggattagaaatcttacaacattaattaattaattaactattgagtgctttctttatgcttggcaaagggtatgttaatgaacagaaattccctgctgtcatagagcatacattttccaccaaagttggataaaaaaataagctaggattgtgtgtttactttttccaaaagtaatgattttaaactgttaaccttctggttactatgtacctagattaagcttctttcactggtattatgacctatgttgacataaggggtaagactattttcctgtagttgtgttaagacactgtattagtttgtatctgtggctgttttaattttgtctagagttaagattttgttgcattgtaattttggtatagatatttcagtagtttctaggattttatggagggtataattttattgcatcatttattttgtagtatagttttaaaaattataaaataatatatgtctatcataaaaggcaaaaattggtaaattggacctcatcaaaataaaaaatacttgctctatgaaagaccttcttaagaggatgaaaagaaaagctacaaactgggagaaaatatttgcaaaccacatgtccaacaaaggacttttatctagaacatagaaagaactcagaacccaacagtaaaaagcccaagaaatccaattagaaaattcatgaacagatatttcatcaaaagataaaagataaacagatggtaagtaagcacatgaaaagatgttcaccatcattagctagcagggaaaaaatacaaattaagagcacaataaaagatcactgcacacctctcagaatggctgaaataaaagtgacgacacaaatgctgccaaggttgaggagaaacataatctctc

SEQ ID NO: 63339 - DNA, 1058 bp, Homo sapiens
cttaaatgtggtagtagttacacagatctacacatgtgataaaactgcatagaactgtatagacacacatagatgaatgtatgtaaaactggtggaatccgaataaagtttgtgggttgtgccaatgtccatttcttgttttttgataatgttacgccgtttccctttgaggggaaactagtgaaagggtacataggacctgttgtactttttttgggcagcttctggtgaatccttataattatttcaaaataaaaagttaactccttccccaaaaaagagcactggtggcaggacttgtgcaaaacaagaggaatggaaatttgtgctttaatcagtgacaggaaaattaagagtaagtatctcagattaattagaaaactcttcaaaaatctgtttctgactaatctaaggtggattttaagattttctactgggataatatgaaataaaagtatgctaaacaagcaagaaaataatttatttattttgcttcattttagaaagaagaagtaaatgaatgtggtgaaagtattgacagaaataatctgaaacggtcacaaagccatcttccttactttactcctaaaccacctcaagatagtgcggttatcaaagctggatattgtgtaaaacaaggagcagtggtgagtagcttaacaaaatacatgaaataatgaaaaaggattacgttctagcaaactcaaattaacatggaaattgtttgctttattttatgaaagacccaaagtgagagaccggcatgctgaggagagtcaggagataaaataggggatattctctgtttataattcaatgctgttatttgcttggtttgcagggggccaggaaagttaatgcccattaccactgactttcagtttaaatgagctttcctaacagtttaatgttttagaaagtgtttctattcatctttactcatactcaggagtgggtcagggaaagagagctgttgtggggagatggcaggccagcggcaggagaaggagtggtgcctaggaggtctcttccttgtttaggcattggcctgacctccg

SEQ ID NO: 63340 - DNA, 1050 bp, Homo sapiens
ggggcgaggagtaggaggaaggggaagtgcttttaaaaaaaaaaaaagtttcaacattaaaaatatgaaataggccaggcatggtggctcacgcctgtaatcccagcattttgggaggccaaggtgggcggatcacctgaggtcaggagtttgagaccagcctgactaacatggtgaaaccctgtctctactaaaaatacaaaaattagctgggcatagtgatgggagcctgtaatcccagctactcgagaggctgatgcaggagaattgcttgaacccagaaggcagaggcagtgagccgagatcgcgccattgcactccagcctgggtgacagagcaagactctgtctcaaaaaaaaaaaaaaaaaacacataaaatcatacaataaaagatgaaagccaggcaccagaaattgaattaggaattcaaagcctgggtagctagagagggatgaggtttaatttatcgcatctctaagggaagtaatgagatttttcactgcttggcatgtctgattgtgggttcatatcagggtaattaagtggtgactaacatttgacattcttagaaacacaagtcttatgtctgtgttcatctctggtagatgaaaaactggaagagaagatattttcaattggatgaaaacacaataggctacttcaaatctgaactggtatgttgttacgtcataaatgttgctataagaatgtttgaaaagtgttgcaatgtagtgattatatataatttcttgtactgttctgtagtttcagaataagtctagtttttagaggtaaatatagtttatttggttgtgatgcttttggttaatgatatttttcttaaatacatttttaagtaaaaagatcctatcttcaaagcagcattccaccttgaaagatctgaagatctcagaatcctctagtctataaatttcctctaaaggggctgtcctcttggggggttagccccacgtggagtagggagagaagggcatccacatggggaaggggtggtggcagagatgggagaatggtcacatacacagtgat

SEQ ID NO: 63341 - DNA, 1100 bp, Homo sapiens
tagaagccaagtcttttcagagaaacaatactttttggtgaatgaatgtatatctgtatatatgatgaggaatgagatatttacatagtttcaaagtacctatctactaaaataggtattaagtattgtacaaggggaaaaagagtaacattacagtgaggaaagtggtgtaaagaattctgtctgtaaaagtcaatatttaaccctctgtatttctttctcttgagattttctttacctatttcacattgactcataaatcacttcacataagatgtttttatcttccctgaaggtagaatcagaaattgaaattccctcttcgccttgtttgagttgcatccttatttaaaatattgtagggtgatctgagtcctgaaatagcttattggagacattgaatgcaattctgtagtataaatgtctatcctacgtcttctttttgtatgggatctttgagaagggaacttatactttgtttgaatgaagtcaccagaacagcattgtccattagaactttctgcacaaatggaaatgtgccgtatctgtattgtccaagggcactagctacatgtagctgttgagtgctggaaatgtggctagtgtgactgaggaactgacttaatttcattttaattaatttatatttacatcattacacacaatggccactgtattggccagcagagcactagtgtataggaaggggatattttaagattcacctcaggagtcagctcttctgggaagcttttagactctgggttaagtgtcttctctttatatgccctgtggtaccctatgcatacttgtatcataatgctcttcccagagttttgcaatcacgtgcattcttgtctttgcaactaaattaaatgagcttcttaagggtaaagactcttgtagtcttttatgatcacagggcctggcacttgatagacaataagtgtctttgaatgaatgaaaaatggcatagcatagcaagaaatgccattttagtatggggctttctcaaagcttaagagcctcaactggaagtagtagttacttggttcagaaagtacctgccttgttgtctcaggaggctatccttgtgcttg

SEQ ID NO: 63342 - DNA, 1058 bp, Homo sapiens
atgtaactgttttttttttttttttttttttgccaggaaaaggaacctcttcgtgtaataccacttaaagaggttcataaagtccaggaatgtaagcaaaggtaaggaaccgctctgacttgatgcctggcacaagttataaacacagaatagtgccttagtttgagtaatgtacttacagattacatttttccatattaattgtagttatttttaactctttatagttgagatacactagaattttcaaaaccctcagagtaaagtattgaactactttgttcatttgaaaactaaaaattaggaaagaatcgtttatttgtttctttgaaaactaaaaatacagaaacagcttactaatggaaaggaataaatttaatgtgaacaacttatggttaggccatcagatttgacaaattgatgtattaagtgtttaaaagatgcagtagaatagagcttcacaagaaaatgtgttagctgtgacagtgtttcaccaaactgattactaaaaactctgaactttaaagttgctttgtgaactttttctaaaagtgaaactacatgaaatatgtaaaatcttacattaaaataaatgggaaaagataatttgggtttgctaaatcagtgctttacctcatttatttattgacgcatactgggtactgggtaaacaaatgaaagagaaactcaaacaactgctatttaagtataattggatttttttttcatacagcgacataatgatgagggacaacctctttgaaattgtaacaacgtctcgaactttctatgtgcaggtaagatgcttatttggcaattaatagatcctcctaaaaagaaattaataatattagaggtgaaataaacataaacaagcttgttgcacttgaggttaaaaaaatatgacaactgtaattcaccagcttaataaaagggtactgtatatagagttattggtggggttatatgttcaggaagtgggagtatttgttatgaattagtgaactagaactaagtatttagagaaagggaaatgcttttaatttagatgttaagtg

SEQ ID NO: 63343 - DNA, 1054 bp, Homo sapiens
ttagccagccgtggtggtgtgcaggcttgtaatcctagcaacttgggaggctgaggcacgagaatcgcttgaacccaggaggtggttacagtgagctgagatcgtgttactgcactccagcctgggtgacagagaccctgtctcaaaaaaaaaaaaaaaaaaaaaatcaaaaagggatgatttgtttttgttttattgaagttaaatatgcttattccagaaaacttggaaaatatagaaagatttcagaaaaatgtggcttataaaacattcagtcccacattgaggcaaccattcttatgattttgctccctttcttaaggtatatatttttataataggtggggtcatactaaatatagtgttatatcctatttgtttcatatattgttatttttttcccatgtcattaaaaattatctgaaaaccttttagaactgcaccatactccattgatgttccaccagtaaattgtgtctgtattactctgttgctgtattgtgtctgtgttactctgttcatgtgcatagtttttgtacatttactgtaataaaatgatgaaaaacatctttgtgcattactttgcctgatttctttagggtaagtttctagatcgagattaactatcagagcatgaccctttctattttgtcaaattgatttctagaattgtatttccattagtaatgaatgaagtatactctacctttggctacttgtatttttttttttttttagtctttgttaatattacttattcaaaaatattctgcattttaaactttttcatatttctagattctagaagtgtaagggattctagaatctagaaacaagaggcagtatctctgcaccccgattggggccttatttaattggattaatttcatagtaaggtttaaaattcacattgaaagccagacgtatctgtcaatacttattgtaggatttagggtactactagaaattatttccagaaaaatatgtaaaagaatgtcagaatttttaaaaattacacaactacataaatattcttgtagcagattcagacagt

SEQ ID NO: 63344 - DNA, 3776 bp, Homo sapiens
tagtatgataataaaattgaaatacaactaaacattctgctcagaaatatttttttaaaagatttttcttgtgttcaagtacataagaattagatttgcatttggaatactttggccactgatctcaggtctgaaaatttaaagtatcttaaaatgtaacactgccatctgcggaaagtagtctcatatgtagcatgatagcctttattatctagatttactatgacatatatgctagttacttacacttttaatatttttttctgatagtattataataccgccttttattagttttctggtagtgataactacagataaataaatagaaatcaatgtttctgatttcttagttgttaagtcattctctctttatatcctttttgaaatatctaagaagtcactttcatagatgttcattttgtaactgcctgtattttatgtgactttttcagcagtcaagtatgagactctctgcaaaaacagtgtctgttgggaagaggaaaagttggagaaggatgtttgtgttttgtgctttgtggtgggggcagattggactatctagctatgactgtcagcacaactttctcttttcctccctctacccagtataggttaactctaatcttagctttgcactgtgttccagatgcggcaggccagaaggctgtcgaacccttgtatacagaggtatacatcaagagctggtgaatgcagcacgtatgtgggctctcacgcaaacgtgccttcttagtggagggcccagacttactacttacaactgatcatagaaagttgagttaaccaaactgccttttgcagttatcataactgattttgtcaatactaacgcaaactgtttcactgtagtcatcaggttggatatgtgtatttaaaaataaaaaataaaacatacaactttactaacagaaagagacattaacatataaaaattaatatactcaactgctgcaagagtttcaattttatattatgtatttaaaaatttttaagatacaatacttacgaaatgcaccattgttctaataatatatgcaaactaatgcatgcatatgcattggataaactgtacattactatagtttgcatggcatttaaaaatctctgaaatttagccatctaataggactctgtagtgttttggtaatttgtagcactttgatttcaaagccactggtatcataaatgaatataatatactagtatatagcaatgtatttagaatggtcatatttaaggatattttcagatttgatctagttagaagcatattgaaattaacattctcaactactaattatttcaccacagtttaaaatgtgataaatgtgtaccctttgttacctttaaaatattaagccatatgaatatatgacctattcagaactaaaattaagtaaaaaatgaaaagactgtgctattattggttgcagtgaaattcagggaagtaaaaactaagtcttatcagcagaataatgtttgaaagatgattcgtgcttattaaagaaatatggcctttcattgttatagtctatattttaatttttttcattctaaaatatgtgggataattcctagtgttgactgagaatatactcttaaataaaatgatacagctgggaggttctcttttaaacacagttcagttgcagctggaacactgtatttcagtttaggttggctgaatcttcaaagtgtcataggctgccaaattcagctttggtgacggaactggtttcctagtggaaatggtttttggctatcattgctttaaactcacctctaaaaacgcgttgctttgggaaagaacttgcacatttatgctgcatggcttctgctgctgcctttgtgtgtgtgtgtgtgtgtgtgtgtgtgtgtgtgtgttttatttgtttttcagagaatcaagtctcacactgagttactaacctggtcatgagtgactgaccgtgtctgactgccactcctttttgcaggagcatccccccggtccttcagaatccaaacacgctttccgtcctaccaacgcagccaccgccacctcacattccacagcctctcgcagcaactctttggtctcaacctttaccatggagaagcgaggattttacgagtctcttgccaaggtcaagccagggaacttcaaggtccagactgtctctccaagagaaccagcttccaaagtgactgaacaagctctgttaagacctcaaagtaaaaatggccctcaggaaaaagattgtgacctagtagacttggacgatgcgagccttccggtcagtgacgtgtgaggcagaagcgcacggagcctgcctgcctctgccgtcctcagtttcctttcatgaggcttctagccaaagatgataaagggggaaatggtttttagtgcgtatattatactgcctcttaggtgtactctttataagctggtaaaccaagaatctagggagtggccaaactaaatataatttctttaaaaaagaaagaaaaaggaaaaatccaaaatatctcagtatcatctgtctgaagcattgtgtgttctcattcgggtggtaacaatgtatgtgtaatatttttttcttagtgattttgacagtttaaatgtttaacaacttaaagcattaaaaatgcttattaataactttggtcatttaaaaaatgctacaatgacttcctattaaaggttcaatatttacacattcttattggttgatattaccacatgaaatattgccagaccaagatacctaaactcatgatgtctgtggtgctgtaaaatttatactaaaatgtggactattttgaaattataaccatttttgatgccctgaatcttgaggtgacttattttgcatagaggatatggatagaccaacagtaagggttgtgggttataccggcatagagaaaagaagaaaactagaattgaaacaactgtgtcttagacatttgtttgaaaaagcttcatcaggccttggagcagtcactgctttattccgcaaaaattatttggtaggaaatttttgggagatctgattttcttatccaagttttgtaaatagttgttatttctatatttggattggtgaaagacctcaagtttatatgtaaagacataactgcccttagtcatgaaattgttgtgacctctactttttgtcactaatagcctacattcaagtgcctgtgttttttcatcttgtttaggaatgttttgagattaatgtgcttaaaagtcctacgtgactgattttaaacattgtgataaaattaattttcagtagaatagttgaatgtgttaagataggattttatgttagagataccagaatgctggtattctactacttgtgcaatatatatgttttaaaaaacaaatttgagaatacatttaatcatagggatatagatataagcacctctctaaagaatctttagtttccgacgttgaattatagaccagtttgagtaagtactgctttttttttttggagacgggctctcgctctgttgctcaggctggagtgcagtggcgtgatctcagctcactacagcctccacctcgtgggttcaaacagttgtgctgcctcagcttcccgagtagctaggattacaggtgcatgccaccacacctggctaatttttgtattttagtagagatggggtttcaccatgttggccaggctcgtctcgaactcctgacttcaggtgatccacccatctcagcctcccaaagtgctgggattacaggcgtg

SEQ ID NO: 63345 - DNA, 1036 bp, Homo sapiens
cttggagagtaggcagtggcagagccagcctgggcccatctatgggaattctccatcgggattgactcctctggaaggaagacagttgacccacagttgagatcacagcagatgggccagccagggtgtctgtagaccatcaggcagtggccactccatgtagtttaatggacaagcccttttaatggaacaggaatctaacactgaaccaagctgcttttagacacacttttattcctcactctgaaatggcgtttggacaagccaaatatttcttcttctttcagttgacattttgtccatctttgaactgttagttgatgcttcttctgtttagttattcctgttctattttcctgttgccactagtccacccagggatggtaagaatggaagtcaatggttgctttttcatctgagatgcaccacgaaggcttgtcagtcagccttgtcatatggtctgtgctcccactgctccttctttctgtttcctcatctgcagaatttggagagtcctggacctgatctcaaatttcacatgttatttatcttcctgcagcacgctggggagaggaagagacagggacatagaaggttggagctggaacagacttcacatctcattccagaggcatttggtccatcttacagatgaggaaatggaggctgctcagtggactgaggctggaactgggccttccagtggccaggccagatcctccttgatctcccttgttgctttcctggtgggaagaccctggaaccactttatgtgactgtgtgagaagggaactgcctctcattttacccagcaaaatccaccttcaatccatcttcatttttgcccctggtgtgggcaaattctcccatacctaattcaggaagccagaaagaggaagtgagttaatgatccttagtgggaaggcgctggtaatggtccttcttgtgagagtttctgaaacaccacgctgtctctgtgttctggcctggctggagttaaacctcttcttggcctttccccaggaagctggtctga

SEQ ID NO: 63346 - DNA, 1007 bp, Homo sapiens
aataagaattgccacggacatctgtggtcattgtccacttgccactcacctacccccttttctggcagcaacagccggcatttcacatgtccatcatcggacagcgtaggtgggaccatcagtcatggtgtcctaccctctgtggccaaggagtggacacaggacccagttagggcaagcagaggctccccttggaatcgcaaagtgaagctggatgccacccacagagactaacatggtgaagctgctgtagcccctgctgttgagcccccagcactgcctgagttcttgcactttgtgagtccagtttaatatctgcttttcctcccattcttggagctcccctcacatctccagtggcttgaagttgccagagatgtttctgggcttgtgaccaaatgactccttttctgcttctcactgctgagcagacacatgtgcgctcactttgcctgctgagtcttgggacccggaagagcttttgggagacaatcacggaccagccccctcttgcctgccctgctgtctccctccaagcaggaggtgagaaggtgtccacctgcagccccggccaggcatccctttctgtgcttctgcccaaatctgaaattcccctctccttgggacccacgactggggccagcctgcctggggagggaatcccagctgcagaaagtcgggacagtgtgcgtgtaaacatgttaatagaaagcagctttgagggcagactagttcagcttcagttacaaactctttccaaatgcgtttaacatgagccactggctgtgcgcagcatatgtcaagctttcatccaatggtggcattttgtccctgcggggtttttttttcctgagcagtttggggcaggggtggggacagggagagagaaaagtaaaaagagagcagtttggtttcttcaggctggagtacaaggcagaggtaatgggatgtattgaagaaggtaggagggaaagttactttagctacagctatttgtccagctgtgc

SEQ ID NO: 63347 - DNA, 1013 bp, Homo sapiens
gtcattcgtactgatacattaatgataagcacgtaaggaaagaagtttgacttccaatacgtaagtattggttttctgattaagttatatggaccaggaattttagagctagaaagaaccttgctatctcacccaggaatcaggtctatagtcttaactcactgtagtgtgaactagagacagtcttttgagagagatttttggattcacaacttagttgagagaaaactttttagtatggaaaagactgaatttgtctgtatcttctaaacatgttcataaattctgttccagatgtagtcgagatgaaacttgtaaggtgtatcccttatttggacactatgggagattccagtttaatgcctttaaattcttgagaagtatgagctctgtgtatctgcagtgtaaagttttgatatgtgatagcagtgaccaccagtctcgctgcaatcaaggttgtgtctccagaagcaaacgagacatttcttcatataaatggaaaacagattccatcataggacccattcgtctgaaaagggatcgaagtgcaagtggcaattcaggtaagaaaaaagctattccatgatccaaaagcacatcatggctcataaaatgctgctcaaatccagtaactcttaagcatgtacagtttagagatttataatagtagctttagcaaataagttgaattttaagtatataggattagtatttatttccatcagttgataatatgcataccatgtacagtgtaagcagatgatacactgatagtttgccattattcatttggattttgagtataagtgtaatgtcctcatctctaaaaacaagtttcttttagttttctgactccttattatagatggcatagcagataattgaatcaaaagcaatgtgttttaactcctaaatgagtaaaacaaaatgaaccagcattccacataatagcctatttgaaaaaaagttattaaaaaaaaagacaaagaatctattatattaacataggctaa

SEQ ID NO: 63348 - DNA, 1037 bp, Homo sapiens
tgtaaagttcttttcctaaaacatgcatcatttacaaaatggatttgcatattctcagtattgttgggacagtaacatttggaaacagtcatttccacagaagagctttgagcctgatatccagtggggggtcatttctgactctgaaaatgagtatagctcaggaggcccaggtgctggggagtgacgccatcagctccactgcaggcctgcttgttatttccagccgcatatcacacctgtgaaagggaaagattcttcccactgtttgtccttctgatagccttctctctggactttgcatttccattccttttcattgacaaactgactttttttatttctttttttccatctctgggccagcttgggatcctaggccgccctgggaagacatttgtgttttacacacataaggatctgtgtttggggtttcttcttcctcccctgacattggcattgcttagtggttgtgtggggagggagaccacgtgggctcagtgcttgcttgcacttatctgcctaggtacatcgaagtcttttgacctccatacagtgattatgcctgtcatcgctggtggtatcctggcggccttgctcctgctgatagttgtcgtgctctgtctttacttcaaaatacacaacgcgctaaagtgagtcacaagttcaaaataaacaacgtactaaagtgagtcacatggggaaaaggggatagcacttcctcagtgggatacctgggcttcctgttggagcaaggtcattccttgctgctgtggccataccctgggtgaagtcaagaagaacaggcagctttgtaaaagcaaagacagctgagtgtagaatcttattttttttcttcctggctggggttggtagaatgttctcagctttggcctgtgagtgtcagcgctgcttggctgtcactggacctcactaagtttaccatcaggtgtttaattcagcaccttggccaagactccctctgtcctgggcactgtaggctgcagattctgtgggggaggctgcatgaacgagct

SEQ ID NO: 63349 - DNA, 2521 bp, Homo sapiens
taccttgtttagaattgtattcccattggagagcagcttcagtcggtgttgggcaattctggatacaagcatatgattggactacaatcctcatctaccttaggaaccttaaacaagtcgtcctccacaccttttccttttagaactggattgacatctgggaacgtgactgaaaacttacaaacttacattgataaaagtacacaactgcctggtggagagaattctaccaagcttgatgagtgtaaagttatgcctcaaaaccattcctttcttgaaaatgatcttaaaaatgcaatggcctctttcttaccaaagaaagtaagtgacaactcaaatatacccaactccgagttgctgccttttctccagaatttatgtagtcaagttaatcatctccatgtgggaaataagaccgagtgtcaggaaaacatcaccaagcatggtgaacgcattcttggtgttgggtaagtattattttaagacatacgagtttcgatttggtaggtggaagaatcagatgaaaggaaacagatttgtctcaatgagtactgcctaaaatttgtttccagagaaaattttagcaacttttacattttaccattaatacacttaaaggggataactgcagagtagaatggattactttgaaagaagtccctataactggaggttttgcacacttcccaggcattttgtggaagggtcacaagtattagttcacagttggaatagaaagtgatttgcatgaatggaaaggagctgtgggaattataatctttatgttgtttttatatatttgtactattttgtgcctgggtatgttaagcatgtcattgtgacattttccttgaagattatgtttggtctaggcaaattcctgattattaaaaaactatattaggataataatcacttgtagtttacaagctattatccccagtctcttaatcccttattttggcagtacatatttgattaagagatagctaagtattatgttcctaattgcttaagtagatatagtatgtcaaaatggtgttctagactagaattcaggactctaggtgtggttttggcttaaacatgttgccacactgtttagtattctttagcctaagagattttatttgaaaatgaggtagttggatgattttgtaactaaacgccaccaccaaccaacaggattgagttgacatttatagagaactctaccaacaatagcagaatatacacttttttcaagcatctatggaagatttgcaaagatagattatatcttgagtcacaaagcaaatctgaccaaattcaagaggattgaaataatacaatgtgtgttttctgaccataaatgaatctaactagaaaccaataaaagacaacaaaatttccagatttttgggaattacacagcattcttaaatttatggttcaagaaaaagtcttgacagaaattaaacctattacacagaaatgaatgaaaatacaacacatcaaaatttgtgggatgcagttaaagaagtattgataaggatatttatagcactaaatgattacattagaaaagaggattgttcttaaatcagtagcgtaaagctacagctcaaccaaaataaaataatctgaatagtcctataaccattaaagaaattgaatttacaattttaaagccaagcaaactgatcttaaagcaagcagaaagaaggaaataataacagaaatcagtgtaactgaaaacaagcaaacaaaatcaatgaagccaaaagccagttctttgaaaatttcaataaaattgatacacttcaaacaagactatcaaaagataaaaagaagatgcaatcatcagtatccggaatgtaatgagatgtcactactgatcctaaggccgttaaaagataacaagggagggaatattacaaacaaatttatgctcataaatttgacaacttaggagaaatggattaatttccccaaaaccacaaactaccaaccaaactcagccaacatgaaataagtaataaaatagtcctataaccactaaaaatatttgattaatgattggaaagctcatgaaaaagaaatatccaggcccagatggctacactgaaggtttccactgaacatttaaagaacatcaattttacatgcttttaaaaactagaagaggagggaagatgttccaactcattctgtgaagtcagtattagcctgacaccaaactagattgccccccaaaattaaaatacacaaaaatgcatgtaaatatatgtaaaatatgtaaatctataaaaaatacttataaaatatatgaaaaaatttataaacctaacaaaatatataaggatatgtgaaatgaaaattataaaatactgacaaaggaaaagaaaagccctaaaaactggagagacataccatattcatggatttgaagacacagcatagtaaaaacgtcaattctctcctagttgatatataaatttaatgtaattcctatgaaaaatcgagcatgattttttataaa

SEQ ID NO: 63350 - DNA, 1896 bp, Homo sapiens
tgctgcagtgaacatgggagtgcagataatctttttgagatcccagtttcagttattttggatatatgcccagaagtgggattgttagatcatatggtagttctatttttaattttttgaggagcctccatactgtttttcatcactgctatactattttacattcttaaccaatgactaattttcataatcagtgaattcttataaacagaatattatatgtcagaaaggaaaaatttacatagcaaatacctttacatttagatttttctgtttaaatgttctgcctacttaatgttcacccatacttttgacattgactgtagtgtaaatattattactcttaatgtagttttccactgtacattttgttttgaaatgtcatagagaaataaatgggctttcctgttatgactgagtaactttctttgagcttatggggagttgtccaatgttaacattttataaatataattttacataattcatcttattccaggaatatttaaatattcaagtttattcaaaacttgcattttataaaacaagataaacttacagtaggttaacatttctctataaagagcacttttccaaagtgcagtttggtaaaaagttagatggggacatgacattacaaatcttcccccagcttccctggcccttattattctcctttctcactttatttttccctaaagtatttatcaccatctccatttcatgatacattttttcctttcttttcttttcttgacttttttctcttcttccttcttcacttcttttctctttcccttactttctctttttcttttctttcccctttttccttcttttcttttgtagtttgtgtctccttgctcccctgtcatataggctctgtgaggtcagggattttaatttattttgttcgctgctgtatttccagtgcttgaaacaatactagcacagagtagattcctggtaaatatttgttgaataaattaatgttgttccggcttagtctagtaataactttttagaatatctataagtatatgaactgagtttcttcagctaatttacatattgctttttcagtctgtttcaccagctgttgaacagcaataagtgtgggatgataacccctgataagaatctatagtagacttttatgttttgaatttagagtggagccatatgccttaagacttaggctagagatattttcttttatccaatggaaaaattaaagagcataaaagggagatactgtaatcatcccttcaaggtaagccagaatcttctcaggaaataatactgcataaccagttgaattgaggctgcaaaacaactctcattatcctggaaattcttagagcaaacacagccagaagtagctaatttcagtcattgaaaatgtcacaaatgtacccatagagcatctaactttaaatagcatacctatctgtgtagtttccaggaaaaattcattgcaaaagatattactagatgaaagtgagtaacttaccgtattttgacagttgggaatgatataattgaattttaagaaacttaccggttcttgtgactcagttgagagtagtacattttattatcataaagagacatttgtagtggaaacattagtgtcagtgcagtttgactattcatgctagtatttatttaatttcttttgggaaaaactacaatgaaatgattgaaagtcatgactgtggagttaagtgacctgcgttcatgttccagttctgccacttactggctggttaccttggctaggtacctttagccttggtctcctcagcttaatattgggatagtattagtggcctactttataaggatgttttgaggattggatgaaacaatgcacagtgcctgactcatagtaat

SEQ ID NO: 63351 - DNA, 1018 bp, Homo sapiens
tgaatggtagttcatttctctgaagcaaaaaagtaataggcaaagtttaaagtagatttcagctagatcataaacagcttgggatgctggtttaaatttgtagatgtttttgacttatgtttcaagaaattttaagccactgtcaagtgtaaggtgaatctgaagaaagtgagactacaaggagaagatgagctgcacgtcattcccctcgtccagatgagagtgaatgaggtctaagattggacgtagtaacataatgctggatgctaaatgatgctaaaatgatggagccattgggacttgacagctaacttaatattggtattatgatagaaaaatcaagttaaacatgaaattgaggctttgaagatggtgatactaataatataaatgcagcccaaaggaggaggatgcttggaggaaaaaggaatttaattttgggaacattgacttttagctgtgaataagacattccctggaaggatgttgcaaacatctggaaacagaggattaggagaaatggaatgaaccttcagtggctggaagggaagtttaggggtgtacccacagtagctgacggagggtggtgaagggagaggaaaaaggaaccagaaacatagaaggcagcagtgtgatagagtagcaagagaaacgatttgatgtcaggtaaagtgacttcaaactcttgtcctgcctcttcttagttctgcatcctatggcaagttaattaatatttttttcaatatgaattcctcatgtacaaaatctaaatgataacactgtaaggatcacagaattgatgtgaaaatttaaaataagtaatgcaagtaaagaactccttgtagatgttgtgtggttcacaaatattaatgtagtaccagtattataatatgggctgagttaagagaaccaggagagctgaagattatggaaaccacagaaagaagaatttcaaaaaagatggaaatgtatacttttcttcctcccacaccatgttctcacctggatacctcaggag

SEQ ID NO: 63352 - DNA, 1119 bp, Homo sapiens
tttataaattaaactttatcataggtatgtatgtataggaaaaaatataggggttggtactatatgcaatttcagggagccactggaggtcttagaacacattctccacagataaagaggaactactatagtttatttttagttctttaaataggtaaacatttatttaatcacctcatttgttattttacatgaagtcttaatttttgaaaggactcttatttaaatagttcatctgagcctcatgataaattggaatttttcctgactattgctgttctagagaaaagtttaaaatatacttgaagttaatttttagattcttgaatacttcactcttgtttaggtcataccaagaagttacattaaatgattattgtttttaatatcattcttttctggaacttttgttttataatagttgctctcctttggcgaaaggcagtgtgtgttcatcagtaaagttgtggtacacatgagatcagtttttgcaaattcttcaacaagctctcctgctctaggatcaaggatagaccttgacaaggtccaaaccataatggagtccatggggtcaaagttatctcctggagctcagcagttgatggatatggttaggtgtcagcagcgggtaagtagaaatggatttctttccagataacattaatgatttcaaaaccattgcttttagtaaagaaatgtagtgacttaaaatttttctttcatactgatttaactgttatcttttagttttgtagaagttaacatttgttagatttgcccttctacaaagtgttttgactacacattttcacactttttatgaatgcattcattcattcagcaagatttttttcttgcagtaaacaaggcactggtttgagcaattttgagtgtgcgaagatggtcagttaatctgtagtctttaagaatttttacattctggagcatgtaagtggggaatgatgaaaacactaaggaaaggctcactaaaagaagtggtattttatctaggcctttaaaatgtagggtgggattagacaagtaaatttggaagaaggccatttcagacaaaaaataaggtgaataaaatcttcaatgctagaagaatttgatatagct

SEQ ID NO: 63353 - DNA, 1852 bp, Homo sapiens
cggccgggcacggtggctcacacctgtaatcccagcactttgggaggccgaggcgggcggatcacgacgtcaggagatcaagaccatcctggctaacacggcgaaaccccgtctctacgaaaaatacaaaaaattagccgggcgcggtggcgggtgcctgtagtcccagctgcttgggaggctgaggcaggagaatggcgtgaacccggaaggcggagcgtgcagtgagccgagatggagccactgcattccagcctgggcgacagagccagactccgtctcaaaaaagaagagtcatgttcagagaactatactgtgtgatgttttcaccaattttcttctcagtcaggatctggtgattttgaagagaaaccacaacaacaaagatgaaaacccctgcttcctttacctgaggtgtggccctgatggaggtgaagaaatcgcttctattggcattttaagttcagcaagaaatatggaagtgtacttaggagaggagtactgtggaaccagtaggggcaagaatgtttgtactgtcctggatgacaggtgtgtgacttgtacacgggaaagtgttcttctgaagtagtgttttgatttttctcactttttgcaataattattgattctctgatattgataccatatgttatgggagagaagataaaaatgtgccagtaggcatagaagtttacaactttagagatcttaaaagacagtgtagatcagcctagttatttttataaatgttgaaatttagaactaacaatcaaggtgaattggtaggaggtcatagctagttagtggaagagttttattagaatgaaattttgagaagtgtgtctctttccttaaactcacagcagtctgtcttccgaaagttaatttggtagtcagtctggaactttgaatacattttcttcttggaagcctattagaaatggtggagggatctaagactgtgctacataaacctatttattaacctgtaacgcaacttgtgattttttttcttacgaagatttttctccaatctgtctttaacacaaaatatgaactgttttatatcctgcatgttggaaacaattgctgtgtttattgagctttaaaatacagtctggctacatggttgtacatatgttatataatgtaattttctcattgagcctagtaagtggtagatgtaatcataggcagtgtgcttcagttatggagcccaactcttcatgcctcaccaggaaaactgaatcttaggatttcaatattgttctggaaacatttatttttaagtgtaactattaaaagtgacaatatatgtaagtaaaaaaaattaattcttttttatttttagtgaacatgaaaagatcattttgtataaaaaaaatctaaaattggagtcctccacacatgcttgtaaaataaaggtaagttgtcagttgtaaactaatttgacaactaagttgtttttgtactctgtgtatgcttgttttcttttggattagtaatacaattagtccaacttgcttgcttgcttttttttttcttttcaagacagtatcttgctctgttgcccaggctggagtgcagtgggacaatcatggctcactgcaacgtcatctcccagctcaagctaacttcctacctcagcctcccaagtagctgggactacaggcatacaccaccatgcctggcaaattttttaaatttttagtagagatgaggctcagaaatacttagtaaacatgtacaaagaaattacttttctaaaaaattatcagccctttttaacattgaattaagaaatttttttttttttaaatttttcacccggtgaccagtgagtagacttttt

SEQ ID NO: 63354 - DNA, 1210 bp, Homo sapiens
ccccgcccctccgtgctgaccgccggtcgcgctcttgccccggcgagaaacgcgtcgggcatgacgtcatcatacgcgacaacaccgatggcccaaccctgctcctgctgcagccggtgggcgagggcgcgcgcgaaagtcgattttcctgccgcggggaggccacagaggacgcagaggcctcgtttccgcggcccgtcgctgccggttcctctgatgttctcggcggtcttcatgctgcccggggagaccggaggagtctgggagcgtcgtctccgctctaccgtctgccctgcgcgcacgcgcagcgtctccgccgcctaccggcgcagtggaggaactggcctagctgggtttccgtgcggccccagaggcacctgctccaccggtgccctgcttgctcccagggaccagaggctggagagaccgcggcgctgcgttcctagctcctggacattcccaaggggtcccagagttaggattgatcttcaaatagaatcaccctccctgccgaaagttgccagccagtaggattggcgcctcagttttgttaggatgaggtctttctgcttaggaaaatcccaaaagagacgttgagcctttccctccagcaatctttcgaaaataagttactggaaatcaaagaatagaaggcgaggctgacagtccgaccaccgcgctcctttgcggttcccagatgtgaagagtgcaagggcaaagtaaacattcgttattgtgccctcacagcaccagtgggcagcaagcgtgaagaaatattgtcaggaaaggcacatccacagacctcaattccagtgcatgcagacagagaacaataggtgtttgtgttaaaaagtaatactaagctatggagaggtacaaaacaagtttttgttttttgtttgtttttaagacggagtctcgctctgtcgcccaggctggagtgcagtggcgcaatctcggctcactgcaacctctgcaacctccgcctcctgggttcacgccattctcctgcctcagcctccgagtagctgggaatacaggcgcttgccaccaggcccagctaactttttgtatttttagtggagacggggtttcaccatgttagccaggatggtctcgatttcctgaccttgtgatccgcccgcctcggcctcccaaagattacaggcgcaagccaccgcggctggccaagttttttttgtctgggggt

SEQ ID NO: 63355 - DNA, 1022 bp, Homo sapiens
ctctagttaccacatatttcatctattatataaattcagatttataatacattgactttactcaaattccatgctgatcttacacctggcccctgactacctttccccccttcttacctcaccccgtgctcaatggcctcttctcgattctgcaacactgcaaccagccaacctttgcgcttctgcacttgatgtgttcattgcctagaatgatcctccagatagctgcatggttcgctcttacccatctttgcttaaatgtcatctctgagaaggcttcctgattacctttttaaaaataaatcctcccatcactacactgccttaccttacttaaattttcttcagagcatgggcatatactcatgtaatcatgttttgtctgtctcctcattagaatgttctgctccctgccgattccccagcatctagagtaaggcctagtacagtaaggcaactcagtaaaaatttgttggatggatgaacactcagttccagaggtagaatttttagttacatttagtcaaattgcataattaaattgaaaacatgatgtgaacttttatgactgaaaactaataaactctgagtgtcgggaataacagtagcagtagaaagtcacaatcataccaactcaacacataactgacacatcataccttttgcttccttcattgtctgagatacaatccttcggagtgtctgatcagttttatgaagaatgttagttgaacaaataattctgtctgtgtcctatgttaatacagacattgttattagaagtcacatagttttataaaataaatggctaaagaataggtcacatgtatttgaaaggactaaaagaaaagtttaagcggcttttctgtttgttattcttccctacaagagagtccaaccaaatcagatccagtggtaaactgggttccagctaggcggtgatatgctggtgaatgtctaataattgactctcccagaaaaaaaccccagacctatctgtagtgtttgccaatttctgtgat

SEQ ID NO: 63356 - DNA, 1023 bp, Homo sapiens
agccatttattttataaaactatgtgacttctaataacaatgtctgtattaacataggacacagacagaattatttgttcaactaacattcttcataaaactgatcagacactccgaaggattgtatctcagacaatgaaggaagcaaaaggtatgatgtgtcagttatgtgttgagttggtatgattgtgactttctactgctactgttattcccgacactcagagtttattagttttcagtcataaaagttcacatcatgttttcaatttaattatgcaatttgactaaatgtaactaaaaattctacctctggaactgagtgttcatccatccaacaaatttttactgagttgccttactgtactaggccttactctagatgctggggaatcggcagggagcagaacattctaatgaggagacagacaaaacatgattacatgagtatatgcccatgctctgaagaaaatttaagtaaggtaaggcagtgtagtgatgggaggatttatttttaaaaaggtaatcaggaagccttctcagagatgacatttaagcaaagatgggtaagagcgaaccatgcagctatctggaggatcattctaggcaatgaacacatcaagtgcagaagcgcaaaggttggctggttgcagtgttgcagaatcgagaagaggccattgagcacggggtgaggtaagaaggggggaaaggtagtcaggggccaggtgtaagatcagcatggaatttgagtaaagtcaatgtattataaatctgaatttatataatagatgaaatatgtggtaactagagttttacacagtaattccattaggttttgaatactgtattgctatatttaaaattgtacctttaaaaaccagcaatgaacattttttgagcacctttctatacgttaagcgctttacaaatactgtttctaatcttcacagtcctataaggtaggtgtaattttacaaatggggaaatggaagttcatagaggaacaagtaacttgtccaagac

SEQ ID NO: 63357 - DNA, 1031 bp, Homo sapiens
gctggagtgcagtggtgcgatctgggctcactgcaacctctgcctcccgggttcaagcgattctcctgcctcagcctaccgaaaagcagggattacaggcgcctgctgccatgcccggctaatttttttggtatttttagtagagatggggtttcaccatgttggccagcatggtctccatctcttgacctcgtgatccacccacctcggcctcccaaagtgctgggattacaagcgtgagccactgcgcccggccactaataatttttaaaagcccctagaactaccgtagcttctaaaaagggaggaaaggaacgattcacaagtattgaattaagaaaagagaattcagttacctgtaagtccttatttggctaaatatgtttggaacaaagaagagactagatgtgaagagagaagacaagaagtacgaaaataagatagatcagtctgaagccaggaaacagggaaaacaaaaacagccctgttactgagtggttgtaaagtacaataattcatattaatggtatgtcaaatgttggtctatttccagtagatttcgagttaagtcaaagaagaagttttgattcttaaaaagttggtcatatttttgtaaattggaaaatctgcttttgcagaaccccctcattcctcaaccctacagttctactatttaaaaacttaggctgaaaaggcccaagaacagcctattcttgaagaagaaaaacaaagcagggggacttaaattactgtgatagcaagacttattattaagagtatctggtatggcagcaaggacagataggctagtggaacagaacagagaatccagaagcagagccacatacgtgcatataaccatttgatttaaaaagaagacatcagagcttagtagagaaaggccgatctgttaggtacacattgctgggacagttggatatctctttggaaaaaagtatgctttgactcttatctcacaccatacacaaaactcaagtccagataaaaatatgaaaggtaaaataaaaagc

SEQ ID NO: 63358 - DNA, 1007 bp, Homo sapiens
aaaccacgacactgcactccagcctgggtgataaagcaagattctgtctcaaaaaaaaagagaagaaaaaaaaaaaagaaagaaaacaatgctaacacagaactcacacttccaccctctcctcagatacaacctccatcctgaagctcatctgtatgcttcctgtttgtgtttttaaacttttactatatctttatgtcctcataagaatatgtactatcatttggtgttttaaagtgtacataaatgctgtcatcctgaacaaatcctctcgctaactgcatctttaactctatactatattttcaagatttgtccatgttgatccacgtagctccctagttccctttaactgctataagatattctgttgcatcaatatatgacaatttatgcatgctttgttgacaggtaattggatttttagtgttttgcctttacaaaaatcactgcatcttttgcacatgtctacttgtgcatatgaactgaggtaaaattgctgggccttactgtaaatatgttgttttaattcactttgcgctgctgtaacagaataccatagactgggtgcttataaagaaaagaaatttatttctcatagttctggagaatgggaattccaagatccattcacaggttcggttgtctggggaagactttcttcacacatcctcacttggcagaacggaagggcctgggttgatgctgtgtgaaacctcttttataagggccttagtctcattcccaaggaggagctctcataacctaatcacctcttaaaggccccccactcaatactatgacattgaatttcaacatctgaattttagaggggacacatgcaaaccatgtcatatgtctttatctttactatcactaaattgtccaaagtgattgcaacagtgatttatatactcaacccacagagtataagaatttctcctttctagctgggcacggtggctcacgccagtaatcccagcactctgggaggccgagatgggcgg

SEQ ID NO: 63359 - DNA, 1374 bp, Homo sapiens
tgcaacctctgccgctggggttcaagcaattctcctgcctcagcctcccgagtagctgggattacagttgcctgccaccgcacctagctaatttttgtagtttttagcagagatggggtttcaccatcttggccagggtggtcttgaactcctgacctattgatccacctgcctcggcctcccaaagtgctcggactacaggtgtgagccactgcacccggcctcgtgagctttcttttaaagataaacttaggtacaaaggtgatatattaactaacagacacatagaattctgtcacaggtttagtgaagtaaataatctcccttagaaataagaaatgtgggcaatgtattatagtttttgaaatgtaataggtaagtttcatgagcattttgtgaagaagcctagttgacacattctttcattcattcaaatatatatcaagaaccccattcaaggctccaccaccagccagtgagcggacttggcccccatgcttacttctcttccttctccaatttccattctttttttttttttttttttttttgagacggagtttcgctcttgttgcccaggctggagtgcagtcatgtaatctaggctcaccgcaacctccgcctcctgggttcaagtgattctcctgcctccacctcccgagtagctgggattacaggcatgtgccaccatgcccggctaattttgtatttttagtagagatggggtttctccatgttggtcaggcaggccttgaactcccgacctcagatgatccgcccgcctgggcctcccaaagtgctgggattacaggcgtgagccaccatgcctggcctccaatttccattctttcccccctttcttccttctttcttcgtgccagctgccactgaccattctctcctgctgctgctagcagcgttcttccccttcttgagcccctttgcacttcgattcttacctcacttctcctttacccttctttttaattcttcctgtccatctcatcaaggagaaaataccttatgtcccctttgtcctcctttctagcccaaagttttcctgtcccaactctgtctttaatgagaaaaaatgttccgtgcaactttgccccaaactgactcctacttctgaaaacaaaacaaaacaattagctaggaaaattgagacgcataccacttttcttctaactggccagtgtttcttgttcccgggtgaatccagagcagagtatgtctgctcctaggcacatagttgcaaagagtgaccaacatgcagcaaagattgacagtggtttcaaacgtagtgactcgtccacagtttctctttttcttgacttttcagcgtgtaatcaaaactactcagaaaacatattt

SEQ ID NO: 63360 - DNA, 3065 bp, Homo sapiens
tatacgcatacatatatatatttttactctgtcttactctgtcacccaggctagagtgcagtggcgcgatctcagctcactgcagccttgacctcctgggttccagtgattctcatgcctcatcctcccaagtagctggaactacaggtgtgcaccaccatgcctggttcatttttgtgtttttagtagagatggggttttaccatattgcccaggctggtcttctggcttctggatatcgcccaccttggcctcccaaagtgctgggattacagggatgagccaccgtgcctggctgggtatttatattatcattctagtttcagagtatacagaagtttcatcccatcatttggaaaaataaaggcatctgaagtacaatattacttatagaaatagtttatattcctattaaatcttaatcttgtggcatcagggaaatatttgttacatagtaggcaatttttatccagtactttatagattcaactctaagttgcaagcgaagtcaaaactgatgaaaatttatttagaaaaatctaaaaattctggttttaaatatgagaatcagtggaaaataagggtataattttgtaggtcatatgattgaagaaaatattattttaacaatgtaaagcaatatgatttgttactataattaacctgtataaaagatacattttatggtggtttcagtaggtcattttaaaaaccaatgtgcattagttttcaagtataaggtttaagtaatttggtttaataatcagaaaatattcaatacagtgttggatattctgtcatgcactatttttcagttgacaatttctgtattttaattgaatactgtttcttcagtcatggttattgcactttatcctgaataataattcagaaattgggttttggttcagtgattctcaagaaaaagatctcttgcccattaagaagtgtatcaaaatctcataaggaatgagggagagaagggggctgtagagtttgaaaaagcatattcaatattaaaatagttttatatttgggaaggcaaaaatgaatctattgttttgcaatataggttataaacaggcaaaatgcaataaaatatatatctggttgtattagtctgttttcacgctgctgataaagacatacctgagaccaggaagaaaaagaggtttaattggacttacagttccacatgactggggaggcctcagaatcatggtgggaggcaaaaagcacttcttacatggcggcagcaagagaaaatgagaaagaagcaaaagtggaaacccctaataaacctatcagatcttgtgagacttactatcacgagaatagcacaggaaagactggcccccatgattcaattacctcccccgggtccctcccacaacacatgggaattctgagagataccatttaagttgagatttcagtggggacacagccaaaccatatcattctacccctggcacctccaaatctcatgtcctcacatttcaaaaccaatcatgccttcccaacagtcccccaaagtcttaactcatttcagcattaacccaaaagtccgcagtccaaagtttcatctgagacaaggcaagtcccttccacttatgaacctgtaaaatcaaaagtaaactagttacttcctagatacaatgggggtacaggtattgggtaaatacagccattccaaatgggagaaattggccaacacaaaagggtaacagggcccatgcaagtccaaaattcagcagggcagtcaaattttaaacctccaaaatgatcacctttgactccacgtctcacaatcatctctctcaagttcgaagttccacaaatctctaaggcaagggaaagatgctgccagtctctttgctaaaacacagcaagagtcacctttactccagttcccaaaaagtttttcatctccatctgagaccacctcagcctgaattttattgtcaatattgctatcagcattttgggcaaagccattcagcaagtatctaggaagttccaaactttcccacattttcctgtcttcttctgagcccttcaaactgttccaacctctgcctgttacccagttccaaacttgctttcatatttttggctatcttttcagcaatgccccactctactgttagcagtttactgtattagtctgttttcacactgctgataaagacattcctcaagattgtgaagaaaaagaggtttaattggacttacagttccacatggccggggaggcctcagaatcatggcgggaggtgaaaagcacttcgtacatggtggtggcaagagaaaatgaagaagaagcaaaagtggaaacccctgataaacccatcagatctcatgagacttactatcatgagaatagcacaggaaagactggcccccctgattcgatgacctccccctgggtccctcccacaacatgtgggaattccagaagataaattcaagttgcaatttcagtggggacatagccaaaccatatcactggtgatgccacttcttcagtattagggattctcagtcagaagagaccccctgtgtggcctgagtcccctcaggaggaaggtggacaacagagaaatgagagttttgatattttctgaaagaggaacatgtgttagagatgaagaatcttccaaggctcatgcagttgcttagaataatcattactgttatatgagaaacattttagtaatttaataaaaggataatgtttatttaaaaaacctgacttttccagagtaattttgttttgcacattcatgtttattgaagtggactaatttctataatgcaaatcagagttaaatattaaaaattgtgtaaatacaattgacataggaattacattaaaatattaggaagaaacaaggacaaatttagaccttgaatccgaagagataaagcttacttgactttcaaatggagagatgatgaaaacccactcattcactctttcagaacaaaaagacagtcatctgataagagtatgacatggatgaaatgccctacaggggccttggacatctttaatttctgcg

SEQ ID NO: 63361 - DNA, 1765 bp, Homo sapiens
cacgtgaggagcgtttcttttccagtgttgggtagaggcgtctgtcggtggggttatttggacagttctttagcttttcaggagcatctgccttgaacctgtaccgttttgggttggagacatgcagacattggaaactccgtctccccttttctgttacacgcttgtggagtaactctaaactttctgaaaatacgatcattatatttgcaacaatactgttttggctgccgtattgaaaggaaccgtttaggggaaatgtatgtttaccctcagctagcgtgttggctaggataaagcagccctcctttaatttccagacacaggagtttagtgaccacttgcttttttatgctgttttttggtttgtttaccatgaatagttgagcccagtgcatatcccgagcataaactgaacacttgcttgtagaaataagaatgttgaaaccctttcaaaagttctagtttttaaacggttcaaaactattttataggatccaacgcatgcctggagtggaggactagatcatcaattgaaaatgcatgatttgaacactgatcaaggtaatgtgaccatatctttaccagtttgttttcttggctagtgttcttaagtataaatgtttatgtaggaagagtggttcctaaattgcttagttactaagttgcttaagtacaggtggcttgaatttaggatttttttaatttaaatgataaccattaagttactgattacagaatattatgcatgtatttttgcagtaaagccagttatggtcgccattgtcagtgtttacataaattgacactcaagtatttggcctttattttgtccttagaagtgggctggatcccagactggccagcgtttcattaggattttccactacaatgctgatgttttgagagttcagtttttagaagctaatttagttttcagaagctaaaggtagatttaaaacctgacaaaaaataggcaatcatgtctatattaattgtgtttgttttaggtatttagcaaaatatgtttccgttgcattttttgaatgagtaactagatgatacatttcctttcggttaagtaatttcttagagatccagatatgaaatgacttactcaaatttttttggtgacattggcacagtgttagagattggactggagcccaaatgcatagagctctctagctgaacatttgtttgcatgtgtattcatcagacataggtattctaaggagataggagggtacagagatatgactagagagaagatgagttgagcaacaggagaatggatggaggatggccacattttgtcaaaaaactaagcacccaattagaagaggcttttgcatgaaagctacttcttctgtaacttatactgcaggtattgggttttgtttgccagtagcttaccctgtgtaataagtaagcttgtaagtctaggttctatttgttcagaaacttgtaggggtagggagaaacactgaaaagcaaacgtctcgattttcagtgttacatagagaattagctgtttattctatgaaagtcactgccaaacttcatgaaatcctttctttttctttcttgtttttttttttgagctagagtctcactctgttgaccaggctggagtgcagtggtgtgatcttggctcaccacagcctccgccacccgcattcaggcaattctgcctcagcctcccgagtagctgggactacaggtgtgcgccaccatgctcggctaatttttgtattttttagta

SEQ ID NO: 63362 - DNA, 1086 bp, Homo sapiens
cttaatgttcaacataaatgttgttgatccagaagaccagagttctccattcatttgtttattcaacagatatttcttgagcacctagcctgtaccagaccttgcactagatacgggcagagatcacagaggtaaacgcagttcctgataggaaatctagaatcaagtgaggaagataacagacatgccactatgttaatgtaatctgaaattcaagacagcctttggtatgtgcaatactagtgagtcatgtgaagtgtgcactgtaaggtgaacagagaggaacggataactttgtagtcatggagagatttttctgtctgtagtagacatttccatggggttggatgaggcaaattcattacagttgaatgaatgtttcttttaattgtttattttaggaatctttagtaaaggtagtaagctagatgttggggttttttcccctttttttttctctatagaaaatcttgttgggacccatgatgcccctatcagatgtgttgaatactgtccagaagtgaatgtgatggtcactggaagttgggatcagacagttaaactgtgggatcccagaactccttgtaatgctgggaccttctctcagcctgaaaaggtaggctctttatattcattgcaggagttgatggttttggggtgatttttgtcttggtgcatgattgttgactatgcttgttgaatttaaaggtgaaaagtcaacatggggggaaaaaaggttgacagttggttttataaatccaactacatagaaatgctttaatgcaaaagaaaattaactttgggattttgggccaacttttatttgtcagttgttatatttgcttccatgtattgttaatgctttaaatcgcaaaattgagaagcaactcactgccttttcagagaagtcatttagcagactgttcgattgtcttaaattgacgctccatcccaaaccagaagattggatggagcatcacttattttcatttgttatctgaggtttctttgggttgactgttgagagggcaaaatgggttatcatttcaagttcagtaagaaaggtgttttatgttccctggcttg

SEQ ID NO: 63363 - DNA, 1886 bp, Homo sapiens
cagtggggatagaaagcactattagaagcttgtgtgtcacctatatagtaaagatttaagataaaattcccagtatgattgtaccattataaatcgatctctttctggattctttatttttaaagtttggtactttatacatcttaattttcattttactgcaaacattttgttttctgagtaagctatgataaatcttaacatttctgacatttatatctgcttatattaaatctattgttttgaatcttaattttaattccttatttttcccttggtcacattaattgttgaattttaaggccagattctagagaggggtgggacatggcgttgttaaagctaacttggttcttcagctgatggtatgtggttaacatactagtgattattaacatatggcttaagtactgaatgttgaagagacatcatcttaccttgccatggggcctctctgcattttttatggcagttcttcaggtttgaaaatgctaagtcagattagagtttcttattaattgaaaataatagagcacagttgtgaatcgcaagtctagatttttaaaaagtgactgaacatgatcaggagaatatttttttgccacctttttaatgagttggctacctctgttttgtttccaagtaacactatatttgcaaataaaccactaaatgtttgcttgtaggaaattctatggtttattataaaggaatttttgtggaaagtttaatattgaagaaagacattataaggggaaaaataggggatacactacttttaaaaattttccctaatgttgaacttctatcttgaatgcatagtattacatcagggcacaagaattgctttgtcatatgtcagaccactatcttgtcttttaattttgagtttgtatgccaccaaaggctgctaaacatctaattagtggtggctccctcacccttcctggaaaggcctatttattccatgtaacaactggggaaaaaaaatcaagatttttagagttgcaaaatgaaatattctaaaaggtggttttagaaaaatagttttgaaaatgattgttttatgaaaagccagaaacccattaagctctaccttgaattattttatggctctattatctcatttttgaatttttttttacacttttatgttgtctctaaatgaaacatgaaggctaggaaaaatagtttaatttgttttagtaatggagagaattaagacttcaaaagctcctttacagaattacttagaatgtacattatatgatgcttggtgaagtatggagagcatcatgggtttgctattttatgtgaattacttggtttgaataattgcagtatctaaaattgttatctgtgattggggaattcagtcagctaattttttatggtcttatgatcagatggactttattttggggcaaaatgccattttcaggcaagaaggtgatttttagcaagttttgatcttttttaaaaggtatataccctctcagtgtctggagaccggctgattgtgggaacagcaggccgcagagtgttggtgtgggacttacggaacatgggttacgtgcagcagcgcagggagtccagcctgaaataccagactcgctgcatacgagcgtttccaaacaagcaggtattgaactatacctcctcttctttctggaatttgaaaataatatgatcttatattataatgatttggccactagcccctaaagccttctttttttttttcagtagtgatttagaatttgctgttaggtgtattcttccttgatatttttgacagccatgtgttaacaggaagtgcgttaacccccattttagagacgaccttgatgttcagagagaccaagtaatctgctcaggaagtggtt

SEQ ID NO: 63364 - DNA, 3233 bp, Homo sapiens
gcagttatgtgaaacttcagagatttagatatgtgattaaaatatgcttacattgtgaacattattttaatgccattatatctaatattttatataggattatttctactttgtaatggaagttaaaaagtaggattttactgacttatatatttcttcataaacagttttcaggaataaatctttttcataccttgaaggattaaaaaatcatagatttcatatttggtgtgttagctcttattttttaagatactgtcatttcaacgaaagatgaaaaaacgtttaaaattgtaaaccacttttgaatgtccctgaaagtctttgtgcaaacctgacttgctgtattaaatgcaagaagtagtatgactgagatggaagactggtgttctagttgatttggattattgatgcccccaatgaaggaaacacaattcttaacagttgttcgcgatgaagaggcacagaacatagaagaatatattttaactgagggaacaaatttgagtctgctgggcaggacaacaaataagcgacactaaaacactttaaatttttgtttaggtttgatgcagtaactagatattttttattgtaatgtgcaaggccctggtacctgtgaggaaagcatgtgatgagtcttattttctttttaaagtcgtcataaccatgttagtacagcctaaacacttcattaaagcctgctgtacttctcatttctgaaataatcactctttagtgtgggttgaatttgggaattagcaccttgtttttggaagctggaatttaccatttttttcctctggttctctcttggcagggttatgtattaagctctattgaaggccgagtggcagttgagtatttggacccaagccctgaggtacagaagaagaagtatgccttcaaatgtcacagactaaaagaaaataatattgagcagatttacccagtcaatgccatttcttttcacaatatccacaatacatttgccacaggtaaagtatggcatgctgacctatatttaattattatactatttggtgcttgctttttatggtatttagtgaaaaaaaatctgtacagtgctttagggaaatgtaacttctatgaccttaaaaattaactgttaagagaatggttatttctgtatctggtgttaagaaccattttaactgttttgaaattacttccaggtggttctgatggctttgtaaatatttgggatccatttaacaaaaagcgactgtgccaattccatcggtaccccacgagcatcgcatcacttgccttcagtaatgatgggactacgcttgcaatagcgtcatcatatatgtatgaaatggatgacacagaacatcctgaagatggtatcttcattcgccaagtgacagatgcagaaacaaaacccaagtgagtatgcttcacctgtatttgagccttttcttgcattcaacccaggatttattaatttttctaaattcatgaatagcattgttgatgcctgctcgatattacagctgactgtagggttggagttgatgttatcatgttctcccaagctttcaatatccgtaggttgatagacgtctgatggataaaattgtgcctagttgttttgtagagaagaatgtcaaactcttattcttcttgaataggctctattatttgaatctctggagttattaccagctcattgcttcaaaattaagttgaggaattcaagaataatttattttagtaaattctatttaagatgtttaagaatttgaactgccaaaaatctttcctctccacagaggttgtttctttaatattaacacaaagtaagtgaccttcaggtcttattggaaactcagagtaatatggccttgcctggaattgcaaatttccttagttttgaaattttcatagatgtctttggttcttggttgtaactgttgactgagaagagccatttacattttttgataccaacagggcaaagctttttacttaattacctctaccaggctttaagggaaatctgatacttcagcatgtgttaaactataaaatacctactccaagtatctgcccagttccttgtcccctctccccaggcccttaaaggaagttctcgatacatatttgtagaataactgaatgttttcaggattcctgtactttgctgagttaaaatggatatggtacccttgctgattggttgagcccctaagagggggcagaatattaaatattccatatcagatatgcttttacaggtttgactttagaaaagtcttagcatgtgaagcctgttggataaagggctgtgtttgcatttaatctgtcacttttgtatctcctgtcctggctggccattttgatctcatgctgttctttttttcttttgaacttgtaggtcaccatgtacttgacaagatttcatttacttaagtgccatgttgatgataataaaacaattcgtactccccaatggtggatttattactattaaagaaaccagggaaaatattaattttaatattataacaacctgaaaataatggaaaagaggtttttgaatttttttttttaaataaacaccttcttaagtgcatgagatggtttgatggtttgctgcattaaaggtatttgggcaaacaaaattggagggcaagtgactgcagttttgagaatcagttttgaccttgatgattttttgtttccactgtggaaataaatgtttgtaaataagtgtaataaaaatccctttgcattctttctggaccttaaatggtagaggaaaaggctcgtgagccatttgtttcttttgctggttatagttgctaattctaaagctgcttcagactgcttcatgaggaggttaatctacaattaaacaatatttcctcttggccgtccattattttctgaagcagatggttcatcatttcctgggctgttaaacaaagcgaggttaaggttagactcttgggaatcagctagttttcaatcttattagggtgcagaaggaaaactaataagaaaacctcctaatatcattttgtgactgtaaacaattatttattagcaaacaattgatcccagaagggcaaattgtttgagtcagtaatgagctgagaaaagacagagcatatctgtgtatttggaaaaataattgtaacgtaattgcagtgcatttagacaggcatctatttggacctgtttctatctctaaatgaattttt

SEQ ID NO: 63365 - DNA, 1851 bp, Homo sapiens
aaagttaaaaagaaaaaaattatagtgagaatgagattcatttcaatgtaatgcactaaagcagaacacgaacttagcttggcctattctaggtagttccaaatagtatttttgttgtcaaactttaaaatttatattaatttgcaaatgtatgtctctgagtaggacttggacctttcctgagatttattttatccgtgatgtattttttttaattcttttgatacagagaagggtctttttttttttaagtatttcagtgaaaacttggtgtaagtctgaacccatcttttgaaatgtattttcttcattgcaggtccacctaatcatcctgtgaaagtggtttctctatggaaagctttgtttgcttcctacaaatacatgcttattccttaagggatgtgttagagttactgtggatttctctgttttctgtcttacaagaaacttgtctatgtaccttaatactttgtttaggatgaggagtctttgtgtccctgtacagtagtctgacgtatttccccttctgtcccctagtaagcccagttgctgtatctgaacagtttgagctctttttgtaatatactctaaacctgttatttctgtgctaataaacgagatgcagaacccttgaatgttggatgtttttgaatgttggtaattaatataatttacttaaaaaggcttgtgtaaggcaaaactcgtcatcacaggcatgttgggggatgacattttacctttaagtccactctccctcgtttaattgtctcctctgatgtgtgttggggattcagtcctgcataaagtgatttgttggagttcagccatttccctcatgcccccttgtgccctctcggtggatcagcagggcctttgagccaagtgtgcagcttcactcaggatgggcagagactatgtggcagcctctggggaccttttggctcagtgctttactagtgccagcgcagtagtgcttaggtagcttgtgcatccccgtgttgatgtagtcatagtccacacagagccaaataacagacccttctgtacttagccatcaaatactaaatcacagtgaagcccttgggaaggtaaataatgtaatagccagggactgatggtattagttctttagtgtgattatgtgcttctaaaagtccctaaccacttggttgaggacagaccataagtttaaaacattgtataagtgaaagaattaatatagtattgttataggtaaccaaattatagtaatgtggacttgtttttgaggtggtgagggagggcttattttgtggttccatctggatgtcctcttgtctctggaaatcaagtgtgcctccctgccatctctacataccccttaaccagctctccacaatttacttgtttatggttatagctaccttttccccaagttacccaggtgtagttaccttggccttctcattggtttccctcacccacattctttaagtgtctcttctgtttatcttttcttcctactgctaccatcccagggccttttgggtgaatgtggcagcctccaatttctgccttaagtcctccatctaatagagtagtgacttttgaaccttgtagttgtgacccaagtaagaaatacattttgaactacagttcagaacacagaggtcagtatattatacatgacagaaggatcctgaaatatgacttgcccttcttgcatgcgatgtatctggtgcatgtgtgcatttttttctttgctttttaagaaatcctggctatgtcaccttgaattgattttacaacaaatgcctgtcacctgtaatttgcaaaaactgcttgatcagattctaaaaaatttctaaaaga

SEQ ID NO: 63366 - DNA, 1083 bp, Homo sapiens
agctctaacttgtatgtgtgagacagaccaggcttcgggggtaggaggatctgcagttgttcagccgtctttctgctggtgttgtctttctgccatcagagaagggacacacagcccgttcgaaggtgtgcagagggctctgagcgccaggatggccagggctgtttttgctactgaaggagcgtgtgtcctgaactcccacttgcagggacagtccccaccttctctatagccggcactgggagcagccgccagcagggaaatctggcctgagcacaaggatgctttagggagagatcacttcagtgtgtgtgtatatttatttgcagtacagtgcgcgcgtgtgtgtgtgtgtacgcgcacgtgtgggtgagtgcgtcttctgagtgggttctgttcagttgctaatgaggctcctccgctctggacacaacccttttatagattaatttctctgccaattaacttgtcattttcagtacatattttactattccacaccaaccataattacaacaagggatttttcttatgcactcctatgcatgtgaataacatgtggtgtaattctgcttcttacagaagtattactgaaggtattatttccaatattatttggtttattatgcggatcttttttatatatgcagtcccatcccttctgtgccactcaatgccatccagacatggtttttccctccaggggcctttctctccagagggcacttcggctgcctctgcttcctctcattcgaggcccggctcttgctgacagaataggttccgttctgggcggtggttctcgagcctgccattcaaaaccaaagcaaattggagcatttctcacaacatggtattgaagttcctttttgttctcaaaagttgtgaccgtgttaaattgtactcccttagtcctgtaaggtatgttaagtgaatcgcagttacgctgtacttttattaatatttaacataattaaagatggacccataagagtgacgcctgtggagcgcgtgctcttcctctgcagccaagctcttcctggtgcatgagtgaatcgcagtggtttagtgtcgcacctgctc

SEQ ID NO: 63367 - DNA, 1115 bp, Homo sapiens
aaggtgccagagccctcccctgcaggccctgggaccactgagttctctctgcaggaggctgcctgaaaaggactgggaaaagtggggcaggtgtgggctttgcactggggactcctaggaggaagcggcttaagctgggctgggtttagatggacagggagaggcagggcaggggggaactcctgacccaaggcacagtttattttaatagctttaaatagtgtttcttgctgcagaagagctaatatctaatatgcacgtacagtctgcttgctaccgggcactttgtaccatgcagagtgtgccgactcccatccagcgccctgggggcaagcccttggatagtttctcccacacagaagggagggtgtgcccctgccctcctgctgcgggtcagcactccgactgtgaactggagagcacagctgaaactgagccataagttcatgggcaccatcgtgatcctccctgtgttgtgtatgcttgagtcttcgtgataaaaggtttctaaaactccatctgtgagaggtgaaagggatctaacctttgttcattactgccagcccctgtcccaagccctttcaatgcatcgtctcattagagatcccctgaaatccatccctgttttacaggtgggaagactgaggctcacagaggttagttctcccatccatagctggtatcaggcaggctcaaggttcaatcctgggtctgctggcgtttgacactcagggagtttttgccttccctagctggctcctaaaagcaaagggttttgctggcaggaggcctgggcttttatgctcaattttgcgttttgctgaggatgacaagacagtagcttagcaggtgcctctgctcagaggagatccccaggggcaggctcagtggacaggaggggtgcagcagtaacagattgtcccttaatcttcagtccctggagaactcacacaccagagaaagagccaggcaatcagaaaccctccttatagaggtgaattttcatttctgggaggagaagccggtttccctccagatgtgaatcccagccctgccacagccctgggagggcagctttgtaaggcaccctgggccccggcacaccctgctggagt

SEQ ID NO: 63368 - DNA, 1099 bp, Homo sapiens
atttggggtgagaagaggaacttttgaagaacagtgttcccctctcatgacaaataagattttgtctcctttagaaaaaattaaacaggtcgggtacagtggctcatgcctgtaatcccagcactttgggaggccggggtgggtggatcgcctgaggtcaggagttcaagaccagcctggccaacatggtgaaaccccatctctactaaaaatacaaaaattaccagatgtggtggcacactcctatagtcccagctactcgggaggctgaggcaggagaatcgcttgaatccaggaggcggaggctgcagtgggccaagatggtgcaactgcactccagcctgggtgtcagagtgagactccatctcaaaaaaaaaaataaaataaaataaaaacaaacaaaaataaacggaacttgcaacgttactgctgtttcttacgtaagtgttattcttgaggctgtccccactgagttgacacatgttgcagatggttttcttaaccattctgatcctggtctgtgtgacttcagccccagcaggcctgaccaggggcacaggacggttccttggtactgtcaaggcgagggaaacacccttagaatcaggggtgtaagcttctccacgtggtttaactcctagaattctgtgtctctccacgtggttgatgcctttatccttgtctgcgttgaatgtacagtttccagctttccttgagagaccaaaaggaagaacaatgctgagcagagcagctttgctttaagatcaagggtttcccagtgtgggtgaggccagggtagtgggatattgaacagccactatggggcggcctggctggcactgggcactgcttgcatcatttatgcctgtgtgaatgcagaatctcagggctgccaggacctgaaaattatttggtccagtgctccctccaatacttccacatcagagctaagggggcacctgtctaatccgaggccctctgagtcagggaattctccgcgcaagatggccagtgtagcttaggacagctgtgttcctattttgagaccaggtctgttttggggaaacatccactcattggtcctctttcttctccatag

SEQ ID NO: 63369 - DNA, 1086 bp, Homo sapiens
tgggccccatgaggaaggcatcatggagtttataggatactgcccttctctctcctgtgggcagccctcggtcctctctccctgtttgacacaacacatgcatcctgggtgtcatcgctgcccagccacttacgagtcccacctgtgcacaagttaaccagccccagactttgtccctccaagcagacatgtttctagctcttgagtaggtgttccagcctttaatctgccactgtctagcttagtggtggtatcttccagcccttgaagcatgcatggattgaagtgggtagccaggccgcatagacccccacccccatccccagcagccctttctgaagcttacctgggctgagcctcttgctgctgtcgccaggccctttaggcctttccatctctctttggttgctgtctgggaggccatcgctccagcagtagcaactttgtcctcagtatctcctgcttcttggttctcataggaatcgtccgcctaagagatgggctgcgagaccgctatcccgtggaagattatctggacctctttgacctggccgcacaccagatccatcaaggactgcaggccagctctgcaaaggagcagagcaagatgaatacaatcattatcggtaaggcgtctgtgtcactctggcagggctagcaccctccctggggtcctggctctggctccaggcctagcccagctctgcttcacctccagaacatttacatggtggcagcaaacttcttttgagcctccacttctccacctggctgtcactcttaccactacataaaatgttcacatcacttgaacattactataaagtggaaatgttgactttctaattctttggagacttaaggacagctgatggctttcttgagaagttgccatttctttgtttttaagaaattaagcagggatattgacttcttttcctgatgtactgatctgataagtttggatgggggaattataagtgcagttaactggttagtcatcgatttgctgcttggggcttttgtaatccctggccactgggaccatataagacggaggcagcttctcctgaaatagactcagct

SEQ ID NO: 63370 - DNA, 1149 bp, Homo sapiens
aattcttccacctttttttgtgccatgggaaaaacctgaagggcaggcagagctgctcccgaacttgtgaccttctctgaggttgcagcggctcttgtagaacatgactctgggacatcacttccttttgttttctttcggagctgaaccaaagaatgtgcaccctctttctctagtgctgtggtgtctgcttatttttgtatttgtgctttccatccatcttctgtgatcacaaggcattcttaaggttttctagcacgacttgcggacatccagactcgtggggggcccacccatggctcggtaagccagcagcccagggcactggcactaccatgaggcactgcattaattgctgcatacagctgttacccgacggcgcacacaagcagcaggtcaactgccaagggggcccccatcacggtcaccaggcgtgccccacgtgcaaaggagaaaacaaaattctgtttcgtgtggacagtaagcagatgaacttgcttgctgttctcgaagtgaggactgaagggaacgaaaactggggtgggtttttgcgcttcaaaaaggggaagcgatgtagcctcgtttttggactgataataatgaccttggtaatggcttcttacatcctttctggggcccaccaagagcttctgatctcatcacctttccattacggaggcttccccagcaaccccagcttgatggacagcgaaaacccaagtgacacaaaggagcatcaccaccaatcctctgtaaataatatttcatacatgaaggactatccaagcattaaattaattatcaacagcatcacaactaggattgagttcacgaccagacagctcccagacttagaagaccttaagaagcaggagttgcatgtgagtagctttgtgctaatcttgactgattggttgatttttagaaatgagtgcttttctttctatcaccatctttgggaacacagaaggaaaatgactaaaaaatgtcttagatgtagcaaggatcatttgacagccttatggatttgaatgcactgagagagtgctgtttgcttacgctatggagtgccaggaagggaatctgctgtcctgaacgctgggctaggcatgttcaagggccgctggctctcattattgcattccagga

SEQ ID NO: 63371 - DNA, 1087 bp, Homo sapiens
acgggtggccggtgggctgagtgatggctgaccgtgctccactgtgagccttgagttctgagcaggttcccctacagctgccaataacagcttcgttcgcctgctgcaggagaaaggtcacaggctttgcagccacacagaccagcggttggattttggccccaccactggtgagtcctgtgactcagggttatgtgtttaaccctgctgtgcctcagtttcccatacatgactcggggaatctcagtgctgacctcagagagtgccttcaagaagggacctagcatgatcctctgcaagtggcagacactggactatcaggcatttccttcttcttttgccgccaaccctaaactgactccgtgtgctgctgaaatgctttgcagctatatgactgtcctcgctttgttccctagagccattttggtagacgcgcttctcggcacaccctgtaagctcctcttgagtggcctctgccttattggaaaaccggagtcagtagatatacaagcatgagaaaatctagtccctacactggtgtgatttactactggaaataataaaatgagcactctgaaatagtttttctctccacttggtttcagaaaaaattattgattgtgtcacaaagacctttagagtcttttgtgcacattgaaatcattgggggggagaactgcagcatgaacatatttgaagtctctggtccaccctgccccttcgctgagaaaacctgattattttgtgcatttcagagagactgggacatctgctgtgtttggcccatatctcgggtggttgcacaagggaggtggagctgattaccctattagagagcaagctatcacagaataggaaaaagaccccattctccctcctgcctgccacggccagaggccctggttcactgaatcactgctgttgttaccacgcttgtttggcttcctggagcagagctagttcttctgcagattctctggggctgggtgggcttcacggctgtccttgaaatgggatatacagtcccgaatgtgggcatttttctggagcctctggagtctttgttctggcgttagatgggatgttc

SEQ ID NO: 63372 - DNA, 1106 bp, Homo sapiens
ttttaattaaaccatctacaagctgattttataaagaggcagaatccccatgtagtgagctgtgcctgcctccctctgtgctcaactctggagccgagtgaggctcgtaataaccagaggactgtgcgagctgctcaggctcggcctcatgggcagcattaattgtgagatgccaccggaacgagatgcgagggcattatcagcatatacttaattgattttgcattctccacaaaggaaggttaaaattaagcttgtttgtaaatggtgtttaaactgcacaggcttggggatgagttgcagaaactaacagagcagggcactggttggagggcctaattttctctttaggtggtggacagagcacatcactcaactaaggtaaagattttcccatttaaaggggctgaaagagtgtaagcctcggctcgtaaatttgacagacaaggcctccgcttgagtgcctcagggatggtctggactctggggatgaatgtgtaatcacattagcgtgatgagttaaagggccccatatttttaaatcctcaggcagagctgcattagagaagatgctgttcgagatcagacttatgataaacaggctcatggaaacagcctttgctatcctcattcctggtatagaatgtaagattctgattgtcattctgacatgccccaggaaaggtctctgctcaaacccaagatgagctttaaacctgaggtggaatgccgttctctaagtatctgttctttggctctaacatataccaggaatgagaacagcactctgggtgtgttctcactctcctttaatcctgataagaaaacattttaagtatctccagatccatctatataatttgcaagacgcagtgcaacatgaaatgcatattaaaaattattaagaattggccgggcgcggtggctcacgcctgtaatcccaacactttgggaggctgaggcaggtggatcacgaggtcaggagattgagaccatcctggctaacacggtgaaaccctgtctctactaaaaatacaaaaaagtagccgggcgtggtggcaggcgcctgtagtcccagctcctcgggaggctgaggcaggagaatg

SEQ ID NO: 63373 - DNA, 1385 bp, Homo sapiens
tcactgatattctaaagcacctttacaactgtaataagaagtaaacttggcagaaactctgtggctataaatcaggggtgccgctttgcaacccccacggagcttattgaaagaaatgcacatactttggtcctacatcagctgttacatcaagtctccggggatggatgctgggcatttgtgtgtgtgtgcacgcgtgtgtgtgtgcatgcgtgcatgtgtgtgcatgcgtgcatgtgtgtgcatgcatggacctggattcgttaagctctttagctaagaaacgctgagggaacttagcagtgattgtaatcattcttctaatgagaatttccagttctcctatggcaaagataagggacagataattagcacagtggtctcaggaatgagcctcatttgtcctcaatctgtgatgagactttgtgactgtctttgagtttcatgttcagattccctgattgtaactaacacacattgttcatcacttggtagcagtggtggaattttagatctgtttttctcttggggaaggaccccattctcatccccacagtggcccaggctggaggcccaggagtctcctttgacagatagctggtcagtgcagaattgcttcctttgtgtctctgccactggaaggttatctgttccttcagaacaggaaatgtgtcttattcaacgtggcatccccagggcctagtccatgggaaagaatgattgggccgatggacagacagatgggtgaaaggaaaacaggcaagagtatagtgaataattgaaaactttgacccatagtgcagggatggtgagtgtctttcagatcgtctgtttatagctggggaaacggaggcctgcagaagtcagtgacttgccctaatccttcagctttgatcaagaagaacattggggagcctggcccttcaatgtcttcaactcttctgactcaggctctgcacatcctcttgagagtcaccctccagtgaaaagaactctttattgaggccctgctgtgtaccccatgctgttctaggagctggggatctagcagtgagttagacacacagggtcccagtgctcacagagggcatatcctcatggagagagacaggcagcagacaaggtcgcaaatatcagagaatagacaggcataagggccatgtgctggagtgaccagctggtgtgcgggaaaggcctttccacaaaggtgacatctccgttgattcttgaatgttcagagggtgctgctgtctgatgcttggaaggagggaacagtcagtgccaggaccccaaggggagaacctgttgatgggatgggattcatttatgctcgggagaaagagacttggtttattggacgcctgggttgattttcttctcttctg

SEQ ID NO: 63374 - DNA, 2552 bp, Homo sapiens
gcggtggcggtggcggcggcggcccaggcagacaatgaacttgcgagctcgacgagccgaggcaggtttgggccccgggctccttggcccggcctccccgaggcttcagcgatccccagcgggaggagtcccttcgccattggtcctggccgcgctccgggcgccctgcgcgcttgaggaccccgcgggaagggttacccagcggcgacacacgccccctccctcgcagagaggacgcggccggagcgaggggacaggggaccgagcagtggcgtggtggcgccgtggatagccggaggccggcggggggcgcaagccgcgtggaacgcaccggcgggctgtccgggagaaggagcccagtagtcggaatcggggcgcccctgcaccgcccagctctgggagccgcaggcgggggaccgaccgacggacagaccagtgctttcacggtgtgagcgcgcgtcgtttggcggtaggggacggggattccccccagccttgcgctccgcccccacacccctatcgcactttggggaagtttccaggcgcggcccggggcaggtaagtgggcatccgccactctctccccggttgcgagctcggatgcgcttccagaaccctggctctagccttgcggcggttccgggcggggaggccagagctctcccgcgcctaagcccgtgggacccggttcagggaagggggatggcgggggcgggcctgggaagagataggggagcggctgagccccgagcggtgtgaacttttgctccccgccccctcctccttcctcctccccgccccgcccccactgctgtcccctccctgcgccccgccgcgtctcgggaggcggcgtgactcgggagttgccggcgcttcccggcggtggcggcgtctctggccggccttggtgcggcgagccgagcgaggcagctctgagccgcgcggtgaggccagaggcggggagccggggctgcggggcggcgaagctggggagccggatggcagcggccggggcgcggaggcgacgctggcggtggagatgtaatgcgagtctgttgggttgtgtgtgccgggagataggacgcggtggctgtgggtggctgggtggcgggctgtggcgcaattggccccctgggatggcaggatagaggcgccggggcgaagggaaccttgcctttgggaaaatgaatgaagagccgtggaagcaccttcccgactcctccaggcaaccgatgggccggcgtgcgcgcgagtgtgtgcgtgttgaggcttcggagccgcccgggtcctgggcacagctgcttgacctccccgtcgctgtccgggtgcccacgttcccgcccgccctgcgcccggggccggccggcgcggctgggacggcgggtatagaggaggaaggctggggctgggttgccggctgctggcggctggaggtccgcgcccagtgtagggaagtcttcgaaggaggctgccaggctggaggctgggaccagctcctgggggcgggggcccttcttcgtctgcctgcgtgcgcggagccgctgtgacagctgggcgccttcgccttgttcacgttggttaagttaattgtaccgagttctcgggaatgaagtgtggctccgggatgccccgcagagggatgtgacaagccggtcagtgaggctgagcaaaggggctaaccttgcctctgggcgccctagcagtgcccccagcccctctttatcagctgcaattcctgagtgttgtgggatgcctcggtgggttagggtagccacccagcgttggggcagaaaggcctcggagggcatctgcacccccgaggggccctgaagtaaactgaggcctagagatttgcccagcgtttctcctggaccctccttggaccttcctggaccattatccatcccccgctttcctgcttctcctcccaggaccggcaaccttgcaaaatcaggaaccctcccttccagaacatggcacttactaattttacaaactgaatgttgaactaggatctcttgattgatacataaagacatacatagatcatatatgattttattcaaagtagtataggaataaaaatgccttctaagtaggtaggtttttgcaaacaagtttttctcccccaagttcctgagaaactgtcagaagattttctttcttgccacctcctagatgggcacacagagctggtgaggtaaagtggcttgttatggccttcctgtgggcacataggtgagctggaggtggagctgcaggtctgggcttccctccaaagtccagctccggaggagagccagctcaggagccctctgcagaagtccaaccctgtctttgcggctctctcctctgggctttggatgattgcagtgagctggcttgtaggtgaagcatgcaggggtaattcatccaggatattgtccaggggggtggcaggcaggtcggcccacagtggtcacatgtgtgccttgcttttcttggatgatcaaagctcgccatgtctgagccactgtcctggccagggacccagcacggtcaccgtggctgct

SEQ ID NO: 63375 - DNA, 1052 bp, Homo sapiens
cctccgcctcctggttcaagcgattctcctgcctcagtctcccgagtagctgggactacaggtgcgcaccatgatgcccagctaatttttgtatttttagtagagacgggtttcataatgttggccaggatggtttcaatctcttgacctcgtgatccacccacctcggcctcccaaagtgctgggattacaggcataagccaccgctcccagcccaagcttcccttagttgagcaagttctgttaattttgttttgccaggctgcactttgcccatacatacggcaagggatgtttaaacgtttatctttgagcatgtacgttttactatttttctttagattgggatgcttggaaggtgtgtctacgacttcgagataatggacttctggccaagccaacccatggcgacattatcaggtttgcgcctccgctggtgatcaaggaggatgagcttcgagagtccattgaaattattaacaagaccatcttgtctttctgagggtagccagctgttttcagtggtccctgggagccagctggagacaggtggtcctgtaaaagctttattcctaatgtgggcacattccactcccatgagtcttcaaaaactttttttttgaatatatttttttcagttgatacataatagaacaacgtttatgaacctgccgtttgctttgtaacgtaactaaataatgtaatggcatctatattcagttgaagtgttttgatgtgcatgtgtacttcctaaggtgaaatgcatctatatacagacagcctctaaatcaagtccttcagtataattgatatatgtttttataatttcctcactggtataagtgtttcatatttgaaaaagttatctctgggtattgcataaaaggcttcatcttataaagtgaaatcattgttattgaattttaggaaggattaatggttaagtgtatataaaatactaatattaagtaaacttcatattggccaacaccagggttgtattctatggatgtcattattttgaattaagaattagtgtttaacattcctaa

SEQ ID NO: 63376 - DNA, 1193 bp, Homo sapiens
tttaggaacaagatattctcaaaaagtaatttaaacttggcctagtagactggatttcctccgtgggcttcctgagttcacagtcacctggcgctttgagttcttcggccctggctggccctcatagaactctcaactgtgacccacctaccagacccgtctttttgcttagcaagcaagtcttctttcaagtgtggatttataatgttttcagactgattttttaagtgcctgctgaaggtatacaattattatgtaatctctgaggacagatctttgtgaggggggaagaaactattgcagtttaggaattacatttcgtccattgatgtattcaattaatgacagtatgtgagttgcattaaataaactttaatccttattttgccatgaatgattggcaatagatttgtgatgaaagcaagactctgagctagtgtatgtttaattagaaactaatacaggctttgaaaaatagcaatgaaagttaagttcctctggtattttatctagtcatgtttttcctgtgtttacagtccccgttgtcctccaaaaaacaaaaaaaggacagtcttaatatttgtataatttttctttaaacgtaggttttagaagaagaaaaccttgctgaaaatgcagacaaattgggcattatcttgagaaatgaactcatgaagctaccttctgatgttgtaactgccgtaagaggaaaaggattattaaacgctattgtcattaaagaaaccaaaggtatggagataaaacatttactcaagataattttttaaggaagacctaaaatacacttggtatttaatttaattaatttatttatttttcgagacggagtcttgctctgtctcctaggctgcagtgccgtggcgcaatcttggctcactgcactctgcctcctgggttcaagcaattctctgcctcagcctcctgagtagctgggattacaggcgcctgtcaccacgcccagctaatctttatatttttaatagagatggggtttcataatgttggccaggctgatctcaaactcctgacctcgtgatccacctgcgttggcctcccaaagtgttgggattataggcgtgagcccaccgcgcccggccacactttttttttttttttttttttaagatggagtcttgctctgttgccaggctggagtgcaatggcgccatttt

SEQ ID NO: 63377 - DNA, 1065 bp, Homo sapiens
ctgcaggccacccggaatatctgtaataaaaacatttaagggaccagtgtgtgacccacttacttattgcctgaagaattgagtgtgccttggaatttgctatgacattggatttgggtggaaacagtttacccccaaaggactcctgtagactcctgtccttttttccagtgttcagaaacatggcatattactaattgtttaaaaccatgactggtgaacaaagagactgagaaaaattaatgtttgttgtagttcatgtcttgggtttgcctttcagagccagtaattgttactacatcagaggtctctgaagtatagatgtttttgctgaatagacaaaacttttgctaaaaagaatgctcagctttgttttttaagcatttaaacaaagcatttcatctcgacgttggaagtgattgtgaaattatatcattgcagaaatagcttttctcttttagttgcaaaattatattgttttgtgccattgaagtgtacctaaagtatttgtaatgttttagggtatgactaagtcattaggttgttactggtagttaggttggcagatgtaaactctttcgttgaagtcattaagtatcagtttcttggccgggtgtggtggcttatgcctgcaatcccagcactttgggaggccgaggcaggcagatcacctgaggtcatgagttcgagaccagcctggccaacatggtgaaactatatctctactaaaactacaaaataaataaataaataaataacatgtgtggtgtggtggtgggcacctgtaatcctagctacttgggaggctgaggcaggagaattgcttgagtccaggaggcagagattgcagtgagctgagatcacgccactgcactcaagcctgggtgacagcgagactctggggaaaaggatgcttagtagaatgcttagtgctgagaaatgacatggtgaattgactgtctttcaggtgtctgcagtgctgtgtgatgatgacatcatgctgaccattaagccaggggagcatgggtccacatacggtggcaatccactaggctgccgagtggc

SEQ ID NO: 63378 - DNA, 1975 bp, Homo sapiens
aatttattcatactgagtaaagcataaagagtccaagaaagaaatcatacatgagtgttttagacttagcagtagtattttggggaagttacatatagtacagttagacatttttgctagcagctacctccagttggatgattcttacatcacttttgttttgattgttggtacccacccctttgagataaagtctgatgaaagttatggaccttcttcttggaaaaatatacgtctgcatgtaattctgcattttatttcaggagattttggactctctgcagactgtccctggatcttgggttaaaaatctgtattctagactgaaccgtgggaagaaaaaatagtcagtgagtctttggcaaaccggagtactggattttgtttagcaattgcaaattcctgaacatactggatttactgggtagtgccaagtttaaagggaagtaagccaaactccaagtattatgttttgctaatttggcagctcgaatcaagagtggctgtgagattatacatggtttgacttgtcattggtagacttctgttgaaacatgaattaactagtcttttagaaagtaagtatagatggaataagtatgcctagtttttggcaactttctcctaatcatgaatttatctttaagctttttttttttttttccttccagaggtgattcctatgcacatgctctaatttccttttaattattagtttctttcatagcttagtttttacttcatggcttatcaggatgcttaatggtaaattgggtacaaagaggtgtgtgaagccttgtggaggggctagttttagggctgggggtgactggggagagtagctatggctctgacttatgtgatggggcggcagggtaaacaccagcctgctcagtgatgtttagactttaacactcatacaagtaacggattgtagtttgtagtttgactctctctagtttctcagttaccttttgctaacaatagctttttcgtttgtttgtttgttttttgagacggagtttcactcttgttgctcaggctggagtgcaatgcgcagtcttggctcactgcagcctcgtcctcccaagttcaagcgattctcctgccttagcctcctgagtcgctgggattacaggcatgcaccaccacgcctggctaattttgtattttcagtagagacggggtttctccatgttggtcaggctggtctcgaactcccgattcaggtgatcgcctgcctctgccacccaaagtgctgggattataggcatgagtcaccgcacctggtcaacaatatcttttatgctacaatttttcaggataagttttgtagaaacaaccatcctagcagaatagattgttttgtttgggaatctcatatatgtgtgtgtgtgtgtgtgtgtgtgtgtgtgtgtgtgtgtgtgtatgtatttatgtatgtatgtatatgttggtctaattcaacttgctgtgaacactttaaagctattataagttaacatttttttcctagtctttttgcctttcacctttgtttatgataaatttgacctacagaagttttagatatttgtggctaaataaaagattttaggctgggcacagtggctcacacctttaattcgaaaactttgggaggccgtggtgggcggactgcttgagcccagagggatggacagttcctctgtctcctgccccatgcctagtctctggcagtcttctctgatttggtctccctgcctctggtctctgccctacagttgtagctgtctcatagcattgtgcctgatggtatcggactgtggtaggtgcttaacaaatacttagtgtttagcaggtactcagtcaacacacagtgcattagctctggaaagagtcttactcttattgattggttggttgattgattgcctgattgacagggtatcactctgttgcccaggctggcctcaaactcttgggctcaagtgat

SEQ ID NO: 63379 - DNA, 1073 bp, Homo sapiens
aacctgggaggcagaggttgtggtaagttgagattgtgccactgcactccagcctgggcaacggagtgagactctgtctcaaaacaaaaacatttcatgccagtggcattgctgagggcctggggctggtgctgcacctgcatctcttttcactacaacccccggggaagggggtggtcaatgtcctttcccctctctgaggaaactgaggcattgagcttgtatttctctgcactggttcccatttcagtagtaatagggaccctccagcacaccaggtgatgtctgcaatgtggccccagaggcaggagcaggctgggagttaggaggctgaagcctgatgtgggggagcgctgccccccaaccccactccctgggaaccaaccctccacccctttgccctgctgcctccacacccctttcctctggctgtgaatttctccattaccaagtgggcccgtcagatctggaacttgggtcagttaggtgcttctcccagtaaagcacctactgtgctgggtactgggtactgtgcccggtagattttgggcaggattctagagagcatctggcaaagttgctgcaggaaagggccagtcactgcctgccagtctcggcccctgtgaatgcacgagttgacatttctcaaattccagcctcactttgtgggccaggcagcccttctgacctatgagctgccaaactgagccttttgatgacactgcccccgaggattccctgcagccctatgtcctcctgagcacctggtggcccctctgtggcctccgagaccctggcctgggtgctcactgcccctcatccctacacaggagatgctggggtgactcctctgttggtaaaccaaggctctggttgctgaggatggggctggtcctgcgccagggtgcccccaggtgctgatcttggctccactgtggttgggcaccaggcatggcagaggtgctgagcagacaaaaccctgccctcccaagccccgggcttgcagaggaggcaggaggagggaggtggtgatgtcaggaccagagcagcaccaagggctgtgtgggcgcagc

SEQ ID NO: 63380 - DNA, 1048 bp, Homo sapiens
caggcgcctgtaatcccagctgctctggaggctgaggcaggagaatcgcttgaatctgggaggcggaggttgcagtgagctgagatcatgccactgcactccagcctgggcgacaagagcgagactccatctcaaaaataaagaaataaaaaaaataaagaagtggcacaggtagagaggcggggggacagagttgcattccaggcaaggggagaggcaatgaaaaggggggtcaggtggggaacctcggggagcctcaggtgtatgaagtccagtgaggatggaaaagagttgtcggggcgtggtatgggggtcctctgagaagggatctgcttcagctcagaaatcccagcctgaacacatcctggatcagccaggaccccctcaggggctcgcagtggcctagtctgctctgggctttgctggatgcccttcgagaatcaccgcgcaacctccttcagaggcccaacactccacgtgctgacttcccgggcctgtgtctcccctgccgcagactgaagcgttcccggctgaaggtgaggttctgcaccaacgagtcgcagaagtcccgggcagagctggtggggcagcttcagaggctgggatttgacatctctgagcaggaggtgaccgccccggcaccagctgcctgccagatcctgaaggagcaaggcctgcgaccatacctgctcatccatgacggtaggcctgtcggacaccaggacctcacgggggtgaaagctcccctttcccagggtgggggctgtgcagagagcctctttcactgggccaaaccactgactgagctaggccaccaacactcatgggttgggggtaaaaacctcatgggacttcctgctgggggctgggggcaggttaggacccagctctgtccattccttggcctcacaccagagggtccttagagcaggttctggatggctcctgggaggaaaatcctaggctctctttcctgatctaggatggaccaagcggccagggaattgtcaaggtggcggagttctagctcctgttgagaaagagacag

SEQ ID NO: 63381 - DNA, 1031 bp, Homo sapiens
ccttcagtttccaaggccatctgtggccaggcctccgggtggggctcccctgggtccactctggcccaggtcccattagctgccccaggtcagcctcacatcccgtcccatcctcacagctgcagcccctcctgcctgcctgccgtcaggtgggagggagaggcagacgagcagatggagccctgtgatgagctgcgagtgggcaggggagaagagggggagaagggatgagaggacggaattgcaggcgagtgagcagagcactgctctgctggcccttgggagccctgtagttttgccagctcttggatgccttctgctgtgggtaggcctttgagtggatggcagggtgcctggtgctaggggacctgagtgacccgggcagccctttctggagttgtgaggctcctgcctgtgagatgagttctcaggcccacagcatcctgcttcttcaaggcccttgactcttgggggcacatttgggacagtgtttccgtggctgggcatacacctgttccttgatcccaaacttatgccatgtccctctctcttttcccagtatgcctgtggcatcaaagccgaggtggtggggaagccttctcctgagtttttcaagtctgccctgcaagcgataggagtggaagcccaccaggtaggttggcgccttgtgaagtgggtcaggggaggcagccccgtcagggaggccctggagcttggaatggattacaggactcaggcagcctgtggggttggccaggcagccaagcgtgggctccctgtgaaagctgacctggctgggaaggagggggaagacagcaaacgaaatccactgaatagtttcaaccgtgaagttactttcagtatgaaagcaagaagcagaaatgcctgcggcttttcctgagtttttgctgcttctctgaaaggataagaattgacaagtcctatcagtgtgttaatatatctcactggcaagacagtgtaacagcaagattacaacaatatggaggaaataataaagtcactcattttgc

SEQ ID NO: 63382 - DNA, 1032 bp, Homo sapiens
acacacacacatgcgcacatgcacccacgcactctctttgcctgtgggagggcaggatcccagctgccccagcggggaaggggtgtggggaatcagccctgcagatgcggtgtgaggggcagacatggcatgctggtctttggcagtgtggtcccaagtgggggcggctggagaggtgccttgccacagggcccaggccacccgcatgcatcccatgaggccgtccaagcccgtctgccctgcatcagagaggacaccccaatgcggggagggaggaacctggtgaagccaggagcggtgggcaggggccagcaaggatccccaggcccccagggcagtgtgcatccggccttcttgcatgcccacctggcatcctgcctgccgcctcctgcctcccgccccacccctcctgcgtcccagcctggtggacctctcagggttcactctcatttcctcctccccacgccacctgctcgggccacaagagggcgccttgctgccagggatgggacaggccgggcctgctggagccagggccgatgcacgcacagctacatacactcacccgggcccacgtgtgctcacgaggggcccccatacccacacgatcccgcatccacatgtgcgcacgccaggccccacaggttctcaggcccaggccacacatccacaggtgcccactctcatgctggcctcatagtgcatgcacacacacacacacacacacatatacatacactcacgcccagacccccccacgccccaggccacacatgtgggcctgctcacaccccactcattccctcccagatgccgcaccacccccatgccctgtgtgccctctgcctctcggggccctggggccccagctccaagaaccacgggcttgctttagccaggcttccacaagcctgcccattcctcaggacactgaccctctcctctgccacccttcacgggtgcagacgatgagcatggagaacaccacagcgcacagggccgagggccaccatcagagtctcctgcagccct

SEQ ID NO: 63383 - DNA, 1102 bp, Homo sapiens
gggtccaggtggcctgaggagaggggtgcaggccagctgagggggctcccagaactccacgagctcagagacgggctcttgcccttgcagccccatccttgggatgccccagcccttcatccagacctctgctgtgattgtgtcaggacctgtccctgcagtggactggaagctccaggtgggcaggccttgccgtggtcacctgtgtccacaggcctgggcagagcaaactgatgagtgtctactaaatcagagagaagacacaaccagggagcgagtgcacgcccgggccgaccagggctgcgggcatcatatcccgctcagccgctgcctgccctccacgcgcccctggctgcctctctcagcctcggccccctccactcatgagtgggaataaataagagagtagaaaacgtaagtgaggttcttgtctggccgcccggctcatagcaatgtttaatagatagtaactggtgttatgactgaagacgtcctttgtgggctattggagttcttaatatccccgagtaaccacagggcaacgctctggcttgacaaggggcggcactgctggtcagcagcccagccagccgcagcggccacttgtgttcccagctgtggcttgtgatctatggtcgactgagctgttactctcctcggttagacacgcatatgcacacacatgcacactcatgtacttacacatgtgcacgcgcatgcaacgcacaaacacatggacacacatgcgcatgcatgcacacactgtacccacgtgcacacacgagtgcacagacacgagggctcactgtgatctgctctaatgcatggtcttaatagctatataatattccacggttcttttttctttctttcctttttaagatggagtctcgctctgtcgccaggctggagtgcagtggcgcgatctcggctcactgcaacctccgcctcccgggttcaagcgattctcctgcctcagcctccttagtagggggggactacaggcgcgtgccaccacgcccggctaattttttgtatttttcagtagagacggggtttcaccgtgttggctaggatggtctccatctctcgacctcgtgat

SEQ ID NO: 63384 - DNA, 1084 bp, Homo sapiens
gccgggaggagcaggactgttgacacgagagcaggggtcaggctcagtgcacaggtcccagtgtgcagagctcacccggccccagctttcatcacccatctgagatcggcctccttcactcctgttctctgggacttccttgtgtgttagagactcgagcaagaccctttcttgtctatccccggacggacccgcctttcccgcatctctgggggtgaggtcggctctcgttcaggcctgcagggtccctggtgccgcagcccctctggttggaaggccccctgcgtgcagccccgtcctccagccccgctcggctctgaatgagttcattatgtctcagcgcgccctggccgccaggctggcagttcttcgggctggcggggctcgggagctgtcagcctgccaaatccagttgtttgacttcatgtttcaaggccaaatcctttcaggaaagttctctccatcccaccactccaccgccccccgcccttagaaaaataaatgcgtgattgactggctttgcaggttttttatccatcgttctttccaaagaatagtgtgaacagctcattcgattcgttcatgtgacgtcctccctctcccaatccctgtctctctctctccttccacagccacatgaaattgaagtgggagaacatggtgtgtgagcattattgggggtggggtgcggagcaggcactggctttggttgaggtctgcaaaggaaagcacccccactgccaggctgctcaggagtggctcccaccctcgactgcggggaagtgctggaaccctccgcacgagggcaacctttcttgggctctgaaggcgcctctcatcctctgagccaagaagacttctgacccagaattctgagttgagttccgacgcaggcgtgggcgatggtgagcaactccaggctaccccgagaaagccgctgtgtgaccccattaggggacttggctctcctgccaagcccccacccagcacctgtcccttgtgtcatgactggacttgttacttctagcccaggagctccaggtgaaggggactgtgttggtcctgtctgcccaggactctcccc

SEQ ID NO: 63385 - DNA, 1166 bp, Homo sapiens
tggttccggtgagtgtagggatggcacgataccagggcagcctcttgaaaacggcctcgggagacgggagctgcgagcaggtgggcagatgagggccctatgcgcactcaggggtgaagggcgtccgctggccactctgcaggggcccctgcaggattccaggcacctcccgtttgtccttgaggactgctggctgtaaccagggcacatcacccacctcaagacaagcccacgcccttgtcagcttagggggagcccagtcctgagggctgcatctctgttgtaggcccagccaccggcacaaagctggattcatgctccctgcccctaccccaccctggctcctcaccctggggcatccgaggagcctagccccctgagggtttgctctcctctcaaggtttgtagctcctctccggctgccttgcagacaccaccacatgggctctgctctatgggaatctggcttttagcgaatgtggcgtcttctgcaaacaatagcaattgggctggcttaggagcaagtggctcattttcccataaggctaaaaataactggtgcgctcccttgtgttggctgacacgcgcgttcaaagcacttttgtagtcactttgcttttgctcgtcttcatggacgagtgaacgcctcgcttctgcaggttgagtccagatgcttctcaccttctttctcctcaagaaagatgctttttgggaaacgttgtttaaatcttatttttttactacatcaaaaggatggtggttcaagttcccaatatgtgggtggcacttcttaaaaatcagctttaaggagctggcagaaagcccccagccccacagccctgagagatggtgttgctagctcaggtggctgacacatggggtatgccgggcactgggcaggtcccagagccggggaaccagctcacctctggttgctgtagctcctgccggaggcatgtctacttgtgatcccggacagccgaacccaagagctggtggctctgagcagacagagacatcttggcctgtccctgcctgggggtcatggagaccatgtcttcttagagcaaatgtggaggcggccagggcagttgttgggtgaatgtggagagcacatggccatgtcttgcccccggagtaccactgggcgtggggggtcctggcac

SEQ ID NO: 63386 - DNA, 1038 bp, Homo sapiens
ggaggaacccgggacttgattggtcttgccacagcctggtggtctagttgctttgtggggtgtgcagtcctggggctgcgggaggggagtaacccttagtaacctgtgtgtctgcccctccacagaactgtcagaccttcagcagcctcagctgcctgagcgcagggacagaggactgcggtccccagagccccttcgcccgccacgtcagcaacaccagggcctggaccgccctgctctcagcctccggcccagggggcaggacccccgctgggaccccggtccctgagcctcttcccccttccttcgacgaccacctcgcctgccaggaggacctgtcctgtgaggagtcagacagctgcgccctggacgaggattgtggcaggagagcggagccggctgcagcctggcgggaccgcggggcccctgggaacagcctctgctccctggacggcgagttggacattgagcagatagagaagaactgagggggtgtgggcccaggcagggctggggtgtgctggcatcgacagcccccactctgggcactaggtgggcccttgaaggggagcccaactcgtgggcctgatgaaagcttcctgagtggtgtcgggtcccagagagggagcccacctgctgcctgggggagagcctggcctggccgcgtcatacagcgggtgtgtcagcctctcaccggctccccgagcgtggcagccaccaggtccacagaactactgcagcccagaggacagctttgaagtttgcgtcttttctgcctctttccctgtgggatgttgggcagtctctgttgtccccggcagagctgggcaccgctctgtatccccctggtggtgggggctgtcagggagggcctggggtgggggccaggggccatctgctatgtcagggcccttcttggcctcactcaggttcacttctggggagtcggccccgcagcttctttcactcagttttactccgtgccttctctcccaggtctccctgcttcaggcttgggaaggttcgggagatgcttcc

SEQ ID NO: 63387 - DNA, 1065 bp, Homo sapiens
ccaggcagcaggtgggctccctctctgggacccgacaccactcaggaagctttcatcaggcccacgagttgggctccccttcaagggcccacctagtgcccagagtgggggctgtcgatgccagcacaccccagccctgcctgggcccacaccccctcagttcttctctatctgctcaatgtccaactcgccgtccagggagcagaggctgttcccaggggccccgcggtcccgccaggctgcagccggctccgctctcctgccacaatcctcgtccagggcgcagctgtctgactcctcacaggacaggtcctcctggcaggcgaggtggtcgtcgaaggaagggggaagaggctcagggaccggggtcccagcgggggtcctgccccctgggccggaggctgagagcagggcggtccaggccctggtgttgctgacgtggcgggcgaaggggctctggggaccgcagtcctctgtccctgcgctcaggcagctgaggctgctgaaggtctgacagttctgtggaggggcagacacacaggttactaagggttactcccctcccgcagccccaggactgcacaccccacaaagcaactagaccaccaggctgtggcaagaccaatcaagtcccgggttcctcctatccaggcaaggacgggcccatgagcaacgtactcatgaagatgcacctccggccaatgagcgctctgtgctcataaagacacgcgcaattccactattcacctactaactcggcaaagcacacaaatttgatgcagacccagttctggggggctgcggtgaaacaggaatgctcctaacacttcgtccacagcctttctgaagcgcaacctggggaaaatatatccaattccttgatcaggtaatttcactacttggatttttatcttaagaaaacattctaagatgtgtgtaaaaatttggcaacataccgttaaatggaaaagaagagagtaacccaaacaccctacaatggtggtgaaatcaatgtttttcaagcagggacctctatgcaaacataactgacgcgccgcgatactt

SEQ ID NO: 63388 - DNA, 1067 bp, Homo sapiens
cacagagagggatgctcccagcaagaaccttcagggaggcgagggaagcccatgaactgcagaggcccaggaaagaggtgggctcagctgaagtcgcttctcagcctggtgctttgggagctgcgaagtgtgactagcacgtgggacttgatcccgcccaagaggagggacagctcctgtccctgcacctgttggtcattggctgggggtgaccccaaagggaaagggtaacctccttcctatcctagatctcccagcccagagtagttccggaaggggcagccatgaactgtcagagccaacactcacagcagtggagagtgggcactgctgtgggtttgggactccaggtgggacaccagcagcctggctttcctcttaggatccttgcagtggccctgtgaagcagcctggccagagacagcagttctgcttcccaggggaggaaacgggaagtgaggccacttggccagtggaggatctcagtgcctccagctgcagagtctagtttcccactctcctctccggaaccctccaggttcagtggagagccagggcccagggggtgagaataccgcagcctccttcggaggaggcaaccgggacaaaggggagtggtcactatctgctcccagacatatcacctgaccagccagctttgtctttgtcaccggatgcccactcctgcatgtggggccgtagctcatgagttctagggacagcagtccctagacaaatgctggggctgtttccccctccactccccaggccttgcccttcggagcccagagtgggttctgggtcactactgataaaacatgtggtttagttcagctcaggagatgtttctagcgtctctattacgtgttcaccctgctggcccaggaacagcagcacctgggagagggaatgagcttgttgggctgaggctggacggagtgagtagcagtctgcctggcagcagtacagagctgatatgttgagttgatgagtttcctgaggcaggtctgtatttcagcttgtacctagaaggcaaggaccaggccacctttgtctgtatccccgtg

SEQ ID NO: 63389 - DNA, 1032 bp, Homo sapiens
atccaggctggtttccttactcccaggttagaggttgaagaggtaggtgcagaaggttctagctggagcctatacgtttcagaactggaagggacctgtcattatgtacctggtgaaacaggcctagagagttgcagtcctttgccctgggtcacttagaaagttagctgatgatggggcagtgaccagacctggccttccactgctgctgttgcctgcctttggcagtctgcccagcaggcctgcagctgcttctgcaagtcagtaggatacagctctcatcccccaccagtttcatcctgtctcccgcaagtggctcgcttgttgtggcaagcactttccaccaccagtctctccagtgacgctgcacattcgttaagggctgggacggtgctttctcttctcagggcggcttcccacaattgctaatcccggccagaccccttagcagcaaaaggagccccgaacaggcgggacaggtggactagctctgagttctgtttcatctgtaggaccttgggcaagttacttaacctttctgagcctgtttgctcatctgcaaagcaaaaaagagcacctttaggggcttgttggtgcacgcaccatgcctggcccattgtgagggcatggtggagggctctgctgttgcatttctagtgggttctccctcgtgaagccccatggcaattattcttgaggtctcatggcattcctatgaggcaggcaggacgaggtcattattgccattttacagatgggggaggctcccaaggagcggggagatgtgtgatgatgttatggcaggtggtggagagccaggccaggacacagcaggccgcagcccatcctaccccagcttcccagaccttcccctccatggagactgcaggctcgtgggcaccaggcacactgggctggaggcacccactgcccatctgtccctctccatcctggaggtttcctgcccaaggcttggccctctgccgtgcccaggcctgtggtcttgagcgtggggttttccaacagacgctc

SEQ ID NO: 63390 - DNA, 1051 bp, Homo sapiens
tgtgcacatactgctcttggcactgaggactgtgtggagcaggatggccatgggcccttctctctggcagcttccatctagtgtagacagatagacaatattaagagcaaagcagattgtgttggacaaagtaagtgctgcaaagacaaggagcatgggtagtgggacagaggcgacgagcagagaagtagaaggatcttctgcgtggaatgagagacctccaaggctggcgtgtgtgggaggagctggctgtggctggggcagagggaccccagcagagaacaggctgctggatattcatctgtgcctgctgaacccctgctgcagtcaggagccccagctctgccattaagcagtccctggatgacagtgggcgttacctggagtggccacgctcaccccaaggagaggctgtctccagagccccagtgctgggcagctcttcctcattcctcggcatcccgtgtttcctgctggtatcgtcctgagaagcttcgtgggatgagatgtcttggtggggaaagccaaggaggtagcaagttcaaggagcccctagtcttcctgttgacacccaggagggtgtggctttcaggcccctccccaggccagcaggtcctgacacctgaattcatgtggaaatgctgagcctctgaatggcctcctgctgtgtgagactgggtggtgtccaggaggtagtcccagggtgtgggtggggagatgggagatgagaatgtcctgaagctagccttgtcacctgaatgtgacaggacactgtggtcagtccaccctctccagccaagagtgtccaatgtggagtgaagttatgaatgggcccctaagctgggcctgaggaggcagccccgggccctggagctcaaatctgtgttgccatcatctaaaacgggattgtccagaagcccatcacctgtgtgcccctggggctcctgtaacctgggcacgctttgggacctgtggctcactgcagtcttggctgttggcaaagcaatcattgtgcatttcctgcctgtcttgctttcaaaaggagcccgag

SEQ ID NO: 63391 - DNA, 1045 bp, Homo sapiens
ctagccccagaacgggatccatccagcagcaggcaatggggcattgcttctgtttttcctgctctacagtaccagcacggtacccagcacacagtaggtcccagaaagacacattgaacaggtggcaaagagaaacctgaacatgggtcctttatgagtacaaaggaaatgaggaggaggcctggattctgcccactggaacagggcaaggcccaagatctgggaggcggacatacaaccaagaggcgtctaggtttgctcacttacagcaggcactcccactgtggaggcgcagtctggaggcaccccaggccccacgataagcatgctctgaatgatcaagagagccaaaggctccagggagccctgctgtagtgggagcgcaggtgttccccgacgccatggccctaatggagggctggtttgggtacaatgccacagtgaacacagaccccctgaactcacatatagactatttgttaagaacaaaaccaaactaatagtagggcactgctccatcagcaccgttgctccagtgtccatggcacagaccaatattggaaacgactgttgttcacggacaggctggaaacagttggtcaaattgtgcttggtgcggccaggccagcccagcccctaaggccagacaacacgaccctcccgaagggacaacagggttgatgagatcataggtgatgtgctgccctcccactgatggagtgtgttctgtggtgttaaagaggaaatagcattattacaaactaaggatacaagagcatcaacattcacagtctttgaaactgaacagcctaaaataattcaattctatgttgcacaagccaggagtttttttaaaaactgtgacaacacttggacacaggaaggggaacatcacacaccggggcctgttgtggggtggggggagaggggagggatagcattaggagatatacctaatgtaaatgacgagttaatgggtacagcacaccaacatggcacatgtatacatacgtaacaaacctgcacgttgtgcacatgtacccta

SEQ ID NO: 63392 - DNA, 1086 bp, Homo sapiens
gggagaattgcttgaactcgggaggcagaggttgcagtgagctgagattgtgccatggcactccagcctgggtgacaagagcgagactccgtctcaaaaaacaaaacaaaagcaaagttgactctggcctgggacccagaaaactctgtcagccagatatcttctggccccttaggtggacagccagctcagaagttgctagaggagatgagcttgtggtaatggagcttggcccggcaaggtggttttgcagccactctgtgaaaataagggtggggatggttggctcagatttaaaagcctcagctggctgtggttttatcctgtgccccacctcaaagttaggcagtggaggctgtcccagggcagatgctgccattgtctgagaaacctgcagcagccagcctggagccaggaggctgttgcgtgggctggagcatctttggggacccagaaatgtgttagaaagttcttactgtaaccaagaccacttccaccactgctattagctctggccctagcactggcctgttttgaaactgacaatgaaaagatgaggggcaaggaggaaaagctgctgatcagttgtatctctccctttaaataaagctgctccttgtggctcctcttagtccttccttggtgagcagctctgctcagactttaggcctatcatggctgaaagcaggaaggctagaggtggagggagtcacgattctccaaagggtagtttagcttcaaaggctgtatgtgtcctgcaagtcctgtcagtgtacactgagctcccatgatgtgcaagatgctggcagaaggggtgggtgcacgtcagccaccaaacctgcccatccccaccatcgccatcccagtatctgggacacagctactgttattgtcatgccaggttaccaccacagacacagaagcacagacctaattaaataactcacctagggccatggtgccggttctaggcaggtaagggatttgaacttgggtggtgtggctagcagtctgtgtgctgagcccgtgcagcgcagcctcagtgggggcacagggagcagggtttgaggaccagcaggctggaga

SEQ ID NO: 63393 - DNA, 1020 bp, Homo sapiens
tttactggggacagtgtggcaggcactgtgctaagcgtttgtgtagctgtggattatctttattacagccctggaaagtgggtattgttgtgcttgttttacggaagaggctgaggttcagagtagcggccacggtcacaggaccagctgtggccatgaggcccatgcttgttccactccccaggagggggtctgggcagggctctgggtgccaggcccctcccatctcaggtgttgtccacaaaggggtctggtccagtgagggctagagtcatggaggtgaggggttggctaggccttcctgccttgccgtggtggacacatgaggatccctggtgtgaggcagccaagcagccgggctcaccgatcggagcccagacctgggatggcagcagggatctcacatgacgtcatctagggagcttgctctggcccctgctaggccagccgtcagagccatgtaagacagtctaagatgacagttgtcactgttgtggatgaagcaggctaagattggatcattactgaaatctgaaacttgaatttaagtggggacaacgagcagtgtccaaacgggggcagtaatggtggccttggtagagcccaggaacctgttgaaggaaccccctcgtgcttttgacagggcaccagaggtgttggggtggtggtggcagaggacagtaaaaggtcccttccctcctccccactgccctggccttgaggcctagagagacctcgcagtgcgggacagtggctgtaagattgtctcagagcccaccagctgggagaaggaaaagcacaggacaggcgcagcttttattccaggtgtcagatcctgtttgggccctttcaggaggcctggcttacaaggagagctagactctgcctttttcctctgcagttgaggtgggttagagggcagccatgggcccttctgctcctgggcctctctcaaccttctggggaccattctcatcacagcatgacctggggaacactcacagaggacagaggtcccag

SEQ ID NO: 63394 - DNA, 2136 bp, Homo sapiens
tactgcttttttgagacctggtttgaccacccagcattggttggctcccagcaagacttgagccatacgcggccatttagacatggatcacgtgtgtgtgagcaaagatttcagaaaaaagcaacaattaaaaagttcacccattgaatgcagtccccctaggtgtcatagtccctgctgtatttttaactccaagctggtcagcttgaaagagcaacaaattgtacttctcaacagtgcttcaaacagaagcaagatgtttgtggggaggggtcgggatgtcgaaacagaggtttgattgattgcggctgcccacacactgagtccccgaacctccctgagcaggcctcagaacaggcagcaactgttgtgttagcagatgtttgagggaccgtgaaagctggccaggggcagtttggggtagaaaagaagcatgagagaaaccagcatgccagcacgtctttgggaagcctctgagagccgtattcctgggggtgagtccaggagagctgggtgggcggggccgcagggactgggcaggatgaggggttgctgcaggaagttgggagagcttgtgcgtatgctcatcagtgactcgcagctctttgctggacaggtcctccccaggtgaagcccccccagccagcttccactttccatcttttgtgctggtggggccgcctttgagggacagtggcccttgttggtcgccatggggttggctacatgacttcttgcgctggcacccccagcagctgcaggccagctgtgcctttccttggccaagttcctgtgcggcaggcccagcttgcctgcacctttgtgacttttcctgtccatcctgccagtggctgttcaccttcagctgcttagggttcccaccgccctgcaccctcagcacccttcctctcagggtgggaagctgtgctgacggcaagtagaggaattcagaggtggagcaccccttataacacagactgcagacagtgtgaagatctagtgagagaggtaggcatggaaagccctagaaagcccattgcaatgaaagaaatgctaaatacaagtaaaggcaaaaacttttgtgggcaggcacacgagagtagttgcttctgacttagagatagttaggataggcttgaacaaaggaagagagcctgtaagacctgggctgtcagagtttagggatgtcaagggggcagctttggatgctgaactagcactcctccttccgtgctcttgacagacattgctaatcaatcacggcagccttttcaggtgaacttagtggaggtcttagaatcctcctcttggcagtcttggcagccattgctaattgatgggtaattgaacgtcatccaccatctctgttctaatcccctcacttgaggatgaagcctctagagtacaggaagagttggggccttgcccaaagtcacatggtgaggcacctcggaaggtgggaaccctgacctcttgaccccaggctcagtgctcccactgctgtgcttggtcctgggtgaggaccaatcagctggcccttccagaggactgatgcacatggggcatagagagtgtggcagtgagaagtgggagcttcggagtcagataactgggggtgtgtccccattctgccacttttgagctgtgtgccccaggcctcatgtctgtgtctgtaaaatgggaatggcagtgcctgttgctcatgagtgtgggaggaatcatgtcgcatggatctggcacacggttggcactcagcaaatgccagctttgatgaacaaagaaagcccgggcctgctgcagcctttcttctgttgctcccatggtagctcgccccacaccctctgctgctctgggcagtgtcctgggctctccactcttggtgggccgggatcctgccagctgtggcgcatgctggcatcaggcttccaggagactagtttcagctctagtcctcatcttccctgcttcccttccttcctttccctccctttctttcctttcttttgacggagtgttgctctgtcacccaggctggagtgcagtggtgagatctcgactcactgcagcctccgcctggatccctcctttctgtctctagtcacagccctcaggttgcacaagcaatctgcttaaggt

SEQ ID NO: 63395 - DNA, 1031 bp, Homo sapiens
aagatggtttcagaggggttggttggaggggatggccttggtcactcagcattatggccagatccacggcaggcaggcttatcacgctcgctgcgtttcaggtgggcatagctgacttccttccaagcccagtgttgttctctcagttgggtcttctttccttttacaaagaacatgcagtttctcttcatggggttttgctcttctctcctttagttcctactcccaacatagaggtctacccagaaaagaagaggtgcaggtgtcttaagtctaaagcatacctggccccagagtccaaactttctggccacctttgttcaagagcctgggcactggctggggcattatgggagggcaagatggtggtatgcttgtgcctcccctgtgtcagtgggatccgcttgggggagagcctgaaggggtgtggggcagagctcttgcctcttctcagctagtttccatttcttccattgtggctctaggcgtgtgccaatctttttgctgtgtagtggaacgtttttgactttactagctggacagggattgaacacatttattggacaccaagaggaatttcccttctccagaaaaatttaaataggttaaaagtctggaaaggtgacagatttgggtgacttctgaggaaaaccaagagccccgagttctgggtatgataatggcttcagctaaatttttaatactgagcatattttattacctaatcagctagataggtaacaaaaacaacatgcatgttattatattttactagccacagttggaataacaccactggcatcattggagacatttcttgacctcgtttggttagaaactatttaaaaatacattgctcagtggggctgcgcccagttgtatagatggcttcatcagccccaggcaggcctcccagatctgggaaggtgtgcggagcctgaggaggctgctctggttcagcctgtctgtccttggccgcctgcttggcagtgggtctcgggcacagggaaagtagagaggggcctctggaa

SEQ ID NO: 63396 - DNA, 1041 bp, Homo sapiens
cccgcagccgctcccagccgtgtgtccttaacgacaagaaggtcggtgttaaaaggcggcgccctgaagaagtgcaagagcagaggccttctctagaccttgccaagatggcacaggtaagagccccagcagcctggagtcaccttggtgctcactggagcctctgctggttctgggccgtcctagacaagcatagattgccagtttcagaaatacccaggagtgggttaatttccttgtttttttaaatcctattcaaagaaagattatttccagttggtttttaaaaagcgtttatttctatttacaagcaaatattccctttcactgtgagctcagtgctaggggtacaagggcaggtggatggtgagaggcggggtgttggtgggcagactcactggaccaaacactggtaatcccctccggcccttcactggagccgtctctcccaggaagccacccctgcagctgctgcaagagatatacacacacactggggttcagtgtcccttggattatgctgatcctgagatcagggttgtgggtaatggtttccaagagctagcgattggggggacttattcctttgattatactgttgaaacatgaggccatcaggatgttgtgatcaatatcctctgagctgcctctgcaatcatccttgcccttcactgtagaagaagtatctggccacacgcccctgtcacttggactttatcctctttgtcttggagctctgccttgtgctaacactgatcttggatattgatttgaatgagatgaacttggagttaatactctgtcatcaggagcgtctctgagcccgagagttggctgcatctggttctggctggggatgaggaagtggtgctggcccttgtgacctctgactcaaggatgggcggatgtgatgggacacaacactgttggttctgtgttcatccaggaggccatcggttgcttaatgccacggtctgaccatcatcttttctggacttatttatataaacattggtctcgctgggtttcaaggggtaaaga

SEQ ID NO: 63397 - DNA, 1037 bp, Homo sapiens
gatgtatgatgaagaaattggatgtttagcgacagtcttgctttgttgcagctggcttgcctgggcttttggaaggtttctctcctgcatcttcagcttctgaggccctctatgaatacagcctctggacagttctaccagtgtcccctgtcagggtccccagcccctcagtttgtatctcatgaccttggcaggatgcccaagaggaaggagtaccaccgttagctctgctgaccttggcaggatgcccaagaggaaggagaaccaccattagctctgcctcggctttttctctgggctcctggccctccctttggtctgcacaggtcattcccgttgagtcaatcaagtagctgctgcttgtgacgctcagctggggtatgtctcttggtgccctttgaggagtggccactggtagtggagataggtttgtagtccttgctgcctcgagcactcatgggttaaatctcagttttctgcacctgagcccatcttgcctgacccataaactccttagggccagggccagagtcaggctcacccacagtccacctcagcgctgcagtgtagtgaaaagggcctgcgctctggggcctgactaagctgggtttacatcctgtctggtgttagctgtgtggccttgggctagttgcttagtgtcccccaagccttggtctcctgatctggtccaggatggtacatgcactcagggggctgtgtggattacacagcccagctgaatgctcagtgagtgatctgcattgctgagagacccggcgtgcatttaaatacctaccaaatatcatttcaggtttcacttctattcttctcttgactgactcaagccattcacatgtgcatgatttataaatatatataggctcgagaaaatagtactaacaggttgttccctgatatcatggcatattttgtaactttgcttttatactgtaaacttgaatacaagaactatgtcaaatttatctttgcatctcctaaaattcccagcacggtgcctgattccatagtagaaaaac

SEQ ID NO: 63398 - DNA, 1010 bp, Homo sapiens
aaaatatgaaggtttatagtcccccaagaatctggagccctgggaattttccttcaaatttaagggtaggaatggaaataagaacatttgaggtcaaatgccattcgtattcctctgagtgtttttcttgcttcaagctctaggatctgtgcacacagcagtcttctgcccttcttagtcaaacggtggcaggaccagagccttgtgagtgcgaatttgggaatttgagtccttgtctctgcatatgtaggcaactcattctcctgttctttgtggcatagtcaaaagtcagaaactgcaagctcagtcatcaaacctcagctttggaagagaccttgcttacctagtctgtccaagactgtgagagaactgggcccagggatgcttgtgtgttcaccctcccatctgcaggcaaaggctcttgtgtgtttacgctacacacaaatgcacacgctctcgtgtgtatcatttcagacttgtgaagataatgctcagtggggacgtggagaagctttacatgccctaaaggctaaagcaacaggcgcagcatagaactgaatgggctggtgccatgctctcaggctgtgggccatcgcgctctgctcaggtctgccaggggcttggtgtcaggctgcagatggatggggggcccttctgcgtatctttaggacacagctgatgggcccttgcgtgttctcagggagaaagtgggaggcttcacactcatcttgttcataggagtgagttagcttctaaggcctttgctagtggctgtccatcaagagcatgttgtgtagcttgagaaggaagccctgagggtccccatcctgtcctgtgaaacctctgatgggtgaagtgatccttctccatacttcttcctggaattagcccaaaccaaaacataaacaccaactttcagtgttgttatgaattcaaatttgtagagaccagaattgtcaaccctcctgaagcttctgggcagtggtgctggatggtctggatgggccgcc

SEQ ID NO: 63399 - DNA, 1187 bp, Homo sapiens
tgaatgtgatctttgggccaggtcctccagtaagagactgctcattaaccagtgtaggctagaatgagatttgttttcattgaaaaaaaattacatccatatgtaagtatgtatatatatatgactttttagggtttgctttattatttttatttttattatggtcatatgtgtgatttttaaaaatctctaaaatagtttgtccataaagggtatgtaaattcttccttgtaccattcattggtttcaggcagtttttcaggaataataaagcacagaatggaagtagatgtaaaatgtggttggcacatggtaactgttgccagtgacgagtgaagacagagcttcccagggctgccttcttacccaggttgggctcacctgatggggaggggaccacaatagtgccagaggacagggaatggccactgccagcctgtctgggtgccatgccttccacatgaagaaatggtcaagttaggcagcctggcccaactgcaagagcatgaccttgggtctacagactaggttgacgtctgggctctgtcatttgctggatgtgtgtccatgggggagatgtgacatcgttctgaagcccagtttcccccatcagtcagatggagattgctgtgacaacccatgagatgagtcacgtgcttgggatgcacattcatgctctttctcagcttcagcaaggaccctattggagtgttagctgattaacagtaaatatgcatttattgacagtttcgtgaaaagctctgcctgtcgccagttccctcgtcggtttaatggcgccccgctttgctgtgtacatcagttaagagatgcatcaccagcagctgcccgtttcacttgctctgtgcacacccacaatcaggatggaaatccagaggagatggaccaaactgaccttgttgtcccttcagagttcttgttgccagtgcaaatactagctgttccctgtacatttatgaacgcctgtgggagctgaggggtagaataggaagtcctggtcagacccaaaagggctgtcacaagaccctagtctacccagccttgtgcagatggtgagattgaggcccctcttcccagtgccccatctggtgtggtttttaactgtgaggatctcactgggcatctttttgtaagagcaaagacttcccagaagcagtggcagctgccat

SEQ ID NO: 63400 - DNA, 1023 bp, Homo sapiens
tttttttttttttgagatggagtatcgctctgtctcctaggctggagtgcagtggcgcattcttgtctcagggcaacctccgcctcctgggttcaagcgattcttctgcctcagcctcccgagtagctggaattataggtgtctgccaccatgcccggctaatttttgtatttttagtagagatggggtttcaccatgttggtcaggctggtctcgaactcttgacctcaggtgatccacccgcctcagcctcccaaagtgctgggattacaggcatgagccaccgcgcctggcctatgctttttatttatttatttatttattttaattaaaagcacttcacgccctgtgattgcaagctggataccgggcccctccccactcttgtcccctaccccagtttaggaacttgatacagataagtggttttgttcttctcagtgtggaagagagaacaaagccagcgtgaagcgtgggtgggagaagcagatagggtagagctgagtgctgcccagccagccctgcaccagggctcagtgccccttattagggtgccagctcagccgccaccacagggctcctgccagcggaggctgttttgactcttggcttcctttctcatcttccagagcatccccagtccaccttctttgctgaaatggaatttcctctacaaagcttctctgggaaagagccatttatatgactggttcttgtgctctcgacacaggaaacatgggtcaggtggcagctccgtggtgcggcccaccccctggtcagccggctgggtgagggagccagcccttgctcctggctctcatttctagtgggtacaaagaggggcctgggctgtggctgagagtcatcctgtgtggggagaagcggggccacgcgtggactctcagtcaaggctccctccacatcttctcccacttgcagtgggggacccagggtcacacgtgtactagtttgatcttttttggtgaaacagggcaagtggagtgagcgcagtctccattcacc

SEQ ID NO: 63401 - DNA, 1049 bp, Homo sapiens
acactcaggccaagggcctgttcttttgtttccagagtgaccacctcccttggccaggcccgctcttctttctgcagcccatcctcccttaaggctgaagaccaaagggagctggtggctggctgctcctgggcagagggcagcatggagctccaggctgcctgactttccacgtaacaaccaatacttgtcctttggaggggctgatctggtagctagaacaagcacttccttctgtacttgtcagattaggatgccaaggctaaatgacttttcttacctgaggagttagtggccatgtcaggccttgcacccagttgcctgggcactggggttcttcatacttcgggccatgctaagttggcactttgagctcaacagccccagccaggatctctggcaggccccaggctggcctgaagttagaatgtgggagtgcacagggtccagggcagcctgatgcctttcaccctgggcaggcagagataccaaggggcctgcccatgctttggctaatcccagagcctcaggagtcagggccagcgtatctctatccgcatctttgagagtcttcacacaaaggtgctgttccctcctcagcttctctttcttgtctcaggcctggatctcctttttgctttcgactgccacggtctcgcggggttgcatttcggaagtgtgggtgctccactcgttcccccgcagggcatgagcgcgagcctccccctgttgctctgtggctccctgtaacaccgtgtcaggagatggaaaaggtgatttgatttctttagtggataatgtgcagagcaaagttaccaagaaccgtggttgtggcctggcattttctgcagggccagttcctcatttggagccttaattgtgtctttatttaagccagggctgctttctttagtcagacagatggccctgaagcctccatttgatttccagcttttgcctttcctacgaggatctaattccaaaaaccttctctcgtgatctgaggagtctcacagagacgaggccctgccccggcgtgggctcgggaa

SEQ ID NO: 63402 - DNA, 1111 bp, Homo sapiens
agttgctgtatatggctgtaaaatggggataattcaatctggcttgtggctaatgtgtgtaaagcgcctggtacctagtaggtgctcagtagatagaagtgattcttgatataggttaagagaaaacccactagaccatggcagggtgtgtgccccagaggtggcctgtgggagggctttgcgaggcttccacctcgcgccctgtgggatcacccagttattgtctttttcttggccatgcccccggcttctctttgagaagaccctgaccctgtttgcagactgggctcgaagtctccggcctggtcctggcattccccagtgaagttggccgggccagggcccacgggtcataggaatcccaggaaattccagatcgtgctgggctctgctggtctggattcgcctcacaaattctgagaacgtgcccagatcatttcacatgttgctgtaatttagctggattctggaaatgtgtattgagctgctagggtatgtgagggatcgtggtaggtgttgcaaagggttcagaaaaaattgctctcccaacagatcaaagcagccagctccagcttctaacctcctttgggagcccccacagctgcagtgataaggtctccattgagtatggcattcagagccctgggtctggtttgagtctctctctagctcccatcctgctgctgtgccctctgcgtgccctgtgtgccagccaccagcacgctcaccgttcccatactccaagtccgacccggcggccacgccttgcttacacccttccctctgcctgggtgccctgcccttcctgatgaaatcttgcctgttttttaagaactaaaagtaccatgggcaggcgtgggatggaatattcaaacctcacatagggttggacgtggttcctctccggaactgtcattcccttctccaggcaaccactgtgtgggaccatgctggactccttctatttttttttttttttctttttttgaggcagagactcactctgtcactcaggctagtggactcgctcttcttgcctttgtcactttataggatttcttggagattgtttcatatctgtacagtttgaactggctcattaaaatatttt

SEQ ID NO: 63403 - DNA, 1081 bp, Homo sapiens
aacattgaaaagtccaggagaacagagttccgatttggttcagcagctcagtttactgttttgtcttgttttgtttttcccccttccattaaggagacacataggcgagcctgggccactttgttcagccaggggcccaggtcaagtctctttcaagctgtgtagtgtgactcccagtccttccccaagtgtggccttcggtggcctttgattacctgaaggactagatcagggaatatgttttagccccagttactgaagaaagcacctctgaggacacaccttcctgtggagggagggatgaggaaggggtgagtatgccctctctgtctaaggacagcaggtgcttcatgcgtacagccagccactctcacttgccctgctgaatgtccaccagcccagttgcaggagcaaggtgcttggaggactcaaaaacatattcttggcccctagaagctaatgctgtagctgtgaagacgagatgcttttatccaatttatgagcatttaataagggcctatgccctgctaggaattgtgcctacctagggatttcagtgtttctagggatatttttgtagtgcccccacctacagggcgttacctccttaacttatagctgaggcgggcagcacaagggtaacgtcttacatgttacaaaggcagaaagctgagcaaagttgcagagcttagccagggccctgcagctcctctgggactgagctgggctgagcgtggactcaagttcagtgctcttgctgtgatactgacttagcagatagacatcagtcaggttgctgccgtgggcaggctctgtgctgaggccacaggatgactgagggagggcaacacctaggctgcacacgtggagggggggctccccacaaacaacctggaaatgaactttgagagaaggacagggtggcagtgggggaggcataggcaggaggcacaggacctgaggagatagggacagatggatacaggttccagctggggttgcaagaagccattgtgactccctgcaggcccaggagcaccctgagcttcctggaagacacttcaccctctgcaggttaccc

SEQ ID NO: 63404 - DNA, 1030 bp, Homo sapiens
taccccagtgttccccccagcaaggatgtgggttggcctgtgtgggtcttggctgcctggcatatgaggctcgtctttcctttcattttcccactgcatcttattttctgggaaacttgagactagattcccggagatgttttgttttccgttcagccatcttcatggaagctgtcctcacactctcaccgtgatagttggagacacatttatttcctacctttaggtaattctatcactaacacacaccatccactgtccatctcggtttccaccctccacctggaacccagatactaacggaggcagccttggcgattttgagttttgagcttttggtttcccagataggttgattttacccgttctcaccaaagacaggccgcatttgggtcgagctgacagagctgtcatggacacagcaggttaccctgtactcgggaatgcttcatgaagcttcccactcactgccgtcagtccaaggctgggcgccctttgtttcaggtgccctgaaatcagtgtctccgtgcagtggtgggaaatagagtgcttaaccatgtccagaatcaactgctgtaccctttctttcccttccctgatgacacctgagcccagccggggctgctggaggtgagagaccctgggacccatctggggaagcaggtgcagagccaggaaatggtgcgttgaagtccatacagtcagccatgctcacatctaagtgcttagtggtggtttcctctcatttgggggttttagttgtccagagtgaacctgaaatcactgctgggtcttgtgtctttagctccagatgtagtcactgggaggtgacgggcaggctttggctttgcctggccttgaagttttcctcacagttttgttttgtcaaggagtgttcccccttctactctcgctcctcagaaacaaggggacactaactcagtcatggctttgaatggagcgtttctgtgtggttttctccttgtcccagtactctgccttctgcagctcccagcccccagcagctggg

SEQ ID NO: 63405 - DNA, 1003 bp, Homo sapiens
ttttatgtattcatacctgttctgttctgggccatttgggcctgatgggttataccattgttcctaccatgctggaatgggaaatacatggtctgatgaaatgaccatgttttccatgggcatcagataaagaactacttcattcattcaaaatgatggctactgtgtggcatgaggaaggaaggtgagttccaggtacctcagctagctagtatcacgtgacttactccttaaaatgctgtccactgccaacactgatgccgtgtgttgagtagcttggaattgggctgaactgtagctcttgtcttgcttggtccataaatgctctgaataggaatctctttggaagctaactaggggcagagtcattctgaggggtgaaggcaaatatggagggcgtagatctccagttcatcagacccaggcataaatgcatcagtgctggacccatctcccccacatttgtgcatgctgatagactctgagtgtggagaagagctgtgtggctggttgtagtccacgctgtctacattggagtctctgaaatgcattgtacagtcaggagtccagtccattgctcctgttaggaatggctggcttttccatgtttggtttacatggttacagtctgcacaaatcttcacaccttaaacaatgcccactccctctgtaatcaggatggaaacctttataaaatgcaagaatgacataccaggaggacttttcaggaccttgggcaagagtgaaaaaagaagaaaaccagataagtaagcctgatgaacttagctctagaatagttgcatgaaggaagtgcctggtaaggaggaagttgtgtttaagaggtcgtacgtggaaaattttttccccacatgctttaaaagggaaaagaatagccttgaaaggccagccttgattacgtgtccccctcccatcccactgccacctttgacactgtgcttgcctctagccagccactcctggaatggtgtcctgtgtcttcctt

SEQ ID NO: 63406 - DNA, 1082 bp, Homo sapiens
ccactgcccctggccaaaaaacaatttttaaaagcatgtgtgaggttcaggtgagtccttatatgttacacatgatttcaggaagtcattgttctgagacatggcgtggtggcgtgctcctctgccatggaggagcgtggccagggtggtgtccgtctgctcacctgaggagctccctgggtctgccagcttcctgcctggccaagcccttcccctgcacttgtaagacgacgactgagcgtggctgatcctgcccggtttctgggtggatagtggaacctgggggaaccagggtagaatcccttatgggaggcagccattggcctggccaggctttgggcgctgttggagacagggctgaatttttagccctgagtgtaggcacaggcgagagctggagcccaggcacttgttccctgtgtggctggctgctcatctctgatttagctttggctcaatttttgtcctaccccctgattgctactggagccagcatggtggtcacagccactggtgtcttagggccctggaagagaagacagcaatcccaggttgccctctcctctgctcagggctgatcctggcagacatggaggaggagataggcaggaggagatagggagaagacttgggagggagctgggtcttcatgccaaatgcaggaagaaacaagccatcgttcagttcatgtttgagctgcgtcagcccatgtgaaggcccccacacctctgggaagaactgcagggagcatctctctggtccccgtctccaaggtcggggaagcattttacagttttggaggtgatgcggggaagggccacagccaaaacttcatgtggcagtctagcatgccacacctcactggaatcccgcacgctagaagggagccgccttgtgagaggtgttccagtgaagtggaaccccaccagtaggtggtgggatgggctccagaacagtgtctggaacaggaactagtagagctcaacgtcttagattccttaaaaaaaaaaaaaaggttgattttgtgtgtcttaataatttcctttataaatggagcctcttatagtacaaggcagtacaga

SEQ ID NO: 63407 - DNA, 1402 bp, Homo sapiens
cggaagtttgcacccgccacccccggggtgcgggagcgaggcggcgggctccgctgctgctggactgtccggggcggtcaggatgggggtgagggggcattctgtcccgggcgggggaagcccgcggggaggccaccgctggggcttgcggagtgggggcgtccgcgccggcgtggcttttgcacatggcgagaagggccgtccggcacaggcacactggtcgagtcacatttttgctagtcttggattttgcaagcccgtgggagtcaggttccccgctcagggtttctcttggggcagagacgaaagaaacgaggacacccagaatccggggagggtttgcggtttgtgttgtcccaagtgtgttctcgctccccccgcccccccaccttgtcccccagcccccagctctccacccccattttcggacttggggaacaatgcttgtagtacgggccggggcgccgcagcagcgacgaaccgcgcggacaggtttgcccgggtccctcgcgttcggacgccccctgaagccgagctccttccatctgaccgcccgggctcattaacacgtactgtacttaggacgatggtgaacaaagaaaagctctttgcagcgtttgatgaatgggattctgcctcctataggccacactccgagtcttccatacggtacaatctccggactcggtggtgttaggaaagtggcccccggaatggcttgcattccgggtctgggatcctggggtgggcatttgtgccgtcgccttcgccgccgcgctcgccttgcaggagcgggtgcagatggagccaggctgacggttgttcaacaggaacaaatgtttgttcaattgttggatggtggagaaaagggactgtttcctattgactgctgcaggagttggaatggcattgtttattggcctgggaagccaggcaagcgtcttgtgctgcttacaacatattagcagacttccaaatgacatgctagcatatgtgttcccagcagtccccaccggctggcagggagattcctccttgctccagatcctggactcgtttaaaagatgccacctggtttgaggacttgggaaggaatggagtcagccgaccaggtgaaactcactgttccttattaggccaggtttttgtttcattttaatttatctatttaagagtaacttgtgtcagttacagttttgatattgaattgcaggtctacagggtcccctcccccgcctctagctgtggactacagaaacagctacttgtcccagttgatagtcccattcagtgggagaaggtttggctcaggattggtagcccttgactctgtgtctgcacttggctgtcacccatcatgcgacctgggagtctgccgatccagcttccaggcgctttttca

SEQ ID NO: 63408 - DNA, 1082 bp, Homo sapiens
gactaagaatacccctcggatttagatcgttacctgttttaagtggtaattttttttttttttttttttggagacagggtctcactatgtcacccaggttggagtagggtggtgcaatcatggctcattgcaacctcaacctcctgggctcaagtgatcctccaacctcagcctccatagtaggtgggaccacaggcacgtgccaccacacccagctattttttgtaatttttgtagagacaaggtttcgccatgttacccaggctggactcgaactcctggcctcaagcagtcctcccgccttggcctcccaaagtgctgggattataggtgtgagccaccgcatccggccccagtaattattcactaagaaatgtgggtatggtgggggaaaatgtaaatgtgggtgcatttgaattgaaaccaaatggacaaggatatggtataccttccttcattaggtctgagtgccaaggcattattccaagtgatatcagacaaaggaaccaagagcatatccctgtaggatcatgcatcaggaagctggtagaactggatttaatgaaagtgttgaattggatttgggtcttggccatttaggaagcagtggcctgagattttataattgatttttactttgcatcatccagatttgatatccttgatcagtgattcaggtttatttcctttgctgtaagttaacagtgccattcacggtgacattttcgtttgatgttgagtaatactttagtttatctgatttgtccttagtttatactagaattgacagtgtagtgtgtaaaaagtatggtgaatcagttatttatgctactctagaaaacatttggtttggcccggctcggtggctcacacctgtaatcgtagcactttgggaggctgaggcgggcagattacttgagctcaggagttcaagatcagccttggcaacatggtgaaaccccatctctactaaaatacaaaaaattagccgggagtggcggcatgcacctgtagtcccagctactcaagaggccaaggcaggaggattgcttgaagccggaaggcggaggttgcagtgagct

SEQ ID NO: 63409 - DNA, 1085 bp, Homo sapiens
tacacatgttccagcaattagcatatcgtgtatatttctgagtagcttaggaaaaaatatgaaaacactctggttgaataaggggactgtgaactgtatttctcatttttcattaatatattacagatcaggcagcttatcattgatgatagcagaatcgaaatggcattgggatggctgtagttccccagctttgcctgccttactgctgcaaagaggagagaactgttgggaggaagaggctaaatgtagaagagtgtgggtgctgtcagttcacattttcctcctaacccttctgctaataggaaaatgtcaggcctttgttcccatctaattttagtacatcctggctaaaaaaatgttaggatgaaaaaatgttaggatgatttccaaccatggaactttgaggggtggggtaggggaaggaagaatggaggaaagcgcagtttatactccatatccgtctgcctttctgcaacagcagctagcccctactctgttgatttgggtaatgaaataaatttagatgcattgaagcagtgataattaggttttccttctatcttctcagtaagaagcctagttggtttctgaatggggaaagtcataatatggtatttaatgaaacatacctggcaaaattaaagagctgtacgcaagctttggaagaaaggcctgaaattgtgagtgcaaactacatgtggtgctatgtataaatagaacctttgagatgcatttgtatttcagggaagctgcttttatactgttattttgaatgagagtaatattttgatttttaagaatcagtcataagcaaggcacacaaggctgagctgtttatcccctctgtaaacccaacaggcctagagggaaagcccagattcagtgagagagccagttggatcaaacaattgataatatagtttgttcaagagataggacagaattattggctttgtagttgaaactaccaactgttgtggttgttatttaattaaaaagtaattaactgaattaaactaaaagggcaattctgaatactggagctcactacgaaataagctgtcttcccccagtattcagtt

SEQ ID NO: 63410 - DNA, 1580 bp, Homo sapiens
tactgtaatgtggtactgtatgttgacctcaattcacatttatccagagtataatagaaacctcaatttttaaggaacttatattagtagttaagtttcttatggccttgaaataattttcttcaaattggtatacaaagaaatagtgtatccctgctatgttaatgactttcgtctatgttcttttaagtaattttattttacgaattgtgtgtgtgtatgtgtgtgtgtctctgtctggtagcctacaatgaaaatctgtacaaatgtgaacagtttgtctccaggggagagccctggggtttgatttcctgtttttggctctgtaagctaacgtgtatgtgctcctggacagccctctgctttgagagtatgagaccaagtgtcttgtgttccacagtagtaacctctttagctaatgtcgtgtgtgtgtgtgtgtgtgtgtgtgtgtgtgtgtgggagggagtgttgatgggctctgaaagaagtcttgtctcgtacatttcactgaatgaaggctgcccatgacctagagcttgattgtgggaggtgaagagcatatatggctgaaagacaattgcatagtggggaaaaaaattaggaaatccttacatttctcttggttaggcaggaaacagagatgtccatagaagaagagggagctcatcagcatgttttattaacagttaatggaagaaaattaatgctaatttattcttcatatacaccatgcaatttgttagaaaagtaaaagaatagtttgaaattctttggtcaattgatggattcctatgttcagggcatagaaatgaaactcaacatcaagcagacaaatacccaagcccacaggctacataaatgctgaataaaaccagctctacaatggaactctgaaaagcgacgggtaagaagcctaatgaatgattgaatatgaccttagcaaaatccctggagtgttgttgaacgatcattcatttccagcttagatgtcaagatgggctccagtaaccaggaaaaaagagagcttgagtcagtacttactgagttttaaaaatcttttgcaacacagtgtattagactgatcattaaaaggacttctctagctgaattttgagctgtcactatagtttaggcccagggaaataaacttaaaaagataggaataattcctaagacatgaatgtatcaatatcctatcctgcttttctggagtaggacttcaaaaactgaaatgtataggctggcagaatgtacttttgtcatgctgataccactgtaaaagagacttaaactaggagatcagttgagccctaaagtatttgcaaattacttgcctagcttgttagaagaagaaataaaaagccaaaatctacatttttgttttcaaaagaaatgatttctttgtttcctgaagagatgagaaaagataaattcttccatgttatatttttacgtacgtatttttattactgtactgtatcaacaaatgataagtattttaatgagtgatctttattgttcatagtagctggaagcatcttaagaaaagcaaatctaatacatctgttttcccaaatatg

SEQ ID NO: 63411 - DNA, 1006 bp, Homo sapiens
tgtaagggtagtagaaggaaagagaactaaggaatgttattatttgctagcgctatgttaagttgtcttattaagtaattgagtcctttcaatgtcttcttgaggtatgtattgcttgttcttgtttctacgtataaggaaaatgaagctgagagaagtgaagtcacttttatgaggttcaacagtacaggatggagccaggatttttatctgggtctgtctgactttaaaacacatactcttctcctagcatattctgcctcacaggtgcttagtctttgcctttgtagcatttacagtacagctggagacccatgatgattacatataaagttcagttagaaaagatgggtagttactttattagtgttcatctgtggagtatcagaatagcagtcagccaactctgtctcatatcatccttcattacttttccccatctccctactcaaagacttgcctctattaagaattttgtcattcttctgtgaaagggtagtgtaagttatataagccctcagcgatacatgcacaaagatgttctagttaggggctaatttggcaagagaaacagtttattaatgtttttgaaaagataagtcatattcatacttaataccattttgtatttgtggtaatattttaatattggagctaaatacaaatttttgcataattttttgatgattttcagctttgtgggcctattgggttacataagtgactttttgtttggcaaatgttactcctgtattgagtaagtctaacattacgtcccttttctttttggggaggggtagccagaggagtgagtttttcatttagatcaacattgatcaaccattaagacaagatagttgaagacatgtatgtggactgtcaacaaaaataacattttttgaaaagcttttattttcaacatgtaaaaagtgagaaattacttcaaaatatatgcaatttaaattttttagaagattgtgttgattttaccaagacaggagatctt

SEQ ID NO: 63412 - DNA, 1031 bp, Homo sapiens
agccaggtgtcgtggtgtgtccttgtaattccagttactcaggaggctgaggtgggagaatcgcttgagcctggggaggttgaggctgcagtgagctgtgatcacgctgttgcattccagtctgggtgacagaaggaaaccctgtttccataaaaaaaagaaaaagattgctgaccctggattgagagatttttattagatttttttttttggcaagtaaacttattaggtgttggtgtatatttgcatatgtggcgtagaatatttggtgtagaacattcatctttttgttatattaacagccattgaagaccatttcttatacgtactactttttcattgatcagctacatttttgatggttacttttcctacatttttgatggatgtttttgctatatcattttaggttactatttttcttttactatcttctggcttccattctttatcacttattgttagctataagccttatcatcatccttttaaaggtaatctgtcgccttgtatcccacatccctactccctggatgtttttgagatttttctgtttttctttttttttttttttggtacggagtctcacgccgtcacccaggctggagtgccatgtgccatctctgctcactgcaacctctgcttccggggttcaagtgattctcttgcctcagtctcccgagtagctgggattacaggcatgtgccaccacacctggctaatttttgtatttttagtagagacggggtttcaccatattggccaggctggtctcgaactcctgaccttaggtgatccgcctgccttggcctcccaaagtgctggtattacaggcataagccaccatgctgagctgatttttctgtttttgtttttcatcagatacactatgatgtgtctaggtggagtttgctttcatctgccttgaatttatactgtttcttgaatctgaggcttgggtcctttgtcactattggagtattcttagccatatgccattttttcttctgccctattctcatttcctttcc

SEQ ID NO: 63413 - DNA, 1795 bp, Homo sapiens
tctaggcttctgttctttcctaagggttgtgactaggtgattgctattggtttcttgtagctcaaaactctagaaatgcatatatatatatatatataaagatgaccttttgcaattccagtaggacatacgtatcttatcttataggtaagcatatggtttgaaaagtgcattttgtccatggaactgtgtttcggtaaacattccactgctagctaaaccatcactgttgtatgcctgcagtgtgctcttgctatgctgtgtgctgtggaggaattataagacttaggcttcatcctagataattttacagtcttaattagtacagaaataaacataagagtgaaatttgttaagtaaccaccacatgccaagcctcatgtttggcattggcaacaggaaaatttagactttgtgcttgaattgtttacattacaatagagtatggactgacatatggacagttgtgccatcacttgatgcatgcagtaatacactgaatatagaaaagagggtgattaattttggagtggaggggtagggaagcatcttggaggagtaaatatccaagttgggtggaaatttcagggacagtttggtgacctagtggcgtgtaaagagggagaagatttcaactaatggaaatattatctaaaggcctgaaggctgaagcagtattttatgttctgggcctgtaaataatttgataaattgaaatacaaagtatacgtggggatggacagacatgaggattaagttaaagataggaaccatattatgctttgccatgcttaagaccttcgattttgcatttaggctatggggaattgttaaaatgtttttagtagtggaatatgattagaagaacttgaaataacccttcttgaaacattgagatatagtgtgtgtacattaaagtgcacaaatcagaagtatacagctaagtgaattatcagaaagtgaatacatccacataacaatcacctggtcaagatgtaaaatattatagaactctagaaattccccttgaactctctaccaattattactcctttcttcctttttttttttttcaggctttgtcacccaggtaggagtgcactggtgagatcatggcacattgtagcctcaacctctcaggctcaagcgatcctgtcgcctcatattttgattttttttgtagagacaaggtttcactatgttgcccaggctggccctccttcctttttaaaagtaaccactatctaccaatcatgaacaaaagatgagttttaacatcagattaatttgcctgtttttgaaggtataaatgaaactctttagggtgtgctattcctggtgtctttcaggcttttttttttttttttttttttttgagacagagtcttggctctgacacccaggctggagtgcagtctcacgatcttggctcactgcaaccttcaccacctgggttcaagtggttctcgtgcctcagcctcatgagtagctgggattacaggcgcacgccattatgcctcgctatgtagttcatttttattgccatataagattcctttgtggctgggcgctgtggctcatgcctgtaatcccagcgctttgggaggccaaggcaggtggatcacaaggtcaggagatcgagaccatgccttggctaacacggtgaaaccccgtctctactaaaaatacaaaaagttagccgggagtggtggtgggcgccatatagtcccaggtactcgggaggctgaggcaggagaatggtgtgaacccgggaggtggagtttgcagtgagcgg

SEQ ID NO: 63414 - DNA, 1039 bp, Homo sapiens
gacatcaagtcacaagaggccagaacgcggttttcaagtcagaatcttagccagaaacgaagttggcctcttgccaaggagccaaataactggatggacgctcgcacccgcttcgcagacaggcgcacgcagtggagaggtgaagtgatttctgcgtttgggtagagcggcgtcggctttaggtgtccacggtgcggaagccagccgttttccaaaatgcaatacctctaatggtccctcacgaacagcagtccccaaatacagccgctcttggacctcgacgaaggggatgccactaacgctgtggggagagcgcacggtccccgccggcgcagggagccgggggtagagcagagggcgtcgcgtccccatcccagccccagcgcgggggctggagcagtcgagagggcggcctcccgccgcctagaggcgccggtccgctcgtccgctctgcctgtgccccgtctctatggcggccccaacggccgtccaggacgtggagcgaaatgagctcgggcgctgacggcggcggtggcgctgcggtggcggcgcggtcggacaagggcagtcccggggaggacggtttcgtcccgtcggcgctggggacccgcgagcagtgagtgtgacgctgggcaggggaggatgagccgtgccgccctgcctgggccccgagaaggggacggcggggtggagacccggggctcagggacagggagaccctcgggggcgtgacgggagcagggccacctggcggggggcttacggggatttcaaagagtggaatccctaggggtcgccctacgcggttaaccgacgtttcaagggattggagcccaaggggcttgtgggtgcgggacaggctttggctcctgggaggccttttgggagtctcgaacctgagggccaggcttgggggaaagggggagagggcgaggctggcgaatagggctggtcggcgagagtgagagaccgagggagaagtgctgggcctgggagccgaaaaggctgagtaggaggggagggatgtgggagctggaag

SEQ ID NO: 63415 - DNA, 1064 bp, Homo sapiens
ctttaaaaatgtaagaaaaaggagcataaaacgttctttttgtgtttgttgaagtgaatacagtagtccctgcttatccttgggcaatatgtggcaagactccagaaatcgtggctagtactgaaccctatctatatgtactatggtttttcctgtatgtacatacctatcatgaagtttcacttatgaatgaggcacagtaagagatgattgaagttatgtgaatgtgtccactcactctcaaacatatttgagagattgaccaagggtaactgaaactggaaagtgaaaccgcagacaagagggggactactgtatacaccaatgccatattatgaccaactaaaggacagaacgaaaaagaaataaagggagaaacgttcggaaaggagaaagcatacaacagagagacacctggagggaaaagagtgaggaaaagaaagtccagggtctcttactcactggacttccccccaaaccaccaccaggcctatgccttctttctcagccccaaacccttccacctaatggctgggatcacgatttcaactctgtgtttcataaaactccccgagacccaacttcttaccctttccaaaagccaggccaatgctttccttctagcactgcccacacgaatacaatcagcgttcttgatcagcagttccttccgtaacgccagccagccctttctgcttgccgcttcctgctgttccctgcagttttcaccctgaccactctcccactgtcagctggcccaaacacctggcccccttgcacccaaaaatccctggggacttgtgtcatattcaccctcgaacatccacccgcacctattgattgcttcagagaattgtcaccatgcaagatggctacctataaatgaagccatcagttgctgagaacctcgcctcttttagatttacacataagcaaaacaggaatggggaagcaagacgagcagccagcagttcgtttgaggggaatctcagagcaagtgaaattgtttaggctctggttcacacattgcttctgtctggtctacgaaggtgtctgatttggtc

SEQ ID NO: 63416 - DNA, 1051 bp, Homo sapiens
aaactgggaataaaacttgtggaattgttgggtcaaactaatacctcccagcactgaggcaagaatggaatgaaacaacctgagaaagtaggcagcccaatgtcttcttccacatcccacaaatgtttacttcccttcttcatttctcagaaaatgagctgctacgttatctttttttcataagtaattgatacctagaaacaaagaaaaatgtcacagccatttgaaaccccacattttataattacttgctatcagcacctcccacatgtggaagtaatatcttttgaatgtagcaatctcttgagtattcgtcaatgcaaaaggggcctcatttcagaaaaacatttggactgatttctctttattcacctgtgtaaacctgtgtaaggtgagaagttaggtcttcattagggttaccacaggcatatgcagccaagcacgtctatgtcacaatactatgtggtgttagtacaagatttttttctcttaaacagtttttatgactacgcaagcaaagtgaatgaggagagtttggacaggattcttaaagatcggagaaaggtatgttctgtttgttgcccagtatgattctgaaatcgttccttatcaccgaaaagataaaaccagacaggaatgtaaaatggaacaataagatttcatgttaatatgtaaaagttttgttaacctacatagattttttgatgtattaatagaaaaaaatttagatatttatagcatgataccattattattacatgcctgtaataccagctactaaggaggctgaggaatgagacttgctagaaccctggcggcagaggttgcagtgagccaagattgcaccactgcactccagcctgggagacagagcgaggctccatctcaacttaaaaaaaaaagaaaaaaaaaaaaagttgaacacaggtgtttttccaaaaggtcatgtatttattatttctatcaacatttgcatatgatgttctagttatgtgtagactaggtaagcaagtctgaatacaactgaaaataaaccaaagttttattgttg

SEQ ID NO: 63417 - DNA, 1037 bp, Homo sapiens
ggcaacagagcaagaatccatctcaaaaaaaaaaaaaaaggatgttggtacaagtcactgagattcgtgacttcaaaaatgtgcattatagtgcatttttttttttttttgagacagagtccagctctgtcactcaggttggagtgcagtggtgcaatctcggctcactgcaacctctgcttcccaggttcaagcgattctcttgcctcagcctctcgagtagctgggattacaggcacacaccaccatgctggctaatttttttgtatttttagtagagacggggttttgcccattttggccaggctggttttgaactcctgacctcaggtgatccacctgcctcggcctcccaaaactttatgcatctttaaataaaaacttgtattattccctttagctctttttgtggttacggaaggtatttttcttgtcagttatttacataaaattgtttttggatcaagaagcattaacaagacatgtttattatgcataaattcttataaggaataaatagctggaaatcatcatttgcttctccataatccactatgtggaaatgtagttttattgctgtggaagtctgattataattttgaaacataaatttcaaatacaaaattgtgaaattgaaccacctgctggttaacgagggttttgcatcgtgaacttgttaaaccaaaaaaaaaaaaaaaccacccctatgattatatgatcatgttgtctgtttgtaaacagcaaaatggtttccctctggaagtttatttgttgtagaataaattaaattgacatcagtgaaaataattgttaattgttaaaaaggtttttataagatttcattatgtaatctgtgggtatctcttgagcacttacaggctcagcattgtgtcagtcactgtgagtatacaaaagatgtgtaaggcatgacctgtgctctcaaggagttgataagcaaggttttactttacagaagggaaaacatcactaattcatgtatccttgggttgtctgtagaaggaggtgctccgtgagac

SEQ ID NO: 63418 - DNA, 1050 bp, Homo sapiens
agactctcttgggatgcacttatatttttatttaatgactacttgttttctagttttgcccacaacgtctgaaaccactaagacattcaggagcatgttgagcttctggtttggaaacagcaagacccaccatttatgacaaggacagccatgaggttaatacttggagtttaactgccttccctttgaactagttaaaatctgtaagaataaggaagttgttgaaggcttaaaatctgggttctgaaaaagtagtttcagtttataggatacacatttactcactgagctccagttccaatactaaattagacagtatcatatagacggaaaatgaaatgctagaactgccgttctttggatcgccactctatgggggtctgtcttttaactactctcctggttatgttggccttacaccactgccatttgatttaaaacgctgcagaccactttatctgcaaatgtgttccagttgttatcagctacctactacgcagcttcagcgccagtgtgaatttatttttttttaagtgccattaccgtctcctctgttcagattttgacattcaggaaaatatttttattttgatgccatactgaaatctacaatgtatatctgacaaagcagttaaatgtgacaataaaaaacttatttaatcatggtaccattgttttaatgtctgtctcagcaccggacaaggccttgcctcagtgtactcattctggcaattcatcatggactgaaaagagctttttaaagggcattaaaactcatcttcatacaaagtttttgtcaggctggtttcaggagacatccaggaacacaacttgctaaaatgtttctgtgattttcaggagtttctgtttccaaaatatttctgttgatttcatgttacctacagaactaagtatcaattgtgtataaaattgaatcttggagaggtccccaaaaggcatcttccacagaggaactgatcttgtttaaagtgactcctcagcctggattccctaacagtagagatactgtagaacttgctgcctgagagc

SEQ ID NO: 63419 - DNA, 1693 bp, Homo sapiens
ccgccggccgcccgtggctggacgcggtgccggtcccaccgccgctcttccgccagatttccccacaacttcttttcctgccggagacggatcggcgagtggggtttcgctcccactccgcaataggccgtaaacacttgggtccatcgccacaagttggttctggtgtctccaaacttgtatttcagtccctcggccgcttgctttccacctcctgcggtggcctccagttgccatttgtaggaaaataaaggtgggggacgacgaggcgggtggggaggaggagctggagctagtggaaagattcgtctacccctcctgctcgcagtaacgagtgttcagtgcaaggatctgttttttctctgctatggtttggtgcgggtcatttcacagacaaaagaactgtagtgaatgctggcattaagcgcaagggacaggcagtttaggttaagcctggaagtttgaaccggcccattatctttgagatacactggtgttttgaaactctcttgctgaggatattgtatttcagtcagttgattacccttttctgtaactccgtagactatcgatttaagcgccgccccatcttaccagtattttggtttcaccgtgtttatgatgatgttaataaatctaatgtgcaaaaataccgttttaggaacacaattggagataatttttttttgtatttgagacggagtttcccccttgttacccaggctggagtgcagtggcgctatctcggctcaccgcaacctccgcctcccaggttcaagcgattctcctgcttctgcctcccgagtagttgggactacaggcatgcgccaccacgcccggctaattttgtatttttagtagagatggggtttctccatgttggtcaggctggtctcgcacctctgacctcaggtgatctgcccgcctcggccttccaaagtcctggattataggcatgtgccaccgcgcttggcctgagagaaatctttaactctgggacctattatataatgagttatttctttacctgtgtgttttagttaacttcttttatcacttgtgcagcatccagcagtacccctgttttggtcaaacatggatgactcagtgtacaaaccataagccaggggaaaccataaggaattttgatcttggcttgtgccaaggctcttgggaaagtcatctgaactatgggagaaataaagctggatcttgtctccttgttattattttgaattaaatgagggaattctaaaaaaatttagaatcctattgacttttggctctaaagataggcagtctctttatactaaaatttcataacattgtttttattgggctgttgggggtttacgagatagtaggacagtaatgacattttgctcttttgaggaggatgttatctgagtgtcatgagggattttatttctgttgctgtttcgataccttttattaatgcctcagagcattgggacacccatttatttactcttgaaatgtgcttgggtgtgatgaactcattcatggtaatatattttaagctcatggccttgatccatgtctgtacactgataggggttatggatgtcacatttaaagtctgaggattaacatagttttggaactcatgatctagttgtacaatatatgaggcaaattgcttcatatgtgtaattgatacagtgagagcttg

SEQ ID NO: 63420 - DNA, 1008 bp, Homo sapiens
aaacgtgagtaatgaatgtattgtgccatgacattatggtggctttgacgtcacaaggcaaatttttcagctttgttatataatcttatggggactactgtcacatatacagtctgtcttcgattgacacatggttatgcaggctatcactgtaattctctttttttctttttttgagatggagtctcgctgtcgcccaggctggagtgcagtggcgcgatctcggctcactgcaggctccgccccctggggttcacgccatcctcttgcctcagcctcctgagtagctgggactacaggcgcccgccacctcgcccggctaattttttgtatttttagtggagatggggtttcaccgtgttagccagaatggtctcgatctcctgatctcgtgatccgcccgcctcggcctcccaaagtgctgggattacaggcgtgagccaccgcgcccggccctgtaattctcaactgtaagttgatttattgcaaggcaggattccctggatatatgaagaaattatccctattctgcagcagaaggaaaggatctctcttagtgttgcacagtaaaagttgaaacaatacacttgtgagtggaattctgaagacatcacttctgtgatttttaaaccacttctaaatcctttcctcttttgtttgtggtgggtaattaacttcactttttggtatttaatggagctaaagtttatttttaaacgggaactagttcagttttccgaactaactaaactttttgtggaatactatcttttgataccagcagaatattaagtttctttttattaactaaatgattaataagcaatgtttacatggagatactgtttagggacataatgagtttttcacagttcagtgttagaaacaaatcataattcagtaaactaagaactattttagaagtttgttttgaagtggtaaagaagggattaaaggcctggcgcggtgggtcattcctgtaatcccagcactttgggaggctgaggc

SEQ ID NO: 63421 - DNA, 1645 bp, Homo sapiens
ttgttccatttccatacatgtttaagaaaactgtggtctttcatccagttagattgcaggttctctgagcacagggacagtgttttgtctagttatatctctccatatttctgagtgcatggtaaacctttggtaaatgttgtcataggttgttacattagttttgtttgggattgtgatttaaggtacgtgattgacctgggatgtctcaaactgtgtaaaggaactatgctctaagataggttctgctgaagctcaagacatacctgtattacacccgctcactttcttgttacgattgaggaactgaagtgttcagatagagtaagtatgtaaagagctagaaatcctcctgagatgacaagatgaacagaaagagcattaatattgtttcatgctagatttgacacaatgtaagttaactttttgtctttaagatcttctttcattctagtcagtggattgctaattgtctagtggtttaaaagaaaacaagaccattagagttgtaacttttattacagttttttctaatgtatccttgacagattaaaatgtaacatttaaattcgttacattttgaagatttaggtttggttggaatgaagttagttgtagttgtagagggtaatcacctcagttaattaaggcatagtgctgataaggccaaggtcaccctggcaggtgttatttaattttaccttgtccaacttatccacaaattcctgggaagagtacagtgtgtttagttcagatctactcatttgatacagatgccatagataatagtgacctctttttataggaatgccagctcatttttgagatctaattattgattatttacatacaatttcacactaatttaggacttttagaagatacttaatgattgcaaaagttttgtacttgtgtcattgtcatagcaagatttgaatagttaaccagcttatgggttgccacagtgctctggatggtagactttcagagcagtgacgaaaggaacaaacatttattgaacaattttgcggcttttagtagtctaatccctttaatttgtagatgggaaaactgaggctcagaaataggaaattctgattacgaattgagttttggacatgttaagtgtgagaaacttgttaaaccttcaaattgagatgtcaggtgggcaactggttttacaaatcttgagttaggggagagatccaacttggagatacaaatttttaaattatcatgaagtagatgatatttaaagcccagggattgtctaagatccccaaagtagttagaggttagagagaagaggaccaaagcttggggcacttggctctttaattcagaaagataaggaagccaacaaagaagtttgaggaagaaaagctactgagattggaggaaaaccaggagaatgtcttggaagccatgtgagaacagtatgtttaattgtggattatagaaccagagagcttcagactaagccatttaacaaataatttagtgattgttgtattttgcctaagagttctttttatttcaaatgccgaagttgcagaggcaaaagtgtttaataatttcgtggattcaattacatgttacaaattttttaatggggctagaatgtgaaggtgctgaagtcatggct

SEQ ID NO: 63422 - DNA, 1359 bp, Homo sapiens
acataacaagtgtatcaaacatgaatcttagtccaaaaactcagatagaaagaaggtaccacatttgctttctttaaattaacttgatttgacttctacttctttggcaagaaattcaacctcagtcatccttggggtcccctctcctcatgttattggaaggcctggtgtcatatggttcagattttgcctgcattggttatgatactgtcttccattgccttccacaaggttccatcaggttctgtggctctgccaccaactgtgggccctagtgcctgtggcttgacacctagtttatatctagcagacactttttactgaggtcttgctgcctgttcagttgctgccatggagttgattccatcctctctagaatttcttctgagattgctcacaaggtctactcctttctttcatcaagtcattcaacatggcctcttcttgggttttactaaacacaaggtgctggtctaccttccgtgccactggaatctctgaacaaaggtttttgaaagcctggctgtttgactggaaatcgaagggagggatggaaatagaaggatgtgagtgacataggaaaaacatatatgaattagcgttccaaaaactagccccaagaggaaatataaagtgccaaatgtcaataaaagtatggttgcttggagtgtacttggagtgagttgaaaacttcatgaagatgagacttgaactgagccttaaaggatgggtagagttcattataaatgagggtgtctattgtgcttctgtatctaaggcagtaccttcatgtgtatgttgggtggtggtgacacatgcatgagtcgggcgtgtgtggcatgtttgggagtgagtggtgtgtgtgtttgtgacaggaaggagttgagagtttatactgttgcagaagagcctcagaaagagaattgtggaacagtcagctggatggatttagaaagggaagatgcttagaaggcttttatggtagttctgacctgaactggaaaaggattgatggcagtgggaatgagaagacagtaattagatagaaaccactagaaagaatctgtggggagaaggcagaatttaaggtgattctgagttctctgctgggtgcagaggtattaatagtgtcattaatggaaactggagaagtcaagataggagtttgttgtgagaagaaaataaggggtttaatggaggatttgataacctggtgaagccctgaaatgaggttagatttgtagataaagggttttaccatatcatcgatcttcacgatcctggtctagaccggttgtttttcctgttgactattgcgaagaagacagtgatgaaagaatatactgatgagaaaagaga

SEQ ID NO: 63423 - DNA, 2773 bp, Homo sapiens
caagcagttctctgcctcagcctcctgagtagctgggattacaggcacctaccaccatgcacggctaatttttgtatttttatagagacggggctttaccatcttggccaggctggtcttgaactcctgaccttgtgatctacccgcctcagcctcccaaaatgctgggattataggcttgagctactgcccccggccatgaattagattttgagtatattttaaatattcaaaatttaaaatattttaattatgaacattcacaattatattggaatgattatgctactggttatttcagtgaccttccacagatttaattttccccagtacagtcttcttttttttactccagatagaactagattttgaggctacagattatcaaggaactacctatttcataatgttactttgttaattgtagccattacttctcaacatgtttctttactacctgtgctaattaagaacagtggataattagcattttaagttgcttttctcccttagcgagaatgataaaatagacgttgcttgatcttctgaattcatgaatcataatctgtgttcataatttgagaatggttatgtgtttaagctattttttagtttgtgttgtttcctctacctttgtctctttaaactattggttacttttctaaattgatgtgatggcctccctgaaattaaacatttctattagtggcttcccgttaatctcatccttcttagatcaaacctcgttatatctcctgcctatctcttttgcattccaaagttcagttttattaaatcccagggtctaagattttttctttgagaatttatctccagtgtttctatggaaattaaaaaagaaaattaggataattcaatgtcgaaatgttgcatgcatcttttgagaaatttatattttgtaggttgaaggacttgctttttgggcagcgtatttttggaggtggaatgtagttattttaataaccatgtcctaattatttatagcttcctgcctgacacagctcacttcaagaagtgcacaatgtcagaacgtggaattaagtgggcttgtgaatattgtacgtatgaaaactggccatctgcaatcaagtgtactatgtgtcgtgcccaaagacctagtggaacaattattacagaagatccatttaaaagtggttcaagtgatgttggtagagattgggatccttccagcaccgaaggaggaagtagtcctttgatatgtccagactctagtgcaagaccaagggtgaaatcttcgtatagcatggaaaatgcaaataagtggtcatgccacatgtgtacatatttgaactggccaagagcaatcagatgtacccagtgcttatcccaacgtaggaccaggagtcctacagaatctcctcagtcctcaggatctggctcaagaccagttgctttttctgttgatccttgtgaggaatacaatgatagaaataaactgaacactaggacacagcactggacttgctctgtttgcacatatgaaaactgggccaaggctaaaagatgtgttgtttgtgatcatcccagacctaataacattgaagcaatagaattggcagagactgaagaggcttcttcaataataaatgagcaagacagagctcgatggaggggaagttgcagtagtggtaatagccaaaggagatcacctcctgctacgaagcgggactctgaagtgaaaatggattttcagaggattgaattggctggtgctgtgggaagcaaggaggaacttgaagtagactttaaaaaactaaagcaaattaaaaacaggatgaaaaagactgattggctcttcctcaatgcttgtgtgggtaagtttctgtattctgcattttttgcgtgggatgggaaaaggtagtaaaaatgatatgaaaagagctgggtgcgctgacacacgtttgtggtcttagccacttgcttgaaaccaggagtttgaggctgtagtatgccatgatcggtctgtgaatagcacttgcactccagcttgggtaacatagtgagactgtgtctccacgcacatgcaaaaatgtgagtgtgtgtgtgtgtgtgtatatatatatgcgcaaagtcactagcatttgattcattcagcacgatagctgtactttcaagtatgcatacataaaaatttgtgtatttgtgatcttgtcgtaactttgtactaaattgcccacaattaattgtgttcatgtctctccattactgggggcagtggaaacgtttaagttaaagcaaagtttttacacatcagcagtaaaatatatacctggactttaaaactgctactctgtttattgtaacaagatgtaactgaggaacaccagctgctgtttccaagtatttgtaaacagtgtgagcatcttgtgatgatagaagctttagtcagatgttaaaaataccacaaaaatgtgtgactccaagaagttgaacaaacatattgaccttgaaaatactggtgttaatttaacatgaatgtcatgtagtaaatgtttgcaaactttatggaactgattacatgtagccagctgattccatacttcaagttatggttcatatgtattgtgacattttcctcaggaaatgctgttaaaggacagagacataggagagcagagtttttcttcagttcttgaccttgtgagttaattgtgatgtaattcacaaaagcagtgacttgagtcttcagtattttttttttgagtagattagatgtttgatttttattaaa

SEQ ID NO: 63424 - DNA, 1131 bp, Homo sapiens
agagaacctgtagggaatattgggactatttaacctggttaaataggttaattccttaacctggttaaggaatttagctgttaacctgagggcagtggtaaactttttttttttttccccctgagatgagatctcactttgtcacccaggctgggtggagtgcagtgacatgatcacggctcactgcagcctcaaccttcttgggctcaagggatcctctcacctcagtctcccaagtagctgggactacaggtgcatgccagcacgcctggcttattctttaaattttttgtggagattgggtttctcccaggctggtcttgaactgctgagctcaagcagtctgccctccttgggcttccaaagtgctcagattacaggtgtgagccactgcgcccagcctagtggtcaacttttgaaaagggaatgccgtaattaaatttgtagtttaagaagaccacactcaccctagtgtagagggagcaacacttgagatggcagaccagtagagtaaatgatagcaacttaggtatagccaggtatagctggggtagagtcagtggagatggggaaagggagatttatttgaaaaagactgaagtagaattggcaaaacttggaagaattgatactgggctgagatgaggaggagtttagaaagccagatttttggtttggacatctgggttggctaacagtatcatttttcctggacataggagagggaaagtttaggttttttaagaggttttgtggtgaggatgcctgatggattattggatacatggggtctgaaacttttggggatggatgcttgtggggctgtgagtgtctacagaagccatgaactttctttttcagtggcaaattataggagctttcttgtttagtgtttctaattggagaccttagtaagattgactgggttacttttgaacatttcttccaatttgatgattttctgtcttaattctgtctacttttgtctagaagaattaaatgtatataatatgaacagtataaagttataataaattatgaaagtttttccttttatcctttcttccttgcccctgcttcgttttttaaacagagacagggtctcactctgttacccaggttggagtgcaa

SEQ ID NO: 63425 - DNA, 1028 bp, Homo sapiens
taatacgaaaaaatttgtaagtagataatatttttagattagaactaaagactataaaaggtgccttgatgctatgtatacctgagaatagtcaagggctttgataggtctgaagggaaaggtcgttgccttcatacagaaatgctatgaagtgaaaggagatggtgtgggcatggtcagtcctaaataaaataaaactgcattgaattatcttaaaagttatgggccctaccagactatacttaattgttcattaaataatttaagcagaagtttcagagttctttctgtatttgaacataataattggaaacagaaaactcttcgatcatagagttgtttttagttcaagtagcactttctggtctatttgaaaggcttgcccctttgggaagatttatagcctttatctcatgccatccttgattaagctttagctttgacttctctagggtacactgttcctcagaaggatgtgtaaggtgggtggaggtggggcatttgtagctgaacttgtatatgcatggtgaggaatttatcaagctacattgctgtgaaaataagaattcctgtaagaaggcattcttaatataatgggttttcaacctgaagaatgtatatgtctgtgttcggggcagggggtcatttttttgaggagaggatcgaaatttgcagaaaggactgttttgaatattggagtcatgttttcactgtctttgtacttctcatattgcctggcaaggcgttcctgtatatgatgaggattcagtaaatgtgggaattattttgaagccttgttatctttactaatggtagaaaattgttgcattttatcaatctgttatattctaaggaatatgtctgatctaattcctagttcaagatggcaattaaaatactcttttaaaagtacactaagaatatttttttacctagtattagtgttctgtccagcaaacacatttgtcttgatgtaatttaggaaacacttaaaagtatttggtcccataaataattttttaaaaatt

SEQ ID NO: 63426 - DNA, 1013 bp, Homo sapiens
taggcacatgccaccatgcctggctaattttgtatttttagaaaggtggggtttcaccatgttggctaggctggtcttgaactcctgacctcaagtgatctgcccgcctcggccccccaaagtgctgggattataggcatgagccaccgtgtctggccaaggtaacattttttaatggtaagagaaatagagtaaaagtgcagagagtcatattaattgtggattcaaattttgtcagtatacatctttcatatatacttttgcatatttgtttattcaaatttgccaatatttgggaaccactgcagggcactgtatggggattaaaaaatttgaaggttagatggaaacatgattgtagtagctaacccctgtgtccagtttggtaagattccagtgaagccggggtggggggcttgagagactgaaggccatgatgaaaacaaaagggcaggcttattgagtataagggagaagggaacttttcagatagagggatccaggttttggaacatgagatagaagaattggagtttttctagtgtcgaaggcctggctgcatttgtgttgtggtgcctagttgtgttgtctattgtatattggaagggctgtcaatgtggagttgtagttgctggtggtgacaggagccaggataaagaaggtggttgtgaactagggtgaaagtcttaaggggctcccctaaaggtaggtagaagattattacaaggttttagaggggccattgtgagtcattgagctcctgagacagtctgaggagtaacagtgggatgatgatcgaacatcagtatatttattgcagtatcacagattgtctggaaacttagcagctaagacaacaaatgtatgttatctcacagagtttgtgagggttagaatccaggagctgcttagctgaatagttttggctcatgatgtcatgaggttgcagtcaagtggtccagggctgtagttgtcaaaagactcaactggggctagagtatctgttcctaagc

SEQ ID NO: 63427 - DNA, 1032 bp, Homo sapiens
tggagtaaatactccaaaggacagaattaaaggggccagtagggagactggaagtgggggagtctggactaagtctagactaagggggtgtgttgcagagaatgctcagccaagttcttttggaatgagaacaggagaacattagagttggggatatgtatgtggggcaggaattttcatcggtttctgtgtcatggaccatgttggtagtttcatgaaacttatggactccttcccagaatactgtttttaaatacaaaaaataagaagtaaatgagattacaaaggaaatcagttgtattgaagtaatagctaccaaaatactaaactaaatttgtgatatataagaaaatacattttaatataggtaaaaagttggggataattgatttaacttgaattaaaaccaaattcccattaaagtacatggaccattcccaagatcatggaccctaagttaagaactcccagcctacggagatggttgagaaccataaggttgaaggaggtgagaaggtgagtggcaggcttcaggggcacatcctgcttaaggatggtggtggaaggggttgtttgggggctaagtttcttttagaatgtttgtggtagtcagggtccagtccaggtggtttttggaaaggtctttccaggtttttggaaagggcctgagagctagctgatgggaataagctatttttgaatttactttgggggagccattttaactatgttacttgagaaatagtcaattatattctgaaaatatttaatatttggttttccatgtttgagtgttgactaatggttgggctcatggagttaagatatagtgagaattttcatggttaatggtaatcttggccaataaagtctagttgaactgaatttccacgtaggagtttttaaattttttatttttttcttttcttttgagacagactttctctctgttgcccaggggagtgatcatggctcactgcagccttgacctccctggctcaagtgatcctctcacctttcagcctccccagt

SEQ ID NO: 63428 - DNA, 1047 bp, Homo sapiens
aaagggcttgaggtcagtgggaactaaccctttaaataccgtgctttttttaagtccaagttagggtacttgaaacttgtggtgtgggagaagagtatttgcagtttccctttatcagctgtgattctctgcttctaaagaatgtttttattgtgtgcacgatggttagtctactgaggttttctgtcctctctcctcttcctgtgatgtgtctatgaacaacacccttttccatacatttttatgtgcatctttgagtatttccttgtgataaattcttaaagagaattactgaatcagaggataaaacatttttgtgactgttactgaaaacttattctggtatatactttcattggtaaggaaataataccagtgtattttaagattaaagaaaaccttgagttattgggaaattttgctgatttcttttaaatactgttgttttctgcttccacttatgatacatgagatgagaggaaggtttcttttgtatttaaggtgtctcaacaagcagcaaagtgtattccagcaatggtgtgtcctgaactgacagaacaaatccggagagagatagctgcctctcttcatcagagaaagggggattttgcttgctattttctgactgaccttgtaacatttacattgccagcaggtaactccaaaatctaacgtaaaaagacttttttattttattatagttacatttgtgtatgtaggtgaaaaatgtttctgttagaaagcacataacatagctactgtatgtgcatcttaaattacttgactgtcttatatatgctggaagtgagcatacagaggattacttgttaggaaatgcgtctgctatctgagaggaagacagcagttgatagtaacggatttctttgtggacctcagattattttttaaaaatctgttgtactcttttatttttctctttggttttattttagaatatcctttaaaaaaatctcctttgaaaaattttcccttttcatgcttgtgtgttatttgaaattagatagctatattggttacctggtatta

SEQ ID NO: 63429 - DNA, 1688 bp, Homo sapiens
atttattttttatttttattttttgagacagggtcttactctatcgcctaggctggagtgcggtggcaggatcacggctcattgcagccttggcctccccaggctcaaacagttctctcaccgtagcctcctgagtagctgggacacaggtgtctgctgccttgtctgattaatttttgtatattttttgtatagagacagggttttgccgtgttgcccaggctgggctcagaatcctgagttcaagcagtatgctggcctcagcctcccaaagtgctggaattataggcgtgagccattgcacccggcccagaaaagaaatattttatatcacacatgttacactggtatattaagaaaaagctatctgataaccttcaatggaaagggagttattttagagaaagttactagtaggtaattaataagtgtaattaagtataagttaagtgtaagttatgaaacaaaagatcttttaagtttgcattttctttgtagatattgaagatttgcccccaacagtccaagaaaaattatttgatgaggtgcttgatagagacgttcaaaaaggtaagcatggaattaatgagtataatttacctttcatctgatcaagtaagttttgtttagtaaggcatggtgtagtttggtgtgtagtcaacttgctttatttttattttaaattaaagacgtaaagtcctgaagttcagtgttatattgtatggttcactgttacagagtgaacaaataaagatacaaaaattttaaaaccttggttctccgcttcctgttccagaatgtatatatttctatatgaaacactttttagaaaataaaactgtaaagaatttaaaagtttattaaattattctagagacagaagatgtttcaagtactcaaaagtttatatttcaattggtcaattttatttaggtgtttattggtaaattacatataaaccattttatagctagaaaataggttcttctccccatgagtattctctaatgacataggtatggaaatgaacatgtatttaaatccatcgtacagaattagaagaagaatctccaattattaactggtccttggaattggctacacgtttggacagtcgactgtatgcactttggaaccggactgcaggagactgcctacttgattcagttctacaagctacctggggcatctatgacaaggactcagtgcttcggaaagccctgcatgacagcctgcatgactgttcacattggtgagctggcattctgccctgtttcaacccaggagtgcatttgctggattatttccttgtagtggtgggatactttttatgtcagttatattttctatggaaactggaggaaaaacagttcattttggacattaaaatactttgaacacgtccatggtttctgtttttgtttttcccccaagaaatgagataaaagcaagaatcaatggtttttatacatttttttgctaaattttaaaatagaaacatttgaagctttaaaatgcaagcatttattgtttctataagacacaggcagtatatttgaacatttcaaatgcagcatttcaagttatatatagtagccttaaatattgataaggccgttgctcatctttttagggattgattgactgattgattgattgatccatcgatggaagcagggtctggctca

SEQ ID NO: 63430 - DNA, 1035 bp, Homo sapiens
taaaatataatgttccagaggtttaactcagtttaaaacatttttcatactccacgtaactgaggatgtttaatcataattccaaatgttttaaaattaaaatatgtatattcttttataatcgctaagataaatgtgtcttgaaaattttggcaacagtgatgaaatacattgttttgaaaagttcaaggagaaatatcagagaaattgtcaatactgaaagttatatgcagttagaaatttcttggtgcctaaaataactttataaataagacagctaagccagccagaaattcaatggtgattgcactcaaaactcttcaaagaccactgaagaagggaggttcaatgaaatatactttaaaactaaacatgttaaaatgttcatcctcaccaccccaagacctaaactctgatactaccagagtctccataagaacagacaagcaaaccaaatccagcaatatatgaccaaatggtacaggaataccagtttggtttaacattcaaaactcaattccatgttcatggattggaaggctcaatattgtcaagctggcaataccaccatcaccccaattaaatctacagattcaatgcaatcccaatcataatcccagctgtcttttttacaaaaatcgataaagctgtatcctaaaatgtatatggaaatccaaaggactcaaaatagtcaaaacaatgttgaaaaagaaatacaaagtcaaatgacttacagtccagatttcaaaatgtattacaaagatatgatcatccagacagtctggtaatgacataacgatagcccagtggaaaaataaatcaatagaaaaatattaagagtccagaaacaaacccttacttttatggtcaactaattttcgacaaaattgccaaggcaatagaatgtagaaagggtttttttcaattaaaggtaccgaaacaactgggtatccacatgcaaaaaggtgaatttaggacatctcacactttaaacaaaaatgacctcaaaatgtaaaacaaaaatgacctaaatgt

SEQ ID NO: 63431 - DNA, 1046 bp, Homo sapiens
atttcccacctgttgtttatacaagtgatcaagtaggtggtgtactatacattgatagagaaatgtagtgtctttgtatacaacatttcagatgactttttttttttttttttgtaaactaattgtggacagtggaaaataaccagtctcatcattagcgtttgaagtttgaaaatttggttgtcggtaaatcaaattctgactaaagatgttaaaggatgttacaaggtatctgctagtggaagagggaggcatttttcattagaaaaatacattaccaaccagacaaaataaaattattaattgtttcacagactgcttaaagactgcattaaataaaaatgatcagaactttaaatgttttatttatagaagactatttatttatttttttactatcctgcttttttaggttttacacacgctggaaagattgggaatcatggtattctcagagctttggtttacatttttccttgagagaagaacagtggcaagaagactgggcatttatactctctcttgctagtcaggtgaggatgcttcaagtcttgttgcttctatgagaaaagtaagcatgtagtctaaactggtttatttgagcaaaccatgttgggggcaatgtggtcaaagaaaagaatgcttgacgtggtatcatcagtcaacttgggttctagtgatgactgctgtgtatcaaataaatagcatcgcaagtatagatgagcatcgcaagtatagattagcatcgcaagtcctcactgcagagcaggaagagtaacgtgtttttatatcgaatgattaaaaacatcaaaaagtgaaagctgtgctatgacggttacatacagtagatagtcttgggattgctctccgttcctgcagcataggcttgatgcctatggtacctatccaggtgagctctgttctgtctctggggacacttaagattactggtgtaggtacttgcattgctgttgctgatctgtcaggccctgaggaaccagttgtcaatcttcataatgctccctgtggtgaggcaatacctgtgt

SEQ ID NO: 63432 - DNA, 1052 bp, Homo sapiens
ttcattaataaaaagacgttagcaaacttgcaaaacttcattcccacattaatcagaaatcattcctattgatggtaattagttcagagtaagctaaactacccttttcctttgcctacatgacacaggtattgcctcaccacagggagcattatgaagattgacaactggttcctcagggcctgacagatcagcaacagcaatgcaagtacctacaccagtaatcttaagtgtccccagagacagaacagagctcacctggataggtaccataggcatcaagcctatgctgcaggaacggagagcaatcccaagactatctactgtatgtaaccgtcatagcacagctttcactttttgatgtttttaatcattcgatataaaaacacgttactcttcctgctctgcagtgaggacttgcgatgctaatctatacttgcgatgctcatctatacttgcgatgctatttatttgatacacagcagtcatcactagaacccaagttgactgatgataccacgtcaagcattcttttctttgaccacattgcccccaacatggtttgctcaaataaaccagtttagactacatgcttacttttctcatagaagcaacaagacttgaagcatcctcacctgactagcaagagagagtataaatgcccagtcttcttgccactgttcttctctcaaggaaaaatgtaaaccaaagctctgagaataccatgattcccaatctttccagcgtgtgtaaaacctaaaaaagcaggatagtaaaaaaataaataaatagtcttctataaataaaacatttaaagttctgatcatttttatttaatgcagtctttaagcagtctgtgaaacaattaataattttattttgtctggttggtaatgtatttttctaatgaaaaatgcctccctcttccactagcagataccttgtaacatcctttaacatctttagtcagaatttgatttaccgacaaccaaattttcaaacttcaaacgctaatgatgagactggttattttccactgtccacaattagtt

SEQ ID NO: 63433 - DNA, 1094 bp, Homo sapiens
tttgacaatcttttctttcttaaaaaccaactgcgatagtatactgaaggggaggtagtattgttttttacacatcagttttccaggagtggtaataaatgttttaagtttttgttttgtttcgtacagcctggagcaagcttggagcagacgcacatttttgtactggcacatattcttagacgaccaattatagtttatggagtaaaatattacaagagtttccggggagaaactttaggatatactcggtttcaaggtaagccattattcaggaacgttttacaagtttctttgaacggaatggctcagatgtcaggaaggagcagtggacaggggaatgtgaacaagggcagtgagggagtggctctttcttcctgtgactgttgggattttcttccctctctttccaggtgtttatctgcctttgttgtgggaacagagtttttgttggaaaagtccgattgctctgggttatacgaggggccacttctctgctttggttgccatggaaaatgatggctatggcaaccgaggtgctggtgctaatctcaataccgatgatgatgtcaccatcacatttttgcctctggttgacagtgaaaggaagctactccatgtgcacttcctttctgctcaggaggtaagcagtttctcctatgaactatttctagtagtgaccttgtaccagaaacagcctgaagtgcctttcaggtgtggttttatctgcactatcacttaatttctgaatgtgatggtagtaattgctgaaggtactagctatactttgaaatttaccttttcaaaactgctgtatggggacacatcaaggaacttaaggtggtgatgggttttaagaagaaaaagtaaagatgaggtttgtgatttaaatatggcattttagggaatgagaagtgagtttttatctgaaagcagagttccaagaattgcaaggccagtgtggtttaagaggggaagcaacagggaaagagagagggtaggcggcagggggagggaggaagggagaagaggtcagagaggatagggatgggggggagttcattgaaggctttttaaagctttgggttttactc

SEQ ID NO: 63434 - DNA, 5833 bp, Homo sapiens
gggcatcacttgagctcaagagtttgagaccagcctgggcagtctggcaaaaccgcatctctacaaaaaaatacaaaaactagctaggcgtggtggctcatgcctgtggtcgccactacttgggtgtctgaggtgggatcacttgagcccagaaggtcggtcaaggtgagccatgttcatgtcactgggctcctgtctcttatgaaaaggccagaagtagaagagccaagagcttggcaactctgccctgaacttacaaggccctatttctgtgtgttccttagatatccgccaggcatcgtgggtgtggctccaggaggacttcctgcagccatggaagggatcatccctggaggcatcccagtgactcacaacctcccgacagtggcacatccttcccaagcgccctctcccaaccagcccacaaaacacggggacaatcgagagcaccccaacgagcaatagcagagaatgccagaaggtaatcactcagatacacttgggaccaagagacagtgaaaaatagatgaactaagagaaaaagaatcggatggtctttgtaactgattctggacatatgcatcattgatgttgcagtgttgaaactacaagagctagaaaactgaagatgtcgtctgcttacggaagcgctgaaagactaggatgtgatttattaacgaccaacttctgttattgtgtgttaagtttttcatctgtgcatcaaatcacaaaaagaataaatagagctttttcctttatcagtcccttgggcacagcaggtcctgaacaccctgctctacaatgttgcatcaagagttcaaacaacaaaataaaaaatattaagaggaaatccccatcctgtgacttgagtcccttaagtctacaggggctggtgacctctttttgctaataggaaaatcacattactacaaaatggggagaaaactgtttgcctgtggtagacacctgcacgcataggattgaagacagtacaggctgctgtacagagaagcgcctctcacatctgaactgcatactgagcgggcaagtcggttgtaagttcagtaaaaccctctgatgatgcaaaaaaaaaaaaaaaagtattaagtttcacaagctgtttgtactcaaatatattttctcagtttcagatcctctgctattttattgagtggaaagtcttgagctaaaagggttcaagaagaataatgttgcatttccttatgtctcaggaaacactttttatggtaacttgtcagattgtctatgaacaaacccacttttttagacattgataaagtcttcttttcttcacgtgatattttatacaagaacacttcagatgtattagatgtgactgattttaacaaatcctattagatttgtatcaactagttacatgttctattcatagtcttttgtgaatcattgcctttttgtttaaaaagatggcctattttgagcctttgtataggtacattcctgtttttgtgacaaaagaaaaactttaaaattgtcccaaacagaaaaataatggctatcagaagtatgttttgttttagtgtgagttaccgttactgtatttgtttattgtaaaggtggacatttagcgttcagtgcagttttcaataaaaagtaattaaaatttgttaagttctgaaattcaagtacatctcactaatgtaaatgttctctacttgagatgtttaaggcaattgcattgtcaattagccaatttccagctcttgttactacagggttccataaccagactcaagaccgctgacaattaattacctgtgataacaaaaagtttaattgaaaaatcaaaacctcacacaagtccatcattatcacgtcatgccatccttaagatgcaatggtgggttagtgctaaatcaattcaaaaaaaaacaaagttgctcaacttttagagttctgactttaatctaccccaaagcaaaatgacctggacctggttcaagggagggaagtgaaccttgaaactgttttgccaataacctaacaaacaaaatgatatttacaaagaagtgttgcaaatagtcccatgagttaagagcttgatttaatggatcttctttttaaatagaattaaacctttatactaaaagtatttgcaagtgtcaattaagtccaacaattccaggtatgaaactccctctgagctcttccttatacttcccttcccaattaaaacaaaacaagaaaatcatggtgtcttaaagcctttggcttgcctggccttgtctgctcactcattttaaggtggtggccccatcccaactctaccataaaagtgtctattaacacaagctcacatggagagagacggcgctcatagttactgacctattaccccagggaacaaaaaggtagtttaacgtcttcgtaaccactcatcaaagaggcaatgaaatatgcgtgaaaaggaggccaagcgcacacagaatatcttaccttcacgaatatgtgaagaagtctgggacacgatgaacctaagagtcaaaaacataaaaaggcaggtctgaatccatggtccacctgggttttaattattagatcttggtcgcccaaacaaaaatttatatatatatatataaatttgaccccaaggaagaacaagtcaaaacaaaatgccacgctctgtttgctctagaaaaagaaccatcaagtccacagagtgcaggtatgacttactctccagagtcagtcattaatgtctgtcacctagccacgtataatcatctttgaaaaaggactatattctatcttgggacaataattatggctgttttaatagttcaagagcataatatagcattgatttaccaaaatttttggcctttaacagccagtctatgaaaaccatttagagccccattcctgtctgtagcctaggaaatggaaccatctttaattctttcccacagggaagaatgctgcacctatcacactatgtggtcagggtcactgattgataataaataaataaataatagagcgctcaggggaaacaacactcaccagaccacaacacacagtagaagctaagtgctgagcgtgtactctggacaacgctggctgcaatgcagactgcaatggctacatgcttttccctctaacaattctctttggctttttcaattgggagggcagattttgcttaacaggcaactagaacaggatctctgcccactaaaaaattatccctatacatagagaaattactacagatgctaagtagtcagaatgctaacattttctacaaacttgattacttattggccaaaatgaaagcaaacagccaatttttaacaacacattcaccacttgaaacaaacagcagcatttacattatatcaaagattcatttctacagaatcgtactaaaaaatcatttttcctgcaagatttagcatgcagcaaaaaatgatcttttcatcctgggaacacctttttactgagttttcggggggaaagaactaaagacatgacagttttgtgggtatttttctatttttagtattctggcagcaaatttgaggttgtacacatttcattatcaactaaacaaaacaagaagcaagcaaatactttaaggttttcacagcctttttcatcacagggaaggaaaaaactgtgtgtgtgtgtgtgtgtgtgtgtgtgtgtgcgcgcgcgcgcgtgcgtgtgtcgtctttccaaattcctggccacatcaatagtctagaaagtgcttatcaggacaccaaatatttctgtgttcctgagataggtctgaaatttttacccagtattgaatgtatacctgaagtggtcaaataatacttcttataaaaaagtttttctacctaagattatagttttaactttaaattaaagaatggccacaattaaccaacatgcaaaaattctcagactaaacactgagaaattcttcatacaatgcatttgccaccttattgcatttttaaaatctttattctgtagtgaattggtattcccaatctgcctaagcaaaggcatgcccttctaacaagatttgcttagagcagaggtgatagaaggaagaatccgaagaccctctggcatggcaatctgggagcagcacattgttgatggagtccaagtgagcacatttcacacaattcatttagtgacaagtgggcttgctcccttttcatccaggaaaaaaactactcacagaccactgcccagaatctggaataagaaccctcattttaaggtattcttcccaacaaataaatatctaaatattgaaagggggcatatcagaaaacttaaagacacaataaccaaaaccaaaaccctcttcaaaacaagtaagcaatgtctgtatttagttcactctaaaacattcttagcttttcttgcagtttgttcctaaaagatttgattgggcacaagaggaacgaaattattaataaaataaaagcttatttttgttttgctgtggataatcggtacaaaacgtttccagatctgagacttagatggatcttttaaggtgaaagtagaatgccaggttctactgaaataatatctgaaaggaacaaagagccatttgccatgtgctttttctaagtgcccatgctggaaaaaattttctcaataatatgaagatgctggtacaacttttcctattaaacaatgtcttacacaaccacatgcgttacatttatagacagatttacaatttggaaggaaaaaaagttctgtcttaataaaattagttttttttacaaactgtagtccaactaaagttctctgtctcctcacgcagcagaggcattatctccataaggtgtgtgtggtccaggaaaacacttccccgagcagatcctgccagatttggttcattccatgatgtcgactctgcttggagcaccacactaactttagggtcattacagatctgatgccttggtcttctgctgtttgattttttttttcattcatcttcatcatcctcatcttcctctccatcagacagggatgtacacggccggatctgtcggtagcggtcaagccatttttctaccatctgagtgaccagggggtgatttcgccgccgagaactcttctgcatggcaaccagaactcccccctccgtcacacagcagtccagccactccctgagcagtttttcttgctgttcctcattacctagcttttggaggaatatgaagacaaagggaaaatcatacaacagatcagagacttggtaggaatgtgacatggaaacctacagctggtatgctaactcatgaaaaggccaaagcaatcaacttttcacatggttttgacctcttggaagttttgtgattaaagtccagtttgctctggttaaatttaaaaagacataaatgggaaatttctcagaaaaaaactaaagaggagcacactagagggtaatttgttagataaaataaaaaacaaatgtcctaataaactgatcctggcaagccacagcttcaaacacatgacaaggtaagtttacttagtcaattatgtacaagctgaaattatacaagttacggtctatgaactttttttcttcatgttgtgattataaacgttttataattactagtatattaaataaaagaccaatacttttataagaatactggctttctgaaagagcgttgtttttgtaccttctcaccacctcccctgtctggtctacagcaccctttcactccccttcatctacaatacctggtgttcctgctcctgccatgcaccagaccccaaatgttcctcttctgggtaaactggccattggtttacc

SEQ ID NO: 63435 - DNA, 2131 bp, Homo sapiens
ttttaaatttaaccagagcaaactggactttaatcacaaaacttccaagaggtcaaaaccatgtgaaaagttgattgctttggccttttcatgagttagcataccagctgtaggtttccatgtcacattcctaccaagtctctgatctgttgtatgattttccctttgtcttcatattcctccaaaagctaggtaatgaggaacagcaagaaaaactgctcagggagtggctggactgctgtgtgacggaggggggagttctggttgccatgcagaagagttctcggcggcgaaatcaccccctggtcactcagatggtagaaaaatggcttgaccgctaccgacagatccggccgtgtacatccctgtctgatggagaggaagatgaggatgatgaagatgaatgaaaaaaaaaatcaaacagcagaagaccaaggcatcagatctgtaatgaccctaaagttagtgtggtgctccaagcagagtcgacatcatggaatgaaccaaatctggcaggatctgctcggggaagtgttttcctggaccacacacaccttatggagataatgcctctgctgcgtgaggagacagagaactttagttggactacagtttgtaaaaaaaactaattttattaagacagaactttttttccttccaaattgtaaatctgtctataaatgtaacgcatgtggttgtgtaagacattgtttaataggaaaagttgtaccagcatcttcatattattgagaaaattttttccagcatgggcacttagaaaaagcacatggcaaatggctctttgttcctttcagatattatttcagtagaacctggcattctactttcaccttaaaagatccatctaagtctcagatctggaaacgttttgtaccgattatccacagcaaaacaaaaataagcttttattttattaataatttcgttcctcttgtgcccaatcaaatcttttaggaacaaactgcaagaaaagctaagaatgttttagagtgaactaaatacagacattgcttacttgttttgaagagggttttggttttggttattgtgtctttaagttttctgatatgccccctttcaatatttagatatttatttgttgggaagaataccttaaaatgagggttcttattccagattctgggcagtggtctgtgagtagtttttttcctggatgaaaagggagcaagcccacttgtcactaaatgaattgtgtgaaatgtgctcacttggactccatcaacaatgtgctgctcccagattgccatgccagagggtcttcggattcttccttctatcacctctgctctaagcaaatcttgttagaagggcatgcctttgcttaggcagattgggaataccaattcactacagaataaagattttaaaaatgcaataaggtggcaaatgcattgtatgaagaatttctcagtgtttagtctgagaatttttgcatgttggttaattgtggccattctttaatttaaagttaaaactataatcttaggtagaaaaacttttttataagaagtattatttgaccacttcaggtatacattcaatactgggtaaaaatttcagacctatctcaggaacacagaaatatttggtgtcctgataagcactttctagactattgatgtggccaggaatttggaaagacgacacacgcacgcgcgcgcgcgcacacacacacacacacacacacacacacacagttttttccttccctgtgatgaaaaaggctgtgaaaaccttaaagtatttgcttgcttcttgttttgtttagttgataatgaaatgtgtacaacctcaaatttgctgccagaatactaaaaatagaaaaatacccacaaaactgtcatgtctttagttctttccccccgaaaactcagtaaaaaggtgttcccaggatgaaaagatcattttttgctgcatgctaaatcttgcaggaaaaatgattttttagtacgattctgtagaaatgaatctttgatataatgtaaatgctgctgtttgtttcaagtggtgaatgtgttgttaaaaattggctgtttgctttcattttggccaataagtaatcaagtttgtagaaaatgttagcattctg

SEQ ID NO: 63436 - DNA, 1051 bp, Homo sapiens
caaatacttttagtataaaggtttaattctatttaaaaagaagatccattaaatcaagctcttaactcatgggactatttgcaacacttctttgtaaatatcattttgtttgttaggttattggcaaaacagtttcaaggttcacttccctcccttgaaccaggtccaggtcattttgctttggggtagattaaagtcagaactctaaaagttgagcaactttgtttttttttgaattgatttagcactaacccaccattgcatcttaaggatggcatgacgtgataatgatggacttgtgtgaggttttgatttttcaattaaactttttgttatcacaggtaattaattgtcagcggtcttgagtctggttatggaaccctgtagtaacaagagctggaaattggctaattgacaatgcaattgccttaaacatctcaagtagagaacatttacattagtgagatgtacttgaatttcagaacttaacaaattttaattactttttattgaaaactgcactgaacgctaaatgtccacctttacaataaacaaatacagtaacggtaactcacactaaaacaaaacatacttctgatagccattatttttctgtttgggacaattttaaagtttttcttttgtcacaaaaacaggaatgtacctatacaaaggctcaaaataggccatctttttaaacaaaaaggcaatgattcacaaaagactatgaatagaacatgtaactagttgatacaaatctaataggatttgttaaaatcagtcacatctaatacatctgaagtgttcttgtataaaatatcacgtgaagaaaagaagactttatcaatgtctaaaaaagtgggtttgttcatagacaatctgacaagttaccataaaaagtgtttcctgagacataaggaaatgcaacattattcttcttgaacccttttagctcaagactttccactcaataaaatagcagaggatctgaaactgagaaaatatatttgagtacaaacagcttgtgaaacttaatacttttttttttttt

SEQ ID NO: 63437 - DNA, 3461 bp, Homo sapiens
cgggggagcaggtctcttctgtagggactgggttttgattaagtcagtagcaggattaagtcattgggtcatcagaaaatctcatggataaagttcaaggggtttgtgaactttaaaaaaaaaaaaaaaaaaaacaaagaaatagccgtcggcacggttcaaatctgggcttggtgctctgggctgcttttccacaggccctccaggccctggatctgcagagtgtgagccccactgattgaagcatgttcgtgcacagacgccatgagggggatggaggctgcaggaacgggggaaggcaggcgggggtcctgtgaagtgtgagctcccagcagttgcatgctggggtcctcagtttcatgttgccagtgcgtcagagagccatctctcactccgtccctgccaccgtccagtcctgcctgctgtaaagggtgacactgaggaggagaggcgtgatggttcgtgccttgctatactagttgtcctgcagctgtccctgatcagactggccttattcaacctttgttctaaactacggcagttgtcctagccaggccatcggttagatggagctgctgcaggaggagccatccagcattgaggtacccctggaacacaggctgcctgctcggaaatgcgcatctttgtccttctcctgcctgcaccttggagccatggctttaaagattccttctgtgatctccaagagaaccagtcgagcatcaacactaaccattttgttttcaaaatgctgaaaactgctctgggaagctggaggtgctatcgagggggaccccatgggtttatgaaatgacagccgttggggagtgggagacacctcctcatcctgtgacatagctggcgggaggcccaggctgcataatgcagatgggcgcgaggccccaccagtgggacaggtccaggtctgatggtcatgtgccctgcctcccgcccagaacacagtagcatgtggccagtctgcactcgggccagcctgcagggagccattgtgctcatgtcaccctttgcaggagcgagcccagcaatgaggaggcaggacattactccctgtgacattgagagcaagtttttcaaacacaaagctcatgttaagaagcctgcagtgcacacaagaagtggggagaggggtgggaacggaggacacgggtggtgatgggaggggcatgtgggcttgtcagaacactctgtgtttgaaaatgtcaataacaaggaagggttttgttttgtttttaacaaaaatcctgctgtacccaatataagcagcaagcactgcggtcctcacctgtcctacaccggccatggtggcccctcgcgggcagtgctcgcctcaggcctcactaagctttgggcacacggtttctctggcagcagctaccagcggggatgccaagcccggactcagctcagaagcaatggaggtggcagcgctggggcgcgggctgtggactcactcacctggacgctctgtttctgtacaggtcgcacggggcaggcggttgcagttcgagccaaggcctttggattcagcgtcatattttatgacccctacttgcaggatgggatcgagcggtccctgggcgtgcagagggtctacaccctgcaggatttgctgtatcagagcgactgcgtctccttgcactgcaatctcaacgaacataaccaccacctcatcaatgactttaccataaagcaggtaatttgaaaatagatgccatggaagcttctgtcgaaaggtggtagcacttgcttgtgggcacaagagggacacggagggcaacggaggtggtttctggatacactgttgagcagggaagaggccctgcaacaaaccagtgacaagccacgtgaagccccttcctcgggctgagccaggctaagcagagaaggacaggcgctagccaggacccagcttcagaagcttcccagaacctttaaagaggccagcagctcggcacagtccagcctttccaccgtgttgcttcctctcaggatcagcagcaacggccctggcttccagccgtcaccaacacttcccactcccttccctcaaactgcagcacacacattaaaccaccagaccaacaaaactagcttgcagctttcttctttaaaccttggtacaagagtcttccaccatgccagtgtgcctgtaaccggcttttctttccttccacagatgaggcagggagcattccttgtgaacgcagcccgtggcggcctggtggacgagaaagccttagcacaagccctcaaggagggcaggatacgaggggcagccctcgacgtgcatgagtcagagcccttcaggtgcgtgttgccccagccgcctaccaggagcccacagggcccagctccacacctgacccccacactttgaactcgaggcccttttcccaaacaggtccctgggcaggaaactccagagatgacatttacagtctctgttcttctaaggattgtgctgtattctaattgtaaaagggctggaagtttcccagaggtcatcagggaaaggagaggcagaaaattggtgggggtgtggcagtggttctggtcttcagacagacaggcatcatctctgccctggattacagcaggacaagccttcaatagaattgggctttttgatctaccaattatacggttcttacacaactttgataattacattcaaaaattcccagccttcataaaatatcatcacagatgttcctgtatccatgctatctatgtagctacttttctacatggccaagagctcccttgtgctgaggagggcagggagcgtatgcgacatttcccgcttactctgttttttctacatttttctagctttgctcagggtccgttgaaagatgccccgaatctcatctgcactcctcacactgcctggtacagtgagcaggcgtcactggagatgagggaggcagctgccaccgagatccgccgagccatcacaggtgagcccctccgtgcctctggcctgccaagggcagcctcagctccacagtgcagccggctcctgtcctgctggctacaggcagctctcgacaggtagaattcacttttagcatcaaatttatatgagttgggccctgtttatttacgtaagccctgaactaaacttcacagagggaaccattccctttagtcccagacattataaactcgggggtcggggggcacacagaggctgaaggtcagtgttgaagagctcaagcacttgggcctttggatgttctacatttttacaaatgcttatttccccacataagcagctacaggtgtaatgttgaacttactgtgatttgtaaaaataatatgattaattttaatcatcttaccctaggtcgcatcccagaaagcttaagaaattgtgtgaacaaggaattctttgtcacatcagcgccttggtcagtaatagaccagcaagcaattca

SEQ ID NO: 63438 - DNA, 1030 bp, Homo sapiens
catgagattttctgatgacccaatgacttaatcctgctactgacttaatcaaaacccagtccctacagaagagacctgctcccccgtcacagcgccccccccggccccccatgccgcttattttaaaagcgcagctcccacaggctgcctttccttcagtttctgtccatgcccccagccccaggctgccctctcttggcggcaccgtcccaccccgcctgctgcactgagcccgctgggcctgggggactcttgctcagtagaacccgaggccagcaaaagctcttagcccaggatggctgcagcagcgacagtcctgaaggctacagagacacctggaaagggaacaaggagagcacgacagtccctgtgctgaggatccagggtggtggcggcaggggttagtgtacagtctcgagaaaacagggcggcggcagggggctgcactgacctctatacaccgagagggtttttaaagttgaatgacaagggcacagctacaggaacgaccccaggaagaagtcccgtgacggctggagtcagaagcccctgaaacaagcacctccccagtgaggccccaccgtgtacccagggtgctcatgaccacccccaggctctgcagcctggccagagaccaccgaggccccaggaggggcttcagagatggagatgaagctgcatctccgagccatgaggcccagtggggcccggacagagggagcctggtgttcacacaccacatctgttttccaacaaagtcaaaacacggtgggtcctttcagaagatccccagcacccgacacttcaactcagactccaggcgtcgggcgaggccagacccaggagatcacagcctgtagcggggacagaaaggtgtgcactcctggaagcgtccagcaacttctctcttgttcaagtggcaccccaggtccagagcggggcttgtggggagaggagcacgggggcttcgtcctcggaggcgcggagctccaagcaagggctgagcagcagctgggagtctcccggaggc

SEQ ID NO: 63439 - DNA, 1021 bp, Homo sapiens
agtagatatttggtgggatacgtggtatctgccttttgggactccaagaaggcgcatgtgcacacggggccagtaatgttctggcctccgggagactcccagctgctgctcagcccttgcttggagctccgcgcctccgaggacgaagcccccgtgctcctctccccacaagccccgctctggacctggggtgccacttgaacaagagagaagttgctggacgcttccaggagtgcacacctttctgtccccgctacaggctgtgatctcctgggtctggcctcgcccgacgcctggagtctgagttgaagtgtcgggtgctggggatcttctgaaaggacccaccgtgttttgactttgttggaaaacagatgtggtgtgtgaacaccaggctccctctgtccgggccccactgggcctcatggctcggagatgcagcttcatctccatctctgaagcccctcctggggcctcggtggtctctggccaggctgcagagcctgggggtggtcatgagcaccctgggtacacggtggggcctcactggggaggtgcttgtttcaggggcttctgactccagccgtcacgggacttcttcctggggtcgttcctgtagctgtgcccttgtcattcaactttaaaaaccctctcggtgtatagaggtcagtgcagccccctgccgccgccctgttttctcgagactgtacactaacccctgccgccaccaccctggatcctcagcacagggactgtcgtgctctccttgttccctttccaggtgtctctgtagccttcaggactgtcgctgctgcagccatcctgggctaagagcttttgctggcctcgggttctactgagcaagagtcccccaggcccagcgggctcagtgcagcaggcggggtgggacggtgccgccaagagagggcagcctggggctgggggcatggacagaaactgaaggaaaggcagcctgtgggagctgcgcttttaaaataagcggcatggggggccggggggggcg

SEQ ID NO: 63440 - DNA, 1050 bp, Homo sapiens
acccacccactgtgctcaccccttccctcctggcaggtatccgcccccagatcatgaacggccccctgcacccccgccccctggtggcgctgctggacggccgcgactgcactgtggagatgcccatcctgaaggacctggccactgtggccttctgtgacgcgcagtcgacgcaggaaatccacgagaaggtgggcccaccctgcccggccggggcctgcactgaccttgggcagtttcctccccagcatccccccattagatcgccccaagtcaccggcaggccccagaacccctgttccctgctttcctgctgaactcctctgcctcaggttcaagggtgatagggccagggggccaggccaagtggtgccggtgggctgcacggggtggggctccgaccctgtgctctgttcccacgcaggttctaaacgaagccgtgggcgccatgatgtaccacaccatcaccctcaccagggaggacctggagaagttcaaggccctgagagtgatcgtgcggataggcagtggctatgacaacgtggacatcaaggctgccggcgagctcggtgagtgcgaggcagcgctggctgcctggagttgtccggagctctgtgggccctgctcgggtgggcttggagaagcagctggaactgggaccacggagcagccgcttctggctgtagcaaggtggctgcctccaggccgggctgtggagcaccttgcggccctgccttcacatgacacaggtaggatagtccctgctggcccttgtgtggggtctgcggggctgtgaggcatctctgccctcagagcaacacccagctggcacaggctcaatttggagacacccagtgccgcctccagaggggagaatgcgactggccacatgtcctctaaaccacccctgctgggtgcgtcccctaaatgacccctgccgtgtgtgtcccctaaactgcccctgccgtgtgcacagctctaggcccctgtccacatgggaacctgggcctcccgttctgggagggcagccttagcagcatgtggtccagg

SEQ ID NO: 63441 - DNA, 1012 bp, Homo sapiens
caagtcccactggccgagcacggccttccatgcagggctggtgcaggtgctctgggccgtccctccccagcaccgtgtatagtcttaacaggatgcagtcacggccccagtggagggggatttccttcctcgtctccgagcgtgtggctaacggaatatgagccttggtggtccagcaggagcccccccgtggctggggtcccagtcatcgtccccaccaagtggccagcttggggactactaagagcccttgaggaggttagggatggaaggcgaggccacacagatgaagttggcctttgtggaaggctcctgcttttgcctgtgggaccctgagcctgctgccttgtgctcaaaggccagtgatcccgggaatgtcacaccttcctggttgggttacccatggtgggtcaccaggctgggctcagcctggagcaatggcctggaccgtccagcctcagagggagggaggggatggggatgtaaggccgccgtcagggttgatctggatatctgaaaagttgatgagccccaaagttttaatctgaggctaaagagttctaatttgacaagagacattgccccttcctggcatctcggcggattgcacctctggaactcaggtagttgttctcttgtgtccagggtgtgggtcttgaagatgtgaggtttgggcagatggtcaggaggacctacgaaatccaaggatggatttgaagggggcagtttttgttggagaaaatgctgcttctctgtctctgaggtcttcggagcctgctgggtttgctgcacagaataaagagagaaaagaggccctgaggctctcgctgcatcctgggcgggccccgcagggtgtctgccctgtatgtgcacggggcgcaagcatgcgcgtctgtagtgtggcaggtaaggccttccaccaccctgctgaacgtctagatgcagccgcgctggtccagatgaagttgctagagaatttgtacttggacttgtgggaaggaccactggggcc

SEQ ID NO: 63442 - DNA, 2705 bp, Homo sapiens
tattgcctgtaatcccagcattttgggagaccgaggcaggtggatcacctgaggtcaggggttcgaagccagcctggccaacatcgcgaaaccctgtctctgctaaaaatacaaaattagccaggcatggtggcacatgcctgtagtctcagctatttgggaggctaaggcaggagaatcacttgaacctgggaggtggaggttgcagtgagcggagatcgtgccactgcattccagcctgggcaacaaaagtgaaactctgtctccaaaaaaaaaaaagccagagccagcctttgcctcctatgtcagaaatgatcatttgcagctgctttgctttggggtagaagcctcaaatcctgaaaccctttaccctggggcaggttgtcttgtgctgtaagcaacagaaacccatttagatcatttttaaataatgagaatttctgttggaaggatgtcggcttagctcacacagtgtctaggaagactggaaaatgggtctcagaaacactgcaggcagctttgtgtggcaggatcaatccagttccttcttggtgactgctcaggggaacatcccatttgccttgcatggtactgagccagaaggtcaactccaggcctgtctgcctgtatccgagaaagcagcagctccccacaatgaaatgtagcgttttccagctccggatccttccgccatcctccctgagatctacctgccttaggatctgtgagatccacgcactttgcttttcctgggtgtctggttactgttcacaaaagtccagcagtttggcctggtgttgtctttgtttttgactgagcatctctcatttcacaagtatttattgcagctgcagctctaagcaataccaggcccagggatgggcgtcagcactgccttgagctggtgcacagcacatcccggacggaggggcagggccgtcctggtgcacacgcaagcctgaaaccagatagtaattgataccaggggagccggcagggctttctgctctacacagttaatgtgggcaagctgtcaacagtaaggcactgatgtcatttccgtgatgtgtccagttgcagctggaattgtcctgaaatggacaaggcaggtttactggcgggagacggtagaaaggaaaaatagcgcatagagggcaccagggccctgtgaccctcgtccgcaagtgtctcctcatacctcgtggttgcgcaccgtggtacggggccaccctgagcgctgactcccgggctgtgaagtgggaagaacagcagcactgcaggactcttgtcagccttgtggtctgtacgcatggaaaaggccgtcagctgtgcatagcaactggaagccatggctttttagcataaagcccagttcttcggaagccctcattacgtactgcgccttgggctttctcctcgcaaattcccaatcctgccccactgggcctggggaccccacgtccctgaaagggtcgtgttccatcttaatgtatatgaatcttactctgtgtgtcagttacatcctaataggttaaaaacttgctcaaatggtcagaagcctgaaagaggcgtcaggaatcctgtgtgaggtaagatgggggatctgtttgcaccttcatctctccatatgagatcttccatatgagctcttccagaaacctctgccccaggctccagcaagcctgtagggcagcggctgctaggcaagggcttgaatttcagtccagattctctggtgtgtgggtggacagtttccttctgggactgaaggagcacttggaagatggtgctttcccttctagagcaaaccttggcattgtcccagctaagctctcatgcccagggcttgggggtctcctgtggcctccatatccctgcacctcatgcagggcacgcaagcatcccacccactcccaaccccccacctccagccgtcgtgcccggcatcttttcccagcatgagaacccgttggcttttctcttttcccgccttgccatgaaggacctgctgccaggattcgagcctcagaccttggacaggtctcgggccagcctcagccacgttctgcgtgcccggccatcagggagggtagagggtgggtttcaccaaggagaaaggcaacccgtgtcggggagggagccgatcgctaggcaacctggagtttgttaccctggtaacggatccatgcactgatgatgctgcggatggacatcttgtgacaatggcctctcaggctccccagacgcatcagcggctctggattcccaccttgcgcccagcgtggttttcctgtgtggctaccatttaacgaacagcttggatttcttataatcaggcactctctccgataaccatcctgccagcacccctgaaagtgaagttggggtgttcctcactgtgtgtgggcgaccgcctggggcatgagaccaggacttccaggccccacagggttgtgcgctcagacctcaagtaggggccagaagagtgtactgaaacagaaggaatcttgtggaatttggcagttgtaccattttcttagcagaaaacaggagcccaggtgggagccatgtgtgtcgggttcctcgtcaggtgacggtgctgttgcggatctcgcggatgagctgagggggtatccagctttgtgctgcacgcttcctgtccactcatacaggtcgtgggctggtgaggacacgggggtgttggc

SEQ ID NO: 63443 - DNA, 1053 bp, Homo sapiens
gacaacagcgtgagactccatctcaaaacaacaacaacaacaatttttagtctttggcgatgccctgaggctcatctcttccacagaggcttggaggatcggccacacgagtggggtatgcagaggcacaggcaggtgggggagtgagaaccccagggcgcatctgaccttggcgtgccggcaggaagagaacaagcagtcctcctggaagattccaccagaactgtttattggacaggggactcagacgatgtgtgtccccagccacagtggtggctgagagtgtccctatcctgtgcatgagatcctgaccacccgtccctgcagggaccgtccccgtgttgggaagcaggagggtatgtcgcagagcctcacccagtgggagccacaatccttattccttgctcctcaggcttggatgttgctccggcttctatcccccacatcctgtcctccctcccggagcccagggaccacccatgtgaggctgggccactggggaaatctcgcacacgtagcgcgtctcaccagaaatagaagcagagcctcacgtccttggctgcttcgctgtgggaatgccttctaaggcgccgtttttggtgatgtcccttcacggatctttcaggcccagtgagtcagcagtgtctgcattcacacaggctgggtggggttgttggatctgccccgggtggatggcacctgctccctcagggcaaaaattcaccccagaacatgagctgcacccggggttaggtgaaggtgacggagcctgaacactcaacaccagaggcagccaacaggacggtgtctgggcttccaaaaagccaccagtgcctaaaaacactttcaagcacctaacatcactcttggttttgtttttattttaaactccattacaaaccgggaaatagctgtcactttcctgtgttctgggcccgctgtgctcctccgttccgcatagcgcggacactgcagggtgcgggctgcagcttccccaggggctctgaggaacccgttgaagtgactgcacgtgcttgtctttctagggttgca

SEQ ID NO: 63444 - DNA, 1172 bp, Homo sapiens
cctcttagaggccagtgttaagggccaagttgacatagatccatttcttggatcaggtgtttgttttttcagttaattttttagagccaagtctcactctgtcacccaggctgaagtgcagtggcacactcatagctcactgcagccttgaactcctgggctcaagggatccacctgcctcagcctcctaagtagctgggactacaggcacgtggcaccacgcccagtaaattttgtagagatgggatttcactgtgtcgtccaggttaggacaaggtttcttatcaccggggccatgaatgcctgctgggccaataggacaccgtgaggaggaccgtgtgtccctgcatccagcttggggagtggggccagcacacacgtgttactatcctgtggcgtctcggtcttgcttggatgtgcccttctgttctccgccgttctgataacagttaccatgatgacgtctcttttaggctgcaagatctagagagacacccgggtgggaagagcgcatgcctcacgtgagaagcctcaggcccttggttcttgattttgtgtgcctggttgatagatcgaacaatcacattcctgcagtaaaagagagagaactttaagacctacctcagcctgccgaggcaagatcacctgtctgtttcctagggccaggcctgatgatgtctgtctttccagtgtccagagcttgttgagttgaaccaatccagcaggtggtttgcactgcggtggaccctggggttgcatgcttggtctctggtgtcagagagacctgagtttgagtcctgactccatcacttacttgctgtgtgaccccgggcaagttccccccgcctccgttacctgctggggaaacagcagcgcctacggcacagggttgtgtggagggtgcaagagaagtggccgtgaccatccttctaaatgggacaggctgtattccatggtcatgatgctcagcatatggtataaggagctaactgtttaccatccctttgttaccagaaacttgactccctgtgtgtttgggttcttggtgcataggtgattttattgctgcaataaagtattgaaaaccaattaagtaaaagaggctgacggcagcggtgcccgcacgagactattttacaacttcgggcgtttccagtctcaggtatttcccc

SEQ ID NO: 63445 - DNA, 1240 bp, Homo sapiens
ggaactgaatgttggcaccaactgcccagcgcaggccagtccattccccttccatccacagtgcttagagctgacctctggcctctcaacccaacacgtttccccactggggatttgcctattagatgctttttatatgaaggaataaatatgcctttgtgatgggttctagtgttttcctgtaaactgggctctgagcctgggatgctgtagaagttactagattttaagaaaaagttagagaagaaagaagagtggaggcggcatccagccagctgttgtgctgagaatgttcacttcctggctgtgagctgggcctgggcgcagcgctcttggcccttggcctgccggacagcagtcctcgcggatcactttcctcttgggttttaggaccactcgaaaaacgagagtgtgctgcaagcatgaggcttctccctctcccatctcagccttggctgccatagctaaggaggagggtgttattttgcttttgtggacattcaccctgggaaataaggtgagaaaattaagactgggtctgccaggctacaggctactcagggtccttttgcgggaggacgtgttgttcatttctctggaacactggtggaattggtccatctgattccaagggacaagccagcagccagggcggccatccagagggctcctggtcccggcactcatgggcagccatcccctcgggcagtgactcagtggtggcccctggaacttggcagtggcactcggctcgctgcaggttcatggaacatccagggcgtttgccctcctggttgctgctacttcctgtaccttggaggaaaagtcccttggggcactgggaagggtgggcggggcctcatggccttcctcagcctgatcgggacccaccaaagggtcccagaccccagtctcactgcaccctgaccatccccttccccgtcaccccgggtggtgccagagcctttttgtgaggtgcagggatccgggtacccagcgcacagtaggcgttctcaaactttcacacagtgagaagtcagactgagccatccatctctgggttgcctgtggcctttttagattcctgcagaatctcacccagccccgtgtgtgtccacactggacacgctgccagcccagcacccagcctcttgtgcggccggcgagtgagtgtgcagcagctggccgctctgccagattcctctggcaacaattcgtacttttctcttctctattttcc

SEQ ID NO: 63446 - DNA, 2953 bp, Homo sapiens
agatttgtgtgtcaggccagatctgctggggcagcagtgccctcctgttctttagttgaggtcgggttgatgtgtagatttcccattacggtggtaaaactcaactgtgtttcttggagaaagtcgcaagtcactcagaacagactgcagccttgagctcacgaggggtggccctttctgtagttcacactagggaactttggagaaggcaggaacgtttcatcaaatgctggctgtaaagtgtgcatcctccatttagaagggcgtgatcgtgtggaaacgtacctctcacgggtccgcacgccgtatcagaggcagtgattacccaccgtggagatgaaaatgtgtgtgtttgcatacttgtgggttaaacaaagcaagatgttgaaatccctcagaactcagtttcaaaaacagatttagtctctcatatcagaaaatacagttgggaattccgcgtgcttgaagggaaggatatatttccaagtccaggaaagggagagtgatggtaggtggttttcttcacaacatgtgccaggtgtgatttatggcgtgtgtttccttggacattgtggatgaagtcctaggtgggcgtcctcagagcaccatttacaatttttattttaactctagagtcttgaccacaaatttaaaatgtaaatcagttttcttcctttcaaacataattctttcctccccgccagcctcccctacgtcattcagaaaacagaatccttttcaaatgatttttttttttcctgaatagcttgtgaaaatcaggatgaaacaataagatctacctttttgaaaatagccctgaagcagctgtaggcggggaccgaggcgctggacctcacaaccctgcagagaccaccttaagtttctctgccatcgctgtgtggcccgtgtgtgctattaatattacctcctagagatgacctccaggcattttgcattttgtttccaagtggagactgagcaactggcctgattttctgctttgtcgtatagattctgattttgtctcatggatttttttgaagtctgatcacatcattatttgactttctcaaatacatgtgcggcaggagggacgtcagataatttttccgagggcctgtgcctgctctctcagtcaaacattctttctttgcaaccaactgatttgcatggcgatgacatttgttgctccagtaatttcatctgataatggccgggcttgcaaagcggatctgaaaacatattccttaattatgtgttgctaagtgacaggagggtttggtcataatcacagaaagattatctcctcacccaagtcgtggaaaggttttgccgaaggaggaacctgtaagattgccttttcttttcttttctttttcctgtttattttagacttgccttttaacaaaaacattcgccattatttgggtatggagtgaggggtattatataagttgtttgcagtgtgattgctaacacgatgttttacagaccggaggatattgatttttacttaatttgcgtggcagcgagccagtgccagggaagtctgcaggcagaagccagccagcaaatcaaatgtctctgttaaatgatccaccccatagctgcagtttccctcctcattccttatcgtatgctgattgtggcattatcccccacaccctgtcgggaagggggcaggggctggcgtccctggtagcgcttcagctgtgtacatggctgtacgttttgtacagtaggttccacagaatccgcagtcacatttggatctgtcggagccagcagggaaagtagacggtgtgtgtgtggaggataatgttgacatttcaggaaagcacaggctgggcagtcccgccggcctctggtccaggacgcggccatctggaaatccagtgttgcttgtttgggacgccgccagcctgaacgcatcttcgttctggtgccgcctaactcaagtgcttccctcccatcggagggacaaggaacgcccttctggaagttgactctcttctccccttcgggatgggcggtgttgcactgcttatagtggggtggtttggggtttggggattgttttcagtatctattttattttcggatgctttggctatttttaatgtatgtttgctttttctcagtccacgaactacctgccttatcttggtgggttttgtgcatacacacaataggctcctatttctagtccagtttgctggccaagcagtccagagtgacaacgtgaggaaggcgtatgctgcggggaccccagtgcggcccaccagccccggtgacacagacaaatgggggctccaggcccgcgtgagtggcagcacctggcaggtggtggggtcggctgtcgctctcaggctgacctggccggctatggcacaagtcgcggagccctccggcggtggctgcgagccagcaatctccccgtgtcacgtgctgtcacccgagccctgcctgcaccagatgcagcagggatcatcagaaacaacgaacgaatggggctgcggccattttcatatctttgtcttcacaaaatacagccaagcctgcagcctgcacagggctcagctcaggacacaccctgggggcaaagtttcagatgtgagaaacgcagtcccagcccaaagagccacaaaaagatctttctgagctttttccattttcttccagccgtttttcttgatgcaactggattaatgggggcacatgtgacccctgtctagttgcttagggtcactgcctgaggactccaggatggagggaggagcgcgtggtctgtgtggaggggctgttgaggaggctgatggttgtgacagttacctgtcaccagagctggtcactctcatggcttcttttcgtgtggcctcggtttccagcaactggaggtgtgaacgctgatctcctaggtagaaagcacctccatcaataattttagccctat

SEQ ID NO: 63447 - DNA, 1067 bp, Homo sapiens
ttgcagcttgggagggctggatagagcaagccaccggcttcatcagtctaacgagatgtcacatggaacaaagctttagggttttatttagctcctaatccgcatgctgagagagccctggtccatgtgagcacaccagccaggaagggggacctggcaggctggggacagcctcctctccgggactgagctgtaaggaacagacctctctggctatcgttggggagtgaggcaaagttaccgtgagtcttatgttttgtctgctaaggtttcggaggattaataattcaggccatgctttgaaacagaaaacccccagttggttgtccctgccgtctcggaagggttagcacacagccaggtctgtttttgatgtatgtaattgaagatttataaagaaaagcttctcctctgcctcatccgcagtcattttttttccaatgccagttcccagcaggcatataaatattggtcgttctcagagctgggatgctgctgggtggtacgagggcccctgggagaacgccgagtccctgcggcctctggggaggagaagctccctgacgtatggcacagcagaggggacttggtttgagccaaaccaccgaccacaggacgctgccctgcccgtggccgccgagccctacctgtaccgggaggccgtttataactcagtggctgcaagaaaggggtctactcctgacttcaccttctacgacagcagacaggcagtgatgtctggtcgcagccccctgctgccacgggagtactacagtgatccgtctggagctgctagggtacccaaagagcctcccctctatcgggacccaggagtcagccggccggtccccagctacggagtgcttggcagcagaacgtcatgggatccaatgcaaggccggtcacctgccctgcaggacgccggtcacctgtaccgggatcctggaggtaaaatgatccctcaggggcggcagacacagagcagggctgcatctcccgggcggtatggacgggagcagcccgacaccaggtatggggcggaggtgcctgcctaccccctcagccag

SEQ ID NO: 63448 - DNA, 1789 bp, Homo sapiens
ccacaacacttaacttgacagaagcagacaaaaatccagcacaggctgtccacatttaaaagcaggaaatgggtatgccataggccgatttttctgccctgtgtctgccagaaaaccgtgttacccgctaacttctgcagcctccctagggaagcgctcgctgtgggagacgtagagggcactgtggtggctccgtcctgggatgcagcaggcgctgaagagcctcctgagatgttatttccgctatcaccttcagagctgccctggccctttgtgttggtggaggcaggatcagggaatggaagcccaggcaggtgcaggacccccctggggaagctgttccttaagttccttcagttgggaacttaagttgcctcctgagaatgagctattccctgagaaggccttgagacaaacctggcagcccaccaagtgggcgggtgacaacacagttaagagggacacaccattgagccaaatggccctcatgttactgcaaccttcagactcactgatcccacctgttcttctttttctataaaagtgagaattagaccccagagtcatgttttctctctcatttcaagcagtttcctgcatgattattccaatgggaacatgaaatgcttgttggcagtttgtccaaagactgctccgtcggagggtacccactgatcatccccatcctggcctctcttcccagctcttctggaactgtctggatccatctctggaattgtctggatctctgtaggtctctgttgttaattgacaccttgtgtcgcacagggacttcagaattggctttgggtggacatcgcctctctccccgacacagctatgttacacaatcatcttatttttacttgacataatttctatagtgagggttttggcagaattaaaaaattaagcccgtgagatgtattactctaatgggtcccatctcacttttagtcaacatgagaatttttaagaaaagcagtcctttctaaaagactggagtgtggtgtgtgtgtgtgtgtgtgtgtggtgtttgtgtaaccagagtgtttggaaaagtgagtccagttacaggtgtttttacctagcgcaggaaaacatctgtcataatatttgtcaaatctcagagccaaggctgtgcgagtttgggtggtttccaagcagaacaggttgaaagttgatagaaatggaagctgggcctcctggttcaatgggaggctgatgctgccccaaagcgcatctgcccacatctgccctgctcctgcgatcaccccttggacaccagctcagtaacctctctgaagaatcattactggtttcttaggcgctaccgggtaaacattcttctatagagccctgtttacatttgagaacttgctgagctgaaaaccagatagcaaagaagctggtgagtcaacagagctacctcaccctgctacaaaaaagacttggcatgggggattttcccggaatgctccaagtttatccacccatctttgaggggtgtgcatgcaccatgagtggggtagcatagtactaacaccacataaggtcatgttgttcattacaacaaggggaggaaagaaattggcaaggtggcttaatcctgaggcgctggccaggcgcagtggctcatgcctgtaatcccagcaccttgggaggctgaggtgggtggatcacctgaggtcaggagtttgagaccagtctggccaacatggtgaagtagatagagtagagacatggtaggctctactaaaaatataaaaattagctgggtgtggtggtg

SEQ ID NO: 63449 - DNA, 1328 bp, Homo sapiens
ggagacaagctggtttctgtgaaacacatagatagttagaaagtctgggaatctcattctgcatcacctttgtcgcaggaggatgagaagtctgagaagatgctgccggggatgaggtggaagggagtttccccagtgggtctcttctgtgtcgcgggctcttctgctcttctcagtgggttgaacttgccatggtggaagcacatgtcagtgggatgtacccccaagaaaggtcatccatacgtataaggaacaaagacaggcgcctccagggtcagcaaggttacccaagtggtctagaagtccctctggctctttccttcttccagcagcctccttgcctggcaaacacccatcagagcctccaggatgagagagtgactttctctttccccgaggaaagaacataatccacagagtgttgacaaatggttttgtttggtatttaagatttatttgtttttgttctgagtagctgttttcttttcacctatctttgtacagatgcattataaaatcaggacttgttttgtttttgtttgtttttttaaagcactttgagcgcttcgtaaagaaacagagttgaagcctgcctataggtagtccacaaacagttctaataaataactttaaatagccccaaaatgtggattttaaaaatgggattcataatgttgctatacattataattatatgttgggatcaggcaattatgcacatttccagcaattatgtgattagctgtaattacattagctatgtaaatatacaatagtcaactagacatgccttaaaaccccaaagcacaaatgaacatacccaaacaatcttatgcaaaggtaaaggttcaggaaacagccaaggcaaagcttcacagacaaaagtgcggttctttgcaaggggtaaagtttcatgttttgccttatctgtccccggctttaagagaaactcagagtgggggacccctccccagggaacccctcaccccacctgttcctccaccgactctggggatggggttcatagactgccctcccgttctgcagctgtgaatcaggttcggtgttttatttctctgttgttactcatttctcaagcacaaacataagcgtctctttgcaccggtcagtttggtgatgggcggatgtcttcatactcaccacttttttctaatagcaacatgttaaggccactttgcttttatttggggggccagggatgtgtagtgcaactggagtctgtggctggggtttgggggttcatcaccgtcttctagtttggttctgcagctgcggttttcagctcctgcccctaccacagtgaatcg

SEQ ID NO: 63450 - DNA, 1036 bp, Homo sapiens
cacccatctcacaggtgctgccagagaggcgttgagcagtaggcagtttgcacccaggaacccgggcagtctgtttttttctgtttggccttctctcataccagcttgttggattcagctctttcttccacctgaaggccttgaacatctaacacacacaaacacacacacacacacacacacacacacacacacacacacacacacaccccctctagctttgaattctcaccatgtttctattctatcaactacttgtagaatgttctgtattgatatgcagagagcctgtcaaactgtttttttctccctccccactgcctacacctgacacagggacttctgcgtcccttaggtttgttttttttttctttctaaatgattaaaagcatgaagctgccatgttctgctgtgcttacccggtctgctcccaggcttgtaggaactttgtcttcctgctcttggtgtctggatacaccagctccttaaaattcgtcccctcccgcctgctacacaatgccaacatcaagccctggtcgtgggtccctaggctggaatcaggcaggcctctccagggtcccactccaggtactccgctggaatctgagcatcacccctgcacagatacttgtacaacctttccctgttttctaaggcctgtccagccccttcctctttgaaacttttcaaagcaagaaaaagtggcatggagcttgatccttctgtgtgcccagaatctgccgtggggattcactccgccaggctgtgtctctactcggagagcaggacacagacagtctttgggactccagccaaatgagctggaataatggtctttctagccaatgtaaaagccacattttaatttttttaatgtaactctttgagtttgctatttataattgttccttttttttctgatgcctgctatcaagcaatcctataataccatgtaagaattattacgaaggagccctctcgtaacacaggctgatcagaacaagattgtggtctcctcattctcaagtataatgga

SEQ ID NO: 63451 - DNA, 2613 bp, Homo sapiens
ctgacccctgcgcggctgttttggaaagcattgttgtaactcacctggcagcaggccttcgcagagcccctcgagtcgccacggtgtgcgtctgcatctcagtgtgagtgcgtttggggcaggtccaactggctgtcacttggtctctgccactggaatataatttattacacttcaaattggtcagtaaattggaatttatagccctaaagttaaaagcaagagatctgttggaatttgctgcttccagaaataactgacgattgtcttgtgtgcattcacttgctttctattatgagataagaagcaggaggcggctgagatgcacttggtgcagcctccattcccagtgctttgggaaaagagcaagtcccatgtgtccgcatggcaggttcccttatagaaagtagcagttaagtccccagtgagctgttgtcctgtgcccagagggtctccagagagtaaggattcttttctccttgtttcagggttcatagtggcgtcatgcacgcagactcctgcaagttcccctaagttcttagaggactgctttgccttttgatctgagagttgcaaagttccataaagaatggcccttgtggataagcacaaagtcaagagacagcgattggacagaatttgtgaaggtaagagcgtgtttggcggtttttaccaaacatacgtagtccctcactcaaatcttcgctggctgctcccttgagttggctgtgccactccccaagccagagtccctcctccgattccaacactgcataccattggcaccctctgctgggtgtccttggccgtgggcctggccttggcttaggacaaggcctggcttctggggcggggttggggactaggaggacagtttcagggctggtgggccctgaggtctatgtcttccatgtacctaaggttattttgcatataaaagatggtgttgattaggaccatcttttttcacttcctgaaatctcaggactttacctgttttggattaagatatttacaatgctgaattccctgatactatgagattcctgaagagcccagcattgcccctcgtggtgtgttcatgtccctggtatctttggaaatgtctggaagtgttctgttcatgaaaggaaaaataaacataattaaaatctaatggaaacctggggacaaaactctgaagtgttgattaagcactgcgctcttccagctagcgggtggtaagaaaccagcgtgtgggttcgggtttaggggtgagtgcacctgccagatggggtcagtgctacagggctgctctttgctcagggtgattgctggtactgccctacagggtggctctcggagggaagcgaagatggctccgcagccccctctgcacccttcacgcacacgctgaagtttagtagctgacccaccagtttgtggacaggaatatgcaacccacagggcttcccctgcagctgcccatatggaattgtctgtcctataagtagatgtggctcatgccacacggggtggggacatcatagacattctgctgagtgactccatggcctcacagaactctgcgctgcaagaacacaaaagcactgacattcctggggttcagtataaggagtttggcgttaaagggtttttttaaagtaaacattcacaaattataaaaacctacagagaggttggtaggatggtacagtgaacaccaatattccattcagttttccagattcttttgaggggagataaagatagagatatacatataaatagacactgtgtgagtagatgatggattttcttccagaaccatctgaaaaaattcaggggcagcactttactctggactacctatggcatggcaccttttatccaatttcgtactgctcccagtaccggaatgaaccccaggaatctaacctcagggacagtattgtctagtataggctgcatattcgcatttcctccacgtctctttgcctgtgcaatagataagggtcacgcattgtgtttagttgttacatctctctagtctccttagtctaaaattatcccctgggcttttttgactttcagagacattggacttactgaagagcccaggccccattgatttgtagactattccacagtataggttcaccagattgtatggggagttgtaaaatttactcttgacttccactgtaaaggtgcttgattgaggttactgagtacttgcttctggaacacgctcgtgactcagctttccaaggttactagcaggaatgcctctggggctgactccaccccctgcacccaggattctccagggatgttgcatcagaaactagaatgggattgaagagctagcagcgtttcctctgtgtgtttccatggctgtataaacctgacttgggcaaaaccattgtctgcttgcagaccctctgtcccatccagacaggtgctgaaggatggttcaccaaccttcccacccccttcatgtgtaataggaaattttcagccaattttttataacagaagtttgcattaccttgtctatgcatggtgttccagatacatttgcagttatatattttaaatttctcaataactatcaacgcagacaggccaaaa

SEQ ID NO: 63452 - DNA, 2430 bp, Homo sapiens
cacccacgattccgcccctggcatgatttgaggaacaatttcagcagaagtggaatagtgaaacacgttccctctgcttttgttccttccttatttgtgcccgtattgtttggtgtttaggggggaaaaattgatttatgagtggagcctggttttcatagcaggcatcaccaagagagctgtgatgtcagggagcccagagccagcgtggatcgggggtgctggcttgctcagcatggagaccagctggaggccgctgtgtgcagctcagctctaaggagggcctgtggctgtcattggaagatggttatgttaattaagtcctcgtaaatagcttgctccttgggagggctaaggaggaaaatgtcacatttcatacattctttttgcacaagagatatcgggggagaggattgaggctacacaagtcaatggtcactgcccagaccagacccagaggctggtggccttgggagccaagatggccagccctaaacatgggtcggtgccactggcctggggtgtgcagaaaggaacccacagaaggtccagaacagagtgacccccctcccccacccccacccccaaaaaagccagacatgggagtcagcctctttttttttttttaatagtggaatattggcgtttgtggaagctgatggctgatctttcctttgattgcatgattgagattctacttatcaatttttcaggaagccatctaattatacaaattaaaattcaaaggaaagcaaaaggaatgattacgcctcactcgggggttgggggaggagggtgtgaaaccccccttgcctcagattataatgctgtcatttttcatctccgaggtcttcacaaaaattaactgattaattctcttccccccttggatgacgcagctgatgtggaaatctgtttttacaacagagtcaaggaggggccagactgcagtttgaccatcagagcttgcgcctgagcaaatgacaattgctggcccgagcctccctggtcagcctcacctagagtcacttgtgggtggggggggggggggtggggatggacaaaagctcagatcaataggtttggccccccgcccccactccaataactcttaagttggctatagttagggactctttttttgtgtggttacctttcagaaagcccagcactggctaggcgcagtggctcacacctgtaatcccagcactttgggaggctgaggtgggtggatcacttgagttcaggagttcgagaccagtctgggcaacatggtgtgaaaccccatctcttcaaaaaatacaaaaattagccaggcatgttggcacatgcctgtagtaccacctattaaggaggtgaggtgggaggattgcttgagcctgggaggttgaggctgcagtgagccatgagcttgcccctgcattccagcctgagtgaagaacagaccctgtctcaccaaaaataaaaaagccaacactagcaaaaccaatttttaaaatacgtccacatggatctgctcaagggtaaccccacacattctatgacaacctccatctcctgactgatccgatatggtcagtccccgttttgggggaacttcccaatcgttgaaagggtttggtatctcagggatgttacattaattatttatgtgattggaaattgtgctttttcgtagctcttttatggagaatcacgtaattatcgccataaatctttcggatgccttttcagcttcgttgctgggaaattagccgttaacttacagaaacctggtagacctgcagtctgaccttttgataaagtaactcttaatgttttgcataactgatgaccgtacatcattatcctcatttctaccccttgggcctcatttttatctttatctctcctctttctttctgctagatcactgagaaccactttttctgtgtgtgtgtgtgtgtgtgtgtgtgtatgtggttgtggtggtggtcttaaaataagactgatttaattgtattccttgggaaaaaaaaaatacagaagacaatagagtgggccttaaatgttgtttcccagttgagattcaagccacctttttttttttttttttttttttaaagacagagtcttgctctgtcaccaggttggagtgcagtggtacaacctcagctcactgcaacctccacctcccagattcacgtgattcttttgcctcagcctcccaagtagctgggattacaggtgcctgccagcatacccggctaatttttgtatttttagtagagacgggattttaccatgttggccaggctggtctcgaactcctgacctcaggtgatctgcccgcctcggcctcccaaacttctgggcttacaggcatgagccaccgtgcctggccaagattcattaagcctcctttaatcaatgtaaagaatgcagttccag

SEQ ID NO: 63453 - DNA, 1027 bp, Homo sapiens
cagaagattctacccagctctcttcctaagaaagacatctgttgcacaagtttggcttctgaagcctatggaatgtgctcttttgaggtggcctgagcacatgtggctgttaactccggatgaaaagtcagagtgttttctgggcagaagtcattggtgggctggcgttctcaaggccctgttaactggcaccgtatctgcagatgtgccgccagcaccacaccagcaggatcctcggctatgtgtgcaagagctgggtgtcaccaccgcctggactgttgctgtctcctcatcttggcacagtggtcgcacaggctcctggatgagcctgtgggtgcactgagaggccctgtaggctgcggtgaaggaagctttccaggagtgagtcctgtcgtttgggatcccaggctcagaagggtggtggaccttgtgcattgatgcggccatctgggttgcagggaatcttttcttcctgcattggatcgcctcaacctctcaaacagaaagtctgcgccccactcatgcttaacagtgagatctgagttctccggggacacactcagagaactttggcaggacttgcttaactacgatgatattaatttgtgagcatattgtgaaactcggtctgcctttattaacagaatgtttaaatagatttccttgaaagaattgaaagccatcatcatgtttaactggatttgagagaaatttcattttgaagaaaggcactgtcaaaggcatgcacttactctataaatcccttcagctgcctattcttgatgaaggctaggaagtggagtcaagaaatcgagagggtcggccgggcacggttgcttacacctataatcccagcactttgggaggctgaggcagacagatcacgaggtcaggagatcgagaccatcctggctaacacggtgaaacccagtctctactaaaagtacaaaaagtagccgggcgtggtggcggcacttgtagtcccagctactcgggaggctgtgagggaggagaatggcgtgaacct

SEQ ID NO: 63454 - DNA, 1362 bp, Homo sapiens
ggaaaaggtcagcccacgtgggggtttccattggttttgagagcaagcagagactgcagagagcatgtccttatacaagcattctggaccctacggtgtcaagagatgagtgggctgggatctcagaaggccagttgggttcccctaaggacagtagaggccccataaaatcagtcgaggattccaggcctctctgaggcaaaattcaaaggcaaacatcttaaaaatctaacctgaagattttttttacaaattcatatctcatcattgcaatttgtttgataagtagctaattcctataattgcctttatttgatatttaaatacaagggcaattcatgtgttaagtgtaagctaaataattaaaagttaggaggattaaatcttcccccatttcatatattaagacagcaatgtttaacattatctcattaataatttattatatactatatgatacatataacacagtgttctataatatggttacaattgacagttgaatacatagtctaataaattgtattaagttttgcataggtttagcatataacctccagatatttctctccaagaagtgtagcttggtggctcttgcctttgcaagtcctcaagttcaaaacccttagtggccatcagtcccctgtgcttttacaccatgctggacacagcagatgtattgtgtgtgcccaattgtattgtgtgtgcccagtttctctgcatgacgttcagatataaacattctggaatcatttcttgcacactgtatgtaacaaaagatgagttttctggtggaaccacttctgtctgcctaaaatttgagatcactaattttttttatctgttcaaccagtcttctcggctacagatcaaaattttcatgccagagtaggaaagagaaaactagaaaaggaaaaattgatctgcattcctgattcctcaagtctaaacagacaggaataagaggtgtcatttagtttgtttgcttatttgcttttatccctttttttttgcttaacctttattattaaataacactattaaaactaatatacagtttatttttaaggcatatttggaagacaagttcttttaaactgtgtgaaaatcctaaacacaagaatggctcattttctttagcaacaaagaccaacacttaatttccattatgacacaaatcaaacaaccaattaggaaaatcacaaattctttctgctcaagtcttctgttcttgattatagcttttagcaagtgaaaatatttagaattttggagtcttgcatttaacacgaggaaatgtattttcgtgtgctaacaacccttaaccaaaacgggaggatttactcagctttgttggccaag

SEQ ID NO: 63455 - DNA, 4538 bp, Homo sapiens
tttagtagagttggggttttgccatgttggccaggctggtctcaaactcctgacctcaggtgatctgcccgcctcagcctcccaaagtgctgggattacaggtgtaagccaccgcgcccggccgtggcttcacatttcaacaggggaatagttgcgacacacgcccatgcctcgctgtgtgaacaccgtcctccagatccttggcggttagcttggaaaaggcaaaactcagggggagaggaatggatggttagatcaggtgagagcacctttatgggacggtgcccaggaggcatcttgtgaggacgcagcactgtgtgtgcaatcgtatcacgtgaagaacttttaacatctttctggagttttctggtgcctgtattctttatagtgggtgactttggggagggcgcagctgcatattccaggctggctgggtgcaactgggacctccactttgcctactgcacagtggtcaagttcaggtgacagtccaagagtttctccccgtcagggctcctgtaaaactctgtaacagttcataaagaacaagcagaatactaactccgagaggcctccaagttagaaatgctttagaggagaaggctgaaaaagcacctcccgccacccagctcgttgatggcatgaaagcaccaggcctcattcctgccacggccctgagcctggcttcccgtgagaccctcttgggggcctgtggacaggaagtgggacggccaggacccagacctgtgacctgcgtcagagtgtaacgaagtccaggccagtctgttgcccgaagcactgggatgctttttactgaaggagtgtttaaaaggtaagctggatctcagacaaagctcctccaagaggcttccagaggctggagttttgtcaacaaatgaaacaggccctattttaagccacgctgtgtaccaggacttcctgtttttccagagaaacttcttgttttggtttttgtgatgatggatttattgaaacatttgctattcaagtgaccctctttgtgttccaaggaaaaagtcaagctggagattctgtggcctggaaaagggatacgcactcacagcaaaaacgtcatccccaaaagactcagtcggggggagtctgggcctcagtggccgatcagtgaatggacaaagagctaattgccagtcaggggcccagacggatttcatagctcggggtttggcctgttgtttagagggaggcgggggctggtcacaggacaattgaaaggggtttttgttgttcctctcaggctaagttaagccatgtgtgtgtctctctttcgaggagtgctggtctggccaatcccagccacgtaaatcccactcacttcctgctgaccttttgacaccaacagatgttttttcttacaagtgtcattagggcctctctactcgctgacctcatcagattgtgttgaagtcgttttcatcggttttgtctctaacaatccgtttaacccttcctgggtgcctctctgggaataagattgcactgccttctggccttgctgtctccctcctgcccccaggacctggcatggggaacggagcccaacccagagggcagagaggcatgcttccccggctgggggctgccctgtgtaccccggggacagagggacccttgtgtcttcctcgggaaggtgtgatggagaaagcaatgaggggctcaacaggtccctcggagagaaccttccagagctctgcctgtggatacatgctctgatcacacagctcatcaagcactggggccacagacacggactgggaggtgggtccccatggcacttgtgtgacctgtccgcattgctgcccgtgatggggttgggagcgatggagttggaggtcctaaggccacggaagtttctgtagccaacatccctcgactaagagtgcagactgtcatctgacctgactctgtggccgttctagaggcaggaggatggcgttggtcatttaacctttccatgaagctgaggcacaaagagcagctgtggggctggcgggtgactagagggagtgagttttcagcagatgaccctgactcctgggccgctgtgttgtgatgttatcttacaggctctgggcctcctgggctccttagagccaatggcacactcttctgaaggcatctggggtggagggggagtgtgtgtatcctgcctgcacctgaggtttcggggactcacctgaagcctcatccagagctgacagacatctgtgctgggcgtgtcctcctccatggcgtgcacgccttcactgtgcaaaccagcccagcagaatggaattgctggctgcttatgcattgtgtcagttactactcacagccgcttagaatagttctcatcgcacatggagcattctagaagtggtagctgcttttgtttattagttattattattattattactattattattattattattatttttatttttgagacacaatctcgctgtattgcccaggctggagtgcagtggcgtgatctcggcacactgtaacctctgcctgtcaggctgaagcaattctcctgccttagcctcctgagtagctgggactacaggcacgtgccaccacacctggctagtttttgtatttttagtacacacggggtttcaccatgttggccaggctggtctcgaactcctggactcatgatctgcccacctcggcctcccaaagtgctgggattgcaggtgtgagctgccacgcctggccagttagctgcttttaaagtcatgcatgcagctaaaaagcgttccagcctcttggagcctcctccttcccacagtcccactcctcagagggactcccctgccaacagttgggtatgtgtctacctgcctctttgatttttttcttttcatgattttacatgctagtctggctttttgcttctgcagatgttctgtgtctgctctggagagctctcccttggagtgtggttcggggattgtggggtgtggctttgtgagacgtagccgtgttttgcatctggctggtgtggctcagtctgactccacaagcctctgcagtgctgcttctgggggagcgggagatgtacatcggggtcctaaggacataggactaggagtgacctggccatgttgagtctcaggttctctgaagtttggatttggtgacctctacaatctcagaaggctccagaaatgccgtgatcctaggaaatcatccagggccacccaagcatctgggcacatgagggcatggcacctgcgtggtttttgcagccttcccatttctgccccttgtgttgcagttgaggccagctcctgcctcggctcatggtgttccctgtctcagaagcggctgtgtttgtgccctgaacctctgtgcagactgccttcaatatttacctacatgctctttttctctgagagctcagacttaatcgtagctgcagttcaaggaccacttttaagaaaaagcaagaaggtctgtttacccagtgaattaccattcagaggggggtctaggaggctgcattcttaatgtggggcccaggctctgatagatctttttaatgttccccagatttatgggtgtgcgtgagtcagagtggagaccccagggtgcctgagttaactctgtgcatgttgagcgtagccctggaatttattttaagcatctggggtaagtgaacataacagcagactttccgttccttcagcttgtacgcattgctgttgtgaggagaatagcgtttaccccaagagtttacagaagtggatatatcacagacctcatgtcagtctgggcagcggaggatttagagggtttcgcttgttttttgttagtgttctctgtcctgtaggtagtataaactagacgccatgcattacaaatgtattactgtttttatcttttctgttgaactgtactgtgtcagtgaccatagtcagtgtgatagtttgtgtaaagggttgtattagttatctattgctgtgtgacaaattacctcaaaatgtaaaggcttaaaacaacaaaactttattgtcttgcactgtctatgggacaggaacctgcacagcttagcttggtgcctcctgctagggccctgacaatgttgcattcaggatgtcagtggggttgtggtctcatctgaaggcccggctcggggagggttcagcttctcatggactgttgggactgagggccttggtttcctgttccgtgggtctctccttagggcagctggcatggcagctggcctctgggagggagggaagttggcagggaagatgggaggatgcccacactggtagccacagtctcttttaacctaatctcagaagtgacatcccctcacctgtgtatactgtttactgtttgtttagaagcagagcttgtacaaggacatgaattccaaaaggttgggggtccccgggggccatgggattgattctttttctggcatccacagtgtagatgggatctgccttattcagggagagggtcatgttcagcttggaaagctctcagtgggc

SEQ ID NO: 63456 - DNA, 1025 bp, Homo sapiens
gcacactgagctgcccactgatgcagtgtcagtggccttggagcatggcttctggggtcgacgtcaaaaaacagtgtgaaaatcttagcgtggacattaggctaatgggtccaggtcaggtgtggatcaggatgggttggtggtgacaagccttgggtctggagtaaattccatctaaatcatgtcacttttggctggagtgcagtgatgcaatctctgctcactgcaacctccacctcccaggttcaagccattctaatgcttcagcctcccgagtagctgggattacaggcgtgcaccaccacacccggctaattttttgtattttaagtagagacggggttttgctatgttggccaggttggtgttgaactcctgacctcaagtgacctgcccgcctcagcctcccaaagtgctgggattccaagcgtgaaacaccatgcccggcctcaattcacatttctgaagtgaaattgcgtatgtcttacccctcacgtaccttcatatcgctgattttctcctctataagccaacaaaacccagcaggatcctgaaacaactagcattgcttgtgtctcctttttacttaaacacgcctcccacccccaccgcccacactttgtttagcaccagcaaaggagacaaaagtgacagtgccgtctccagaaggttcacgcagtgagcctccggtatccatgcagaagcctccccctgcccatcctagtggtaaggaaatctcctgaaggtcctcgtcacctgcctgaccgtggggatgtgcttttggtggtggtggaatctccgtgtgaagaatttggtagacttgattctctgatctctctgtgcctttttattttgagacagagtctcaccctgtcgcccaggctggagtgcagtggcataatcttggttcactgcagccaccgcctcccgggttcaaatgattcttctgcctcagcgtcctgagttgtggagattacaggtgtgtgccaccacacctggctaatttttgtatttttagtagagac

SEQ ID NO: 63457 - DNA, 1379 bp, Homo sapiens
atttttacagcgcttggctgtccttgcagacgaaaataagatgtttgctttagcaatttgcttagccctgaaaacattcctagacaatgccagggccttagttgaaaatagtatgctcagcttgctgggatggtcccaggaaggatgttttgagtgaaaataaaatggtacataccagggctgtttgccaccgcaggaatcctgggagagttcagcattgagggttgccgggagccgggatctagcaggggctggctatgggctgccctagcgtgcacccctggggccgaccggaagattccagaacagggagaactgtctgcaggtgtcaccctgcatgttgctctttcctccctttgcaccttagcacaccagcccccgcgggtcaagaggggtctccagctgcggtccacagtcctggcctcggcttcgtgtcctctaggttggggcaccggcctctctggggaagcctgcccgtgtgcttcttattcctcgactgtgagaaacttctttatccatctgcaatctctcctcttggcttcccctctctcctggtcatggttctgcccacgcagaatacacccaatccctcttccgcatgactgccctgcacataatcacaggcagagatggaaactcgggaacgttccctgctggggatgagcattgccattctcttccacaacacatttgcaagtttttcacttgctcagaaccagtgttgcaggtaagccgcaacagacacacacatgtacacacacacacacacacacacacacacacacacacacgtggggggaatggaatatcatgaccagtagttaaggaaaaatgcatttctgtttaaaagccatgttttaagaaaaagtacttgaactcaaataatgacgagtgacttatttcatgacatttgtctctgagacaaggtggcaaatagtatgctatgatcatttgtcgtgtgaagagtgaagtcagagtaacccgctcagctccagagctttgttttcctctgcggattcccttggcagcatttctgtggaggataaaaatagcacacggtgccttaaaataaatggctgtggggaatgcttgtgtacatcagctgcgtggccacatatgttcacattctccatattgttcactcttcaaaagagtgactgggatagacggttcgaatctgcccgccatatgataactaaagtgacatggaagagcctttggcccccgggaaggatgactccagggatgggcagtggggcaggctcaggtgtgtcagactcgtggctaacccgcgaggtcctgcaggtgagccttttctgtcctttaccccatttcatcctaagtgtctccccacaaaagatcagcaaagccagacccaa

SEQ ID NO: 63458 - DNA, 1179 bp, Homo sapiens
ccttagctctcagctcagagacccacaaaaacaaatcctggggagctgactgcgcaggatgtggacttggtatttccctgatactggcatttgttagccggatcctgcctcttcccttcgccacctcgccttccccaaagcccctgcgggctttgctcttccttccctttattttgctgaagttgacagtcaggtatgagctgcattaaaatgttgactcatccttgggttgttttcaattttttaaaaagtgcacattgagaaaagcacagattcatgtgtgcagcacaggaaatcatcacaaagagaacaaggctcttgttgggggcatttgagttcaagcagagtgccccagttgcaagacttccatttggatctgatgatggctggacctccctggaaagactggaacctgaagagcccagtcaaagaacagtctgtcaagcagcccctccgcaaccacagtttttgtgcagagtggtttggggagcccatggaatggggacagtacgatgtattttctagtggcaaacatttcatcatcaagtgagagtttctttgctgggcatttcctgttctgtgtgaaacagttgtggttacctgtgggtgtgtttcagataatcattagagcatattctctgctcgttaagcagtaaaaccagtgaggtggggaagcttgtgaaactgaaatcccaaatatgcaaaacttggcaagaaagtagagaagagccagaccagctctgagctaagtcaccaaaccagaaaggtttcattctttgtcttttcttcctctgtctttaaccacaagccttgggctgaatccccacatctcactacacagtcagggaagcagggtcaaggctgactggggacactggcgtggcgggaatgggtgaagtctcctgggtggatagtcacctctctgccttttttgaaactaaacttctctgatttttatttcaagttgtcctgaagaacatgattctaaaacagattcagagcacgcactctgactataaatagaacataaggcaaacttggacaatggattgtggcacttttttttcatgtacctgaaattcttagagttggggctctcttcccttgagaagtagaactgctattcttcggagaccgatgggtgacctcagcattgtcctcaccaagaacgctgtttcc

SEQ ID NO: 63459 - DNA, 1391 bp, Homo sapiens
ccccagcagggcaaagcaaccctgacctccaagttgcaagggaataggtgactcagggagtacctcctgcagccctgctggtctcaagactcccaccttccagggcctggtcctgtgctcagaaacccctctgcatagggtgctgatgagtcctctgcagctccctcacccaagggaccacactgggaaacccagtagttgtctcggccatggcactaagacctttgcaccctggccatcttgttccgggacagccagcatctgtggtgtggtatagagacaaagctgccacctccaggacacttgctccttcctggccttcctgctgccctgaaacctgtggcctgtgtgttagtggaaacattctcagtttcattgctcagtaaaccttaggttatccaaactgcaaataaaatgttctctactttctagatttttataacttgctattttgagagaaaggggatggggttatgtgtgcaaattaacattttcttttggtttatataactccctgtctacgtagtttgaattctttaatgtagatgaagtttcacactcctgaatttgggaatggtcattgtatggtgttcaccctgtgcctagcagaggctcagtgaacatctgtggtcagaatggacgtgtccttcgcagatcaggatggtcgtggggcagaactctggtgcagctgtgaagcttcccaaaatcctctggagtctgtgggcctgggccgcatggtgaaattggctgtcatcttcctcgctttgctttctggctgcttgttggggctgagttgaggcccatctgactgtctggaggtagtgggtattcatccgttgttgcttggcaccagagggcaggtagatcctgtggcaagtggacaggtgagaggcccaccaaggagaggtgaaattgggggtgcctcctagggtatacatcggacccgccctgggtctgcagcccggtggcttcttgggcagacactgcacttggcggcttcagaggtgagggcacagaatgacgcgggtcagggagtcccaccatgggccctgcccatgggacttgatgcttgggtcagtgtacaggtcagggccttccttgaactaaaggctacgtgcacagactgacagctgacacttgctataacttactgctttgagagaaagagaatgagggttatgcgtgccattaatattttcctttgatttctctcatattttggtttacattatatcctttgcctgggttttgagatggtaagataagaagtttgataaatggcatatataaaagcagttttttcccttctaaatggatatttttaagaacagtttgatttacagaaacgtctagaaggttacatggagagttccgtatctcctcacctagtt

SEQ ID NO: 63460 - DNA, 1024 bp, Homo sapiens
atctcggctcactgcaacatctgcctccccagttcaagggattctcctgcctcagcctcccaagtatctgggcctgcaggcacgtgccaccacacctggctaattttttgtatttttagtagagaccgggtttcaccttgttagccagggtggtgtagatctcctgactttgtgatccgcctgcctcggcctcccaaagtgctgggactacaggcctgagccacccgtgcccagccggtatgatgcatttgttacaattaatgacccatatatatatataaaactgctgagctcaagtgattggcccagctaggcctcccaaagtaattgatccattgttatccaaagtctgtagttacttagggtaactttttatctttctatattcacttcttttggggtttgtgtgggggggggaggggggcagggtatggaaaaggaagtaattttacatctttactttctgtcaacttcctgatggtggtggagttggggagtagggaaacaacaaaatactctgtgagaacctccattaaaggggagactctcagcagaaatctccatgtcctgattagatggcacaacaaacagaaatgaccgtgtcctggcttggggatttaatattggaaaacaagcttgtcttaatggaaactttcagccagtaattttgttttcttgtttgtttgagatgaagtctcactctgtcgcccaggctggtgtgcaatggcacgatctcaggctcactacaacctctgcctcctgggttcgtggcagttctcctgcctcagcctcctgagtagctgggattacaggtgtgcaccacaacgcccagctaatttttgtattttcagtagagatggggtttcaccatgttggccaggctggtcttgaactcccaacctcagttgatccacgcacctcggcctcccaaagtgctgggataacgggtgtgagccaccgcacttggccataggcagtatttttgtgtgtttgaaactcatcattgtgggcgtttacaagttgg

SEQ ID NO: 63461 - DNA, 1693 bp, Homo sapiens
tggagtgcagtggcgccatcttggctcactgcaaccacagcctcccgagtagctggaactacaggcgcacgccaccatgcctggctaatttttgtatttttagtagagatggggtttcaccatattggccaggctggtctcgaactcctgacctcgtgagccaccgtgcccggccatgtatgtggattatgttctggccagaaaagcccatgtccaggtctcagggtttgtccatggtgtggatgtctagggcccagactggccaccctcagcccagaggaagtgcctgtcttgacctcttgtcttccaccaagtaccctgcgggcagctgactgttccggcccattcccctcaacaacagttgccagattccgtttcctgcttgcatcctctgtttcttaatctgcagcatttgcaaaggtgcagggtctgctttgggaatgtttgggggtggtggtacgcatttcacggtatctgggaatttggttttgtgatggaaggaagaaccattggaccattaactatggttttagagagttactgtctttcttctaagcgttttattcttcactggctctagtcagccttgctttctaaaaaagctcttcaaaacctggcggactggtccattctcctgttccttggccagctgtcatcaccattagctctgttttaatttgcatcttgtaagtttttactgccatctttcaggtcttacttcacttttggggtgggaccccttcgccttgttccagcagttggaactcaggtcttcagcatgttggattaatttcctgtcccacttgggctcaggctcactgtaccaatgaccaatttgttagccggctttgctgcttcctccatcaggagcacacagcaagtgttctgcattttattaatatttcctggtttttccatcatccctgaatccctggctggccccctagtccagtgccaagggccgtccagtggccttcaaccaggctctcatgttcttgggccttcccgcaaatgctccttcccttcccagagcagggagcctgcccctcgctgcctctgtttcccctctcagcaggcggtggttgcatgggtgagtggggcacagatacgaggtcgtggcagccctggcacacggctcgggagcatctggatgtgcctggaatatgcttccatgcaacagagagcagcatctgctcagaattggggagggaagcaatcaccgcatacggggcattttgtctttgcaggaatgcagtgtgagggaagtgggtgattttctttttttctttggttaaaaagtttttattttagaaaaattttaggccaagcatggtggctcgcacccgtaatcctggcactttgggagactgagagcagcctggccaacgtgaaatcctgcctctactaaaaatacaaaattagccgggcgtggcggcagatgcctgtaatcccagcaacttgggaggctgaggcaggagaatcacttgaactccagaagcggaggctgcagtgagctgagatcacaccactgcactccagcctgggcaacagaacgagactccctctcaaaaaatagaaaaaattttagatttacataaaaattgtgatgataatacagatttcatatacctcacacccagttttccgtattaaaattggtaatcattattattattattatcattatcatttt

SEQ ID NO: 63462 - DNA, 1168 bp, Homo sapiens
ttaaaaaataaatcccatttgaaagaggtgcagaaaccagccatgcatgatggctcacgcctgtaatcccagcactttggggggccaaggcgggcggatcacttgaggtcaagagttgaccagcctggccaacatggtgaagccctgtctctactaaaaatacaaaatatagctgggtgtggtggtgcacgcttgtaattccagttactcaggagcctgaggcaggagaatcgcttgaacctggtcaattgaactcgggaggctgcggtgagccaagatggcgtcactgcactccagcctggcgacagagggagactccatctcaaaaaaaagagagatgcagaagccattgaagaaatctcatcgtgtttttgagcttctaagtggacatcatcaacattgagattaagaaagaaagatgatgtaaaatgtaagagagtggcccttgccattgcagacactgatttattgggcagggccacatctgaagacttgggcgagccggcgtggaactgctgtggctgttagctttctctgacactgtgttcttgggctctggaggtgggatctcagctgtttgccattctgtcatctctatttattgcatccaaccgttagtaatgacttaaatgatgattgccaaaactgtagtcaacagttttgttagtgatttggggccttgtaaaataattagtcctgagacatgtatcaaggggaacatactgaatatctgagactagcttttacttgatttgagcctgcaggtcctgctacaagatcctgtgtgtgctccagggacctgcaggcagttacttggggaatcagccatgccagtggtaggtggtagttcctccccagctaccatgagggccccaagcaattggcatctgtttctttgttttggccttcttgtcagtttcctttttttttttttttttttttttcttttcttttttgagacagagtctcactctgcactctgttgtccaggctggagtgcagtggtgcaatcctggctcactgcagcctccgcttcccaggttagagcaattctcttgcctcagtctcccgaggacctgggattacaggcgcctgccatcacacctgactaattgtttttgtttttagtagagatgaggtttcaccatgttggcaaggctggtgtcaa

SEQ ID NO: 63463 - DNA, 4530 bp, Homo sapiens
cacagcttgagacctaagtctggcccttccagatgggccatggctaaggttccctcattcaataaataattgatgacttcagctgctgtatgcatggatttcttgcgtgactatttttccccctttttaaatttcttatgtgcgtctggagaccctttggcagtggggcctggagctccttttagaaaagatccacaggagattgtgtttccaatgatgacagccaagatggcacaggtggcagccctcccatgctaggggtgttgtcaggtcgacagcgctcaatccccattgttccagaacggccagaggacagtgaccaggggcagaggagagtgcactctcatggcccagcccctcacttagcccacctgccctgggctgggtgcactggtggctaccactgcttggtaagaggtacgggtgacagatgtcttggttgacggtgtgggtgtgtgttttttttttacccctaatccaaggaaactgggtgtatttctctttgtgagttttgactgctgttcccctaagtcaagttatatggaagcatgatttatcttctccaaaaaatatgggcccctcagtgaagttaaacagagtataaaatgccttcatggtagttaaatttatactctgttaaaatgatttgtgcactttgcagtaagctgtgatattaagtgcataaatatacagcggagttaacttggaggaacgttttatttgacaggatcacttaaatgctcaggtacagtatcgaaaccatttagcatggttaccaggaatggagggtgagccgactctgtttaaaatctgcagaaaacattcagaatccaaaggaaagcttgtaagtaagtacttctccatggagtgcttaatcgtggaagtggttttcatcacaggagagaggattgcaatttctaaatcagtctccctgcatcatgtgagaaaatgccttgtaaataaactctccattggaatagtcacttgtcctaagcgtggaactgattctattcaaattagcaaccattatagatattttggtcttctattgtcaatgacaatacattttcctgtgggaataggttatttagtccatattgggacattacaggagaattaataattaatgacatgctagtgctcggcccacccttctgtttttgtagccaaggcttgattggattttctgtatgtataatgggctgtttcaaaatggtcttgcctcattgtttcttcatatcttattgaaaccaacccactgttgatctcaatctgtgtaaggagaatgcggagtatggcattcgcaggactgaatccctagattttaagtttggaaggagatccaaccgggcagatgaattgaccggtggtgaatattctgtagcattttcctccctggagaggaatgccgccaccgctgggaaccgtggactggcatgtgagccagtggctgtgaaaggcgctgtgccctgtgtcctccgtgtactttagagcaggagcgtcacacatggtggagccgggtgatatcccgggcaggctcccgaaagctcctggtggcccatcaggggctggtttttccaccttttttttttttttttttttttcctcgagacaaggtctcactctgtcacccaggcaggagtgcagtggcatgatcttgactcactgcaacctttgcctcctgggttcaagcaattctcgttccttagcctcccgagtagctggcattacaggcactcgtcaccatgcccggctcgtttttttttttttgtatttttagtagagacagggtttcaccatgttggccaggctggtcttgaactcctgaccccaaaatgatctgcccgcctcagcctcccagaatgctgggattacaagcacgagccaccgtgccaggcctggttattccaaattttttgattggtctaaaatttgtaatgaatggtaggaaaacacagcaggaaaaagaaagaacattattattggtaagggtcagattaagccctgggtgagagtcatgagtccctagaggtatctgaagaagtcctcctggctttggccatctctacaggatccggtgattgctccgcctccagagctgtccccaaccatcgcagcttggcttgtctgtgacctcgtgtcaactcaaaacagcactttccccccgacactttgaagtcaaccctggtagaatttgtgaggaaatggccagtgtgtgttgggtttaaaaaaaaaaaaaggctgtggaagtagaacaatcttggggttgccacagaacaggcagtttgaggtgacgaagtggctttgtaatcaataataattgataagaccttgtttctagcaggctgtagacaaaaataatcttcttggacctatcttcgcctaggaaatatgtcctagaacctccctcctctgttgatctcaacgcccaagcccatcctcccatgagaaaggtttttttttttttttttttttgagacggagtctcgctctgtcgcccaggctggagtgcagaggcgcgatctcggctcactacaagctccgcctgccaggttcatgccattctcctgcctcagcctccagagtaactgggactacaggcgcctgccaccatgcctggctaattttttgtatttttagtagagacggggtttcaccgtgttagccaggatggtgtcgatctcctgacctcgtgatctgcccgtcttggcctcccaaagtgctgggattacaggcgtgagccaccgcgcccggcctgagaaaggttcttatgggaattgtgatgaaggggtcagagcagcccccacctccccccatcagcaccacccagggctgaatctgaagtcagacttggctgcttaagccacaacctaagataactttgaataccaggtgctgaaatcacagaacagactccaaatggtggccccgtttggactaaatgagaggtgagctgaggttgaacacgggaggcagagggccaggggtcccgtgggcatcagctggggtgggcatcaccacggtgcccccagctttttcatgggtgatttcttcagctgacctgggttttcagggttcttttaggcaggctcccagttgtttgtgtcagagagccctttttgttggtaatcccaagcccagaactttccagaatgtgctgttggatgtggctttattctttgatcccttcaaaaaatgaaccacaccgattactattggctgccaggcctggtgagggggtgagtgagccctttctgcgagcccggggagtttggagccagatgggggttcttccttccccgtctccagtcctgttgctctaagaacacagataagggagtcactccatccccaacaggtgccgccttatccctgctgatgtcagaaaccaactctgcagaaaccaactcttccccagctcacacatgctggaaacgctgaatgtgtcttataccctgcatctcattacatgtgtcttgaaaatgtggcttttctttatgtatataaacctacattcacagctctgcacaatcagtggcttgttttccgcttacaatagcgacattttggtggtagcggtgcctgacacgcatttcatttttatttaacttataaaaccttggggtgagtgcttctggacacacaaaagctttcatggagtgcaagagtggtgaattttttctcttttcaaaatggaggcgtggcgcatctggacacacacatcagttggcctgacctgtgcgttcgctacaggaagtaaaagtttggatgacatcactgcagggttatttcttgttattgtaattaatggaccagcaggaagtagcgagacagatgattcttggcagaaatgaccatttaaagggggaaggatgaagagggtctgggaaggaagaaacctttctggacatttaaactctccagggatgaaatagggaaatacgtagacagtgcacaaggaacgagccatctcttgccagagtggatataaaattgttaacccctgctacaactcagtttctgtttttctctctgccttctcagaacaacgccgacctgactggcactgggttttgtctggtccttttgtgccaagtgtgtcttccacgtcaggtcggtggcaggagaactcggaaagtgaagtctgtgctgcgtggagaggcgcgctgcctctcaagtcccaggtgctcttttgtgtgagtggaaggagctggaaggagtgtggggctgtgatgaaagaagggaggtggccgagttcctggggaaagagctgagtggtgacagtgttcctggacagaactgaacctagaggagatcttctggacccagaggagatcttgaccctccttgaagttgagcctcccatggtgtgtaggggccagagctgactgggcgatggccgtgctcccaaagtggttgagctggggctagaacccagctgctgcctggaccagccttccagggccagtgtcacaccccagcccacctgagtggagttgacagggttggagccttaagccacgtttgctc

SEQ ID NO: 63464 - DNA, 3858 bp, Homo sapiens
tagtagcagagctgtgcattgagattacccacaccccagctgcgagagtccctgttaatgcaaggtggccagtttaaagctgacaggactagatttccccatggagtgatttgctgaaggctttgggctggaagttccagcgcccgcagaaaacttactgttggaggttcttcgccctcgtttctgaaggaaagctcccagctctgcctggagcctgggatggaaattgtctctggttaataggatctttaagacagctaaatcctgcactaaagacttgatgcaactgctgttgcacacggaggtggctcccctgccatatgcccgcagagctttctttcattgtcattacagagagtcaggcgtgtgtacaggaaggagacgggatcctgccgtaatgactttgtcttcaccatcttttctcagctgcttaaattgctgtcagggcagcgtaggaatcttaaaggagggagttttctctcatataattatgctgttggtaaaaatgttggcggcttttctctacttttccccttagccaccaaaataaaactctttatcttggaactcggcagctgtttgcaatccgcctcatttctcctgctgatgtattggtgtcgcagcttgggtgatgggtggtgacgtgagggttgaaggtaatttctgtcgcagtcccatggtcatgagccaagacctggagtgctggaggtgcgccaggtcgggtcatctttgggttttgcccagtgagctgttgctaaggagagggctttgtttgcctagagctgggggaaatgttcaagggcaggcacacattggcagagatctgctgacgtggcgacggcggaactcatggctgtgtgtcaagcctgggcagtaacaggtggcgaaggccaaacctttgggggcagacttggggcagcagtggagacgtgttttggggatctcaaggcgtcttggtgggaaagagtgccggtgggtcaggaaggcgggggtgctgggacactgctgctgcttgggtggggtcaggacctgctacacagataccagacccaccctctgccaggggacacagaacgggcaaggagaagggctgtgcttctgagtgcttcactggtctggaaacccatgttttaactggggccacccccggacccctgagactgaggtggtgtgaacctcagggctggggaggtggcttccaggggaccacctcctcacgccctcccttcccagagaggatggggaaggtttgggcgggagcctccggactggtagggactccacctagaggccagcccctcctggggtaggcacagaggcctccagagcgcctccctctgagtcacattccttctcatttagtcacctttccttccacggggctgctgttggctcgaaatagaaggatgactggaccgttctccgtgcagcttcttccctgagatgttccccaagcccctcaaggcatcctttgtgatgcacttctaaacagcagccggctgggctcacagtggctcacacctgtaatcccacgactttgggaggccaaggcaggaggattgcttgagctcagaagttcaagaccagcatgggcaacatacataacatctctacaaaaaataaaataacatagtgggctctcttctctacaaaaaatcaaaaaacgtagctggggccaggcgccgtggctcacacctgtaatcctagcactttgggaggccaaggcgggcagatcatttgagattaggagttctagaccagcctggccaacatagtgaaaccccatatctactaaagaatacaaaaatcagctgggcgtggtggcgcatgcctctaatcccagctactcgggaagctgaggcaggaaaaatgcttaaaccagggaacggaggttgcagtgagcccagatcgcaccactgcactccagctggatgacagagcaagactccgtctcaaaaaaacaaaacaaaaaaaactttagctgggtgtgatggtgcgtgcctacagtcacagctacttgagaagctgacgtggcaggacggctggagtccaggaggtcaagactgcactccagcctgggaggcagagtgagatcctgccttaaaacaaacaaacaaacaacagcgagtgtatcctgggtgcttgttcggactaaggtgcaaacagagggctttgcgttatggtctttgatcctggtggcattttcattagactagatggtcacggtaatgtggtatcttttccttttttgtagacaggcgactgagtctcagagggcggtatcctcgcccaggtcgggggtctgcacatggctgtcagtgttgtgtcctcggacagccctgtcctgggaactcagaggctcagcagtggtgcctgtggaatgggcctctgttttcaccgagtagttgaccccatctggcacgacagggagactcttttttatccagaagccaaatcaagagaggcttttctgagtgacttggctgtgcttttttccagctttggaaagtatgttgagaatgcgtgctggccctggtggtcttacgttgttggtgtcagatgtaaacttgcgacgtgaaggcagaatttaagtctagctttatttagtccaacacgtgttctgcagcagccgctggctgcagagccaaggggataaccatcccctcccagtacttgcagtctggtggggaccaaccccccagagagatggaccctgtgctggctcagagagagagggcacttaaatcttgcttggtgtgctctgggaaaccctctcctggagcattggcttctgagctgaattttctggagtagaaggtaatgccgaggcctgctggacatatgtcctgtgaaaattctcagaaaggctgggtgcaggggctcacgcctataatcccagcacttcaggaggccgaggcgagcggatcatttgaggtctggcattcgagaccaccctggccaacatggtgaaaccccgtctctaccaaaaatacaaaaagttagccaggtgtggtggcgtgcacctgtggtcgcagctactcaggaggctaaggcacgaaaatcacttgatcccacgaggcggaggttgcagtgagctgagatcatgccacttcactctagcctgggcgacagagcaagactgtttcaaaaaaaaaaaaaaaaaagaggaaagctggcagaatgatcatggatacagtgtgcaaacgtgacttgtgcagccaccatactctcctcatgggggagtaaaaattagctggaaatgatacctgaggcaagaggcctattaaatcttattaataattgattttagtgggaagtacaagttcagtacataaagcaggagctttttggggaagttactgagttttttgtcttctccagagagaggccagaagggcagcatctccaaggtgaatctgcccattggctgtaaggagcatggacgaggacttaagaggcagcccatctggccacatctccaaggcgaggctgtccactggctgtaaggagcatggatggggattttgaagacagtgtgtcccggagccggcctgcagagacaggctgcctggggggaggagggcagcccccagctccggcgtggccagccctgaccttgggccatcagggagggcacgccaagctttgtgactttcaggtctgttcccttgcccacgggctggttctggctggtttctggactgtactgtggccgtgtggaattctctggcacacagcagcaggtacagagcctgcccctgggcagcgctgaccatgctggcctggggtttggatacttgagcctgggtagagacagggtgggttctcggtggccacttcctctgcagcagccaacag

SEQ ID NO: 63465 - DNA, 5250 bp, Homo sapiens
aaaaatgagctgggtgtgatggcacgtgactgcagtcccagctactagggaggctgaggcaggagaatctcttgaccccagaaggcagaggttgcagtgagcagagatcatagagatcatgccactgtactccagcctgggcaacaaagggaaacttcatctcaaaaaaaaaaaaaaaaaaaaaaagaatcttcagacaaggaaaccatgctctttgacctagtaatctcccttccccacccaatgccaagaaagctctaatgcaccaagattttagttatggtgttacttgacagcaaaaagacagatgactcaagcatccaacagtgggaaaacagctaattctttttcaaatgatgccttcacagtttgaaataagtagaatgcttgtcttaaaatgaaaagcttcaatatcaaatgttgaacatttatgaatagaaccataaaaataatcatgggggaaagctgatgaggagcagttcatagtgattatctttagttggtagaattttgggtgatttttttttccatacccactcctcctccccaaatgttctgtaatgaatatatgtttgggtttttttgtttttttccaagacagggtctcactctgtcacccaggctgtagtgcagtggcacagtcacagctcacagcagtcttgacctccgggctcaagcagtcctgcctcagctccccacatagctgggaccacaggcatgcatcacgatgcccagctaattttttgtttgtttgtagagatggggtctccctgtgttgcccagactggtctcaaactcccgggctcatgtgatcctcctgccttggcctcccaaagtgctgggattacaggtgtgagccactgcacctggcctatgttactttttaaatagggaataaaatagctggtcaccctgatgcttccaaaggaatcatgcatttgttgaagaggggaacagtgcaatgcaagatttacgaagacagagctgattaccttccctccccagtcctcagatactgtctttctccttgcctttaccaggacgtacaagtgcatctgagcatacggagggtgtctgtgttggcttaccgaaaggagtcctgttactcctgcattcccattcgatatggcagattgtgcatagatacctctgcagaccagtaggcctctccaatacttttctttccctcttactgcctttgggcatgtgtgcacacccaggattttacctaagtggaatctgtacttactatggttttggtttgtgttaagtcatatcctttgttttttcaattgtctcttttggcagaaccatgtatgctagcatccagctgcctgggctcaattcctgcctctgcctttggtagctgtgtggcattgggaaaatggctgatcttttctttgcgccaatttcctccttaaatataagtaataatagtacctgttttataagcttgtaaaggataaatgacttagtacctgcaaattacatggaccagtgcttggagacgtaagcactttgccaacttgctgtcagtgtggttggttattttcccccatctccccagttttgttttgttttgttttgttatttatttatttttttttttgagacaagatcttgctctgtcgtccagggtgagtgccagcacagcttactacagcctcgacgtcctgggctcaagcagtcctcccacctcagcctcccaaatagctgagactgcaggcatatgccaccatgcccagctaatctttaaacttttggtagaggtcgggtctcactatgttgcccaagctggtgtcaaactcctggcctcaagtgatccttccaccttggcctcccaaagtgctgggattacaggtgtgagccaccacgctggccctcctcagcttttttttttttttttaaataaccattattattccatattttttctatgaaatcatttataaacataaaatatcttaagtctgtaattcagtttatgatacatattcagttatgatacattctttgcatttcactgtttcatgtttcagccaaatcccatccccccaacctttttttttttttttttgagccagggactctctgtcgcccagactgtagtacagtggcatgatctcggctcaccgcagcctcttcctattaaagtactgggattataggtgtgagccaccgtgtctggcccctatccctctattaagtgcctttcagcaattctgtttttagaggaaaattcctttttgcttctgcttgctccttttaccacccctgcccatgaaagggggagttacctgtccagagcaagtatagctttggccgtgatcttcaaggactattgcattggtgctgactgctggggccccttggcccccaggttcccaccagtggagcaaacacgaagggtgcagcctagtcggaagtgttcccaaggacaacatcagtgtgcagacttccaggggaggggcatatgaaactgagccaacagaggccaagatgagaaccctcctgtgacatggtcccacccattaggccattcccttggtcagctggatggcaaatactagtagtgtatgctatggagcagacatttattaagtccctgctgtgtgtcaaggattgagctaggactctgcaggaaatgcatgtgtagttcagtcctggaagctgcccagcttccgcctcctggaagcatccttttctccccagctgctctcgcctgcacatcttacattctctggctggtccttctgggtgtgttcagccactttgagctgtgcctgcctgatctgcacactttgcaaatgtgtagactcagaaagagaaacagcccaaacagtggccagaaactgttcttggaggctctaggttgacaaaagggtcctttaatagctccaggttgacccctcccctagacacctgtgctccccctgagccacaccgtgacttcggaagttcaactgtcatccagtttggtcggctctttcacaaaataatttcactgattctgtcaggcattttcattactttgatttaaagtttttgtgtcaacctctggtactttagaatctccagatgttgaaaaacaaaatcccattggtaatgtttgttttcctttacacttatgaaaaaagcaacttttattctcgcctaaaatttattgtcgagagcacgtcttttaaagtaaaaaaatgtttgcagcatgtcatacggctctgaaatactatgtaggtcgcagcttgttttgaggcataagtgacaaatatacttgtgagagatgttattcttaccctattaaagaaattagaacatggcttttgtgtctctgatactgattttatatcttcgcaaccgaatttgtgaatcccagctagagtaaaagacacacgtgatgcatgaagaaagtgaaatggttctgtttggtatttatctcatcttgatctttggcttggaagaactgataatgaaactctctttgggaggacagagagctctggggcattcatctcccaactaggtctccgaatttggtgcagttcttgaaggcaggtgggtttacacagtggtgagaagtgggaagtatgaagggtgtgatcttcgccctctttttgtatgcccgttaacaaaactcaattgttaggcgttgagtagggctattgatttctagccaacggaaacacttactgtgtaatttccaggagagagacattttcaggtgatgtggactcattccctgcagttcagaaggtaatgagcaatagtgatcaatcctgaggttatccggggtgatttcagcttgtccattgcattgattgataaatggcatgctctgaggctgattgagtgatgaccagcagcatcaaagaaaaccctcagtttgcatggcgggtattagaagtggctgccttgatgcctcctgtcatcgtttgagtggtaaagagacattctttgtatgtttataactcttgatttggggtcatggttatcatctgtactaactgcacaggtcatcccgctcccatccctttttcattctttagaatcccccacagcggtccacgccccttgccaacttccttccactatcctggttctgttgttactcctgccgactgcagtgctgttccgtgagcttcttgaatgacatcgtacagtatctccgacgcacagtacgtaccagttacagttgtcttgacaggatctcctgtgatcttttgtcccttttcagtttagctcttggtggctccataggctctcaagcatcctggacagttctctgtgggctggcgtcctgggtcagattccagggccggatgtgagctgtgccttgaccatttgaagagctcaccgaaggaggtgggaatggacggtgcaggaaagtaactcaggcacccgaggctgctgagcccagagaagaagcacctgtccttggagtattgttccaggaaatggggaggcaaccggttccagagggcagaactgggttgggagacaaggaagcacagttcttgtaaatcaagaaaatttgtaaagccacataagctgtccaccagtgagagagagcatgtacatgctgtgagctgcagtcaggccgcctggccacaaggcatgttgtggcatgctgtgggagtcggcgttgaagcatcccagagacctcttgtgcttaaacaaagctgagttattcagcacactcctagatgtggggtctgattgttggtcaaactgaaggactcgagaaaatgaggactaagtggggggatgagagacatgtgagtgggtgttgggccagtagaatgacaaaaggagcaggcccaggctctttggaagacagacctttgcccttcagggggactgggggagtgtttcctggcaggtgtggacattcgtcctcatggatgtcttctttataataacctgtggaggacggcccagcgcatcatgccactgaccttcactgatgcttctgtacttaagaagtaatgtcccttggctgggcgcggtggctcatgcttgtaatcccagcactttgggagctggaggtgggcgaatcacctgaggtcaggagttcaagaccagcctgggcaacatggcgaaaccccgtctctactaaaaatacaaaaattaaccgggcatggtggcaggctataatcccaggtactcgggaggctgaggcgggagactcgcttgaacccaggagttggaagttgcagggagctgagatcacaccactgcactctagcctgggtg

SEQ ID NO: 63466 - DNA, 2150 bp, Homo sapiens
gcttgagagcccctggtgaaggggtagaagttgattccatggcccttgtcacactgtacttgagccataccgtgcttggcacggaaaccaccctgtagccgttgtcagaggtggagcgtcctccctgaggtgcgtaacccccacatcatcgttgcttccttgggctgtgttctagcgattgcgtccgtccctttttctccttgattgcagatggaagggccctgctctgagccgtcgccacatgcctggtgcttggctccatgatgctcacatgggtgttcatgacagtgcatttgacagacagatttatttgtcaccttgtcagggtgacatgttgggatggctccaccacttgtgtgccattgacacttggctgtctgaaatcaggacaaagcatccctgagactgatccgaatgaggcttatcagcaccaggcgtaacttaccgcctgctttcctctgtttctttaacttttaattgaaaccatttagttaccacccctgctgctaggaatctggggacaattaggaaagtcccatctgtcctttgaaccacattatattgcgtttctcctcgcaatctcaagaagacggcacattctagcagcagtgtctttgccttgccgtctcgcctcccactggatggtttttatctcacttgaatgagttatagcaactctttaattcaattattttctccagtgcaggctttgagatgatttagttgaatcaaacacccgggttttccaatgcagagcagtgactcccagcgaggccgtgggagggtttttacattttcacttccagccacggttgcgcgcgttctgtgctgccccctgagcgtcctggcacaagcccctacttaccattccgaggagtagattggaaatggcagatgccgtgggctttgccagtctttccccaaggcaaggaattatctgtccagtgatattaggtcactgcattcccacccagctgtgtcgaaagaagggagggggtggggcagcctgggtgatgggcaggaaggccatttataaattcaagtgtggtaaacagtcgactctcctgctttggtatttgagtttgaattaaacaaagtgtcgtgggtgggaggtgtatcatacgatcattttaaccattgtgccttttaatgtggaaaatctgcccaaaataggacctgctgcagtggttttcacatatacaaagaagtggctagaatgttctctcagaacagcacacaggattagaaaggacatttggccgctggaattcttcagtgagaattcagtgattaagcctgccttctgttttccttgtgggccgcagggttcctgtggatgtccccaccctcagattgctggagtagaaaacttaactttccaaaacactgagttgttttcagcccagcattagaggttaaagatgctcatgtagaaagcacgcaggatggatctgacgaaggaaacagcttctgatacttgagcaggctttggacagtgcagatgaagggggctgagatactgaggcagtaaagagaacggtcagcttggggtctggagtcgctgggcactgagtgcgcgttctgagtgccattcaagcaccacgtaacggttggggctggtgttgggtcctgagatgggccatgggccaccgttaaactcaggaagcacgtgctgcccccccccactctagaaggcgggctgttttcctggcgctgtgtgtgccatgctttgtgtgaacatctcactgggtgtcgctctcatgtggtaactgggcatgttgtagaagtcgttgctcctaaacgtaagccagtgcccacattgggtacgttctggaagaaacagtgtggcccaacatgggcttatccagagacaggacacctgctgcctggtgacgtcaccacctcccgatggcaccactctgttctactccactgcccccggggcctgacttgctactatggaactaaccctgtaggatgaggccgccatgcccgtgtgtgtgtctgtccagatctgtccccacatacttgctggtggcgggtgggaagaaggttagataagttactgtcatagattgtgactatgaagtaatccattagaatcttcagacaaggaatgctgggagtggtggctcatgcctgtaatccca

SEQ ID NO: 63467 - DNA, 1906 bp, Homo sapiens
gtgcagtggtgcgatctcggttcactgcgatctccgcctcctgggttcaagcagttctcctgcctcagcctccctagtagctgggactacaggcgcccgccgccacacccagctacttttagtagagatggggtttcaccatgttggccaggctgatctcaaactcctgacctcaagtgatccacctgcatgatccacctgccttggcctcccaaggtgctgtgctgggattacaggcgtgagccactgctcccagcctcgtcggccttttttgccttctgcttgtacctcaaccctttggcaaaaagtaggaactacagagggcctgtcattgagacttcaagttgccaatgcccctcacctattcatctgaactcaggcacatgtacatgctcacacgtgtgcatgctcacacgtgtgcacacatacatctgacatggacacactgatatgcacacgtgtacaaattgtgaatggtatggaccccacgtgaggcatgcacctaaggcgcgcctgtagcagcgggacagagaacaggcttccttgtaccctgtactcatcacgggggttgcgctggcttccttgggttggctttgaggagtgcggcttgtgacttctccacggtagagaactgaggccttagacaaatagtcatccattgtaactgttccctgcagtgttgatagaaatggtgttgggataattagactgtgctgctgctttctccttttctcccaggttgatgagtaggagcagtttaatttgagactagtaaattttgtaattggatttaaaagactgaaatgagcggacctggtttccatattacctttataccccagcgaggggaaatgcttgagtcaggtgtggatcagattattttattgtgccaacattaatattgggagcacacacataatctggagtcagcaggttcatccactactatctcattaaattttcaggcaaaagctgcaaaaattaattggaggcatgtaatagtttagaatgtgtgccagcttatggtaatataaattatgtgaagagaagacagttttatatactgagagagggaaaactggtttactttaatgagaagagatagaaatgtagagctattttttcattacagatacactctaaaatgtttggacttagttgatgaatagagttaattcgctgctacagttccaataattcatgttgcacagtttaatgacttctagataaaaacaggattgaaatgttaatttctcggaagaaattggggcactcttgtatatcagacatctcccccccacccccccattaaaccactagttaattccaccaaacaagtctctttgagctatttcatgccgtgtagacttttgtatttcttacctgggctggctggcttttttttaaaccttaatgtatatgataatcttaggtgacagaatgtgttagagctgtgtctaggcaacctgactcagcagagagtttcataccttttagttttgtaaatgaccacgtgctataacctgcattctcctgtccagtaactgtttcggcagggagggggtttactgggttgtggttagccatctgtttagtcgagtagcgatgttgtcccacttctgagctgggaaataggaagtattgatcagtcagctttagattcatgaggcgatagtctcaaatcatgcagagattttatcactatgttattttgcatctttgttttctttttcacttttcataacttggagacattttttccccatggggtaggttcagcaaagttcactgtcttctttctctttaacctactctcagaaaaaaagacgaaaaggaaatacgaagtatagtaatgaagtgttaactaatagtggggctacataattgagtactcggattttgttgc

SEQ ID NO: 63468 - DNA, 3277 bp, Homo sapiens
aacctttcttggtcgtgaaggtctgctgtgttcctgaaggttctgtcttccacctggcacttgggatgtgggttgctcactccttgcccatcgacctggtaataatgttttcctatcaagcagtgaaaggtttggggtttccatgaagcctttcccaaatgtcacgcattggggttttagttgtgagggtgtgctgatcccagccgcagccaaggcgaggtgctggcaccatgctgctgcacccgctcctatgcccacctggacatctgtttcgtaatggacatccttccctgggaacatgtctctactcctttaaatggcttgaggtctctgcaatttgcctgaacattaagtgtgaccaaagagcctgaggccagccatggagaggacgaagacatgaggctttctctcgagagccacactgggagaggccgggaacacggccacttcacatgaaaggcggttagattcaggtcactgggtctggactcctgcattttatggcaaagtctaaaaatgccgatttgtaacaaccaatgttaatgaattcagactgtttgaatttcacactgaataatggctggaattatcagagcccacagcttataagatccctggatcgtgtaatcttttctcaagatttaattgatagaatgatgtaatatcacattacttttattaaaagttctggccataaaagagaaacacctattaggatagaagaatttagtaaaaatagtagtaataacaagacagtttggaatatgtcatatattcagtaaatttcaaaagtcttcatctcatttaaaatacagtattgtgcccatagatcctgaatgcaatacctttgtaccctagggcttcctctttcctacactaaaaacattctatttaaatgcagattttgatttgcaatctaggaagaggattctggaagaatgggaagaaggacaactctgcatctattaattttagttttatgttattcgcgtttttcctctcatccttatctcctccagcccttccttcctgtaaaaggatcctttctaaacatacaaataaagacatgcttagaatttcagcacataagaatgttgttacgccttcttttatttttgtttaaaaattaaattaaaaaattttttttccaaaaatgtttgttcctttgatttgtgtacgtgtgtgcacgtgtatttgcccctgggttgtagccttgtcttgcttttccacacatgctcccagtatcttacctaggaaatgagcggaacagtggaattaccaagtgcagatggtagaacttcccttaccagagcccaagtgacttgtgtgatattgagctttggttactaaataaatggatttctggcttttgacattgtactctgagaattgggtggccaatcatcaaataccatttttttcactgttgtctgcatttaatacagcatcttctgccatacgcacttgtcaattcaaacatgagcgttacattttggtctttatgatctgtcaagggaaaatggaagtaaattctttataatatgctaattgatgtatttgggaatttttagatgtagacaacatctgtgcatgccgttaacacagttaatagctcccgttcttcaatatgagaaggttttcagagtctatgtgtgatctagatgagaccttctgtgtccgcccccccaggacttggcagtgtcaaatttaaggctgttttttctggtgccttaggactgaatctgagcctgcgcaaagtcctgttttgaggatgcttctggccacagtgtgctgggattgtgttggttctgggaagagcctggctggccagacctggtcttatctatcacccccatccctactccgtcctagcctggaccagactggctggagtgatgggtccagagaaagagaccgtggacctgaacagtccttgggacccttctgccactcttggaggtgccacctcccctggtagcttggcaccatttgggttctcctttagccatgggtttttgacaactcaagagcttattttccatacaaacttgttgatggttttctaaggcaggaagcattgctttattgagagtgaggaattgtaccctttgaaagctgccccctgaaaagggagtggagagagatggctccagttggagttcaggatgggggtatctttcagtgaacttggggggagggctgagtggtggagcttggggctcatgtcccaggccttctctggtcaggaaagcagagttgaaaagggcccttttaatctggagggcccagaatggtccagccagttgccccggaaaggaagcctcatgtggcatgcgtgccagacgctgcacagcttgagttggtcctatgtgtgtggcacagccttacaaggttgaggtatttacctttattcctataaattgatggataaggggggttaattgatttctcttggcacttggcaagaacagacgtcagatttgaacctaggtctaggtttcagttgcacacccagcatgttctgctccacagccttttcctaaaatagtttagatgttggtataaacctgtgcgtactgaacgtgcctgaccgtgtgctagtatgatggcttttctacagtgtctccctagactccatgcttgcagaccgacagcgcgtggaaaggaggctttctggcttggtaaatgctcagtcaggtgagcttgctgagtttattgtaagctttgcagttccattccccacacacccagtggtggggatggagggggcgcagggaggaggtggccccagagcagattgagccccttggtctttgctgtagccaggactccaggctaaagtagcacagggtgggcagctccgaggcctgggtgtctctctgtctctctctctgtctctctctctctctctctctctctctctgtctctctctctctctctctctctctgtctctctctctctctgtctctctctctctctctctctctctctctctctctctctctctctctctccccctcccccatttctctctctgttcacccgcagcagccccaggctgcgtcattggcactgtgaaggtgcagggcacaggtacaaataggggggtcttctggccatctttggacataaacccccatcctcggaagcatggcccgctcatccccaggtcctggccttcctaagggctgttaaacacacatcaaccaagtgatgccttacggaccacgcatataccagacgcagctgggtaccgtgtattctcttgatattac

SEQ ID NO: 63469 - DNA, 1103 bp, Homo sapiens
caaattcaaggacccagcatggtggctgctgctttgctcaccttcagaggcctggaagctggtgtttcctgcatgtgtaactgacggccccagtcccacatttgttaaaaaaaaccttcactttgatgagagtacagtactcctggctttttgtaattcaattgaaactcactgccactccctcattacagcagaagatgacctctaaaccatgacacagggcgacagcttcctctgggaaggaggactcaacattgatttgtgctctgatccccacccccctgcaaaccctgggcttaagtggcagcactgcagaggcctgctgaaggccggaaagccctctctgcctgtgtgtttaaacagagcagattgatgcagagtttgatgtggccaggaagaattctttagcatggaattgcatcataacagtcactccctccaggagccccagcggctctggcacttcctcctgatgtttgcaaggggaaggtaatgattctaattgcacaggacttggtcctggccttggtgatggcaggagggcagagtcctcatggtatggccaaaaaatgtttacaacttgaccttgtcctcctctgatggtgttgaccttggacaaactatgcccctctgagcctagtgcctcagtttccccctcttgcaaatgcagcaggtagtagtgcttaatctcagagttgtggggattcaatgaaacagtactgaacggggcttaacagatacctggtacatgttaagagcttagtcaagaatgactgctgagtctggaatgacattatggggactgacgagggaggctgatgagaggtggcttggtgggtacaatgtgcattgtttcagcgatcgaggcactgaaggccctgacttcaccacaatgcaatgtatggatgtagaaaattgcacttgtaccccatgaatatatgtacacacacaaagatgattgctgcagtagcagcagtaaatgcacacagccaaaggcttagcatgtgggagatgccctgctcgcctggctgggctggaggggaaggtagtacaggttgcatctctccaagccggtacctgtggtctatgttgcaatgaacatt

SEQ ID NO: 63470 - DNA, 4762 bp, Homo sapiens
atttatacatcgtttttgccctcttagtattttctttagcatgtcctaattttaaaagcatcccattcctgttgtgctagacttaatattttggtttatggccgtcttttttagtaacttgacgtcaaacacttcagccttctcctgacaagaggctcgttctctcagtaatgaatagtgacgtgctaaatttagatcggatgcatgttctgcttttactatctgttctgtatgttgctatttgtcagaatgaaagctcaatgtgccagatggctttgctggcttctcctggaaaaagacttcgttctccatcacttcagttgggtcatggttttttagtactattttgttgttaagcattaatatttgcagcagtacccaattatctttttttaacaaaagtgtcacagaaaaagtgtttttggttaaatgctcataaatgagggggaatgcaaatcaaatcccttaacttttattatattacgtaaaatggtggtagaatagttgcagctgtggttttgcaaagataggactgtttccggctgccatgcatgctgtattatgtattttgacagatctccaggatgatgtagaagcttggcctgccgaccagggcctctgggaaagacagtctgaggtgacacagtgctggaaactcagtgtgcttggtggtggaagaggggtttgccttgatctgctgtgggaactaggctggatttccatctgagttgtggctgtagcaggccacctagttgaggtcatcttcctgatcattggtcctctagcctgcttctggcaggacagatatcttttttccatgaaaaacagaaggaaagtattgaattactctggaaacacatacctaaaccttggggtccgattgtcaatggttgtgaagtggtggaggtgttggcgccatggccactgtgccactctggtcccagtgtgtggcccccagagtccttcgggcccttggcctcctgagctcctggcctgcatgcatccgtggggcctttgctagggccgtgtgatcctgctccagtgtttgggccagaagcaagactgccaacatccgaaaccacaaaccagaggaagatccacagggcctttcatctctggggttctctaggtgagaaacagtcaggaggctgagatggggcagtggggaagatgccagcgaagctttagccagccttcggagtaggggaggaggggcccccgctgaagctcttggttcttgcttggattttattcctgtgccttctggatgtgagttatgcttcggaatcccagcctccctccaccccccaaggataaatgggaggcattgattcagtgtttgttcttctctcctgagcatctcagcaacctagtgtggcctcccaagtagggatggagagatcaccccgtccattccccttctttttgctttagcatctacatgggtccagggtcacacaggggtcacgccctccattctcctggtgagtctggctttctgctgttactgttgttttccgcttcctgcgccaccctggctgctggttctcatcagagtggatttgcaaagtagggaggaagagaccaggcagaaggcctgaattttcccactgtgacccatgtgtcaacactgtgtggccggcctgggtgggttcctgctgagttgctccttcgctggaggggtacctccgagcagggcatctgcaggatggtgggcacacttgcctctcactcttggcggggccaggagtctctgttgccactgagtgacgttatgctgggaaatggaggcgtggtgtccgcttctctttccgtgatcctcatacccttcccaagacccccattttgttagtgaagaacttgacgcccagatccacctgccagcatgtgtggccttaggtatatctggcattcaggagccgatgaagcaaccccaaactcaggtcgccccgcgtcccttgctggtggaagcctttccggaaacactgtggtagtgagcctggcttcccatacactgcagggtccctttacagtgaagatggcttcccgggggctttgatattcctggaagctttctcaggtttgtcatggtaccgtccccacacccagggttgtgggaggaagagcacttggtccatgtgaagtggggccgcacatggggtgcatctttccgctgagagtgtggcagtgtgcagagaatgggcctctgctacccctcatcagccaaccctggtggagacccccttgtgccctagacaggcctggccactgaactgagggatggcagccctgttgtgtgggacagccagagacacgggtcagcggctgatttctctgaggcttggagcgtgtgtttgttaaaggcaagaagagtgggaaggagtggatggagtgagcggcagggccagagcctcacttgttgaagggagtggtggtgcattgtgtttactgtcaagtttcaggctggggcgtagatgccgatgtgcaaatgagtaggcagggaagtgagctttctcttattaaaatgttggcttactaatcaagtgttgctgggtgtgattagtggcagaggaaaaggttatttctttctgtaaatatttttgcttaacatttatgcgttaccattgctgattgtattaatactcttagaatgcattagaccaataacttgtttttttttaaaaaaatgtcttggttttaagcagtttcagttggtctttatggaaggacacacagcatttcactgaagcttgagggatctgccaggttcaagtgtaaaggggcattagtttcaacttagagcagctcccccagctacaaatgctgataaaatagctcagaagtgcaagagcctggttactttcagtaattttaggatttagtatctggatctgaattttgaccattgttgaaggagcagataattggatgcattttctaaagtaatgatttaggccaaggagggcagatcctttgagcccaggagtttgagaccagcctgggcaacatagcaagaccccatctctataaaaaaatttttttaaaaaatcagccaggtggtggtgtgtatctgtggtcctcaggttccagagtagctgggtgggaggattgtgtgagcctgggaggtcaaggctgcagtaagccatgattgcaccactgcactcagccttgggtgacagagggagaccccatctccagaaaatgtttttaaaactcggccaggtggcggcgcctgcctatgcctgggtggccagattgtgtgagcctgggagctcacgtctgcagtgcactgtgatcacacccctctacttagcctgagtgacagaggcagaccctgtctcaaataaattaataaataaataaaagtaacgatttaggaaatggctgagaattcccatgaccctcgtgtcctcgggcctggtgttttcacaggggtgggggcgggagaaggggagaaagaaggacgtgctgtctgtggcttccttcttcccaggcattcatttaacaccagctgaacacatttgctttattgattggttgattcatttatttttggcaaacttggcaacttccacctggccccatgctgttaaaaataaagtcttcttggtcgactgaatgcttttgcaattcattctttccatgtagcaattaagatgattcccctagccttgtaccagttaaggataaataggaggttttcaaagaaaatgctgcgtaattcatcggcatttgtgtgtgagcacacgggtaatacatgcgagtagcctccgtgagtggactcctgtgtaaggaggtaaaatggaacgtttttctgcacttatcctgagaagcagcccgaacagtgacatttatacatatttcataatgtggtttcttcaggcacgcggagcaaacaaatcaatttctcagcagtatactgtttaaaagaaacagcaacaacctgtggggaagttgcagaagctgttaaaattaattatatatggcaaaaagatagaacattagggggaaatgttaatgtgggaggatgaaaaaacacagccgtggatgagcagcagtgcagagcatctgatgacagtgtttaatttccgtttctttataaatgtatactgatgaacaacaatggcgcccgcacagggtcctcctgttccgtcctttctccaggccgctgggatcgaatgtccccgtgagcatccagtcagctccacgtggtgtgagccttgatttctgggaacggtaccgtgctgtcttttaatagggatttgtggaaaacgagaattggtggtgaaggtatcgaattcctgagccttgtaatgcaacacctttcccgtggtcaccttccctcttccggttcagctatacgttgtttaactcaaaggaaacctttgttgtcgtgggtagggtgtaacctgcaactccttgaaaaattcagcttgggtgatcagtttcctcagggatgtagggggagaggctcttcagcaggggtgggagggtgcttacaggagggtcccagagctgtgggacaggcttgccccctttcctgggggaagctcgcctctttcccggacactgcaggtttgtaggatataccccttggttcagctggtcatggcaagtgagtcctccctatcacccacttccgcggtggtgggacgcctggggggcatggatggggcctgcgtcctaggagaccttggctccagctgctcgaggccactttgtctcttctgcatgtcgcagaagcgtctgtacctcctggggt

SEQ ID NO: 63471 - DNA, 3099 bp, Homo sapiens
tacgtctcaaaaaaaaaaaaaaaacgaaaaaggtagaatgatggctgggcgcggtggctcacgcctgtaatcccagcactttgggaggcccaggccagtggatcacttgaggtcagaagttcaagaccagcctgaccaacgtggtgaaaccccatctctactaaaaatacaaaaattagccaggtgtggtggcaggcgcctgtagtcccagctattcaggaggccgaggcaggagaattgcctgaactcaggaggcggagcttgcagtgagccgagatcgcgccattgcactccagcctgggtgacagagtgagactctttctcccaaaaaaaaaaaaaaaaaaaaagtcaaatgcagctgggaatgtggttcgtgcctttttgtatattaaccatttgaaacttggttgtaaggtggggttggcaatgtcaggcctggctgcagcagctcatgtctttagagtgtgcctcttccctctctcgtggggctcgagcaagactaccttcatacatgggctctccagttacatagcaactccagtgttaaattccatcttttcttcctggaaaagccgtagaaaggacacctggacatgcctgctgcacaggttgtctgccttccccatcagccgcagaaggaggaactttgctctcttctctcacagctgtgtgtgcataggaagtagttcggatgatgtgggtcccaccatgtattccttctctgttccatgtagagtaaaataaatgggagttctgtttaatgcatcacctcggttcatattgcatttgccaagaaagtgcaattttattgaacattaggattgaattcttaactgagtaatcaatttcagtagtaagttaaaatgccttctattaatggacaactgcaaccgttaatcagagttacagtagattaacagttgtcagcatttatgctaatagcacttataaaccgtgggctcatgatttgcactttataattccatatttctcaaaacagttggtaatactttttgcttgaaggtattgattcttttgtccctttgcttgctacttggagatgtagagaaagctaaatgacattttcacggtgatgacacaatatcaccttctgcttttgcacacttggctttgtgtcaaaatagatggaaagggttcatttgttctggtgctctactgtttaatttgatctggtgtgtgactaaagcaagacaaatagtatttttaatgaaaccatttaataacctctggtagcttagagtcgaaggcattggaaaaatgcaattaaaggatgcctagatgtaaacaaaaaaaaaaaatctctacttcatcttcactgactccattcattttgctttcagggtttcatcaccttaaatggttttgaaccaatgaaggtgtattcccttaaaaagacggacagcccatcgtgtgaactatagagtttgtggacagatttatattggtgagttattgtgaaatatctccaggtaaaagttcagttttctagaatcccctttgcaatgtgtgttcaattagttgatgagtatggattgcctgcagcctctggctgtttcattgggatgtctaatcgtgggatcatattgattgtctttcaattaattgcatctagtattttcatttatcaaaagcaaaatacatgtaattaactctgaagcaatatagttcagtgtaaagtgatttttgctgctgctgctgctatagagataagtcaacggaaattatgctacaaggaaactcaagtcagaatggaaatagtgttaggatttctcgatgtattaattaaaaagaataaaaatgaattagagaaaccatctcatgacaccccgagtcagtcataagtgatagatggatgtctttaggaagaaggcggcttgtggatactggcacctcttcagtcagcttaggcttttagtgttaccagcctctaggatgtcttgaacataccatgatttttctggcggagtagattgggaatgtgggtgcaggctgagatgagcattcaatccctaccacactcattgatggatggagttcaatcctgtgcccgtagcagggttttgggattctaagtttcatttcggcatgtctttagccatttttcacaaaacctggatctttcttaaagtctcaaagtggcaacttctctgatggaattgattttaatcttgctttttaaaaaaaaatgttttccccgtgaggtaacaacatcattcaaaagcaagggaaaccgctagccaattgtgtcctgtctctctcacctgtcacactcctagcagagccttgaggggactagctttggttcccagagaggtttaagtttgtgaccaggccctcaggcctggcttcctgagttgctggaggcagttagagacttggagcccaggggcacacatgggtgaccacctgagggggccaagctgaatctctgcctgaacctaagcagcacagtgggttgtaggatcaggaaaggatctctgtgtgtcccttccttttctccataaagtagatctagctggggaaactgaggtagctgacccagacctagacctccaaatattgcttaccagcttggtgactgagcaagtggtctctgctggcactcggaagccttatctgtgaatcgaacaggtggattgggctggtacccaggaccctccccaccctttaagcttgaatttgatgtagaaattcagaaccctttcctgggagtgctctgacagggctttgctgggccaaaggccatagcagagcgtgaagctcgagttgagttgtgtatgagaggggcccctcagtcatctttgaacacttaaggctcttagcattgaggaggatgaggaactggaagtctgatggaatgttctttggtggaaacctgagggaggtcaggaccgccactcgcaaccttattcagttcagcctttcaggacaaacgttgcttacttttctggctctcactctcagacctgtgtgctagaatctgcccgggtttctcaggcagagacaaagtcaccttgggcctggggttggcaaagatagttccagtgttgggtgctgggtccaaagatgttttcagtg

SEQ ID NO: 63472 - DNA, 2000 bp, Homo sapiens
agagtttctcagacgcccccatcaagacctttttagggctcattgaaggcttctaaaggttctagtctcatttagtttctaagaaaaggatttattcactacagacctaaaacgtaatttttgtatgcctgacttagtataagaacaaaacacccaagcagtggcggtggggtagggggtcctgtctaggtactgcagcctcagttgtgagtttcctatatgtggaaggtgcaggaactagctgaccacagtctggttgggactcccacccccaaatccatctctgggtgctgcggttctcttctgggatgtgtgagagtacacacccccctgtcatcagctgtaggcagatcacatttgccgcgggatgtttaataagttcacgcaggttgatggtacaggccagaaataggacccctgtctggcccgaagcagccacgtgaacttggagggggtgggcatgctgaccggcagttacacgctgaggccacttcagctcctgcggttgctggttcagaagtagtggtgattttaatcagctaagtcatttctgcgtctcgttgtatactcctggaagttcttagagaaatcctgccaagaaaatatcccctggtgaatcctcggggcactagtccacgccgcactgtcagcaagtatctgctgaaacaagtatttttgaatctttagcttttctgtagctccagtctttttaaagtacttcttttgaccttcaagtaacaacgagcacttgctttaaaattctgacagtcttccaagccttttaacattcttattccactaaataagctgtcgccgttcactgggacaggcagcacagttgcttgaacgcccggcttgaaattccacgaaatgtcacctcctctgtgaagccttctacaaggcagacttgtctatttcctacttaattttactatgaaatatctcaaattagaacctgtacccaccatcaagattaggtagatgttaacatgttgctacgtttgtcttcagacattgttcaaaaacaagtaatgttatagtcattgctaaggtgcacctccccagttccttttccatccctccttcctttccaaaagggactacttcctgaaaatagatacaatccctttatatttttggaaattctgtgtaaaccattggaaatggaaggagaaagcctgtgacatacgaagacaagcaacactaatcaggagtataaattctgttttgcagttaattaaatatttgattccctactatgtttcaaagataaataaaatgtgattaagtaaaaggcatttaacctttagagacttggagatgggcagggtatatagtagcctgccagctagagtagggaagatgttaaagaagataacctgtgagatgggttttgaagggtggataggagtttgccaggcaagctctgccacctcaaaaaaatagttccttggctgttagatgcttgtgtcactataggcttgggattactgaaaagctatgcttgtccctcccttcctaacacttctgaggctggaatgtctgtctcccatctacttccttaagaggtgtgggttacagtgtggtgtacagttgggagtgaattactacttgaccttgggtacatgataaccttgactgtagagtccatgcttttcctgagtagttcttcagagtccttcctgccagtgacttggttctaggtgtggagcaggagctggctgtcggaggactcattgaattcagtggaaacagcagggagcatggttttcttttgaatggaaaccatgagtgtagcagttcttctttatgacttgctacataatcatgcaggaaaatgcctgtcacgggattggatcctaggagattagccccattgctaattaaaagccccattaaaagaggggaagttcttttaggtatctacagcttcctaagatttgaatggtttacaaagcagaatgttggctgggcatggtggctcatgcctgtatcccagc

SEQ ID NO: 63473 - DNA, 2832 bp, Homo sapiens
ttttctgtatcgaacttgcatgagggtggagggacacttggcttttttcaaaacccacctttgtagtacagcagccacgcagggacttacatcctaaatggggccactttacaatgttggtgtggcccgaaaacctgcaaggcaaagcagcccaggcagcagctcactttctgcaccccagcttcagagccctcctgacaggagctcacagctcacatttttccatattataggaaatcatgctctttgcagaaaatagaaaaatacaggaaagtataagaaataagtaaatgatagttatgttacacattgtaaaaatcctttttaatcttagcatggagaataacactttggatctattctgtctcttatgcatatacgtatatactaaaaatgagattcactgaagaatgttttaaaatatgtgagatttgaatacatgtttcatagtttattttccatttgacctataagtatttttcctatgtctttgaagtattttgaaatacttttagtaaatacataattgttgagatggatagtgtctgacatatccctgtacagctctatcaggagaaaatttatcctactctggtttccagcatggtctggtacatcttgaccacttttctaaggattccctagggggagagtggagtggggcatggaatctcaagtttacagaaaagatgcccactccttccaccgcagtgggagtgggggtcacaccctcgctgactcctcagagcagccagcatcctgcttttggtcaggggatcttgcattaaaacctgccagctttagaggttccatctctcgctgtggtatgggtgtgtgctctgaatgtctgaagacccctctgctcaccttctggccctgtgtagggcctatagtaaatatatagtctggcccttgttagatcaggtgtccttgggataccctgtggaaaggagctcagaaaacccctcttggtcaccctatcagggagaaagcaagaccggagcctgacaccaggatgccccagctggttagtagtggccaccagttggagtgagccatctcctatgtccgctccttctggcaggttcctgaccatctcacaggggtgtgtgcacctccaccagcagccgccttgtccacttacagtgtggaaccatggaagactagagacggataccttcaagtgcttctgagttgggatgtgttttctacttgtctttcggagctgcgcgcctttgcggggacctcagggccaggcttccctctgagccaggctgattttaagcgttccccatccccccctcccaccccccagcgcctccactgcactggtctctttcaagttcaggtgatttcctggcttgtctgtaagtaggactgtcgtgccccactcaggtacaggtgtgtgggggtgcagccaggccccatgagcctcaggtccagttgctcacaccggctgcctctgcttccatggcccacgggcagctttgggtgtgggaatgcagcttgaattcacaaaatgacgtcgttgtgtgggctgcttgctcgtggatccacttttcttcccccctttcaaaacttggcccatggcagccccgatcagcagcacccgtttatcaatttgttccttgttcctttctccagttgttgccaggactcccatctggcattctcccatctcacgcccttgtttatttctccgtcctggagccacttcggatggggcacttctagaagcctagctaatgccgcaagggcttcaagttcctccttgtcacccagctcgtctcaagtccgttggccctgtcatctagaaaagctgaaagctgaaagagcaggggaatggtcacattaattgactacatctgagacaacactggaaacatatcctattttatttttctttaaaaagtggcaggattccaagacttcccttccagttttccactggttggccttctattggaagacgagttctaaaatcttggctgttgggcctttttacattcttaaaaccagctgaatatatttaatattgtaaaatttccataaacactctctgacaaagactgtgtatgtaaagtttctgcctagagggcatttttcttctcagagttgagactcttgggcatcagggggtcataatgaagtgttgatttcacctgaagtgcctctgtgccaacgtggctgtatagggacatggaaagaattagctttcggggttgttgttttttccttccctgaataaaggataattgtttccaagctaattaatatggtttatttattactaggcaatagttggtggaattgaatctcgggaaggaataatccagcaatgctaaagtgacaacctctcgggtacaccctgttcattcctgtccagtgtgtatctgacactcagccctttggtagacgttgtcattttattgtatttcttttccccatgtgccaaccaaacttggactccacactgcttcatgcccagtgagcttggcctttctcagggtgggtttgtccttaaaggctggccaggcgcgtaattaatatggtgggcttggggggtgccgtcccaggcaacgttgagctgtgctgtcatggtagcagcctgaagtccttgttagagggcatgggtcacacgtgtaccccactgtgtggtgctcggtggcagagttgagaagtgaggagaggtggcatctcccactgccgtttgctcagggatgcctgtctttacccccagcagcccccaggactgcacatgacctcttcctgcagagccagctggcggccatcccagtgccaccccccactgcccccgttacaatgcgttgt

SEQ ID NO: 63474 - DNA, 1135 bp, Homo sapiens
ttcttttggattctttgaaccagcggggagttaccgggagtgctagcgtcgagtatgccagcccttcctaaaagggaggcagcaggggaggcccaggaaaagacacagagtgccacaaagacctttcgggtgatacaaaaggctggtgtggcatttgagggcaccagcaaggtccccaggctcgagaagcaggggcgtagctctgggtctcccctgaccctggctatctgctagcacactccagctctagaactttctttgagcaagctgggtgttggaagccggccagcccagcgtacaactgtgtatgtcagctggggacagtcttggcctgttccagcctgctctgtagtttcgatttagccagactgggtcagggagtcctgaagttgttacccaccagagaggcacttgcccagcacagagctgccccgggggctggttttctctgctggtctgtcctccagggctgctctgtcagggaacgtgccctctgttgggtgtggccctgggaggcctgggcagctggcagcacctgggagagaacaatgagtcagtcatgcccgctcccaggaaagaattgacgtagcacgagcatctctgccagctccagtgagagaaggtcagggttcaggaattgtgagctctggcttctcgagagacaggatgcaccccggggcccctggggagccggaggacacagatcccagttgagtgcgtaagcagtgtcaacagggccagctcctcatggcccctccttgtaagcgctgatcccctaaagaaaggaattgccctacttagtgcccagcatgagctaaaccacataaaccaaaaaatgacaaatctgttattttaaaaattaaacttattttgaagtaattgcagattcacatacagaatgaattcacagggtaggagaaggtaatacaggaggtcccttaaaccctttccctggtgccctccagttgtaacattgtgcagagttctggtaacagcaacacagcggagaaattgacgtggatagaatccatggatactattcagaaatccctagtgtaacatgcactcatttggctgtgtatttagtctgtgcaattttagcacgggtaggtctctatttgtaccagcccaagaa

SEQ ID NO: 63475 - DNA, 1171 bp, Homo sapiens
ttggggatccggggaccgacttgtttacacttcttctgatttgagtgaaataccaagaggctggcagagggacagcccctgagctatggctccctttcttagcccagatctcaagagctttctgctgtttttgctgtcatctctgctggatgtcgtctctgctaccgaggtacagcagttaggaaacattcgcgtccccatcactctggtcactctgctgactggtttttggacactgagtgtcccattcactctatcactgttgactggttttgggacagtgagtatgtgacatgcatatgacccatgcttaactcactcggagccattatctgagcactatttgtcaggtgctaagaaggcaagcttcaattgacttaagttccagcggggatgtttgctttttatgaaaatgatgcttagtacctccttactaagacaatggcagaatagaccagactgttgtcttcagagattcccaaacaccggatattgacaaggtttgctttcctaaagttgagaagagggctgaaatataaggcttatatctgtctctctgagcattttagaagaaagatatatctaagctctgtgtttaaatatagcatggtgtttgctactcggatggcaaataagcaattgaatatgtaggtcattgacttatgagaatgagtttggaggtttttttgcatgtgattaacgctgtcttacgattgggctgttgatgctccgccaacattgggttacacagagttcagcaagccatctgggaagaaaactggaagaatcatgagaggatacctctgtccccttaaggtgttaggagtgtgacttggtgttgagccctgtggctacagccagtggcagtggcaccaaccgctcccaagttacactggggagaaacacatctgagtgccgtgcgtctgtacatatctatcaggagggagggggcagagggcgatacttcatcgagataaatgccagcggtgtattttaatacattcttgattcagaaggcactgtttggaattgcatatttaaaaggaaactgccatccccttttgaaggtatgtgacatttaaaagatctgtagcagaagattggtttgacagctttgaattataattgaaagagtttttgttttaaaaaagaaaatgattacttctatttt

SEQ ID NO: 63476 - DNA, 2447 bp, Homo sapiens
tggttgaagcagagggccaggaagcagagggacctgaattccccaccaggcggtccctacagagtcatggaccttcctttctccccgcttcctcctgccctgttgtctctgctgagcaaggcacggggcgggggggcttccgctgggtggacttgagttggcctagatttgaatctgctcttactgccgtggactctggcatgagactctaagcctcagtctctccacctctgagttgggaatgataacagaattacttgatgttggtcatgttggctgttggtgatgggcttgttaaatctggtcgttggggctgctcaatatttgcattttcagaacagcatgcagcgagtaactagcgctccaggacaggacttcggaatgtttccatttgttccttctgatcgtgtccttttcaaatctgatctgtagtttgtttcttgcctgatatcctacctgctaagttttacatgcctttatgtgcgtttctttttggacacattttatcacccatgcagaaagaagctgctccagtcttccagccgtggttaggaagtgcctgccattcagaagtcagttgtagttttccacatggtcggctgaataggaatgaggcacttccctgtccctaaagagctcacagtgtggaggagagatggtatacttctgctttaggctttgagactctttgtaaatacaactttgattaaatttgttcatggtggcttattatttccaaggcaaaaacagtcatttcaaaagactagactagcctctttaaagtgatttagagtttatagttgtgttcaaatgcgttctaattacaccctccaaacaacaagcctctgttttcagatggagaaaacaaaggattcagattgaaggactgctcagacaccctccgaagaggtggccctgcctgcgctcctcctggctgcagagtaccccaccagcgcgtgagcctgtttccctatcccctggttttgagtttctggcctgatcgttgcatgcttggcttcactgctactttgtgaaactctttgctgagattttaacctgggctctactttcagggcacgatgggattgagacacatcttgggggatgggtaggcaggtgagcaggtctgaggaggaggctgggtctgccttgacctgtcctctcccatctctacatacttaccagtaatcagtgcttgatgctgaaggtcatactgagatggaggctatgggcaagagtttgaatctgtgtggtcttctgtgggtgctcactgacctgctgtatgtggatttccatgcaccagacacatgctcttagaatgtgcctggcagcttgagcaggattgagggatctagagctttcttctggctgcttcccccacaatcaaggagatttagcaagcaggtgcagggccaagttcagggatgtgggccacaggcaggccctttaaatccagtcatccattttgattcttctctccttgtggtatctgtcacttgtcaaaaaagacttcatcttctggggctgtcattctaagcgtcattttgccatactgttaaaattttctgagtgtttgcttgatttgtgtttattgaaactaaattcattaggatgatgtgaaaatagcactctgctgtttaccaaatcggattcttgttgttgatatttcagtacatcatctgttctcacttgaatgtcgtggaatttgttggtaaagtgctgtgcagatgaaaacccatattttagtggagttttttttattcaaataagtttataagtattatatacccaaggtgcttgatttgccatttgatgcagtctgtacggatgtgcgaatactggtgcttggcttgggctttgagagtttgggggtgtgctgggagacagctgcagggattaggactctaccaggtgctgagtcagaggctggttggaaatcctcctcctccaactccgcccctcgccagctgtttgactgctgccaagtcccccaactgtgggaaccccaggccttcatctgtgaaatggccattcctgtgtttctgacaaggctgttggaagacttcattgaagacactgtattggtttttcagcactttaacatctctggactcaagttgtgtcataaaattgatcacaagccatagtttaattgacggcatttttttttttctcccttagtggtttataaaatgatgctggtctaaggtttgatgatgtcttagacttgaagaacatgaacctgtttttgcaaaagttttagagtttggcattttccaacaaaaaggcagttgctggacttttgaattggtcaacgaaattccacttgttaccagaagatttactagttgcatttctagagttgttggcctctcttttctgatttgattcagtggtcagatcatccagggttcttgtgttcagagacccagagtgctataatgctt

SEQ ID NO: 63477 - DNA, 1087 bp, Homo sapiens
agaacactgggcaggcgatcaagctgggtgagccagacagggggatgtgtctggggcctggggagccccacccatgcaccctgaggtcagggctggcctttcacaggaggtaggctgtgagctgtgagggtgaggggccagcctgggcctccctcccagctcaccctcccctaggaggccgccccctgcctgggtccctccagccccttcgttctcatccttatctggatctgagaatcacctggagagctttgaaaaaagatcccagcttaatcctacccccaggttctgagtgtgtggtccacagtggcatctgccttggtaataaaaagttcccaggtgactctaatgaacaaccaggtagggaaccactgcccagccagcactcctcagctgaggccacttgtcctgttctgctcgtgggccggaagggatgggctggagaatcaggtaagtcctaacttcgctgccccacagactgggagcagggtcagagggcagaaggctgccctgggaggccgacttcttaaatgcacacctgactgacaggtacgctcctgctgtggggccaggcaggagagcagcacaggggcacccagggccacacaccgagaagtgtcccgagtggtgagcccagtgtggcctggcttcccatcggcaggtgagggtcatctttcagggctgtttcacttcctcaaaagaatgcagtggaatgagctccatagggtgaggtgcctgtgtgcgtggggatggagaggagggctagctgctgggatgccagaaatgaagggaggctgggatcttcctgccttggtccatgtgtagctggaaggagaaagcagccgttgcctaggagacaaagctggagggcttgactcagactatggacctcttgaggcttcctgcctgggtgggggatcagcccaggaaccccacgaggcgatgggggatgggatggggacggtcatatatgcatttctatagaaaaagaatctggctttccagtgtctcaagggattccgggaccttacatttttttcggagccctcagatgggaatccttggcctacaaaggtgggaggctgtc

SEQ ID NO: 63478 - DNA, 1027 bp, Homo sapiens
aatagtaatggctaatgcaccactcacaggctagagacaaagtagactcagagaagctcagtgactttcccaggaacacacagctctttggcagctgctgtatggaaaccacagtgggactcatcagaagccggttcctttgcacagttagccgagtgaagagacggacgggcacaggtatgtttggagttcttaagttcgtcatcttgcacccaagaatcaaggtcgcagggtgaaactctgtagttctggagcctgaaaggcatttgacatcctggctggaaacatacatttttgttttacatttattcgggtagtggtttgctggtctgtttttttttttttttttaaccatttggcttggagaaattttccctttggttatggtaattaccctttcctgatatgtaaattgattacagcggctctttccaatcttacacatttgattatccacgagcctccttctctgcctcttagttaatcttatttttagcacagtccttgaaacctcagcgtgagactgtccatcttccgctgtttctgaactgccgaaggtcattttcaccagccccaccaaacgcggatgtgtttcaagtcaaacacagccatttgaaccagtttcaaacagttgcctttcaagtgtcagcgtggtggggacaggacctgccgcatgaggtccgtgttgcttgggatagtctcgaatcacccagcgtgactccgttggctcccttggttcagtcggctccaggatgagtgcacttgaccagaagctccggcgacactgagattataagggagccaggtgagcggaggctgcgttgtggacaccagccaagtctgggtgggaggaggcaccgggacctatcagcaacctgccctggactttgtttcctcatgtgtgtgtctagggctttgcggatgatttgctccagatggaattaatgctgcagttgttagaagagcatctctggctccgcttctgaagctaatcaccacctctgtttttgtaagttagtgagaggag

SEQ ID NO: 63479 - DNA, 1110 bp, Homo sapiens
ccctgagtaaaccatctgaagcggagctgcatctcaggcagcctctgcgagcatgtgcttcacagaatccttcctcctggtgtcttctgggtgttgctgatttcaaggaagcctggtggggtgtgtgctggctcagccacccctcagttgcaaagctcttgggggccgcagaggatttcacagttcactgcataaagcaagtcatttaattttatcatttgctttttgagaaggatcaagttttcaaaatcctatgtagaaataacttatatacagtaaaacaccctttagcatgcagttctgcaagtcttgacgatctaggcgtcgccaccgggtggttgcggaaccatcccatcaccgaggaaagttctctgtgctcctatggagttcctgcctccccgccctgactcccagcctccagccaccactaaggaaatcactcctttttgatagtagaagggccagcctaggaagtgcgaggagtttggtagatgctggtgtgagaggccagtaatttccaggacatttgtaatatccaaggattatgcatgagccccaggggtgctctggtcacagcagatggacttggcttggatgacacccctcctctccccagtgccatcctagggatgcctgagactccaggagcttggctcgtctggacaggtcggaccaaaagccagtcactgcagtcttgagtcgtgtctgaaaccagcagataaccacctcctccgcaaagtaggcaaaccgcccccgtcccctgcaaacccaagagtgggcagttctgggccacacctgcaggccctggtgcatctaaggccatgctccctgggctccccagggacactcacaacagctgcctctccacactgtgtcccaccagcccctcttggaaagtgcctgggaacaggtgcctcttcgtccgccatagccgctggctccaggtccagagggactgtgagtgactgccaggccagggccgctttctcctttctctgtgggggaagtggctttggagggagccgggcagtgtgctaaccgtgtgcatgtcgtgtgtttgccgcgtgctcactgtgtacttgctgtgtgcttgctgtgtatttactgtgt

SEQ ID NO: 63480 - DNA, 1346 bp, Homo sapiens
ttttagtaacaaccctgttgtgaggcagtgcgattatttcccacttgaggaattggcaagccgcataggctgggctcacagttaattaatgatcgagcgagatccgaactggttctcctccaccaataccaggccgtccagagaatggttgtgtattcacatgaccccattctagggatgagcgggtgggtgcaaattcgaaggccagaagggaagcaggagaatccagtttcaagagtctggagcctttggtgggagtcccccgggttgaaaggtgaacttgaaagagcatccacgggtgtccttagatgaagaaggatttaagggactctgtttgccccttgatatgaggtttgtaactggggtcttgagcagaaaggaattgctcttcttggtttgagtgactgctttctggggagcgtctgggtgctttttgagttgcatgcagagccatttatggtgagagaaattatgacctgactaattggcccagggctaggtgttttggggctctgcactgaggcctctgtgcaaggagcttgtctgcttgaatatggaaagtgatagtctttggggccctggcagtttcttttggggccgcttttggacttgagttagcaaagaaatgactttatgatttatggtgtttatgaagaatacctatctgttttcacatagacatcttaatagagattaaatacaaaataaagtggaatgcatgaacggagatattcccataagcaatattgtagttttaggcagtgtaattatgttttgtacacttcccgattaagcagttatgcattactggggaaactaccttttagagatttagaaaagctttagaatttagtaaatcaaataaaaataggtatacaatattttagacatagggtttcaacatgttacatggtgtgataatgcagtgccattgaggtgaattttttctttttttgaaatggaggctcactctgtagcccaggctggagtgcagtggcgagttctccgctcactgcaacctctgcctcccgggttcaagcagttctcctttctcagcctcctgagtaggtgggattacagcactcccagctaatttttgtattttttagtagagacaggttttcaccatgttggtcaggctggtcttgaactcctgacctcaggtggtcggcctgcctcagcctcccaaagtgctgggattacaggtgtgagccaacacacccggccggctgaggcgaatttgcttcttctgaacattgcctgtggaatgaaggtgcacccctactgtgtgcgggatgtcgtgggggggctgccgggctacagggaagaagagcaaggagggttta

SEQ ID NO: 63481 - DNA, 1835 bp, Homo sapiens
ccattgcactccagcctgggcaacagagcaagacgctgtctccaaaaaaaaaaaaaaatctcacttagggccgggcatggtggctcacacctataatcctagcactttgagaggccgaggcaggccagtcacctgaggtcaggagttcaagaccagcctggccaacatggcaaaaccctgtctcttctaattagttttggagaaattgattttgtagattatattttagtctcttctagaaatacaaaaattagccaggtatggtggttggcacctgtaattccagctaatcgggaggctgaggcaggagaatcacttgaacctgggaggcagaggttgcagtgagtcgagatcatcccattgcactccagcgtgggcaacaaaagcaaaactctgtctcaaattaaaaaaaaaaaaaaatctcacttggaaaagcaaaatggtccttgaaaatgcccttgggaaaccacccatgctggaatgcaagggcatctcagctggccagggaccaggggtctggggccagaatgtcatattcttcaattgcaaatcctggagagtgtgcacaatgaataagatgtgggaagtgctcccacgctagctgtttgttaccattattattattagggacggtggtgctggtggtggtggtggtgatagtagtaggattcatggcaatcccagtagttatggtggcgtgaatgtcattgagaaagacaaatcctcccgtcaactgtgccttcttcttcctagcagggagtggctgtttgtgccctgttttatcaggagggagcagataagtgctagcaaccttctctggccccctgccgtgccctgccctaccctgccccaagggacagcagatacctttaatactacgaagcttgggtgggcttggtggttttcacgagtgactcagtcagtccccagagaggccctggtacctggggttgggggtgctcaaaaggttggcttctggagcaggggcgtccccaaggcacccctggccaggagtctcctgagggccccacccttcgtcccgatggagaagccctaacatctgtatttttagccacctcctccagggggtgcctgatgcagccagcccgaaactgccaacagcagcacacagactggctttcttcaaaaacaaaccactcccccaacacacacccacacactcgagtctagttattgaacatttggcatgaaaaatggttgaaagaagattttatataactcaaataacccactaaattatttgaaacttggaatatggatttctgctgtactcatcctcattctttgaagagggattctccaccctccaacattaccaggcatttctaggaaggcagaggaaatttcctgggtgtctgataaaattggagctagttccgtattcagatgcacttgacatttcactcttgaccgggcagcagtgtgtattgagatgaggctgggcagtgtcagagcatacctgctagaaaagaaattggttttgcagattatattttagtaaaatctgaactgctcagtgaagcacactattactatctatgtacacaagtcaaagatggatgccacagagtcgatgtttttaacattggcccgtgtgagcaagaacatggatcagcaaaaggtgcatttacttcccactgcaggcaaatatgcttaaccttcaggagcgcccccgaggccctcacttgtgcctctagcctgtttcatcatgatgcaagcggatttgggagtgatacctgctgttttagaactgagagtgaactcgttttgtggcaaatcctttttatcttgatcggggaatttattaattagta

SEQ ID NO: 63482 - DNA, 1083 bp, Homo sapiens
ggtggggctggcttagtttgggagcagccgtcttctttctcattgattcctggggcccaaagcaatgaactgaaaactgttcacgaggttaattttagtctgtgggatgttactacgtattaggtcactccaagaaacgctcagtaaaatatttactttctatttaagacctactttctcttcctggagaaggaagaaaaaaactgccttgcctgatgggcagccagggtgggggcccagtgctgccccagccaccctgcccaggtgaagcctgttgagaagggtcgctcaggtttgaattctcctctactgaggcctcagtacataaaccacagtgaacgtgggcatgacaggccacattccgaggagcatatttgttgaggaaaaggaactgtgtctgcccttccctctgtgcacacgtcatcatcatagctcccttcaccctcccaggtccctgaggaatgggtgcgtttgccggtcagtgaccagggctgtcgacttgcttggtggcatcctgtttggtttcttgtgggtgctcagtcagcagcagctgtggtaactggaccaggtgcagctgggtggcagatctgctgtgatgtttgagcatgttcctgaccccaggccctggcaatggggtggtaattaatcatgtcctcctaggatattcattcacagatactgactgagcacccactaggggccaggcacagtacgcatgtgcgtacagcatcaccaaatgtcttctgattgaaatgttcaaatatcttttctccacccagccagtgttaactgctctgtgcttcctgtggggctccaggtgtgaatagtaggtcatgtgcgtgaaatggcaaggtggggtaaggaaggtgcctgtccggcagttagtttgtcaccttcagagtgggctggtcatttcatggaccagcagtttctttggattcaactcatgctattaaaaaatctcacttggaggccaggtggggtggctcatgcctataaccccagcactttgggaggctgaggcaggtggatcacctaagatcaggagtttgagaccagcctggccaacatggcaaaaaccct

SEQ ID NO: 63483 - DNA, 1023 bp, Homo sapiens
ctctggcattcaactggagccatgtgcacacctgaaataggatctggtttgtgggttccacgttggggagttgggggtcaagagacagggaagatgcttaggatttctcctaactgtgatagtctgtttgcaccactcctgtgaaaaccagggagaaactaggttttgccgggtgaacttcctttgggtcgctcccctgcatccgtgtggtgtgggccttagaaaggaatttgaattaatactcctgaacaaagggaacagccttcttttcaaagaggctatcagagaactgacagggaatggcacagagttgggtgtgtcttcaaatccagagaccagccccgctccaccggaagagtacccggagcaggtgatgcgggagctcccaggttgaccttggctttccatagagggtaaggtccccacaaggtgaaggttttcctgaaaaacaggcttttctttataagattaccttcctattctacaacccttctcttctttttgtgaacacgtgtgtacacttgtgagcacatgtgtattctggaaatccttggtttccgctggggctctggtggggccgggggtggtgtggatgttgggtgccccccgcctccatcttggcctttggattctgctctgtcttgtggatgactcaaggaagtgctgggaggagtctcttgacaaatcagtcatgtgagtcccggtgtcctggctcacctccagcttgggtatgaatagagtcagcccattttaagtgccccctgcagtttttaaacaggtctccttccacttcactccacctggaagagggtggtggggccaggatcatccctgggccagccctctcctttctgtggtgcctcactgggacactgagaagggggaagctgctttctcagaggctgttgcttggaaagtggcatctaagcatgagaatgactgcggcgtgcaggttcccatgaatggtcatttcctgtgagccgggccttgtgagtggtcttccagagcccatgtcgtgtctat

SEQ ID NO: 63484 - DNA, 1029 bp, Homo sapiens
agagacagacctgattcctttatctcggggctttcagattacggaatagaagtcacactaggagggcaatcaataaagagtatattttgctgtacagataccaatatgcacatataagtgcctacaagtaaaatctgggaatgtttttgatcttaaaaacatttcacagtcattaatcttcacgacgctcctgcgggctgggtaaatagagcaattcctattttatgccaggaagaaatattgaattgcctcccccaagtcataaagaggctgtttttcctccttgttcctgtgactcgcggtgtggggggcctggggcgcctggaacccctgcgatccgctcagactgactccaggacgacttccggtgtcctgcgcgaccttctgttgcggggagcgccagtccgccacacctggccgcgctctacctggagggggcggggtctcctgcatttcccggaccgcgggggtgccccaccctgctgcaaggacgggcctcctggcgtccgggcttctggggtcccggggtcccggggttcctggctcccgagccccaggtgaagccccctccatccctggggttcgcccctctcctcccggcgggtggacctggaggccccgcccccgcgggccagaacacctggcggcgcggccccgccccagctgtgccctcttccccccgcagggcacttggcggccccaccctggcccctccgcgggccgcggtatctgacacccccgggcccccccacctcgcgcctcgcctttacacttgtaaatggagccgcttcccgccgcggggaagtcgttgagaggtgtgagaatgggccctgccccctccccccgctccgtgcccacttcctccttcctcccgctggcctttgtgctgggcggggccgctcggacccggggcggcgggggtccagctagacgccgcctcaagccagcagggtcgccggcccctctccggtccgcgaggccccggcaaggtaggagcctcgagaccacgcgggacaccaggttggcccc

SEQ ID NO: 63485 - DNA, 4008 bp, Homo sapiens
ttgttaatctggtcgtgtacacaagatgaaacggtaaaacttgctatctgtataattattaactagtttgtcagttaccctttcagagaataatcaataacttcagtcttaacttttaaaactccagaaattttactttttaagtctggaaaatgtttcaaagagagattaaatgaaacaaacaaacagcaacaacaaacaacaaaaccagaaaatcaacctacaactttttagtttctgagtagccagctacaaggcaaagaaatgatgaatatatatagtatgtactgaacaagcagtgcactggattttaaaatgatatttttattgttaccattgctgttaaaatacaaacagctcacactatttgaaatccttgagattcacggattgaaaaaaaaccgaaaaggacacctctgagtgagggagtagccctgctgagatctagcaccagaatgccatttgccaacagttcactaacatcatgaatcatttttgaaagcaaagttataccctttgcacttaacgctttccctaaatggaaaaaatttaaagagtttacagcaatggtagaatggcagccccagttgtcatttttttaccactgtcatttccatagagaggggctgtcatcataatgtatgtgcatgcagcctgggtccctctgttaatctatcagggaaaagcagcagccctagtgtcctgtggccctgaatcaggccacaaatatatattcatacagcacatggttgggaagggaaatttatcagttgggcagggcacagctcaggtaatatttccactttgggatggtaggtctgttacacagggtggaacatatttttgtagtaactaaaaaatgggagggcagtgtgtctgtccctggaaaaagaagtatttgtacttaatggaagtgacccatgtggtgaaatctcggggtgtcttttccccagcaatctttctatgaattgctaggggaggaatgcttgtgtgaacttaccctgctgaaaacttttagtgggcacatgaaatgctggaatggatacacttttagagactgtgcggcctggcagatatcagttttctcccttacagctggtaagcatgtcttaatttacgctgctgcaagttaaagttacagcactcctggaaagaagggaaaatgcaaggcttctcctccccacctcatcttttgaagttaattttcattcaagtctgtgtttgatggaatatgtatcaaagacttatgaaagagtttttttttttttaatcctatcttggggtttggaaaattatatttaataattgctaaaaacttaagaaccattttaaaggtgttcagtggcccttttgatcatgatttaatggagagtatccaaaagccatcagtgtgactctaatgatattcacaaattaatgtttgggcataatctggagtttgcttttagctatcattattaatgtttaaagcctaaattatggctgcacttgggcattcagaacttcgcctgtgaaaagaagggctttgcacattgtgtaaaaaaaaaaaggggggattcacaaatgaatacagaatgtacaatagggagagagccaggccattgtttgtgtggaatgttgaccatgggagccaagggctagtttcgccttcattcttctgactgctggagaacacagaaacttcaggagctgtggacgggatgggaaccaggggcacattcatccgtctttgccgggcatggagatttggcctgccccctttccagagtttttcttagaaggtggtcttttctggactgctaaggaacgtcgtgtgctttctcttctcagtaatctgcttttttgaggaacgattttaacggcagatagtaagagttcctcaaggaaagtaaacagaccttttctaccccctcgaaatgtgattttaggaaatgatattcaacttcagaaaggaggcatcttaagtcacaggaggaagttgtgtttatttttactcctctcctgactttaaagtagtttttaatctgttggtagcattagggagaatgcagctaaaataagtttttgctggatgttcatgttttgcgtagctgctgccatttcggaaaaagctcctcccccattcacaaagcccttctccttccacgtgggagccgaggtcccaaagtggaaccaactctgtagcttaagggaggtgcattcctggcccctcactttctaaccctcaccttaagtggaatatgtagataatatgtagatcattaaccattgttggtgtctgaagcctgttcagtttttttagcaacgacactcggtgagaaccagttgtagtttgcatgtgtatatgcctagtccctccctcagtgaatgttttagaaagtgatctgctttagctgtttacctaactaaatttaacagatggttgcctagagttggcttaatattcacaaaaattgtgatgaaatggttgggatcttatgaatgggacaagtgatgattttgtttctatagagaattgtgacttttgtcctaggtaataatagagacttcgtttttcccaaagatcggttggtgtttaaaggatgggaaccctgaatagctgctgttgtctgcccctgatcctggtggtggccagccttgcctttggttttgttgccttctgtgagtccagaaaagccctggaggcaggggtgaggggggagagggagggctgggcttttcatccgtggggttctaaaaatccttctcatttataaaatacaaaaatacttaccttccattgtattgctgatttgtgcttcctccaaagctctcctctgatcagcagaaatgtgcttcttgcattaaaacaaatccttaattatgactaaaagaaactgtcagctgccttaaagattgtctggaaatagtggcaatatttctgtgtctcattccagcccacgttgtggcagaagcctggaagggccacgttaaaggatgtgtcacagagacagtgtgtgtaggtcttcctgcagcacaagcaagctcagggcttgtaaagtccagcttatcgtggctgtgctccagccatgcctgaaatctggcctccagcaatctgtcccgtcccaggacaaacaaaaactttattatggagtcatggaacctgaggaagtttctctggaaggaaccgaagacctagaccgtggagggagatcaactcctctggcctaatggggcttttctttttccaagatggaatttaaaaatctcatctataaaatgaggctagcaaagaatcattttatggtgtaagtggccagaatctaacctggaagtgatagtattgtacctgccgcaggtgtgtgtgtggcagcgggagggtggagaggggaaatgagaggagaagagtttggaggggaaaacagagcattcgaggtttctctgctggagggggtgaaaggccaggagtttgtgcacctttccttttaaatgagctctagctgtgagtttattattttgctgatggatggtctttcgtgcagtctagaagtgcaaacacagtcggcttatccgctgcttgttcaggtccagggagaccaagggaacgggtgggggcagtgcttgcaaatccatctggatcctggacaccccacttggtgttgctgcagccagctcccaggcctgcccacctggagtacagccagcgccagcagcgggcagggcccgagagagctcttaaagccatgtcccaggaacggttgagggaactgagaatgttcagcctggagtggagacacccctgggaagcccaacattgtcctctgtgcggtcatgtggccttactctgctcggaacagggaggccttgctgttggagctgccgggccagatgggctgcgtgggctcctggcacaggcagaacttggctgaccattggctcccagtgccagccaaggctctgcaaacacccgagaccctgatggagactcaggctttgggagcacctcctaatgagctggggaggatactg

SEQ ID NO: 63486 - DNA, 1118 bp, Homo sapiens
aattctgttggatattctagagactggtatatttttatctgacatggataattttgaggggacgttatattttggggaagtttacaaagtgattctttctgcctttctaacttgggcgaaatatatcgactcataccaccctttcaaaaaagatagctttctctactaggtgtttgggttcgaagacagtttaaaaattacctcgtgttcagtacctaagattgctgttttgcctcgagggttttccaagtagaagtgggtagttttcatgtactttgagaattctgaggtttttaacccccccctttttttttaaatataaatcttttctattttgaagtaatgagactttaaaggatcttgtttttgtaatcacttgatttcaaaggatacttcttacagcaattataaagtaatagtcaaaatgctaattagacattttcagtcatagctgctttaatgttgaaacagaatttttttctttagcagagactgtatcgtagagttgaaacgctaaatattcttttgtctggcatcagatctctgaactgctctgacattctcctgaaaaacccctagtgccctttttattgcccccaaaagaaaagttaatgagatggtagatttcaagcaaaaaaacaggccctctttcttgcaaaatatgcttacagttgccattgaagttggatgttagccgtgaatgcacttgcctttaatgaaaccagtttaatcgttcacacttgatcaagtataacatgagcaaacaaaggaaataagccagcatatttctgtagagtgtaagtgttgatgttgggtcaccccctccccctaccctgcccccctgtaaaagggagagagggttgaaggcaaagggaatttatggcgctgattggttttttgtgccccaggggtaggggaccccagttacatccctgtggaaagcagttattagagggaattaaaagatcttgggtttggagcttgttttgaacctgactaggtggtttgggtttaattctttttcctgttcagaaagataaggtaaagaataccgactcccccccgctctttttttttttttaacccccacctgacaaccccctctctaattgtacctt

SEQ ID NO: 63487 - DNA, 1035 bp, Homo sapiens
cgacgcgccgcggggacaatacggccggatctccggggaacaggagtccgagcgcgccggggtgcggcgggccttgcgcctacgaggcgagggtggggggggcgcggagaagaggggttccgtggggaagtcggggcgtgagcggctctcggtccccaggggcgctgcccctgccggcgggggatcccgcgcggctccccgggagcgcaagtgaaagacgggaaaggaggcgaagtggaacccttttgttttgccggccccgcattgttggctcctccgggcagccgggccacatctgctgccgctgccgccgccgccactgccgcgcggggctcggcccgccaaagtcgcggcggggcggggggcctgggcgggccgggcggcgggcgcgggcgggggccgggcgggccgggcatttcctctgcccggccgcgctcccgcgggcaccacttcctcctcgcccgccgccgccgggagcccggcccgcccgcctcccccaccttccccgcccgggccgcacttttcgggtggggcgaatcaaaaagaaaaagtttagcaggaggggctggctagggcgcgccccgggcggcagggacccggtgcggcgcagggacagccgggccgccgcggttcctcctcctcccagccctccgcggcgccggacggccccgcgcggccgaggggaagcgcctttctttctctccctcgcgctgcccccagcgccccgggcgagttgggcagaggcgcgcgggagccggggcgtgcctgggcctttctcccgcgggaggcccagcggcgtggcgggtcgcctgcagcccacgccgcgccctggggctcggaggccgcgggcccaagagctcagctcggtcaccgcgggccgcgccgagacacacacgcgcgcacacactccctcccgtggctcgctttccgccggcgacgacggtcgcggacacggagtgagcgtgtgcgcgcgagtgtttgtggttgtcccccctccccccgcccggtactttttccggaggcggcccaagcggc

SEQ ID NO: 63488 - DNA, 1033 bp, Homo sapiens
aaataaggtttattatgctttaaaatgaatgaagctaaaatttaaaagattccaaatcacactaaaacagtctttctaaactattttttctcttaattttttaagaacataaaaaaactcctgaaaattccctacagcaagtcgcacgtgagcatggcagtacaccgcataggaaggactctcttactagatgagctagatattcaagaactctttatgagatcgtctcaggtaatgcttttgtgaaaaaatccaacaaaacattaacagcttaagagcactagaaatacgattttgtttcagagaatggccaaagtggaaatgtagttgagtacttcaacaatcgagaaattgaaagtttcactgaagatagaaaagcttgaatgaagaaaaaagaagagaatgagaatggtgaagaaaattattttattgattccaacagccagattcttttttacaagaaaaaagatgaagccaatgaagaaagttgtgaaaaaaactgtgaaatttaagggactagtttaatatttttaagaatcctttaacgtctcccttaaacagattctcaggaaacacagctactggaaaatgtgaaaaatattagaagctgttcctatgaataaatacagtcatgttcccataatgacgtttcagtcagcgatggactgcatataccggtggtcccataagattataatatactgtatttttactgtatttgcagtgttcagatacacaaatacttcagtcacatgtacagatttgtagcctgggagcaataggctataccgtatgacctaggtagggagtaggctgtaccatccaggtttctataagtaacactctgcgatgttcacaccaggacaaaatcacctaatgacgcgcttctcagaatatatccccattgttaaatgacacatggctgtagttattagaattaattgatgctctttagcctagattctcaaattgtatgttggtaaggactgtttttcccacatgttgagaatggatacttttgaaaaacataata

SEQ ID NO: 63489 - DNA, 1026 bp, Homo sapiens
atgacatttaaaataagtgcttttttcctttgaaaagaccaccgtttagttcatcatgtgagtatgagcctaggcacggggatgtgacagtgaacaaatcacaggccttgctcctcagcagttcattgtttggggttataaacacatacacagatcatttcaatatagtgtgcaaagtgggaactactgcagctgctaaggaacatgttatagagaagactcacctctcccagcctggcttaggaggaggaagacgggtttcctttaggaaacaaaaaacaaaagaaaggtggtatgaattgacccagaaagatatgtttttaatgagtatgtgtttatgaaactattcaaaaaataataggagccttttctgtaagctagtactaggtaacattgtttcgactatgtgtgttgtattaataatatgtatctcatgttatccagactggtgactggacatggttgaaagagttttatcaaagactcattgatcagaagtggcagaggaagaaaaagagcaaagagcactggtatcaaaaggcaattctttccaagtttttatattacaggtacttggctacttatttatctctaaagagaaaaagggaattctgatctaaaatttagtgtgaagcttaatgaagttataatttaagttttgcccctgtgatactgttaacatttgtttcatatttcttttttacaagatgtatgcttaattacagattgtagtttttataaacgggtagactgttgcatgaagttaactttagtaacagcaatccttttttatttctggtttggccagtatcaatggtgatggagccgctcagcctgtctcatccaccgcagaacagcaggaatcgtccagttcagatcagacaaatgattcggaaggggcttcatggcctgctcccttcgaaatgccttcttcagtttctgaagatcccagtgcttccagtcaggttagtacttaaatgctaattctagaaactcacataggaaaacaaagccttttttaacatc

SEQ ID NO: 63490 - DNA, 2020 bp, Homo sapiens
cccctgtcgacctcccacatagcttggactacaagcacatgccatcgtgcctggccagtttcttaggaatttttaaattcaatatagatagagtaggctgaaagagcagtggtaatcagatgcaccaaaaaagagaaaaatgaaaaacttagaaagtttagaataatctttaatctatctctcttgagtaagatctaaatgtgattcgcttcttatagtagctatgatcattagccaaagcaagccacccaatgaggcgtgttattatttgtattggcctaataattcacaatggtagatttgaagtgtgtgctttgaatatttaggtgatactctcaaaagtgggtcaattttaagaaatgttgacagcagaatcactccttatccttgcacttttcacagggaagtgagcctcttgaaccctcatacatagtggggcatgtggcctcagcccccaaagaacaaaacctgattactttattcaatgacggggagcacagtcaggtatgctttccatggtgtccaaggtgacagcaaatccccagtctactttgtcatttcaaaactagcctaagtcgaaattgatagggaaaaactccacttgatcctgaaactgctttctaagcatctttgtgatcttagctctggggcctgactttgtcttctttgtctcttcctttttctagtctttttatggatcatggggggaaattacagattgactgtttattataatcctccctattttaaatcacagggtcttaaaaatgattttgttcggaatattctatggacatttgaagatatccatatgttggtcggctccaacatgcccatatttggaggaggcagatacccagcagtcagcttacgtctcaggtgaactaacatcatacccctcctcaagcttatggtatttaaattcttcctttagaatcagtgttccatcagactgaggttgcagtgagccaagatcatgctaccgcactccagcctaggcgaaagagcaagactcgtctcaaaaaagaatcagtgttccatctatttgggcatcttcctctttctctaggttttttcccctccctccttcccctgccagttgaaatggccacattaaggaaggagctactgtcagcagatgctgaaaggcaggcctatagctgagtcttcattctagacctcattgaatagagccagaggtttgttggactggcctagtcttaggtctgaatctacaacttgtgagaatattcaagagagtttatttaattagttagattcctactaactacttgtgagcatttttcttaatgctccacgtgtatttgttgatattagccaatgtgaattccaacttaagcatggtcttgtatggtgttcagtctttcttcaagttgtgtgtgaggagcaggcagtaggctcaccgtcctttcctattatattgtcttctattcttactgaaaacttaccaatgtcagttagaaatacaagcaagcttttggaaagatgttaaatatagcacaaccactgagctgcatgtgcatatcttatcagaaaagaaagcatagatggcattttctatctagagaggacagcttaagatacttaaatggtgaaataactttcagatgattaattaaggaacatcttaattaaaccaaataacactagaaatgtatatttttagggataacaacaaaccaattaatgtgctaactggaattgactattggttggacaacttgatatgcaatgtgccagagcttgtgatgtgttttcatgtaaatggaattgtacaggtaagatacagtgtgatttttctgatctctcaaatgcaaattggtacagagagttcctcaccaaagtctttacggccctgaagtactaaggtgcatttttgccagggaagatagctgtgaataaactgaatttgagtgtacatttaagttggtgataacagaattgtagatgttatagaagtataattttacaggtaatttggaggaagttcataaatata

SEQ ID NO: 63491 - DNA, 2128 bp, Homo sapiens
aaaatgcacttgcttgggcccccagtgttctagtatcagtaggatgtgtacttctgtcttttctgaaagtctgctgtatgattctggtttgcagtcttgattgaaaaccactgttagaccatctccctaaatggcaacatttagtgagaggctggggtgggagtggggagcaagagaaaagagagaggcagataaagcgttagcaaggcggaggggaacaggagtcaaaggagattccagggtttagggactagaataatggtggtgccatttagtgagataaggatgttgaattggtttagacagggaaggtaatatgtttttgtcacatgttcagtttgaggaaagtataaaaatgtctagtgagcattttgaagttgcagccattagagaaataaattgaagcatcatctgcctagatactgtcagatttcatcaccagaggaatctattaaaatcagacattggagcctctcctcataggggtaaaaatagaagggcatttagagagagagaaggagaacaagaatagcacagattaaaatacaggaaaggagcattttaaggaaggaaataatcaacattggggacttcacatgaacaaagtggggtgaaaatcaacctcagacgattgtgtttggtcttacattccagttgatttgaagtttccagttttagagtacttcagaaaatgtggtaggagatggttaggagagtgtgcacagaagataaacaagaaaaatgcaaaggcacttttaaaatagtggtagtaatgtccatgaagcctttactcttattgccacctccattcccccctgctccatccctgtgaagtaataaagtccatagatgaagggaagagaggtgtctactggaaaatttcctaaatgattctctctccttgagtcactgactgtagtttctagcaaaaaaaaaggccagaaatacatgtgttttaaaatcttgctgggtaaagcctaccttcatttaccatcttcccagttgaaaaccattcaagtggaataaaagtagtcagtatgatttgttccatgttagaacagaaataagatcatgcctgaatctgaggttctaaatctggtagtgattctccattgaaattactccaatagtgaactgcccttgctgatggggtggatgagattcctttgggaggctggggcagaaaaaagattaaaaaccactggtttaaacactttcatgctacataggtctctgtttgcaggacttctgcatttggttgctttttaaaaagaaaggtgttgtttccttgggttttctcttaaactgctttccatctgtctgtattttacagaaatatgaaatgataaagacagaagaaattcccaatttggaaaattctaatttttctactaaagtcataaaagacattgcacagaatattttatcatttttgaaatctaattgtaccaaagaaggacatacctattggctctttaaaggtaagctattaatacttcttgagtgaacaataattgatttgggtaactgctgtgaaatgagtcttctttgtttttcttttcagcaagtggcagcgatatagtgaagctctatgacctcactactctttgtgaagaaactgaagacaaataccaaaatccattcacaatgccggtagccattctcttgtacaagtgagtgctttaagaatttaagatgaagaagtagcctattatataaagttttaaagcatacagtcacagtttccaaaccaaggcttttaaatgcttttaggttttcatagtagggggaaaaatacacgtacacattgtaccaaatattactcagctttcttatgccaccatagtataaacgttttgggggttgtgggtaaagtgtaaagtttagtattttgttgtttcttatagctctttgttggaaagaaacaagagcactcctagacttgagtcttgcagacaacgatgaaatgggcagtaaagttgatataaactctttttttagggttgcttgcaacatgatgatgaagaagaatcaaaataagaaacactatggaactattagaacattgcttcttaattgtctgaaattactggacaaaagtaggcatcctcaagtaagattaacattt

SEQ ID NO: 63492 - DNA, 2093 bp, Homo sapiens
aaatttttgttaatattttagttatgacactctgtactcaaaagcttttgtttgtctccagtgaaattcagttgacaccttttaagagggagggctcagggtggagtaatttcgggaaataggaaatgcatcagcctataaagattttgcagagcatacccagagtatcagtagctttgaactgggaacatttctgtgtgtgttacagtctatatggtggaaacagcctgtgtgcagacctcctcctaaaattcgttagtatggtagtaaaattcatgtattttttgatgacagtaatttacacatatttctctctttttcataagattattgcttccgccaattacatgctttcagaactttttcaattggatgaacctaaaaaggaagaaaattcagaatctcctttaaatgagaattctgatgaaagttatagtgaagaggaggaagagatgcccgacagtgatgaaaatggatcctatagcaccagctctgatccatcagatgatagcaaagcagtagctataatcaagtctgttggagaactatcagtaccagaaaaatacaaatctattcatcaaatcagagtaagcctttagaatttatattaaatttttatcaaggaaacataattgttaatcgaatatagttagcctttcaaaagataccattacttcaataaacctttcatggtctagcatctagtaatcattagttttctgaattcttaaagttggttttataattgttcgagggtaactgacccacattatgcaagcctatagtggacaggtgtgtaaaccaggtgtctgtctattcttatgtgaaggattttcctttccagtgaccagtgtgtagtcatagtcatgtctcattactagggcacttctatccggtgttggggttgctgggaaatgacatatatagattgcttggtgaacatagagtagagaagggggtggctcttggaactgtatatggtgagctctggtacattatccctgtgctatataggacagtacttttttcgtgactcttgtggtcatgtctgttgtattggacatgtctctgccctggagagggccagacagatttctccctgtgtggattgcactgactctaccatcagtgtatctccaggcagtatatacctttcaacataccgtctccctatgattagatccaggccagccttaagagttctggctgttccctgaactgaaatacagtcgtatttacagataatctcttaatttaagcactgagtgtaactttcagatggaaactctaagcaagtttttgaggggctatgtctgtcaccttaaaacattgaccatctttctgaccttcacttgctccattggtttgccgtggccatgctgggttttttttctctcaaaagcatcaagattatgctcattggagggtctttgtatttgctgttgcttctgcttggaatgtacctaccctaggtctgttcatggctgccttttttaaggcttaagtcttgactgaaatgttgcctcttcagggagatgttccctgaccactctggccaaagcatgctctacttttttgtccttcaaggagcctatctgttcctgaagttcttaatgtttgtcttgcttcactagaacgtaagctccctgcaggtacagaccctctatctcccatgtctagaacacattatgggtgctcagtaaatatttgactaaatgactgcaggaaaaagtcattaactgtccatctaaattttagttcactttcagcttgaacttccacagtggagtgaaaaaatgttctggttataatcattgattgcaaaagttacatgtatctggaaaactgcattgtaacactaggccatggacttacggggcaattaggtaataattaaagatgtaatgagttagtgtcactatttttcacagatagcactttctgttccgtatctgaagcactcaaaaaatgcagtcttagtattcatataaacatgtctttagttagcctttccttatcctcattgaatgactttgtggtatggacagtcagcatgagctccagggtcccagctccccactcactcaccgtgt

SEQ ID NO: 63493 - DNA, 1049 bp, Homo sapiens
gctgggtgattaagtgtggttttgtttttggtttcaatataatggccatgtatttgaggattggggtaacaaggtaggaggagatacttctttttacgtaaaatttggcaagtttttaatctaatttactagttatataaactgtaattttcatttagaaagaaaaaaaaaaacaaaggaaacaagtgcatcatcatgctcagcctgagtcagaaagcagcagcacggattggcttcttgtagccttgagatgggaacacagagtggtcttcagtctactcggaataactttcttcattgaaatattttcattgacttacttttttcatttcctcataatattgtctctttataaattatcccaaaattaaattaacatctgggtagttgtgaagtgtgttttattttaatgcagtattggtatatgtttaagctgagtcagaaatgtacactgttttctcctttgcaggctattgattactatttgaaagcgctaaggtcattgggaacacgagacatacacccagctgtttgggattcagtgaactgggaattgtccactacttactttactatggcaactctacagcaagattatgctccgttatctagaaaagctcaggagcaggtgataatatttgctggagtataaaataagttctcaatctaattcccttgtttaacaaatatttagcgtctgttgtcttttccctaataagcagtatttaaacgttttaaaaactcctacagtcagattagaagcttatttttttcttccccctcaaaacaagaacagattgagaaagaagtcagtgaggccatgatgaagtccctaaaatactgcgatgtggattcagtgtctgctcgacagcccctttgtcagtatcgagctgcaaccatccatcacaggctggcctccatgtaccacagctgtctgaggaatcaggtattgtcagtccaagttaagtacagtgccacatcagtttaaaagtgttctgggtgctttttgtttttttaacatggtcatatatgtcttccttgacgtccac

SEQ ID NO: 63494 - DNA, 1775 bp, Homo sapiens
ggcctcccaaagtgctggaagatactggaacaaatttgctaagatgataagtgtgtttaattctctcctttaaatgttttactactgtgagtactttagaaaataatgtaaatattttagagggttttgttagccaggtttgtgggttttgtaagccaagttaataaatgctctagtttgtgacaccttttattctatcttattttacccagtgtttttttttttgttttttttttctagtacatatgattcagacctcccttcctaatgtctatattgtctggtcgttgtcccaacaacactttcatacataagcaatagcttgtcttccagatgccaaatctatgctgaaatcacattgatccattgattttaaagagaataggttgtttagaaagtgtgggattatacttctaaaggaagaaggcaacagttattctctccccacccgcagagtcggggagtccccaagaccattgtcacttctcacactaactacgagtctgtcggcggtctccaagaccaccctcaggtttgagaatttgctaaaggactcacagaactcactgaaagctgttctgcttacagccacaatttcttaacaatgaaaggatgtacattaaaatcagccaagggaagaggctcgggaggcagagtcctggagagttctaagcgcggagctcccagttcctctgctgctggagttacagatagtgctaactcaccccggcagtgatgcatgacagtgctcaccaagtgtatcaatcaatacatgtacaactgcggaagctcacccaagccttggtgtccagagttttcattggaacttggtcagatagacatggttgactgccacgtggctgatctttgtctccagtgcctccagaggtcaagctgttaccctggggcccaaagtccccacagtaaatcccattgttaggctatccattgtgacccaaggacccccaggtaaacaaaggcgttcttaccgggcaggacatttcaaggacttagtggttaccttctgggagccaaggacaaagactaaacctctgtacaagatttaatcctctactgcacaccgcacacaattgagttctaggagaacaggagcaaaggtgtcctgtagtatctgatagctctagaaaaattgtagttagaaggctctagaataaaacaaaaccttgttcatctggtctgacttcctgcctttgaacagagatgtaataaactattttacagataggacaactgatactaagtgcttatgtgacttgaccacacaactggtaaaatgtgaggtgggcctcgagccccagactcttttctgctggtcccttttcctaaggctcctgttctgaaaaagtggcctgtcttgacaaaaccaaatggtggggcagggaaacaatgattatttattgctttgtccagacttagtatttttgtcaagggaatattattaaatagaagttggatttagaagatttaagattctcattagcttcctttatagcattttgaaagtctgaattttcattaatacattaacattagatgggtttctagatttatattaaagaaatgaacgttttgtatttaaaactttaggtcagaatagcaatgttggaaagttgaaaacactatctggggctcttgatataatggtgagaactgagcacgcattccagcttatccagaaggagcttatagaagaatttggccaggtacatggagaaaatgactgtctttggtttttgtgtgtcttaagctacatg

SEQ ID NO: 63495 - DNA, 1064 bp, Homo sapiens
ttgcctggtattcatctcctttctttaatttgcaagtattttaaaatatttttaagaatatatctcaacaagaccatagttaacaaattataaagtctcttaagtttttttgttgctgttggtgggaatttgttttgttttatgttttaaaagaaaaggcctgtgccctcttttctaatttccactagaatgcctgggagcagttgaatggtgaatgggcctaagcaggctcctcaggaaggaatttctcgttttctgggcattccggcattcattttaccttctgctgttgctaaaagcttcctgaagcccccatgttgcgcccacctattgctcttctagccctgcttggtcaaatcctgtgtggtaccgtacatttctgcgttgtgtctaatgttggaaagtcaggattaatttcttctacaaaagtgcctattggggctgagacattttaattatgtgttttagtctatcaaaatgatcataggtgtgctttttgtttgtttgtcttgtttagggttaaaaatgtattggatgaatgaaactgcagttccatcacttggtacgatatgaaactacagttgttggatagctcgagtaaaataactttttgttgtttttagcctaagagtggtgacgccgctgcagctgctgatgcttctcctagtctcaatcgagaagaagtgatgaaactcctcagtatatttgagtctcggttgtcatttcttctccttcagtccattaaactgctatcttcaactaaaaagaaaacaaggtaaattaagtggttatttgtaggaatttctttcctagcaccctacctataaaaattttctctactaacatcataaagaaaaactaggggccaggcacattggctcacacctgcaatcccagcactttgggaggccaaggcaggcagatcacttgagttcaggagttcgagaccagcccggccaacatggtgaaaccccatctctaccaaaaatacaaaaactaaccggtatggtggcgggcgcctgttaatcctagctacaggggaggctgaggcacgagacttgctt

SEQ ID NO: 63496 - DNA, 1404 bp, Homo sapiens
gcagtggcgcaatctcggctcactgcaagctccgcctcccaggttcacgccattctcctgcctcagcctcccgagtagctgggactacaggcatccgccaccacacccggctaattttttgtatttttagtagagacggggtttcaccgtgttagccaggatggtctcgatcttctgacctcatgatccacctgcctcagcctcccaaagtgccgggattacaagtgtgagccaccgcgcctggccttatttggttgttaatccacagtgtctgcaccatatcctggttgtggtacacagcagcgggtgttgatacactcactgtaatttagcagagacatccatctttttgaagagccctaaggcggagcagatactgcatatggtaacaaggcttggaaagaattcctgcctttttctaacagcagtgggtaaagtttttaaatttgtattggtttccacaagatggtaatataaatatatgatacatgagaaaaagtgattcattgatttttcacaagtcaatcatttgagtaattggtaataggtaatagtttcagttttatcttttataactgtaacagtcatatgtatgacctaagtaatttttattttaatggaaggttttctaagcttctgtttatttaggttattaatattctgctgaaaactattgtaatctaaagttttcatgcatgacacatacaatcttatttagctaatttatattgattttaaggtttattaaacttaaatgtgataatgtgttaataaaataaacactttgacaagtttcaaaacaaaaatattaattactaagtcagtgactatttcatttttcactgatgtgcaaatgaaaacatctataattttattgttaagaggaaaataccctctgccacaggcttagttgtttcacagtgaatacatgaacattctcttttgcaatatagagagaaatcagaatgagacctaaaagaaagaaaatgcaatcagccctctgtatccaaggattctgcatccacagattcaaccaaccacagactgaaaatattaaataaataaaaaataatacaaatttaaaaagcaatatagtataacaactatttatatggcattgacattgtattaggtattataagtcatctagagttgatttaaagtatataggaagatgtacacagcctaaatgcaaatgctgcaccattttatatcagggactccagcctcctcaaattttagtttcctggagggtcctggaaccaatcctccacagatactgagaggccatgttaaacaaatttttgttttattttttgactactgctttttccacttcatgccctctggcaaaaaaataaacaaggcttaataattaaaatcttaagtttattagattcctat

SEQ ID NO: 63497 - DNA, 1006 bp, Homo sapiens
cttctggaaagaatcaacgttatcgtccacctgctgggccagcttgccgccggcagtgcagcgagcagcaatgccgttcagtgactgcacagagccgtgtcccagacacgctgtcagtgccttcaacacggagccggtttgttcattcggtgctttgtttcattaaataatagggaaatatccatttaaaacaggtatatcagtggaaacacagagttattttaagtgacagacaaattacggttgagttctgtggcttcttcacttgaagtgctaacatcagaatcaaacttaaagcttccactatttatgtctttgagaagtatgtagtacctcggtattaacagacctgctgtgatgcagttacactttcacgtatttttgaagtatgtcaagctacacgggtctaagatatgattattttggataaaatgttactttggtcaagagaacttttatccagatgacattacaggttcaagtgggttaaggagacctcctgtacatctacagtgtttccttttaaattgtccagaaaaaaggtgtgttcttcataagcttcagtgcaggatttttcaaagacgagctgttgtgcaatttgctgtatttaatgcatgttctgaaaggattcacttttgactttatatgacagttgatcaagaacaggtactacccctttttttcatttcaaacttgaaactgtgaataaggtaagaaaactattttgaataaataaactatttatttaaaatgtctttgtatttttccaatttccattcttcacattgagttttgatttgaactcagtctaaaattaataaactttacaaagcaaagctcaaaacattaaaagtaaaattctgctgtccactaaattctccctagaatattttacttattgctgctgctacatggctcttgtccagttacacacaaacatcccctgttctttgtaatggctacagtgcacaaggctgttttcgttcataattcatattttcaattt

SEQ ID NO: 63498 - DNA, 1001 bp, Homo sapiens
tgttttcacatttggggaagattctggcatttgacaacttatcagcttttttggacagtattgttgcaaattggcattcaaatcctatgctgtcctcactattctgcaaagagttaagggctgaaaatgcccttaagtcttcccagagtggagatgctgggagcagaggttgtggtgaaaggagaggcaggccgttcttagcaggcttctctctctaaggcctgtgcattcgccttttggcacttggcctagtggctgttggtgtggctagaagaggagtgggcagtgagcttgtctttgttgggggtggctgcagagccactcctggctgccggttaccggctgcctcctgagcatgagccctggctcatctggagcctctttaaaggtagaaaatgtttgccccagtgccagtcagcaccaggcctgatcttcaccttcctgacttagttaaggtgcaaagtctgccttctaaatagtgactgcaggctagggagtcacttcaggatcagaaggagttaaaagaatgtggctaacttgtttgtgtggatgttcattttctgagcacctccacacacattacctcttatgatcttcatataacaacccttcaagttcggcaaggtagcaggtgctcttcctgtttacagatgctgaaactgagtcctagaagcagagccaggcctggagcccagggctgcttcccccttcccaaagctgcccctccccattcccctgtgcacaggcactggccctgagttttcacaaagcctggttatttattcacaggggagtcctcagcactgcctcttctatttccctgtggaaacctcaaaagagaaatcctgccaaaagcgctcaaggacaaaggcgagtagaatgctttgactgcatcccttaccactttgggatccaccaggagcctttgcagtgatagaagtgggtggccctgcagagagcacacaagggagagcagggctgggttggataagccaggccag

SEQ ID NO: 63499 - DNA, 1026 bp, Homo sapiens
ggcggggggccgggcccggtgtctcgcgcctgtaatcccagcacttagggaggtcaaagcgggtggatcaccagaggtcaggagttcgagaccagcctggccaacatggcaaaacctcatctctgctaaaagtacaaaaattagccgggcgtggtggcggacacctgtaatcccagcactttgggaggccgagatgggtggatcacttgaggtcaggagttcgagaccagcctgcccaacatggcgaaatcccatctctactaaaaatacaaaaactagccaggtgtggtggtgcgcgcctgtagtcccagctactcaggaggctaaggcaggagaatcgcatgcccccaggagacggaggttgcagtgagccgagatcgcgccaccgcactccacactccagcctgggcgacagaggtagaccctatctaaaaaaaaaaaaaaatgcttcggggccagtggggtagtctaggttaaagacccgagcctatttggagagaagagtggaggggactgcggccaactgcagagcgagcgccagcccctgtggcaggtggggatgcagcctggggcagccaggtcttcccattgcgagagaaacagggttcatcagctttctaggaataagatctgcggttctcaattgatttttctctgtaaaatgaggggggtgggttggatatgtttgattctaggaatggtgtgagctgcgctaataggctgcttctgtttaagcagggtaacatctgataaatcagtgatccttcatcagtacgagatggcgtgccctaaaggtccccaggagcccagattgcccataatcgtgttctgtgatttcggtctttcctgggagtctcttgtctacccagccatgtcatggatattaaagtaatacttacacatcagcgctccacatctgatggggcagcttgaaatggcctctttgggtcgcacaactgcaaaaacatgttcctgtaatggagaagagaggaagctgtcaaaaaagacccatcaaaaggctaagat

SEQ ID NO: 63500 - DNA, 1125 bp, Homo sapiens
ggtgtcgcgcagtcccagcgaaaaggctgcaggagcaatgacaacaggggcggaagccccctccccacgcagcccgaggggccgcggcggccacccgcgccgggccccaggaccccgcacctcagactggggtcgcgtgggtggctgcgcgcagctaggcgctcgcgcatgcgcaccgccatccaggccacggaatgaggccagaggttagatgggttgaaccactacgggaaggggaggggaagctttgggaggagtgatggagggtggaaagcggaagaaaaaagcaagatgggaccgcaagctggacgtgactgtaaggggtcatggctgcggaatccagcaggggcattggggttgacgtgcactcagcgccgagcttcttcgtagttcctcacccccttggctactatgggctggtccggaaggtcaggcaaggggaagctgcgcaggcgcagtgtgagcggcaacatggcgtccaggtctaagcggcgtgccgtggaaagtggggttccgcagccgccggatcccccagtccagcgcgacgaggaagaggaaaaagaagtcgaaaatgaggatgaagacgatgatgacagtgacaaggaaaaggatgaagaggacgaggtcattgacgaggtgagaaggacacgctcccctagttggtttatacctgagaaaaactttttggcaagcccaggctgtgtaaaaatagtgtagggtcttccctgaccctgagggtctgtgaggagaaactggagataagttctttctcaggtttctcctcggtctttaacacactgcagccatagtagttattttttaaaggtctagtccggtccagttaatctcccaacccgcgtcctccccgaaaaagcccgccacaacaggtgtgttcttctcgtcctctttagttctcaggctgaagcctcagatcctgaatcggccaccccgggctcgcagagggggccctctcccctcggggcagcagctgtcctcctcttcactctgcgggcggcactcacttgggccctcagtttcttgaaggctcttgccgcgttctaccgtagaagccttttcaaatgctcttctttatcctgcagttttcccttccttcttcagatctca

SEQ ID NO: 63501 - DNA, 1050 bp, Homo sapiens
tttatttctatgaatatttccttaatgcctatattccttcctaaatcgtaagctgcacgagagcaggatcatttgtgtctgccttactaaccttttcatcttgagtgcctggcacagtgcttggtacctggattgatacttaataaatatttgctaagcaaatgtagtgtaacctcaaatccatgggctaagtcaagctctaggcaattccagggacttttgaagtgattttgatttttgcccacccttgtaatcaggaaaataatttatcctttgtggctgccgtgtctggtttatttgaactggactttctcaacatttaaactaggttactctgagtgttttgttttctcaggcttttgtgtcacctgaagaaatagtgtgaaggtgctttgtattcttcacagatggcaatcttggcaatgtttgcctgttttaaagtctagatgtttgtagtttttctggtaacaactattttgtgtgttatttacaggaagtgaatattgaatttgaagcttattccctatcagataatgattatgacggaattaagaaattactgcagcaggtattgtcttttatttattatgcataaatttcctcttctaagaaaaatcaggggccgggtgcagtggttcatgcctataatctcagcattttggaaggccgaggtgagaggattgcttgagcccaggagtttgagaccagcctgggcaacataatgagaacctgtctctacaaaaaaattaaaaattagccaactgtggtagcacacaccgttagtcctaactcctcaggaggctgaggctggaggattacttgagtctaagagctcaaggctgcagctatgaatgtgccattgagctccagtctgggcaacagagtgagcctctgtctctaaaaaaaaagaaaattcaggtcattcaatacaggctctcccaagttcatctttttagaatttccatttctatcctctccaccttgcctggaaggaagaattatttcctttcatctgctaattagagttattttgtttttttttttaattca

SEQ ID NO: 63502 - DNA, 1034 bp, Homo sapiens
gtctctctgcagctgttatctttgctacttgtgtagtggggatattctcaggctttgctgcctcaatgttgagggcatttactgacattttattttgtttcgattcatctctttttattgattctctgatgagttgtaataaaaagtaaaccagctgcttacccacctcagaataagatgcaggctacacttagtctttaattttgaaataaactgtccagttacttccatctatctttatgagatggactagagttgccattccagtgtgtctgaatgttaattatgactctcttaccactcatcatgggatggtaaataaccagtgtatttacttttgagaaatgcttaagcagtcaacactgaagacatacaagacgttaaggctatggcaggaaactgcccttagctgtaagatgaaaagtgatagcttttactctcaggttttgtcctctatgtgatggcttgtaataggaaacaagctttctctttgctttctagggtacccagtgtgttgaacaaattcaagagttggttctacgcttctgtgagaagaactgtgaaaagagcatggttgaacagctggacaagtttttaaatgacaccaccaagcctgtgggccttctcctaagtgaaagattcattaatgtccctccacagatcgctctgcccatgtaccagcagcttcagtaagagattctgggaaaatatctttgaacagtaatttttttttcaaatagattcctaaatgtcatttaagtagaatatgtagatatagaaagagttctgtccttggtttaagtgggtttagtgtgaggggagtggaagaaacatcctgtgaagtacatacattattaacaactggctttttgaagagtttgtgacaataatcatgaaattttaacttaagatttaagtgatatataagtagataatttcatatagactttgcatccccatttgattgaagtttttcaccttcacagatagctttctgcaacatgaataaaataatgaacaattacaacaataac

SEQ ID NO: 63503 - DNA, 1138 bp, Homo sapiens
ctctatccctgttcctcatgtgggtttaaaatctacttggtttgtgttttataacttctgcctgaatgtcccatttgaactttttcaattctgagttttgcttttttttagctctcattcttatttaagcatatgccaaacgtaatattctttgccgtagatcaaatgggttttgtctttgggttgtcccgatttttaattcatggttacttatttggtttagaaggcaattctcaagttcaactactcagtgcaggaggagagcgacacttgtctgggaggcaaatggtcttttgatgacgtaccaatgacgcccttgcgaactgtgatgttaattccaggcgacaagatgaacgaaatcatggataaactgaaagaatatctatctgtctaacccatttccaatggacagtgatgggcttgtttttgtaaaattaccagaaaactcagtggagatttactgaaaaactcagactttattcagattaagttcctctacaaaaagtagggttctgtcccatgtgtctctgacacatttacaaaataccagttttttaaaattttggtcaaattatgagtggttgatttaaaaacttttccaagaagaagaaaagcatggagtagtaatttaaagaactcaataaaaacttctattttttattttaaaataatatacacagtgttattttcttcaagaccgtcctgtggatgtgaaatccgtcttcgcgtcatgtatctcccatatccagcagttcagccatccagctacctttgggaccctgctgcaccttgtgtttgctggggagtcactggagagtgcatctctgttcagtttcagggcacgtctcacacatttgctgttccttattcattgttgacacaggggataggtgatccactacttgctgtagaatgtccttactttcactaggaggcagattactgaaatagtattgtggtaccagctgcataaatctgtttatttaagacaaaaagatgagattatgagtggggaaggtggtgagagacaccaaacattatgtctgggcacttcccatccctggagaatctacctgtagaaccggtatttaatttgaactcagatagtatctcagtccgactttgtaaaataaatact

SEQ ID NO: 63504 - DNA, 1017 bp, Homo sapiens
atactagatttcttttgctgaaataatcagtgcagatgaagaaaatgtgtcactagaggtgtttttccccaaataatgttgtgtgcctgttttttatttcctattggcttcattcatcctggcttgtatgttttaatttattctaatactgggggaacagaccaaccattgtgctgtatcggaactggttccaatcctcttcttgtgtctggacctccaagcacctcaggttttccctgctcctgccggaatagaagcaggatattaaccatattcagttgaccttagaaaagcaaacacacacacacaaaaggagagggagaattaggatgactcactctaaatttctgggatttctaagtaaacaagaataacatatttattcagagtaccaagacaggagccatgccactaacagtcgtgacccctcccctctgcatgttaggctaagataaaatgtcttcattattgctaaccatgtgacctttttcattttgaagctccaaattgcttttcacatgtgccacatggagctgaagaggctgccttgacttgttggaagacatttttacatcccgaaggagatcactttaccctcatcagcatttacaaggcttaccaagacacaactctgaattctagcagtgagtgtaagtgaatgctcagaaactacctattaattccaccttcctttccctagataagtctgagtccttattagttattcatcaaacattcttcgccagccctactggccacttgaatgcaatggcacttgaggccctaaacgcacccacaggcatctgcagagtgggagatgctcagtccccctgctcccacggagctctggtgtgccaccatggcgggcctgtacttccagagctccaggactccactcagccagccttcagagcaagcttgcttggggcatggtgacgggggacacagactcgtacatgggtctttggaggaagacaagaacagccacctctacgtgcccactgtcagagttgtgct

SEQ ID NO: 63505 - DNA, 1039 bp, Homo sapiens
aggaaggtggaattaataggtagtttctgagcattcacttacactcactgctagaattcagagttgtgtcttggtaagccttgtaaatgctgatgagggtaaagtgatctccttcgggatgtaaaaatgtcttccaacaagtcaaggcagcctcttcagctccatgtggcacatgtgaaaagcaatttggagcttcaaaatgaaaaaggtcacatggttagcaataatgaagacattttatcttagcctaacatgcagaggggaggggtcacgactgttagtggcatggctcctgtcttggtactctgaataaatatgttattcttgtttacttagaaatcccagaaatttagagtgagtcatcctaattctccctctccttttgtgtgtgtgtgtttgcttttctaaggtcaactgaatatggttaatatcctgcttctattccggcaggagcagggaaaacctgaggtgcttggaggtccagacacaagaagaggattggaaccagttccgatacagcacaatggttggtctgttcccccagtattagaataaattaaaacatacaagccaggatgaatgaagccaataggaaataaaaaacaggcacacaacattatttggggaaaaacacctctagtgacacattttcttcatctgcactgattatttcagcaaaagaaatctagtatgttttcatacatctgatgtataaatttgctgaactttgagttagttttcttaagataatttttcatattaagaaaattttccttttctaacctattaaaatacctcactatcatttcaaaaggttaaatgagttgatcactatctctgctctgtgctcctcaaaatataatttcaaatggatccgatctaaatctatacctagtgcagatttgcaaaaaaagaaaaggaatagtcattaaggatacctgttaccatggctgcgattgttagcacttcatctacacagtcaaattcacaggacgctaagatagacttcgagagttgtggatcaagaggaaactctgac

SEQ ID NO: 63506 - DNA, 1432 bp, Homo sapiens
gcttaaaacacaatagctgataacagaagccatatttttgatgggccttctaatcaaaaagaaaataatctctaaatacattagtcttttcagaaacacagttgaggttgaaagtattttttttttcatttttgtccttgatttttttttttttttttttgagacggagtcttgctctgtcgcccaggctggcgtgcagtggcacaatctctgctcactgcaagctccgcctcccgggttcacgccattctcctgcctcagcctcccaagtagctgagactacaggcgcccgccaccacgcctagctaattttttgtattttaagtagagacggggtttcaccatgttagccaggatggtctcgatctcctgacttcgtgatccgcccacctcggcctcccaaagtgctgggattacaggcgtgagccaccacacccggcctgtccttgatttttatctgcctttttttgtctggcagtcaaactttcacagtccctgttaactcctgtttcttcttaactttatttcctagcagtaactctgtgcataatccatattgttcagagtttcactaagtaagatgtaatacagcccactgctgatttactgatgaaagaaaatcacttataagatgaaccctgctgtaagacagagatgtctcttgttttgttttcagcagaagctgatcctgtctcattttttcctgctacaggttcctcagtggtgtgctgaatattgtctttccatccactaccagcacgggggcgtgatatgcacacaggtccacaagcagactgtggtccagctcgccctgcgggtggcggatgaaatggatgttaacattggtcatgaggttggctacgtgatccctttcgagaactgctgtaccaacgaaacaatcctgaggttggtttgtggggttcagtccgctccctgctgatgattcttggcttaggttctacaattctgaaggagcattattctggcattctacctgttaagcatctatgctgtgcagtagcaactggtctctgtcatcagccagccagcaacagttgctttcccacactggcatcatctgggattccttgtctaaatgtatcccatgactcccattatcccctggaaaaagttaacaacttgcttggcccctcagaaccttcaagcgtgtgcttctggagctatgcctcatgcagggtccacatcattgcctgtgtgcaagccacatggacacctggagcacactgtgtgccctgtgctttccacaccctgtgcctgtacacctgcccctccctgtgctcagcatgtccgggcccggctagttcctcctagtcactcagtatgcagtgtagcagccacctactccaggaaggcttccctgcccctccagtaatacacattagaaaaccctctgtggggcttctggaaaact

SEQ ID NO: 63507 - DNA, 1113 bp, Homo sapiens
tgccggtgtagaaaccattttttttttctccaggagtccttgttccgtttagtggtgaactgtgttttgaaaccaagatctggacactaagtacctattaccattggtttatcattgcaattttttttttgagacagtgtttcattctgtcacccaggctggagtgcagtggcatgatcacggctcactgcaacctcaacatcctgggctcaagtgatcctcccacctcagcctttagagtagctgggactacaagtgtgtgccactacactcaactaatttttgtattttttatagagacggggttttgtcatgttgcccaggttggtctcggactcctgggctcaagcaacctacctgccttggcctcccaaagtgctgggattataggcccacttcacccggcctatcattgcttttaggccatctcagtggacacaacaaggaaataaatgtatgtgagtgcaatatacacacgtctcattctatccatctatttgtggctctgtttctctctgtctttctctatttttatgtatttctattttcttacctctcatattttttatctctctttctatatcttaaaaaccatgagtttgtactgatgcctctgattccagtttagcactacagggtttattctagccttcccagttttcatatccataacttctctatgagaaacagggcttcgtgttattcacactatctttacctgttctcagattgaacaagtaaagatactcaaaagaacaattcatattgtagtttcagaattgctaatccacactgcagtttaaaaaatttttttaatctacttcttgagttttagaatttatcatcttcaagagcaagaattgttatatgttatatgttatattaatacctagcaatggtttctcttgtcatttttaatttctcaattatttcaatgaattaggcttattttctgttaattgggacgacatgtatcttcaaagtgagaaaaatcaaaatggtactcaaataagaaaatggatctatcctaaactaatttagatagtgggagcattggttggtttcttttggaaacaacttggtttttgttgttgttgttttaagagtttgcga

SEQ ID NO: 63508 - DNA, 1267 bp, Homo sapiens
tccattcacagttgatcaagacgcagagcctgagatagaggtcaggcagagagcacgaggcccagtgcagaatcattttctgaaccagccaggaaataccggaacccaccaaactttaaacaccagcctaaattattcctgttcttttaagcaggcagcagaaatgacagaaacccgttaacagaaaaaaaaaaaataatgcttttcatttgaactcctgtgcattttctttttaacttatatgtgttcctaattttccttactctttttgtttgtttgtttcttagtgtggtttattgacaatcatttacaatgccgaagagtgctgtagtgagccagcacagtgggtaacacagcaacggagaacagatgcaggtttgaggaatttaacttgctaaaaccttgaactgaagtcttagagattggaacatacgggtttgtataaataggcttttaagccctgtttgcaatgggttactgataggagaaacttgcttgtggaatgtcagctgcgtgagctcactgtcagacaagatggaagaagaagggctggagtgtccaaactcttcctctgaaaaacgctattttcctgaatccctggattccagcgatggggatgaggaagaggttttggcctgtgaggatttggaacttaacccctttgatggattgccatattcatcacgttattataaacttctgaaagaaagagaagatcttcctatatggaaagaaaaatactcctttatggagaacctgcttcaaaatcaaatcgtgattgtttcaggagatgctaaatgtggtaagagcgctcaggtgagtaaccactacaaaaaataatttgctgtatgtgttgattttttaattgttatttaatgacatgtcacagcctagtgttctaataatagtgtctaaaacaaaaaacaaaacattattcagataaaataattaaatcacgtacctaattttattaattttactaatactagctgaaaagttaataatatctatgtagaaattaattgtgtttagggtaccactgaattgtctatagagcagtattaaaattactcaaatgatcctagtattaaatttactcaaatgatccattgtgtatatgatattttaaaagatgtgatgcgtgttatttcctcagcatgggtatggggattaactgctctgtttcagtgcccagtggtctgagaatccagatatgtggatgtgcttgctggtgaagctggctgagctactgaaatcaaaagcacaa

SEQ ID NO: 63509 - DNA, 1050 bp, Homo sapiens
aattatttttttggaaacggagtcttactctgatgcccaggttggagtgcagtggcgcacttcagctcactgcaacctccgcctcccagattcaagcaattctcccacctcaacctcctgagtagctgagattacaggcatccgccaccatgcccagctaatttttgtatttttagtagagacggggtttcactatgttggccaggcagatcttgaactcctgacctcaagtgatccacccgccttggcctcccaaagttctggggttacaggcatgaatcaccacgcctggccaggacagaattaataccttttactttttcagcattatgctatcacaataaagttcagagtttgctttattaagatagtgtttgaatattctaggagattcagaaacctgcagtactagggaaatctgagttttagatataataacaaaattataaattttaaagatttgtattgtagaagattatccttaagtgttttttaaattactaatttactatttcacccttcatgcaaatatatgaattataaatgattgattgttccatagaatatgaagagacattaaataaatcttaaaatatttataaagttttggttaaaatgagcacaatttcttctcaaaaaaattcactgccagcctgggcaacatagggagacactgtctctacaaaaataaaaaaataaaaattagccaggcatggtggtgtgttcctatagtcccactactcgagagactgaggcaggatgatcaattgagcccagaagttggaggctgcagtgagctatgatcatgccactgcactccagcctgggcgacggagtaagaccctgtctttaaaaaaaaaaaaaaaaaatgcattgctcaaacagataatgttgaaacaaattctggggtaatataaacataataatttttaaaaggcaaggcgtgtatattttacatataaatatgtatattatatagtacagggtttacaaactatgagtcagatcatgagacagatttatttttgcagactaatttactgttgagtg

SEQ ID NO: 63510 - DNA, 1018 bp, Homo sapiens
agggcggcctccgcgcctcctgctccgggagccgcgcctcagcgggaggacggagccctgcgggcagccctcgcaccaggggctccctccgagcccgggcatgggccgggcctggggcggtccctcgagcccccctgacgggaagcgtggagcaatgcgagccgccgccgtcgtcgctgtcgtccccagtgagcctggcgcgtctcctgaatcgcgagagccaggagcacggttttgcccggctttgccccgtcatccccgtgtcccatttcaggcagggggcccgggttggatctttctcgctggcttcgttttttgtgtgttgatttgtttcagtccttcgcgtttccggttgagttacggaatctgcccacacgttttgtggccaaactttgtagggctgtgaaacaatgtaacattatcccacacaatagtctttcatactggttttaaaacacagtgattcagggtttgctttaaggaagctttgaggatcacaagagattattatctggtaggttgtaaaaattcaaacaaccaggagagtatcataggttccggaacaccagaaggaggaaagaaaaatggagacgagagaaaaaggataagcaagaaagtgcaggggcattaagggtgtggggggctgcaggattgatttggtattcaggtctggagattatggcccctctattaattccaaccgctgctccagacagtacttgagggaaatggaaggaagagccgttttgggggtcatggaagtgattactaatcttgccagtagaaagatttccactccatggatgacaaggacactaaggagaattactttcctcttagggaatcattgagaggttaattgaacttgagaagcatatattctgtgatggaaactgacatttattatattcttccaaattaggttttccccctctcagactatatggggactttttcagattaattgtcaaaacaagaaggtttatgtgtggatattgacaagcagcgtgatatatac

SEQ ID NO: 63511 - DNA, 1007 bp, Homo sapiens
ttcttaacacatggagttgttttcaggattaagccacagcacagaaaccaccgtggcatcatgcctgtgatgcagtaatgctcactaaacattagctgtggtggtggttattaggaagaatcaaaaggaacccgtcagcagccctggaaagaacttttagagcaggcagcaaaggcatcatgtatgatgacttgatgtgagtttagcataaatgacagtcaaacaatggcactaattttggagaggggaggttgtctgttatattactactaagtatgaaatctgttctaaggatgtggtttgagaagcctagtaggtggagatgcaaaacccatcattatcatgaaaagctccttgatgaggaagcagcaaacctagcactaaggaatgatgacaattagtcctttgctgaccttcattactggctccatgcaacactcctgggaggcaaacctagtgtctccttcccagatgccaaccctgagcccacgcaaggtgtctgaccccaaggacatctcttagcaagctggtgtgagcatcagcattggatcgcctccgtttctgctttctgatcactgttacctttgtatataatagagctgaaaatgtaatctctcagtggacagcagccaaacatgtgcattcagagttccagagccggccaggaacttactttcgccccggaagcctgggctgggagtttgcaagtagatagcgtgggccatgcaattcttgattgaaaacaaactgttgggctgtgttgtagtcatgtaatcgtctcgttaactcattaatgtaatgtctgtaattgtgatctgtttgaaaccaagttggaccaatgcaatcagcatatattctgtgatgcactttgtatcctggtcatattctcctgctaacccaatgctcaccagatgactgtggggaccagcaagggaaaagatgagctcaccttatgtgggttagaatctagggtcagatgttcaactttgagcagtttcttctacttt

SEQ ID NO: 63512 - DNA, 1049 bp, Homo sapiens
aaaatggcggcctagacgcggagtttcctgcccgacccgcggcggctccggcggcgccatgacgcgctgggtgcccaccaagcgcgaggagaagtacggcgtgggtgagcagcgccgccgccgccgcgcctctcgccccaagcccaggctccggcggggcgggtgtgccgggcgcctgttgccgccgccccgagcggccgccgggccggggagaggcgcttccgcccgcgcccgcgccgccgccccgctcgcaatgcccggcgaccccggccgccccgcgcccccggcggcgtcagctccagccccggggatgcgggtcgggaacacgagggggtggggtgggaatgggggcgggcgcgtccctccctagggtgtcccctccgacgcccgctcctctggacctctgccgtggagccccccgggctacccccaactccccggccccggccgctgctatctgcgcggctgggcccgtcagggaagcccaggggtcactgtctcgcggcggcttctgcttcttggatgaacttgcgtcccgcgtccgggctctgggtgggcgggctcaggtcggcgcggtcccagcggataattccgccctttcccggcggggaggagggggcgcgacctgggtggccagcgccccttgcccctcggcggtctcgctggggaccgtgtgggaccttggagagaaggcgagcggccgagcgccccagtggccccaggcctggagacccttccgggagagcgggggcctgtttttgctccgcggctctttgtcgcttccgaggggggatggaaggagtcgggttgcaagtttacatttcggacccgagtgcgcattcctgagagggaggctttcccttgcggctgaatagacgggcccgtccgcgtgggacccgcatccttgcgccccggggacccgcagccggtcgccgaggcctgcggacgcccacctcttcgtgatctgcgcgcctggtgtcgggactgggccgtggctactctcctgctctcccgggtccgggatcttcccagttggttttcgggcttgc

SEQ ID NO: 63513 - DNA, 1049 bp, Homo sapiens
aggtccacgccctaatccccagactctgtgaattcaatatgttacatggcaaaagggacttggcagatgtgattcaggttacttggaattcgtagatgggagattattcaggaccatccacgtgggcacagagaactttggctgtcaaagttgtgaaacaggcagtcagaagatcctatgtttggaagcacagttgctggccctgagatgtaggggctcacttgcaaggaccagagagaggcctcagggagctacgggaggcccctagctaatgatcggcagttacaaagaattggatcctgccaacaccctgaatgagcttggaaacagatttcctccccagggcctcctgctaagagcccagccagccaacaccttgattttgagaccctgagctgctgggcgtgtggcctgtggaactgagataatacatttgtgtggttttaagctggctgggttgtgggaatttgttacggcagcagtggaaaactaatacagatgatgggagagaagcttgcagggtgaggctctcttgcacccttgagatctgttactaagttcattgaaggtagtgaacccaagtgtgctcttcactttggccacttccaagtgcagctctcaaatgggatggggcattggcactgctcttactcataatgggacccttgagcaaattactcatactttcttagccttggttttctcatctgtgaagtggaaccaagcctgcttgctgccgagtcgtgaggactcgctgagatgatgttggcagagaatttagccctgcgtttaagatatgccaagtactcaacgaagcgttgcttttgttaactttttatttaataaagcataaagtttagaaacatagtgacaagtgacttctgtgtgcggttaacgggttgctggaaaaatgcctttcttcaaaagttggtttcttgatagtgtgttttgcttcctaattggggtagaagtcacatttgctcagtgtgaggagcctgacttgcgtgccttcacattagctctaagcaatgataattgctaggaatagt

SEQ ID NO: 63514 - DNA, 1023 bp, Homo sapiens
atttttagtagtgacggggtttctccttgttggtcaggctggtcttgaactcccaacctcaggtgatttgcccgcctcggcctcccaaagtgctaggattacaggcatgagccaccgtgcccgtcctgaagcaattgttataattatccaataaataaactattggtgacagtggttttccaatgtccttggcttttcagacaatttgtttttatattttgtgtttgcaaataatttgagcatgccatatttcattttatgctgtggttattgttgcacagaagggaagaaatgatgggcttgattttttaaagactgttcagatctggaggttttggtgagattgtgttttcttattgttgtcggcttaatttcctgcttgaaagggtggttcccatatagcatatgaataaaaaggataatttcagtagaaaaactgctttttcacagaggttttttagcaaaacccttccacatgggaggttgggggtgagaggggaaattgaagacatcccgtagtaatcagcaaattgaacttccaacttgaaatccactttacaaggaatgaagtatgcccagcttcctgctcgaggcaaactgtgaccagctcctggtagactcctctgagaaacacagacctactaacagatccatgttcatggcccttatttccccatctgatgcatgctgtaccttccctaaaaaagtcctgtctgaaaaaaaaaatcgactttagtggcctctgcgtggaagccagtgcagctctgcaaaaaccagccccagtccttaagcggatgagtagttgtgatggggtcttctgcttgttttccgtgtttacagctgacagctgtgttcccttatctcctctcagtatatactgcatgtgtctgagaggagacagagagaaattaagtagaggttaaggatcaaaccgctcatctcagacacttttctgatttgaagggaaatgctcttgtatcttgttttacttttgctgccggtcagttgaagttgaaatcctgg

SEQ ID NO: 63515 - DNA, 1066 bp, Homo sapiens
ggtaatcgttccgttctgttctcttactctccggtgcaaaacctctgccgggacatcctctctccttcatgccgaactctgtcatgcagcagggtttgtggtgtgacccctacttgtcttagggcacttccagtttctgagctcatggaggacagagattgggtctaatctctttctgtatttgtggcacccagtgtggtctctggtacatggtgtgcgggctcactttgttgaagaaatagtgcatgccaaaaatcgtggggaggaaaaccatggttttcattttgcttaggaaggccattagaagaggaatcgactgcctatgaacattaaataaagacacaaaactccttgcctttcatgcctactgcttggcccttcctcctcctgcctcccatagaaaacctttctactgtgtgtgaagtggcctctcgtttgcctgtgttctcgtgctgtttggtgtgcatctgtttttaacagatgtaagtgtgtcattatagtcttgttctgttttttattttccctcgtgctccatttaaaatgcactgtgttctctgtgtccctttagtccatggctctaactgcatcgtgtgcacatttcatgttttactaactgcctgcctccccgggtatgagcacttaggttgtccccgcttcccaccacccaagatcaagctgccctgagcatcccatgtccatctcactctgcagggcacacagatgtctttgggctgcgttcccaggagggggttgctgggtcttgggtgtggagatgtagactttggataagcagggcctgcttctcccaggctggttgccgcagtggacactgccacccacggtgaccaggggcttcctgcatcctgcagtgttctgccttctaccactcttaactgtgtacttttcatttctctgactattattaaactgaagcatctcttcatacatgttgaggtcttatgggtttcttctatacatagtttataaactttgctcattttctttcttttcttttttttttttttgagatggagtcttgctctattgcccaggctggagtgcagtg

SEQ ID NO: 63516 - DNA, 1213 bp, Homo sapiens
gtaagaagtgtgagttttgcatcttatttgcattttcctcttgtcacaaagcaccaagagcttgtagattgagatttggcctcttgcagaagtgtctcttgtgggttgtacacaccacagtgtgcagcagcccgcccagggtggaatgcttcttcttccctatagctgagctgagagcgaggccgaggagttcaggttctcagtgtgctgagaagggtccagggtgcagggtgttctgaagaccgtatgtaggttgtaggattcagatctttaggctcagactaattccggaggagctttagacttgcccatctctgatccagatgcaggaagctcacgagcaggtgttgacgctcaaggtctagcccctgttgggatcacctttttgcttcagtgggacacaggatgttggatgaagtcttggggattatgcattactttttgttcctttaatcttttaatgtcgcatggaaaccaaattccgtataatatgttttagtttatgctgaaagcaccttttaattcaacattaactaaatctcatgatctagtgcttatacctcatgcgtatttgaagagatagccattctctaccatctccacaatgctgttttataacaaaatctttctgattgggtttttccccgtatagcaagataacagggagatgtttcgaagtgtgcggcacatgatctatgaccttattgaatggcgatcacaaattctttctggaactctgcctcaggatgaactcaaagaactgaagaagaaggtcacagccaaaattgattatggaaacaggtttgtttatttgaaagatgattttacgcttaaattatccaatgtaataacatcactataagtcttcaggagaccaagatcatattttatcataaaacaaaatttctaccatcaaagtaatggcatgtttttcattttgaaaaggatgaggtattttccactggattctgaactggggaattttgtgagccattcttgaaaccttgtcattcttcaagggatagagtcaagaagccagggagcctgtcattttcaccgttctggagggaaccccatcattactcccctagcaaggaacttttactttctgaccatagtttttgactttgagtccagatctggggggccttgcatagtgacaagcaacaggtttctttctgtggaatcccaggttctgagcattggagtggac

SEQ ID NO: 63517 - DNA, 1049 bp, Homo sapiens
ccagtcacctcccaccagtatatatatatacacacacacacagtagatactcagaaattgactaattgaatcatctgttaattcaacaagtacttactgagcatctactgtgtaccaaatgttgaagacataatgatacatgagacagatgtccttggagggtttagtctaatgagggaacaaaaaattaaataactacacatatataatcattattttgatttattggatggacacctgaaagttttgtatctctgaaaatactcagcacagcagttgcacaggatacaattttttgtctgttgtgtgaatgcatgatttaagaatgtgcaggggagataagaaagtgactgcaccaaggcctttgctgggttatgccaatgagttattacaattttctattctgtagggaataaagaaagcaagtgtcagtgatgagtgttgctggggttgactttctgtttccttccatacacagtctcaaaagcagaacatagatattaacagacaagccaagtttgctgcaaccccttctctggccttgtttgtgaacctcaaaaatgtggtttgtaaaataggagaagatgctgaagtcctcatgtctctatatgaccctgtggagtccaaattcatcaggtgggtgacatttcttggctgccgtctttcctctttggttagtgttaggaacttgggatcagaaccactgaagcgtcccattcatgctgagaggccttggatgaatggctgctggacacgagcaagcagccgagtcaagagctgtcttagacagtgtgatggcagccaggttgggctctgggtcagggtgaaccttcttgcgtgtagattgctatttgctcgtagagttatagcagttgcaggtacactctggccgtatcttaagagtgtagctgaagattgaagtaatactttgtttcctaagttgtcttcgtaagattttatatatcctggtccctcaaatatcactatttccatttttcaaaatttggtttctatgaatgccatttctgtgagttttgtcttgttttttc

SEQ ID NO: 63518 - DNA, 1050 bp, Homo sapiens
gatcttcacagtcactttcaaaagaatcactgttgaatgttgattggacaatgcacagctgtgatttataagcttttctgctggagagaaaaaatatatttattagttattttcattgtggcttcaagttgacctgctaggctcaggatgctctagtcctcaagtttcagatataaatcatatatttggttttaaagtggatcccatctttccctgggagtgatcctgacccatattctcagtctgtagggaagccagtcagtggaggttttcaggtcttggtgatggacataagaatggatatgtgcaggacggtcaaagcaacgaagaagaggaagaaaggcaaactgtgaagagaacgcggttagcttcatgttggtgctcttcatccgccatgttggtgctgtttctccgccatgttggtgttcttcctccgccatgttggtgttcttcctccgccatgttggtgcttttcctctgccatgttggtgctctttctccgccatgttggtgctcttcctccgccatgttggtgctctttatctgccatgttggtgctcttcctccaccgtgctggtgctcttcctccaccctgctgttgctctgttatttttggtgacagcacgaggaatgtgaaagaccaattatctctgttgaggaaagataaaggcatacccaggaagttctgattatttgccctagttcactgtgactctcatttttcatagttttgggaagtggttttctctcttttatggttgcagtacaatttcattacctagcactgtgatatttattttaatttttgtgatttttgggattcatatggatatttatgagggaaaagttcctgattcttgacacatagctggatttttttgtatgaacagctatggaagacattctttcccttggctaccaggaaactctgaacttagtccatcccccctgccttttaaataaacattatttttagaagagttttaggttcaagcaaaattgaacagaaaatacagacagttcctatatatttctccttccttccccctg

SEQ ID NO: 63519 - DNA, 1035 bp, Homo sapiens
atttaattttgaggctttctttagaatgacttctgcgtgtctgtgttaacagagttcagttccttaaaatgagaaagtgtccatggacctttaagtctacagttcttagtcttcggttgaaaagaatgtgtcacatttctgtcttttaacctttttataatgtaaccttttctatctttttctaaaagatagaaaattgtaaaaataatggaaattttatggaaaagtgtagttaaataaattatccatagttttacatagccagggtagtacctcatgtttattctgatatgtttgtttccaaattattttttctgtgtgtggcatatgatttttaaatacaatatcccgtcctaccatgtatttgtttatttaactgattgattttttaatgtctttttagtcccttttttgccatcttaaccatttttaggcgtgcagttcagtagtaagtatgtttgcattgcacatacttttatctttctaacaaacctagcattatcttatgaacatgtccttttattaagcattattcaaaaattcggcttctcaatggctgcagcctgtagtcctgtgattccagcagtcctttgctttgggctctgaggttatctcagccttgcggtgtagtagctacgcagtgagcatcctggggcttgaagcatcccacctgtgcctgtttgcaggccagcccctgcagcggagttgctgactcgcagggtgtgggggtccatctgccgtgagcaagtcatcctgatgcagccccaccagtgggactgagccatcagcccctctccctgcgagacgtttctcacctcctgccttctgctctcctgcctgtgctggccctgggcctctgtcactcttgtcccaacgccactgcctccttccttctcctgccctctgtcttccagcatcacgcggtgccgtctgtctacccggcctctccctcacacagctgtactgacttcagctggactctgtcttttcaccatcctcttccctgaatgtagagaccctgggctggctggctgg

SEQ ID NO: 63520 - DNA, 1414 bp, Homo sapiens
ggaagccacctgccatagtgctctgcagtttcacttttccctcatttttattcttaatcgacttcagacttgaaacacatttcagattttagaaattttacggttttcagctgttggctgaagggtttaggaggcgggtagtaattgggtggctgaaggagccctgtccttgggggcccggagatgtgaggttgacttccctctgccccacgcatccttggtgatggaccaccgcgctcaaccccacccgactcctctgggtcttgagtgccactggctaagacaggaagagtatggctttctttgcaggcgggcgatgtggtcacatagcaccctaaagctttttgtacagctcagtaggagattttgctatcttcttgacgtaagaataacagcaaaccctgcgttattgagctgggagtcagggttaagttatatgtatctcagcatgcacaactagaggcaaaggtctctttgtggcttaaatgctttaggtttactctcctgtccaatatggtaaccattagctccatgtggctatttaaaatacttaaaatgagctgggcgcagtggctcatgcctgtaatcccagcactttgggaggccgaggcaggaggatcacctgaggtcaggagttcgagaccagcctggccaacatggtgaaaccccataactactaaaaatacaaaaattagccgggtgtggcggcaggtgcctgtaatcccagctacttgggaggctgaggcaggagaatcgcttgaacccgggaggcagaggttgcaatgagccaagatcacgccactgcactccagcctgggcgacagagggagattctgtctcaatgataatagtaattagaatgaagtagcattaaacatttagttcttcagtcacattggtcctgtttcaagtgttcagcagcaggggaggtcagtggccccgtcctgggcagcacatacatagcacatctccagcactgcagaaagctctgctggattatgttgttttgtagtcccatccagtgaggagagtttataaagggaacacagtgctgcagaatctggaagtttccttagcaaacaaggggaacagtatcatggaacatgggcagatattgaggtcataaataaaatacacctttgtaaaattataatattaaattgcctcattctctcatgagaaataatgcagccccctgctgttttgaatgctgtattatatattagacctcagaggttcttgatgcccagatgtaacactaagttgaaattacctgttgcctgctagtgtcctctgtgaaaagtcaaaaacaaaaacaaaaacaaaaacaaacccaacctgagggattgtttgaaaggttagggaggttattagttttagattcactgattttcacagaacatgttatgagttg

SEQ ID NO: 63521 - DNA, 1029 bp, Homo sapiens
cccagactgctgggattacaggcatgagccaccatgcccggcccaaaaacagcaacgtttaaaagtagaatcttggccggatgtggtggctcacacttgtaatcccagcactttgggaggctgaggtgggcagatcatctgaggtcaggagtttgaggccagcctaacatggaaaaaccttctctactaaatacacaaaattagctgggtgtggtggcgcatgcctgtaatcccagctactcgagaggctgaggcaggagaatcgcttgaacgcaggaggcggaggttgtggtgagccaagatcgagccattgcaccactctagcctgggcaacaagagcgaaactctgtatcaaaaaaaaaaaaagaaagaaaaaagaatcttaacagtaatggtcagagcattcagaaaaaaaaattcagctgtgtcacggagtcagttggcttggcagctgttacaatatgatacaaaattttgcagaggcattttgtctttggaaaaatcatataggggactaggtgtacagtattttcaccactgcagttagaaatgtttacagttgtacctgatagctccagttgaataaagctgttacgctggatgatattgataacagtgcttaaacttctttttcaattcttgaaggtggccattcccatcgaggacgttaaccgcagtcaccttcggtttaccttccgccacaggtcatcacaggactgtgagtagtcaagcactttcttcccccaagtatttttaagggagaactgggggaaagcgcgagaggccactctcagttgttctggaactcgctatcataacacaataaggctcatttcccaccggaacctattccttggaaacattcttctctcttttccttgagcagatctcaggaggagatcttaatttccttctccagttcctcctacccagtgttgctggtccccttctttcttttgctttccagtcttccgtgttgacttgccatccatccatgccatccatcagaaaagttactgagctgtaaca

SEQ ID NO: 63522 - DNA, 1067 bp, Homo sapiens
ttccttggtggaatggtctgccccttcccagcctctgtcgtttactgtggcctcttgtttccaggccctgttgatttccgctggtctgggcgtcttaggttgaaagcacacagtctttctcattgtcattttacagttactctcgctttctagtgttgcgggctttcctctgccttcttcaagaccatgctgctcttcttggccctttatcctggaatccgttttcacgttccaggaaaaatctcttctatgagattttgattagaatggctttgaatttatagattaatttgagaacaactgatccctttatgctaggagtcttcttacttgtaaacgtggtccatttttccatatatttattagattagctttaatacctgtttgtataattttgtaattgttttcataaaggtagcctttgtagcttcttataatgttattttgtcatgataattgaaagcaatcatcaatttttttgttttttgttttacagctaaggataaatctgagaaaatatttgcactagcatttgtcaagctgatgagatacgatggtaccaccctgcgagacggagagcacgatcttatcgtctataaggtatctggttgcattggtgcaatattgctgctatagacagtttcagtcttttctgggctccctgacctggaccaacctttcccatcattgtgaggaagctgctatctagctacatttaattatgcaaatgaacatttccaatgaccagcccttttgttgttcctaacgggaaaagatgatatacaatataacaataggtgccatctaaaaatgccgtgaacatgaattatgctgcagtaataagggaaattattaaaatgtgtatttaatatgatacaaagcaattacgatggttacaaggattagggataacaaagggtggcaaaaatggtgtgttgctgtttgtgaattgcctttgacatacggcatgactaaatccacaggccgaagcaaagaagctggaagatgctgccacgtacttgagtctgccctccacgaaggcagagttggaagaaaagggccactcg

SEQ ID NO: 63523 - DNA, 1044 bp, Homo sapiens
tcaaagcaatgctctgagctgcggttaggtgatgaggcccatccacagaatccttcttaacccttatgaccctggagaaaggggactgtggaccaggacatccccccggggggtggggtcagtggcaatccctcctttcaccctcaagctccttaagtctcaccagctgcagagtaatcccctccccagactgagggagagggcaccctgctctcagcagcagctgttgccaggcaacaaggaaattccgatgtgatgccactcaccaggactgatgggaagtctgcctttcatttctcaccagccacggttccccttcttgggattgtggcatgtcaggtgtgtacaagatggagctgccccaaatggcgtctaagcatcaactcccacattctcatttgagggaatcatttttctgaaaccatgatttgttcctgcgaagttccattacttagggaaacgcagtggctgaattattcattgaggttggtattaaacttctctgtcctcagcattatgctagatgctgtgggggatatgaaagaagtacaagatgtgattcctcttctcaattaactgactatataattagaaaggagtcatgaatatgggctgtgagtcccggtaataagggcctggggtgggactcatctgccttgggcagcctcatgggggctggacaagccctgttttcttccagcactccctttgctccaaggtgttttactactcattagcccaattggactttgtctcaaacttacaatacagcgtgccaccaactttgaatgaaggggatccagattattactgtctattaaggaaatactggtaattcttgtgagatggaaatctcccttaaccctaggaccaagagtgtgtctgggcaggatggagccttttccattacttcactttcacttagaaatgaagacatgttgcccaggtgcagtggctcacatctgtaatcccagcactttgggaggctgaggcgtgaggttcacatgagcccaggaggttaagaccagcctgggcaacatggcg

SEQ ID NO: 63524 - DNA, 1455 bp, Homo sapiens
cttgggccaggcatggtggctcacacttgtaatcccagcactttgggaggctgaggcaggtggatcacctgcgatcaggagttcgagatcagcctggccaacatggtgaaatcctgtctccactaaaactacaaaaaaaattagctgggtgtggtggcgggcgcctgtaatcttagctacttcggaggctgaggcaggaaaatctcttgaacccaggaggcggaggttgcagtgagctgagattgcgccattgcactccagcctgggcagcaagagcgaaacgccatctcaaggaaaaaaaaaaaaaaaagaaaaagaatatcttgatgccttaaacaaaaacatttctggacactgtcttcttccacattgactctttaaaaaccagtatattcattccttgctttttctatataaaatgcaacaaacaaaaacacaaccataacaaccacaaacttctgtggaagcccagacatggtgagggccggaagctcactcagtgcaggcgtgaacctcagtgcaggcgtggtctcagttgtccagagctactgtagctgtggggactcttaaccttgcagtctcagtactttaatttgtgttagttattttatttatattatctataaaaaaatagcagcttgttcttgagcaggagaaacaaaccatttggtatccagtgcctgggcagcgctttctgggtgagcaggcctcttcaggccttgtggtgctctgaaactgccttcctgtagaatggaaagacaagttcttttttagtttcccaaatgcacttttaaagcttctacatggaaatcatttcatggtaaatgtcgttgggaataatgaattcaagtgtactaggtgttaagtatgttgctacaaaggaatggaatatttagcaggtgaatcttttaaaatagggttgatttctctgttcacaaaattttatagagaacctcacataatgcatgattaacagagacagaacagagtttcttgcttgtgaagatctgattgtcattttctgtttccagtggaccttctggggctcttgaaatggcgctccaacaccagcctgctgcagcagaacttgaggcagctgatgaaagtcgatggtggtgaagtagtgaaggtaacatggagcccaaagggactttttgggtctttttttttttttttttttaatgtatgttaacagaagtaggcagtgacttcaaaggtagtataggattgtggttatactccctttaaaaaatagtgacatagggattgggtgcggtggcttacgcctgtaatctcagcactttgggaggccgaggtgggtggatcacctgaggtcaggagttcaagaccaccctgaccaacatggagaaaccccgtctctactaaaaatacaaaattagccgggtgtggtggcgcatgcctgtaatcccagctactcgggaggctgaggcagga

SEQ ID NO: 63525 - DNA, 1054 bp, Homo sapiens
aaactccgtctcaaaaaaacaaaacaaaaaaatagtgacatacacctctaggtgcacagagtgcttcttggcttctggtttggggggactctctgggttagccgtgaaggggactggctttgcaatcaacctcatcgtgggttctgcgtcctcttcccataggtcctcactacaggactcacaacagttcagtgacctctttaagcctctctttcccctgccatgagaagtggggtaacagtagtgccttctgcagggtcgttgtggagcctcaggtctttttactgttgtcatgatccttgttactgccatcagcattcgtactagactccctgagatcccctttaagtgaccaggagaggtctgtggtgtggtagaaagatcacgacactgagaggcttgcctgggccgtcttcttcccacgggacgctctgcagcagtgtcgggtataattattcattcagacccttgtggcctcagcatctttatctgtgagagagggcagtcagattacatggccggaggtcctgggagcactcagcttctggaattctttactctgtaattgtttgtggttctgatgttttctgcagtattaggctcttctctgctctcagataccccacaatttgctggggcaacttttccttgtacgtgaggaagcgaatttccatttttagtcgattctgtttttggctatgggacgataagggggtcactggcatgtggcgttctataagcatagactctccagcaaggtctgtgtgttgccgcctcagttcctcactctctaggagaggtgattgcagaaagagacgaccttatctctgtaaaaactaattacttaaaatggccttaattaaccagcagtgtgcttcacttcagtatcaattaatttggtcgcaccagtttcctgaatcgtataactcttcagacatatactcactaatcttaaaattttaatcatcttctcagtcctggtgttctcccaatggcttggacaatgttaattgcattttaaacttccctgtgttctgtaaattccctaattcag

SEQ ID NO: 63526 - DNA, 1615 bp, Homo sapiens
cacgatcctcttccatgcctgggcaccctggttggtagaaggtccttccttccactcagctgggtcctgtccctgtgtggcttctgcccattcactagctgaagtcctgtacccagtgtgtagaatgagtgagatgcatcttcccagagttgccattcagcgctttgtcaccagccttatgaaaaccggaaagagggttggaaaggccccctgggggaagcagtaggccctctccttgctttgaccctctccatttaacactggtggcatttctttgttctgaattcgctcatccaaaatttttgtcttgtgtatctagtggctgaaaaggatcccgaatggctttataggtagtgctgggggcaaagtgggtatttggagtactgcagagatgatagttattccagtgtgtgggggaagtccggtgggttcacattgtcacccgaccttctgtgtctatgcagtttcttcaggacacgttggatgccctcttcaacatcatgatggagaactcagagagtgagacttttgacacgttagtctttgatgctctggtaagagagctttccttctcatatgcttggataacacagcgttcttccatgctgcagcgtctgaggctggagtcgggggcttcgtcacagtgaccttgaacgcattttcagttgtaaatccaatcagagatgaattggggtggcagattttttttctcttttttttaaatgtaaaactgtagttaggcaaatgtcatttctagggtaagaaaaggtaaactagccaccaacttctatctgaaaatgttatggttcatatcctaacacaggggtgcagatggttctgatgaagattataaaatggcttacattatgttgctaatgaaaatattattgattaatttgacaggtatttatcattggactgattgctgatagaaaatttcagcattttaatcctgttttggaaacttacattaagaaacactttagtgcaacgttagcctacacgtaagttcctactttgttttaaaaccaatacttctttttttggtatttgtgttatttagagtctttttcatgtacttttgtctatgactgtgtatttactcctgctcaaaactctgagtttactggaataatttttagtattgtttccctcttaacatacctaaaaaccttgttgaaagagatatgtgataaatcatcgtaatattctggaataaattcttgttctccctcacaccttccatttatctttgaaatcttcactttatgttcgatgaaactgagctttggatgcggagtgtctgacaccgcggcttcctcgcgagcctttgatgaatggataaatgcatgtgttcccgtgttaaggagattggttgtttagtgtgaattagatgcagttttgtactttgcaatgtatctccttgctctttaaagagcaccttcccttttctttgacaagcttcagctgtcactgtcttggattccttctatccacccctctgcccgtctgtgccccagaggtctaggaagacaccagaggctatgcatggtgcctgggccagcttagcagtgtgcctggtattgaagagcagagccctggagtctggagtcag

SEQ ID NO: 63527 - DNA, 1038 bp, Homo sapiens
cattagatttattatgatgacttaccggctctttcttggtggaatttattggcatttattcagactttttattgtgtgagttacagcaaaacataaagatttacataatttctttaagaacatcccgcttagaatcagtagaaaggattctttttagtgtgagtaaatttagttaaaactcccttctgtgtcttcaacatactttgcaaaatacctgtttttcctccctgtgtgcagtcatgaactcaggtcagaggactctggcctcctgaagccagctgttaatataccctggtcctgcacctggattctttcatatctgcctcgtgtgcgtgtttactgtaaggtggtgggtggagctccaggaaggctaagagctgtgaggtcctcaagcctgcggaacaagctgtgactagttctttgcacttgcttgctaataaacgtttgtttaaaacattttgttcgctgagtggagatgcccagtgtgtgggcatgtcgagtagttccttacagaccgtggggagggtgcattgcagggcacttttcctggctcttgtgaccaaaacaggagcttgtggggtttgcggaagtggcctgtggactgcagcaaacgtagcacggcctccacgtgtgctcattttcaaaattctgccttttgattgaaatgtggccaaagaactcttctcagattaggctccgtgcttgaatttcagaagatgagaggcatgaatcagcttaccacactgcagccacatctcttcattggcgccagcctttccatgctgtgctgttggggaaggagtgatgcagccattctcataggtggagaaagaaaaatgggagattttgatgagtttcctaatgagacaaacaaaaagtaccattttttctttatgctgtgatgggactgagataagaatagtatcctcatggccgggtggagtggctcacacctgtaatcccagcactttggaaggccgaggtgggtggatcccatgaggccaggagttggagaccagtctggccaacatggagaaa

SEQ ID NO: 63528 - DNA, 1033 bp, Homo sapiens
acatgatttactataaaaattggtgatttatacagaaagaaatgtaggtggtgcatacattaaaattttaggttatttgggcaacttgatattgcccaaagctgtcttattgtcccaaggttaaaattagcaatgtgtttggtacatttactactgaattcagtggcattttagaaaaacagacgtgtgtagtgtaagaatagataaaaattacaggaagttttgagcccagcagtaattttagattgctaaatatatccttacattattaaatttgattgggcttgatttgtgtctgcctccctcccttgaagtcagattacttagtgactagggaccgggaagaccatgcttcagtgggtgttttattataagacacaagtgaattgagtgacgtgtgtgcattgatgcaaaccttacatctgcaagacagacgcacggcgttttattaggcatgtcacctcccttctggtaattggtatcgtattatttcacaataggtgctttctcgatgacgttggaaatttaaagattcccatcgtgggagcctgacttttgtgttgttttaactctttcagttttgctgtgtctaaatggaaggaaataccttgtgaaccatcttccatagacaaagtatattttcagactgtgacatttaaaggttaaacattgtttccccaagtgtggccctcgttggtaccaaacggttggtaccttcccggttcaagtgattctcctgcctcatcctcccagtagttgggattacaggcacccgccagcatgcctggctaatttttttgaatttttagcagagaaaggctccatccccttcttggtaccaaacctgccactggcatcaactttgcggattagagtcagccacggggttttacgcctcattgaagagggagggcaggaggaacttcagaagtaatttattgcaggataagcatggtctccagctagaattttcaacaggactgttttcattgatttagtgacaaaatttttccaaggtcatttaagtgagaaa

SEQ ID NO: 63529 - DNA, 1032 bp, Homo sapiens
cattataatcaactcccagctgatgctaaggttgtgggtccctggccatatattgagtcagaagtggccacgcctcgccttgcacagacagctgctgtgtgagcagtagtgtttgtgggtagggcacctggtctcagttcttgcagccttcaaggctggcttcattcaggctgcctgccctcagctgtctgacgttctggactattttgatttgataagtttgccctacacacagatgatgacacacttgcaagtgtgtcatgttaagaaagactcagcagaagaaggaacgagggaagtgaagaaaatattttatggcttgctcttagaggacctgtgggtccaaatgctccccatttcactatactgcttgctggtctgtggccctgcagagggttgggtagtctggctgagatctgaactcaccaggtgctgcagcattccagtcttcttggttgcttcctaggattcttcctgcccgctctggagggaacaataccactcacataggcaagaattaatcaggagaggtctggataaatacacttgtttccttgagcacctctccacccacatttatactgtgcacagtactttgcaacagtagcagaaatgcagcagtagcactaccttgcagaaatgcaacagtagctgaaatgaaaatcatctctcttccaccgtttcttcagcaaaccaagtatttctattggttttcttccaattctagtgcatgcccatcaaaatgtttatgcttgcaacctgcgtagtttttggtttactgatttttttatcattttatcacaacacctttccattattaatgtgtagttgtaattgtaatggctgtatgccagttcagaacatgtgcctgaattgatgtgcaatcatttgcttaatcaaatgatttttcctcaaattaatttttctattgttgaatactaccgtgttgcttttagcattttaagcctgcaacaaattatttcattgataagtagtgtgtgtttatgttttctttaattttatgatccattt

SEQ ID NO: 63530 - DNA, 2619 bp, Homo sapiens
ctgaaagtgagcaggtctcagagttatgcttagtacctcattgttgagttatgtattcacctgtttaaaaaattccttcaatcatatgttcattctcctgtgtgccaggcactgtgctaggcactgaggagttacagcaccaatcacacagatacgctctgtattctcatggtggttccattggagtgagcaaggcaggcgtgaactcagtaaccatcccctatgtgtatagttgcatagttgcaatatgtgattttaagcaaatcacagacataaaattatcattgtggattgtagtcactcattttaagaaaaagtaaaggtcagggtgacaaggtatatcggggcattggaagtagtttaggggttcaaagaaggtgctgatacaaaggtagtcaccatgaggtgcttggatatgtaatacagcagaggaaaatgccaaacccagactctcgtatggtttggagagaactgtgctgccacttttgtccagaggggttgtggagcatgaagtaatcctaatcccttctgttcgtgcagtactctcaggcaccaaagactttgatgcgtgttatctcttaggatcctcccagcactgccatggtggttgttaaaaataatgagaaagctttctaaagggacgggcagagaacatcatcatgcaaagtctgtgcgtcttaatagctgactcattgatggaaacatttatatcccacatccactggctcttgtctggcttcttcaaatgcacctgtccctaggaccccttcctagagataccagcatttagaacagaccagtctaaacaaggtcttctcaagtgaactgaagatactaggcctgcaaacgctcatctgcacttcacttacgatgtggcatttataaatgcattcaccgtaggtgtttgtagattctttttatgttttaagttttaagtttgcagcattgaggcctattttgattgcaaattgcataaacctcaaataagatctaaatcaaaggaaaggtattgcatgcttataggtgactcaacattaagaattcagttcttcccaacttgatctacagattcactgcagtcccaatcaaaatcccagcaagtttttttgtggctattgaccaactgattccgaagttcatgtggaaaggcaaaagacccagaataatcaacacaatatttatggagaacaaagtcagaggactggcactactcgacttcaagtctgctggaaagctccagtagtctaattacagaaacccaactccaattcacattagaaagaaggaaattaattgattcatgtagtttgggagtccaagtgttaagcatgagtgagtttaggatttagaaggtatcctcctcttggcttagtatttatttctctccatttgagggaaaagtggctgccagtagccagaggcttgcaattttcttttttgtctaatagtcttcgaggacacagagtgaccgtctccctctttaaggcaatgttaatcttcagacagaaccatcgttaaccttcttttaagcaggaggctatccctgaaaggaaaagactgtgaagttgaaacagaagtagagcttcataatgcagaaaatggagaaagagggatgagaggactcacaggaaggctgaagggacatttgtaaatgcagctgaagccagtgcaaattggcgactttgtgaaatgggttttgcagctattctttggagctgtctgctgaggtgatggaaagggtagttaaaagcttcatttaggattggtgttctgccagcatgccaagtagcccaaaccaaggcctgggaggagagcagactttaaatatgtcccaggaaacgttttattgagaaacatgtcaactaccactatagcattatcaagagggaaaaaggaatatttcatatgtgagcttaaaaaatcattagctctgttatattgaatacttgcaaaatttcattaaaattgtttttgcagaattttatgatagaataaattacttttgtgtatgtattgatgaaatcatggagttatatgagtttggatttctcaagcacccaaatagtcaacatcaagaatcagggaattaggaggttagaaagtcacatctttagtttttttcaggaacttgcccaggaacagaggggtcctaggtgggatgaccagaccccagttctctgttcttcagcccagtgcttttttcatgacatcactcaagtcagattttaaatttgtgcattacactggctttatttagaatcctgtgccaggcaatatagttttgattagaagctgaacagtattattctccatgaactgtgaatgtgacacttttataattcaagtagaattatttttcccttgggaaatcctatacattcaatatggtacattgaattagcaaagaggtagaagaaaaaaggggctataaaaagtgtatcttattaaaacaaagtaggttttcttcttgcctgtgtcacctttagatagtaattcttagcatcactattttttaaatcacaaattgtcttctatctagtgaaatgattaagaaagaacagtagtcctcatttgattaggtgaaacgtgacacaagtctcgttgatttttgaaaaggac

SEQ ID NO: 63531 - DNA, 1035 bp, Homo sapiens
aggaatgcaaaaatataaacaggattaagtcattgatggcatgctcatacttcctaggagaattaagtcttttcaggtaccacagtatgtatgagtccttcttaactctcatttccaccagatctccaccaaggagtttagaactgatggactccaagtctccctctggatgagacattctgagttcttgccaatatcatgctaagctgggttgataatttcctttgaaaaatttcctttgaaaatgagtagcatttcatcttttggaaatttatcattcttcagacttttcactgacctgtcccctcccatagccgaccccctcctgtaccccagggtttgattgatatttgcttttgtattgtaattactatttaatatccagccctcctgaggtttgcttcactgcagtcacattgtattgcaagcagaaaatgtcacgtcgcctggagctgttggggtagtgtggttgtggtcctttgggtatttcctggcacacctggctcatgacatcgtgcagagctgaacaggctctaggaggaggaaggaaaccttgcctgggtacttaaaattatctatcacagtggatcctgagtctgcctctcagcctgtcttgaatgccaggctattataaatcagctttatttattttgtgtttgaattttgactttcctgttcaataatttaatattttaaaatgacacctttggtcttttatttgtcataagcgagggccgagttagccaccctgcaatttgcctctgtactctccgccccccagtgtgtagtcgttagctcataattgttttcttaacctcctcagagcctggtgtgatcttgctctcaaccttcttgaccttccaaggtagttaaatgaggttttgctttctctatgaattaattatgtcatctctatttgaaatgttcctgaacccatggtgctgtattttggcaaaataaatactattttcagagactgtaagacccatccattttatttccttttattagaagatagaacgattttcttagatg

SEQ ID NO: 63532 - DNA, 1031 bp, Homo sapiens
gcagaggccacttgtttctacaggtttgtcctggtggtctgtcctctgtgccattgaactcccagagtcctctgcagaggacatgtaataattcttgcctattaatttgtggaccctgtatgtggggctttttttttttttgcctgtttgagacttcctgcctttaggagtagacaatgacctttcatacgtttaatgcttctgttgttctcaagtttgagaatgtggtgtgtcccctgggtcccctccttacatgaaatccaacccaaagggtcagtgtgtttcttgtgtgtttctgtcttcactcctctgtccgctttcatctctttcctggtgagtctctgccctgtcataagcaaataaccttagttgtttcctccccagtaatggtggcttcaattgctgtggatttcctggcctgatttcaaggctaggggaaaatgcctgtgtcctggttcagaacaggcagtctctttatttcttctgtcttgccgtggacaaatagaatcgtggcccttacgagttctttctaaaaaaatcacctttattgaggtaaaatttatatgaacaaaaaaatagaaccatttgaagtatctgattttggatcattttgaaaatgtcccaaatgtcctctcgtcaccaccgtaatcaagagctggaacatttcgccaccccagtgatctccctttgctggcccctggcgatgctcatacatgtggtggttcttcacgcgaaagcagctgacctcaaagagggtgaacatgagccctgctttcctttcctctttgacttcctctctgatccatccctaaactacaggattttgtcatgttagttcctattttctattaccatgaatgactgttggcgcctcaggctggggaaggttaattgtagtaacaaagaagaggttttcctggcaggaaccatttccttactcaggaaacaaacgctttcctttctcacagtcatcttctccttcttatgtaagtagaaatattaagccatactcagtctgtccaggtcctgag

SEQ ID NO: 63533 - DNA, 1128 bp, Homo sapiens
ataaggatgagtcaggtgcaggcttcggttgctcatttgaacagtgattctgactactgttagagaagggatatgggagagaagtgcaggggatttacttagccaaggctgaaggcagagaaaacggtcattgctgcatggcacagctacctgtggccagagaggagccatggcccagctcttgctgggctgacccaaaggccgaggaattttgtgtgccaggcacccatctgtgacacaaccacgtgggccaggaagctgtgtgtgtgtgtgtgtgtgtgtgtgtgtgagcaattaatggacaggatccagagatgctgagagcagtcctgcacagtgaagacagtatcaatatccctctccctgagaaacccaggagacccgttcctcatcatcgatatgcttcaaggaaggcataacaaattgatttgtgtaggaacttgaactggattcactgaagaatctcaggaagtttgtacttttttcagtttgggctttgtgatacagaaacacgcagatacttgtgggaacaacgtccctcaggcgttaaattgacatttgggattgagtgaaccgaagcattggtggtagagatggggaatgctatctgaaaaaccagaatcagctttaaggaagctgattacaaagagaattgattacaaaaagtatttttggatttaaaatacataagatgtaggcagtcctaatttaataagatataagggattgaagcaattgttgccatcgtctttctttttgttctggactgctgtcacacacaccatagagatgcctccttgagtgtcttcaaagtgctgtggatttcctttcttcagccgcctccgaccatcacgtccagccatctgtcctgtttgatcaagtccgcagagtgggtcgaggggcaccaattggcagaactggtcttggtgcattttcccctatcaagtttatctgtttttccggaggctgtttggctcttccccaaatcttccaaagacagaacacttaagtctaaaaggaggatttgtggaccatatatattttagctcaaaacctccaagtggaatcattttaatgtgcgttttcttgagaaatatgtaaattaataattgcttcatacattattca

SEQ ID NO: 63534 - DNA, 1046 bp, Homo sapiens
gtcacttctgggtgggcttctgttcctgttgctggatgttgaatgcaagaagaacgatctgagaagagactgtgttggttgtgctgtatttagtcatgtgcacactgggcaccaggaaagcaagtccctgagtctctttagtacatgatttcttctagctcctggtagctgatttctgtaactgcatgatgtgttgtctacagtaactagcctgggacagtggaaagagccccaggtcagcatgcagtctcctaggttctgctttaggacctctgtcttttcttgggcataaactcctccctgggtgcacagtccttccgctaagatgaactgcaacacaatatagggttttgacatatgtattttattgtcagagcaaccaggaggggagtttgtgcaggaccacatgggccaagacctatgtttttttgctacctttattctcctggtttaaaaaatacccaccattccacagccctgtatattctctctcagttttctcatcctccatgtggtgagatcctgcctgcagactgacagccctgtaaattctttctgaacttaacacaagccacatccttgatgtacccccttccacctagaaaacagacttcctgcctgaccaattcttctcacacagtgttttctgcatttttcttgcatcttgccaattttttcatctactgataaatgggactcatttgcaatttttctccattggctcttctttaatttcttccctctgacaacttgttactaacagagtaatggaagtttaatccttagttttccagagtaaaagatacaaaatatctgctcccccactgccttcctttaaaggatggctcgcttttttacaaagccttgtgccgatgtccagaaaacatatatttgacaaacttctttttcctgttgttcaatagtccacgtgctactgtgccccctccttccaatttccaacacccttttacttgctctgtcaccttttcatttcaaattccatgatactgaatacctcaagagtgaagtgcagattaccgcatttc

SEQ ID NO: 63535 - DNA, 1254 bp, Homo sapiens
aatatagtggaaattatgtaactatgaatcagcttaaaaattctaagtaatcactgaaaatgagtttttaaaaattaaagtgattaaaaagaactctgaaattaatatactttacttaatgatttattccatgatgttgtcaacaacagtactagaaatgtggcctctttccatcggaataaggcattaactgggaatgtgattatgccctgacagcttccccctattaatgtaaggaatagaaaactggggaacttcacacttaattagataaattgggatatgcaatataaggcttttctttatctgtgggattttacaaaaactcgactttgcagtcagttgtatattgtttgctttagttgattatatttgaaatgggtgattggaatgcgtctcgtgcctaggataataatgtgctatgatccgaagtattacatccttaagaaaaaaccaaaacaactctatttggcagttgcagaattgtagaccatgtgaatacctagcacatgcccagagacagaagcgttgcaataaccttgccacagaacaaaaaggtcattttatctttactctgatgtagtctgatgctgtagaagcatggagtgaaatacttatttttatattaagtcagacttcaggatttatttcagccttcctttttgagaagctttctaagccctcagcattaagcagcatttttcctcatcacacacggatctgagcaggtgaccgcggctgggataggtgctgttgtgttgtgtgcaggtgggctggccagccattgggtgtgtgtttttcctagagtaagaagcactccaggctgagatgagagctgttgaaatgagtaacatttccgtctcctgtgatacgcgctgctgttgcttctttcaaatgatcagatttacattcttttaatgggtcctttaaaaatgtaatcgagtgagaaggacttctaaacatttttctttggcctggatacacacgaggggattggaaattactaattcatgaaaatgaaaatgtgggcttcttttaaggaaaaattccctttgaacattgacagaagtgggcatagggaaggggaagattttgcctggattctccacttaactcttgtcaccactggagcatcctgactccctagacacaagtgatggaagttattttgtttccactctaaacactgtctcagggggacattgatgggatggtggagggtgtgtttcattgtgacaacagcatctttggtgg

SEQ ID NO: 63536 - DNA, 1046 bp, Homo sapiens
tgggtttactgcagaagaagtaaaaaccacattgttgaatgggcacaatatgctctgcaatccttacatattcataccaaacagcaaagatatttgcaaaaccagactgccttaagttaatttttgcgcaacttaaaatgaccttgtcattgaccaaaatgtataggatccactgtagcatgatgactttatgccagttcatgaaatggatgttctttctgatctttgtaccacagagttgtttactttcagtaaataaagtggctgcacatgcagtgcctgcaaatatgctagtgatagagtttctgtaggtcaaagaagacgtgctggtgtgggaagcagctgctgtgatctttaggtgacactgctgcagccaaactgccctgattcataatgaaatcaactttcacttgctgataaaaatgctaaggaatgagtccaccagtgacaggttttctaaacaggccatggtgttactaacaccatgacatagaaaagttcatgcctctttcttgtttccttttcttgctgtcttctaggaaaggccagtatttgatggtctgtcttcacagttttaattaagagttgtgtatcttggttctgatatgcccatgtggtttccaaggaaaacagtgttgcaggccatcctccttgtgactgtttataggttggagttggtctgcctgaggctgggccatgactgtgacaccatttacacccagtagtccagccacatctcagatctctgtggctgtagataactaactgcctctcagggtacatgggaaatgctgccaactgcctaagttgtttccaaggtagcaaggttttcccatactttgagcccctccccatttatcttctgctggagggtcagagattgaaggagcagatgcaggactacaggacttctgcttcttggaagtgagttgcacacttgtagagtgactggtgggcacccttcattgtatctgggtgtctgtagaacaggacctttgaggcagcaccaatagttggctcagaaatgattatagaatgagacagaa

SEQ ID NO: 63537 - DNA, 1560 bp, Homo sapiens
acagttacacttccttcatgttacaggatcaacttcctcattgttcttgcaccaaaatatttctcagttccttttattgatattcagggattcgaacttcatatagtgtttccgcagaggatgtgtgtgtgcacatgtgtgttttaaattaaagcatacaactgcagtgttgtttggcccccgaagaatgtttacacgacatactcttcatttttttttcaaggcccgatctggttactgatcactaggtccttgtagaatcaaaacacttagaactaaaacagatttgctgttgagtcaggaggaaaatacatggcaagaagcagctccaatctgacaaaagcaggtgagatccttttaccaaggttagccactgtgtgtttggcatctagtcaatgaggtgtgcatgtcagcactccactagatgtgaaactgctggacagaaacttcaagactaggttttcctgtatgctcacaaactattcaaaatttaagttgtacaaaaaaaaaaaaaaaggcaaagtaagatccctacttcctattgtgaaaatcaaaaaattgatagacaaagtcattaatagactaggggatttgatttctataaaaagatacttgcaaaggtgcaaagaaatgagtgaaaaaataaaggaactaagatttacattgcaatgtgtaatcaagagagaactctaagtgttactgttgatttaaaaaatacctaaaaacatttgattcacagctttcccctaagtatgttgtttagtacaacttactaataggttaaatgtaggcgacattgtcccttggtagcagctaaactaaacgcactgtttctctttgagatggtcagggcttccaccattaatacaaagcataacgaattgtacataacgtctggctgcacttaccatggctaacagtgtctcggaggatcgatccacaaaaacactgtctgccatggcacagaatgcctgtgatttattggtgggtggattatccatcgtgtatctctatgtatgttctcagattcttgccagaatgtattatttggcctttgggtaccaaaagattaaaaatgagatctaagaaaacttagtgtccaatagctctgaccctgtctacttgcagtgattaaaggcatatcctgactttgggggactcctggctgctggccatttggaaaatgagcagtaaacatgtcgtaagtctggagatgaagaggatgctaaatttgaggtgtcgttgtgacactgagatgtggtcacttggcttagcgctatagcacatgaaggcaaatatacatatagtcacattttagagattattcatggtctccgaccacttgaaaaaattgtgctttctccggaatttgatgtgctgaaaattgcactcgccccctgcttatttgcaaaatgaaacataaaaatgaagtccttcgcaaacataaggcttgctttttcttctcattatttaaaaaaaaaatcaaggcttgaaaataattatgagttatagctgtgtacagggtgacagcctgccatctcgcaggttgataatgtatta

SEQ ID NO: 63538 - DNA, 1148 bp, Homo sapiens
agttggtgtatgtatttgtggaaatgaaaaatgtgaaatatgaataaccccattgtttgtccacagtctgttcacatgggcctcatggagtaaaacagaaaaccaaaagtatgagtgggcaggggtcaccttagtacatctataccaagtgcacgcaaggtccgttcctgtgcaatgtatcacaagatcagagaaatctatttctctgatctcccacctaaaacaattctggaaggaaatgaccttggctgacattctccttgtaaaagcttatctgtctgaaaatctgataagggccatagtgcccaacgctggggaaaatagtgtgttcatggagtcaacaccattgaacggtactccgccattactaaccacagtttctttgggagaagcgtggggagtgttcagtaaagacaacacagaagtaaaattccatcactcaagccatggcgtgcaagcacagagccaatgtggaagcacatttgccaagcagtgataatgtttgcattagaagatggtgttaaagatgatttttgaactatgttatttcttacagcatttctccgaaaattgctgtcaacttgtctagagccctctcgtctccatgtctttgaaaaggaccacatttgatcttctaacttggagtcctaacaggtctgcttggcagctgggataggacccccggtccatgcatcgtttttctgtgatgatctctgcattgaggagttctgcttcccttcccactcaccctgtccctccttgggacctctgcgttctgggccaggccttgggaggattccgctctgtcctccttccatgtctggtctggatgccagactaaatgtcagtagatttcagtaaaggctcagcgttgatgataatgcatgagctcataacattttataaccagtggaaccgtaaaccatttataaacatgaaatcctattgatttagagaaccattaatcctagacaaattttgacattttggaaagacagaaacagccaagctatattatctggagttttaaaacaagttcaggacccatctaatgggccatttcatgttttaaatccactgttccatttttctcattgtcagtgactctaatattactcaaaaaattaaaaaaaaaaattgccagagaa

SEQ ID NO: 63539 - DNA, 1016 bp, Homo sapiens
ctgtaagtttgcatgggagaacaagacatggatgtagatttgtaaagcctttgaaatttggagacaccctctggctcacttggagtctatacttccgagatgctgtggccacccatgtacactgctactgagtcacctgaataggtgactcctcctgcccaaggaactcactgggttctgaacacttttctaccgaagaaacttctattcttaagcttctgacatttgggggtgactcacagaactgaccgcaagctgcgaggtcatccagctcaatccccattgctcaccctcccctttctctttgctcagtgggaccctgagggaagtgaccctgtgtatcagcaactctcagccaccagggcagaatcacacagaccagtgcttggtagtcagataggattacataagccctcttagctgatgtgctagattaaccatatggccctgtcctttcacgacataagtggtgcacccatgatgctgggacccttaactaactggcttctctgtctttgtcctgtgactctctgtccttacttctcaaggttcatgcttaccaagaggatgctagatttgttcctggacctgtttatacaattagtactcactattgaaatgatgtgattattgaatgtcatgcaaaccactgaggcatgagaagatagtcattgctgtggattcagtgctttggaaagagtggggtaccacaaaatattcaatgaaaaaggtagagacaggtcaagtatggattcagaaggattctgatctcagattctgccacaggactttgctccactttaaagacaggaaaattggtgtggctcatggcagatcatttgaaactgtagtgggggtgccacattcaaagaaaacgtctgggcctcacctctaaaggctgccctaacttgaaatcattcaaatgggagatttcaattcatgcgattcaaattaaaataacatgtttaagttaggtacgtgtcaattttttatgatttccccattgattgattttt

SEQ ID NO: 63540 - DNA, 1038 bp, Homo sapiens
atttccattataacatgatagggagtttaggaagcagcatttgatgagctatgttccacttggtagtcacagtgcagtctttatttgaatactagttcatttcttgagtttcacactagtttatttcattgacaggactcaatgaaataaagactttgggaggcagcaggagtccagccgaaatattactctgcagactgtcctgggaccaaaagccttccagtgtaacttctgtttgtagcagaagtttggctgttgtagggatgttttgtcattgtgaccactccaaagggagtgattttaaaaatcaggaaagaaagatctaaaactccactcttcctcaaacactacctcttctagaatgcctctcccatttataagggggtgacagtcgggtctgcaggctaccgagggccacatctctattcagtttctgaagatgccacccaaatcacccgtctgtaaaatcacatctgcagtaaaagttctcgatgagtagtcatgcattttccctgctcgtatgagataaccagagcgatcacagtgcctcgccctctacctagtgagtcttcctaagtcttggcaaattcctgtggtgcttggtcactcgcagttcttctagcaagtggaccagtggctgatgtattcggattcatgtagagtgatgtttgagccagttcaaaacagtgaccactcgagtcattcctgaaaggacagatttctgtccttcagagacttattcagtcacttttaatgtcactttttataggagtgaattctggatttagagctaagttcatttaaattatttcagttaggttaaacagtgttcacatatatatatatattttttttcgatcacccacagaatattacgtaggtttaggctgaacagctcattctctgaacctaccctggatgtcttgactcactgttgcttggttgcgttaaagacggtatgagctttagcttccaaactaacagaagctgaactctgagtacgtgccaggtcatctacactctgcacttcctaacgta

SEQ ID NO: 63541 - DNA, 1062 bp, Homo sapiens
attcctggcctctacctgctgcataaccggcagcagctcctcagttgtggcaactgaaaacgtctccttccagactttgcaaatggcccattggttcagaacctctgaggttaaggaatgtgctgatgtggccttcggtgcctatctctacctgtggtttcttctgcctcctcccagacaaggtctccaggtgacccagctttgcttttgcttttaaggaacctgggccctatctgggatgctctgtctggatcggaggcatggacggccaggtctaggctttcccttgggagagaaccctgatgggttgaagattgtgtagcctcaagcctctttgctctccccatgtctgtgttcttaatgcagaggacagtaactttgaataactttttagagggttttttggtttggtaattgttttttgataatttggtggatcactaaaattattctccagtctaaactttagaaaaagaacttactcataacatttctcaccgcttttatattttgtttgtgaaaaattacatttgcaaaaagaaaagaaaaaaggatagccatccttctgaaggttttgactatatcttaaaatcctaaattactgatgcaggccaaacacagcttcttcctgttgggagtttctgctgtattcttgttgatgtcagtcatataaacaaacttcaaattaaaaaccacaaggaacagctgtaggggctctggagcagggattctgcccggagacaggcaggcagcacaatcctcgagagttcccaggaaatgaaattccacatttggtgtgagcagcccaggtctttccatggtattcctagcacatacggtgtgctttcaagcctttgatctataccctctgaagggcctatgttttacagcctttccagaacacagagcccagggctcacacctatcgattccaagggagcaagccatcaaacttataccaattcttgaaaccactaagatacatttgcaagataaatgggttcaagctctcctacatcccacggttctatacttggggtggggtatttagaggtagcttag

SEQ ID NO: 63542 - DNA, 2595 bp, Homo sapiens
atgcaacacctacagctaagatgatatttaaattaaatttagaagtgaacataagctcctggatgaagtaaataatatgatttcgttataagcacagggaatgtgggatgtttcaatgcagatttatggtgttttaaagaaactttgaggaaaaaccaaccacatacacatatgctgactccatggcttatgtttgctctaccccacctgtcctgctacaactgggactggcaaagtgcggcctgcaggccaaatcccgccggggcctggttttgtccagcaaactaagaatggattttacatttttaagcacttgaaaaaaaattgaaagcatataatatttgtgacacatggaaatgatccgaaattcaaatttcagtgtccatgaataaagtttttacttttgaaaataaaatggtgaaaatttttatgaaaatacctatttctagtatcctcaattttgcctcttggtctgcaaatccctgaacatttactctctggctctttagagaagaaaatgccaagccttatgttagaatgtcttactcccattgccataacttctgagttactttccctggctttattctctggtcagttctgtcagacccctgaggccgggcagattttggcctttgtaggggaggttgctaattctcccccctaattaaaaaattaataataatgatcttggggtctttctgtagtatattgttgaaggttgtataaacataaagggttgatgatgagaattttctggaccaggctggagttgccttggctgtttcttggtccagccacgtaggaacagctggggagtgtttcatgccttcacagtttctcctattttatccagcctttcctctctgacatttttaacatgcagatgtgtattttctggatattattttgtgtccaggcacagacatgataaccggaatgttaaatttgtggcaggagaaaagctcccatctgcattagcttataaacactctgggggcaaatttccacgtacagagctactcaccagagtaacagtgtgcacagaaggtcttctgtcaacattgctagtcagtactttttatcccctttgctgtgtaaacttctctgcatcatgggttttaaattgaaaataacttttgttttcctcattatattgtctgttacatcaacatttgacaaaaggattgtctgctacatgccgtgattgtctcagtgggcttgcaaaactcagacgtgacctcatggttatgtgcagtttgttgatcaagtgaccatattctgctccaaagtgttgccaggcactttctgtgattcatcatatttcagccagaattggaattacagtatggctgtctctatcgtctttccatcatcacctcccacatgaggtgcctttggaaccccacagcaggccattccgttctcccgttggctttgtcaggagagagggggatgaacagcctgtgccttatcccctccccttgttcctcaccagacacggtgattttgtagtccttacccctttcctcctcatggcaagccccaagaatgcattcctcctgcaccttcccacctggctccagatttgtccaccctatggcaaggctcttccacatgatgacatcacccttctcccttctctcttgccctatatagacttacagcctttctccatcagctaattctactggagctcggctctaagctcagtgctgaccaaggtcattttgcacagtgaagtcagtgccatccttgagctcaggtgctggcaatggcacggtccacgctgaatgtgttgttaaactgttggcttgggtggcagatgaggtactgctctactattgtgttgtgctagtgggtataagccagcagtcaggagaaagtacctagtacttgtctatatgtgctagtcatatccaaattttaggttcttacagtgggcgaaaccagggatatttacagttttctgaaggcactctttttgtgctcataggaaagtgtgaattctaagcttatagaaccttcctgccctaaacctcaggggaaatgtctatcaagcctcatcaacatcaacactccttccttgcccagtgtccaagtttcccagtgcctcacttgcattagagccctgagccttctaattatgctagccccacttacagaggagcatacagtcacacttcaggtccaggatctcattattcttaggccccaggcttctgatgctccctgtcaccttgcttgtatgctggggctggtgttctgcaccacatgtaattggcagcttgggataggcaatgaacctgacaatgagaggacaaaggcttcaggcacctgaaatgtacaagaggaatcttccaggaccttggagtacttcagtaagaaattgcttttctgaatcttttcttctcttttctttacttttcttttctctttttcttcttcttcttcttcttcttcttcttttttttttttttttttttttgagaccaagtttcgctcttgttgcccaggctggagtgcaatgggcacaatctgggctcaccacaacctccgcctcctgggttcaagcgattctcctgcctcagccta

SEQ ID NO: 63543 - DNA, 1027 bp, Homo sapiens
taaagaattccaactgagtgtggacaaaaaccctgacaggtataaattgtgaaaagttctagtcttcatttttctccccatatgaactcctttgggtgctaatgataagcatgttcattgtagatatggattttgtggcattcactatgtatcgtcccatggcagttagttgtaagtattctcttaacaatgcatatagcttggaaaacatcgcattcagcaccagggacagtgttaaaagtccaaggagctctctttttttggtgcttttgttttctgttctgttgaccctctagcctcccatccttctagaactgggttttatcccagggaccaatttggggaccctggacctctccttgcttgatgccttttgaacactccttggtcaaggtaggcttgcctgttagaggagcctggacatgaactgttaatagggaagctataagaacatagactctgcgacagtgcatgaaagagaaggtgatgctctgttagaaacagaagggatctggacaagccaattctacaaggtggtttttgtggagtccagtttttgagtcatttacatttctgttttgtagtgaaccacctttcttcacaggactttgctctactttaaagaaaggaaaataaacttggcttacagaacacagcgtggagctctagtcagggctacctctctgtaatggcctggacctctcaggtttagctcagcatgcagttccccagtttctctagctaccttatacctttataataatcggctctaattcttcagttgttactatcagcaattcctgaatgtataaataaatatatatacttgtatacttacaagtatataacatacctgaatttttttgtgtgtaaatacacacacatacatacctttgtaaatttattttcaaaagtagtgacaattcggggcatgcaggtcttcagttaatcctttttggaccaatagcaaaagagggaatatatgcacctttgtatatttattttaaaaactggtgacaatttgggg

SEQ ID NO: 63544 - DNA, 1024 bp, Homo sapiens
aagccatttggaaatctacataagcaaatgaaaataatgaaggagagtctcttacgaaaaataatttggaagctactgagagcggttgtagccagtgacacagaaattcctgcacaggttaagaactacagggaagcacttgcctgacaaactcaatagtgaaaagaagtcctattaaagagattttacaataaacatgttctaagaaacatacattgcccagggccatcagcgggattcaaagaatactggcttcccaaggagcaggcccatgacccctttgggccaggtcagaccttaagtatagtgtggaaatgtgggggcaagatttgtcacttgtattcaaactcatgggctccgaggtgcctgccctcactaggactcttctgaatgcagatgaaattctgttggaagcccctgtatgctttattggggtggcaagtggggagaggaactgactttccccagcttcaagagtgttctccagctcctgatttgtaggctttagaatattttccaagaaaagttccattgattttatttttatttttttgagatggagtctcgctctgttgcccaggctggagtgcagtggtgtgatcttggcccactgcaacctccacctcccgggttcaagcaattctcctgcctcagcctctggaggagctaggattacaggtgcccgccaccacgcccgactaatgtttgtattttttagtagagacgggatttcaccatgttggccagactggtctcaaactcctgacctcaagtgatccactcgccttggcctcccaaagtgctgggattacaggcatgatccaccgtgcccggcctccactgatattttaacttggtcatttgagttcattgtcgtatcatataataactatgtatcagtgtacacagagtgcattttcctgttttctttttttgtttgtttgtttttttaaaccatgagatgcaactaaaataccaacttcccagttcagatctggtacataaagtaagccctgtgaatccc

SEQ ID NO: 63545 - DNA, 1425 bp, Homo sapiens
gccaccatctaaaagtaagtgacatgactagccctctattaaaatgacctctatgtctcaggccagcctggtcttgtcaccttgctggcctccactgctgttcactggatgaaagagtgaaggaatcaaattcttcatacattatgctatgaacaactaacaggtaatcatgtgtaagaacaacaaaaaacaatctctgcagcatttgatttaggtgggaccagagtttctaaatcctggcactactggtatttcaggatggatcatttgctgttggaggggctttgctgtgcggtgcagggtggtcagcagtccctggcttctccccactgaagaagtagcaccgctccctcccagtgtgacaactagaaatgtctccagccattaccagatgagcctgggagcagagtcttgcctggcagagaaccactgcattagcccttgcacctctggatgcctcgggctcttgttcgattatcctatagtgtgtcctgaaaggtgaggcttgcgtagacagcaaaggaagtccttggtgctttactaggtgctgggggtatttggagattgctgcaatttgaaacttgaaaaactgggcagttttagagaggagagaaaaggcaagaaacagactggagatgcaccaatatcttggccccgtttgggatggctagatgataggtggaaggagggacaaggcgtgcctgctcaggagaaagcatcgatggcttttagagattcttatcccagcaggttaaacagatgcacacaagacagcttggtgtgggggacagtatgggtagcagtgggggtggaataagaaaattaaatcttaaccttcactctgatctcctattcattctttaactgcctttgttgtccaggtatgtcagaatgtattgtgccatcattctgcagaagaccttcatactagggaaaatttgaaagagagagcatttttacaaaaagcaatttactagtaatttatcagccttttccctgctacttctgaaaaatgtgtgtctgaataagtttgtcctgccatgctattcatcatcaccatttgctagggactgcactgaaataattttcttacatcagttggctggggtaagaaatattctaggtcttggacgcaaccatcaaactaatacaacaaatcagaagaattaattgctggtggccaaataataataaaaaattctaagctcttctctgttttatagagggttgctggtacataaaaatcatttcgttgttagtaaaaaaatgatggtaatacttaggatttttaatcactttagtttgttattgctgacttaaaaaacagtaatagtaattgagttcttattctctgatagggaaaacaccaaggaatttttgtggctggtttattttggcttcaaatgaggttatgagttctttctg

SEQ ID NO: 63546 - DNA, 1669 bp, Homo sapiens
gatgcaggcagctgccagtctgaccgagacacctcccagggcccagcagtctccgcatatagtaagatagctaggcaagcagtcagaggagtgccacaagggattgtatgaaattatgggttttcctagtggctttctcactgttcagacaccttggagtcaaagatgctggtggggattcaagatgaactgggtcagcattttcttccatatgccaagggggtgcctgaacatgaggctactcagaatgggagaatggtgaaaatgaacatcccattcttcaccaccggcttccaccggaaggggaggtaaaatagaacctcactcactaaatgaagtcactcacattgtgaaatagttaacttagagacctgtttcataggtgccaattgagtcttcagaactggaagtcctcttttccttggggcaaagccagctgccatagatggtggactgtgtcttagattcattatccggtttaattttctttatatagtgaaatgttattttttccctacatttgttgttttcagcagaggtcactgatgaggaccaaaaaggggtgactggatgaattcagacacccttgtgtgactgagcaatgcgtgaggaactgttttcttgcagaactatggctccttggaggaaacacggagatggcacgccccgttccctcgatgtgtagaatattgcagtgaaacctctgtcattaagaactgatgaccacctagtccaaagcagggaaaaggggcactcacagaggttaaatgtaggcatcgaggcagaagaaaacctatcttaggttcagcccccactcatgcatatctgcggttttagaaaacactcttaacgaacaaaaaaacctatggtcagttgctttagccacataatgtaaaccacaaaggctcacactggcctacttcggggagtgagaacaaaggagggcaagcatgcatgcttggggcttggtgcttggtgctcatgttttaaaagaaccagggaatggccctcttaaatggtccagacttttaatttatgtttcactacccagttctttgattttcagcttatgttgatgttaacctttgctcatcctgctacattcatagagatgaattaccaaaattttatgatgttggtgaaaatcaactggaaaatatgcctccttgaaatgagacattatgtcaatgtaaaaaaagttttatttgcagcagttagctatgccagctaataatggccaaaaggagttcagtacagttggttccaacaactcaccaaaatcacctgtgagattggtaaaaggaactaatttccctgcctccctgtttcccatcatcatgacagtgacagagtgtgagacaggagggctgtgctttgaacacagctcatgagtacctttagttacgatagcaggtgtcccactgaccctggaggcttcctggtgatgaagcaacaatcagctggtagtttggggcccatcagaggcgggagttggcaggacacagaagaggtggtctcccttttttagacttagtgggaatctcactcacatgaaaacacaaagatacatactagaatgtacttggggagtgctttgccttcctgattatggtgaatctttttttttttttttttttttttttaactaaacagcatgttttgactcatg

SEQ ID NO: 63547 - DNA, 1048 bp, Homo sapiens
caagagcccaggctcgggcaggcacccaaagcaggacatcatacagtttcctgttctatgaagcacccaacacataacacattaagtgttaaactcaatgaagagtcccattttcagcaaatattcctgcgtttgcctctatctttttatctctccagcacctccttggaacagatgccctgctactttacaaggcttgtggaaaagagaaagagaacagtagcaaaagcctgtgtagttcatgaatagaagttagcatcgtagtgagtaagcagtactgatgatctgtgaaatgattctctgtggacttgagcatgctaaaaagatcttgaaaaaggaaaacataaatctttccaaaacctcacatgacccctgtatgctttcgccttcttgaagctttggaggagagcataggtgtggatgaaatggagtcttttaaaagttgttttggtttttgtttttgtgtgtgggtttttaaagagagcatatcctgccacgtagaagaaaatccagggggtggctgtcctcctacaggaaggaggtaaacaagcatttttccttaagggctctattccctcagcctcgctccctcgaaggccacacttggaggccaggaagttaatccattaaaaaacaaggagaagaaagagagaaagaaagaaagaaagagagaaagagagaaagaaagaaaagagagagaaaagcaagcaagcaagcaagcaaaagcaaaagcatattggtctctaccccagtccaggtaaatcagaacttctggaggatggagactgggttccactgtttgttttaaatgcctaatataattttaataatgcacatacgataaagaaccactggccttcttcctttatctttttcaccctttgttgtcttctatttcctgctgtatctccaaagcttagagaagtttgtggcatacaaaaagtacccagaaatattgactgaacgaagggcttaatgaatgagtgaatgtcacgggggagcagggaggttgagccccttccatttttttctagaatgaacctggaca

SEQ ID NO: 63548 - DNA, 1044 bp, Homo sapiens
aaaacaattctttcccaatcaggattccctgagttggtagcaaaatcactggctaggtttgtgttagtagcctcattaaatatttattaagcacctgttatagatactactatgcttagtcatttaaggatttgcgctgtgaatcgcttcatccaatttcctcctatttcaaagtatttcttgtggacattctaggacgtaagagataatgaaaaacttattttttaaataatatttccagttgaaaattcacactcaaatatttaatagaaatcctatcttccccccccccccccccccgttcctgctggctcccagatttctgttgccattaaaatcccccaccgccttgctggccttgggtagcatctttaatcccttctttctatcttgccacattacaaagacttgtctgccagaaggttttactcatagctgccccctaacttacttcccagtgctactgagactggcacattctcatctgtgacaccttctcaactggtctccaactcctctcctctggtttgcctctagttataccgccttaatcttctgagaatatatgttcttgtttcaaacatcaacagaggaccctcttgccctgctggttcctcctcaaactgactccagactatgcctccactctctgattccagcacctcaacctttgctgaatgtcacttctcactcttcccatacaagtctgtagccctgagcaccctaccacttggcttaagctccaggactaatgtctgctgggctcaggagtgcaatctcaagcatcacccacgaagtgagccggggcatcactctctgcctgtaatctcctatcctgattctacctgggagtctttaggctcctgccacttccttgccacctcctcccctcctcctggacttgagcttcttggagtcctctcacttggtcttgtaacaccttacacattgccttggccactgctgcaacagctcagtacatatccacaaatcagaagtcctctctgaacaaagccatctgcatatccatctaccttccctatg

SEQ ID NO: 63549 - DNA, 1030 bp, Homo sapiens
aaacacaaagactgctcaatttcattaaggttggcagtgaataggatatagccccatgctgcttcctcaactgaacagctgtaaaaaggccctcatgccatcagcctgtgctttttcctctttctctctgggatgtgcctgtccatggaacccctgctttgggatatagctgtgatcatctctgctgagatggagtgagagcaacttttatttgcaaggctgcctgtagtattttcagcattccgtagcctccttcccatgtctctcatatgttgtagtttactgcatttcatttcatggccaaagctagattattaagggctgaactggaattttccatattaagtagaatataaacttcaacaagcattttgatatggtggggttttcttttgtttctttaccattctattggatagaatagtataattcatatgaatgtatgctgtgcagagatgtaagactctcttcttttctttttttgctcaaacttcctaacagcaggatagtgtggtaaagagaacatgtctatggatgtgcaatactttgaataaacagttcagtgctctataaaataaatattcacaaataatgactttggggagagttatttccaaatccctttgaaatatgttgttagccaaaaggtttatagagtaatttagaatcataattcctgcttgtccctaatatctgctgttctacattcaagttaattttctctcagtcccaattagagctgggaatacatactcagcagaaagagacacatttgtcaggttagaatgttttgtttttattcaggtagtgatttgtcatctgataacatctttatacacctcaaagtccctcaacccattcattatggtttgaataatgtctaaagcacgtacgactcaaatgcacactgaatatcctgtgacttacagtagaggggtctctgaaaggacttgaatttggagccaggaaatgtctctgaagttatggtttttctcaatgtgagaggtaagatccttggttgcctggagat

SEQ ID NO: 63550 - DNA, 1751 bp, Homo sapiens
gttcaaacctatcctttcatggcttagtgcttaacacaagacattgtccaaacaacttgtttacagcaatcctgtcagggtccctatagtttggttcctgcaagtctgtattctgtccttaatgtataagaacaatgtacattttaaataaactgattaaaagtcatgaagtttcactacatatatatcataggttagctccagtattggaataaagacttctctcaatgtttgtatgagaatttcatggtaatgaaagtgtcgtcatgtagtatcaatcatattaaattttgctttaaaatattgaagtcaccccataatgttatgaaatattaaaatcaaatatgtgagacaaaaaaggatctgcttcataaatcatgccagctaatttctggttggggaatgtaggtctccaaccagtggaatcatggtggggaggggttgtggtgcttcacatttatgaaagactgttgaaaatgacgatgacactggttttatctggggagtttttatgacctcacactcccagaatgacggtggtttgcctcaagtatgtagaatttgcctgccttcccaactgagcttcttggatgctatggacgcgttgaacagcatccttcacaagcgttaaaatccgtggtgaacctgtcactgccctcctacgtaaatatctgaccacagagctgctgctttgggaggtagctgtgatcatttctgtatcatgagtctctgagaagcataagtcacctgcttctcatattccagagttcagtagttgtctctaaatgagatagccatggctgggcgcaaacaagagaatacaaatgtctacgtgaacgggtctgtcctgccactccactgcgatccgttgttatttctgagaatcattttgatttttggactgcttatttcagtgtgtaggagtcttccttgtagatgaatgcctttcacgtacaagtctttctcttatttattgatttatttaaaaatttttccctacagagggagaaacaaaacacaaaaattccctttcctgccacaggggaaaacaactgtggcaaaacagagaagcccccgaagtaaacagagtaatagagtacccagcctcccatagagcttgcagaaatctcattgtgcagacatggagcttcccagcttttgccttgttagcctatttcttaaccagtaattctgtttcttaataggataaagggcctgacttacatgaaagctcaaagtcttaatcacaatgataaaatacaaagtcgtggcaactgtaataagtttaaagacatatgtagcttttcaaggacatcttgtctttaaggaaaagtctttcatttagctaaagaaattaaactgaattgtttagtcttttaaacaaaatgatgaatttagtgaagaaaacaaaactctccatggctaatgtaatttatgcaaaatcatgcaattagtgatagctgtgctagactttttcttttccttaaccaaatgcgcctctaataaaaccatcgtgaggagcagtgccatctaatgtaagtagtaaacatggatagtaaatgattaatatctggtgaggcatgcagatggcaggacttccattttttctttgagctccttgtgcatgtttgctaatcattcttgcaaaaaaattgcaaagataaatatgaactttcaaaagtaacattcaacaggatatgaatgtaagaaatagtacagtgtgggggaatagtaaaaaccagcactttccg

SEQ ID NO: 63551 - DNA, 1065 bp, Homo sapiens
gcaagatgcagactctcgctcttgactttgggctccaggagctgccccgaccccgggctgcccgcgggctccctcctccctcctgccctcgcccgccagctcgcagtctcttaggtctgcagcgttggttggtttcccacgcctgtcccggtctgactcgggctgccaggcaccgggaagccccgcggcgccgaccccaacccgcagccccgggaaggtgccaaccccagcgagtggaggagacgagcatttcacgtgggcatctgccttcactgctgctcgcgcctctcctcaacggccggcgtcagggcccctctgttccaactcatcccccccccgaagttaatcagccgtacttgtactttccagggcgctttagtttggaaaatacttaaaagcctcgaaaccttccggggagacggccgcccccagatctcccagttttgcctggctagggctgtcgggcgctcacgaagctgtggcgtctgtctggaacccacatcgcagaggcgcagccccgctcctccctgacgtcgccaaagttgccagacgcccctcagcgacccggtcgcgccagatgcagttgcataaccttgccccccacctgcgaccgcaccgggtccgctcccggctgcaccggggtgtcccggccccgggagccgccgagtttccggccaagccggtttggggccgagtgtgtgcgcccgaatcggggtcggcgcccgtcccagcggtgctctgcccgcggccaagtacgacgggcgcgggggcgcgggaggagggcacgcggggctccgcttaccttccgctgcttacagataagtcgaggtcgatgcagcgcctggctcgggcatgtctcgctgcggaccctggcaagcctggggcggcacggagcactccggacagggcatccgcggccagactcgccgcgctcacgcggaggaagcctcggctccggggacttggcccgctgcgcgcctgctgcccgccccctccaccgctgccggcccggccctgctggcccggccggcccccgcgccgcagctcgcgtcgctcgcgtccctc

SEQ ID NO: 63552 - DNA, 1033 bp, Homo sapiens
agggtctagaatgagtcaatatgctcggcttcctcaggaaaaaaaaaaagtgaaacttgatagattcattttaggaatcaattggtattggctttttatattttgcttaagatttttgttgaaaaagatagacttgcaaaggagaaaatagctacttttcaagtgggatttcctaaaagcagaggaataaaaataagggaaagttcaagacggctaactaagcaaaatatccacgtctctcttcttttgccttcttcttggaattgtgcaggggttgtacagagaattgctggaattccacccctatggtatagtgagtttgaggtctcaatttccacattaaaaagtcaagaatatacaagtcaaacatgttcaagaatgttcataacaggtttatctatatctgttccaaacgggaaataatccaaataccagtcaacagtagataaagatttcttggttcttcgtatagtggaatactagacagcaacccaaaagcactaactgctgatgcatgctttggcatggagggcttctacaaaggtgcagaacaaaggaagccagacgcccagtgtttatgacatgattccctttagatgaagtccaagaatgcgacaaagttatcaatggtggaaaatatcagaatggggattacctttgaggcatactcgttgcccgggaccacagcaacttcactggtgctggatcattctgtctcctgcactagttgcttatgcagttttccacctatatagaaattcatggagatgcttcctgtctcagtgtgacctcatttgtctgagcatcatcactgtgtcattgcaatgtccacatgcatgctccccaataacccttacccctcagtgaaccagtgtatctgtcagtgtgattaacctgtatcctctccagtgtgcaaggcaggagaagagaaaagtgtctccaaactagcaactgcagaagaggagccttccagtttagctacacagcagaacttccttctttaggagactgccgatgaaacgcctgccctccc

SEQ ID NO: 63553 - DNA, 1072 bp, Homo sapiens
gttcccttaaccttaaacatctagaggtgaggaatgcctaactttctaagaatgcagcccagtaagtctcagcctcatttctctagtcctcactcaaaatggagtcgctgtggttcggatgcctctgacatctgcatattccaaagagactcatagatgagcccaacctaagtctgtgatgggcaggttacacccgtcagttcagaagctgtggtagcagatcagccagtgctcaacgcctacgagggaaaagtaactcatatcgccttcgacctgtagggtcgagatcattcccttggggacactttagccttgtctttcaagaacaagacagacacaatcctcaaggtgccccagtggggcctccttttctgccgagaagccctgcaggaaggctttctgcatcattccccttgtcatattctgctcgagccttcactctcctctttctgggcttatttctggtttaagactctcgctttgtgtaaagccccttgcccgtggctcttgcacggtcctggcagccgagccgtgtttccttctggtgggaaccagagctgtttctgaggtgctggtccatgttccagggccatgccactcctctggctttcttttcctttcatggtaagaaactagagatggtttattggcctgaaatacaaatttgttttggaaaacctgagcatcgtgaggactcgttgagatccctggctttctatgatgcatcattgtgaatctgatttatccacagaaatggaaggttttccttttgaaagagagggaagtagctctaggtttttgtttttttctaatgctccctgcaactgaggcagtgatgtatgggaataaggaagagcaggcgtgcactctggctctcccctctcccctcacaatccctcattttcagggctctgagcaaaccccaaggctttcccctcccaactgcagcctctcctttcttttaggcggactcctggggaatgaaacagaaaccctttattttgttgacctttatttggtcagtcttgggtgctggtttctatagggtttcttactatcccattctcgtcac

SEQ ID NO: 63554 - DNA, 1077 bp, Homo sapiens
ctgctaggctgctggtacaaatcatctttctctctttctagtcacctggatacattatgatgcgatgccagacttccccaaaaccccaatcaagaaataagaaaagatttttctccatttcctggttccctcacagtgagaatgagattttttatgaagtcttacatttggtggttattggcccattacctatggaaaccactgtaaagacctcacagtgctgccatcagcatgcgctctggacttcggcggtgccacataaggtggccccagtgctcatcccaggaagaatggcccctgcttgtctcggcaaatgactcccacggaagctgtggagagccacgaaggtggcaggcggcattagaggggctgtaaagggaccgatgcctgagaatttcttctgcaggatgtagaaccgtgtgcatttggatgataatgcagtcagaggagggcttcctgtgattacggtggaataactctcaggctgagcccgggaaaccaggaaatgcacgtctaccaggagccgaagcagaggggtttctttttccctcttgctctgtctcgttgaaccttggttcttctatctgtccctgagtcctgcctctgagccactgcctgttccctgggtggctccagccatggactgcatgggtgccaggcacatagctggtgactctgcccctctggtgagtgcagcatggcctctgctctctccccctgcctctttttgttttccttttctgagggttcctcagcctcatgaagtttaaagcctaatgcagatcctctccctccgctgcattgttctaggtgtcactgaatttctccaaagagaaaaataaaaactcagaatattcttgtgactgatttctgaatgtgacacgtggcgtaatgacttaaacgtattacagccagcagctcttggtataggacccatgatattttattatattttgtttagcattttgttgtactttattattttattgtctttgttttatttagaacactttatatccacccttttcacagagttttaaatgtacgttacggtactgttaactctgggtacgatgt

SEQ ID NO: 63555 - DNA, 1054 bp, Homo sapiens
tgagttttttatatatttgagatattaatcccctttcagatatatgaattgcaaatattttctcccattttgtagggagtctcttcactctggtgattgttccttttactgtacaagagctttctagtttgatttaacatcatttgtctatttttagccttattttttattgtgctttttaaggttatatccaaaaactcattgctcagaccaatttcaagaggttttttttctttatgttttcttctagcagttttacagtttcaggccttaggtttttaatacattttgagttaattattgtatatggtatgagatgaggttataatttcattcttttacatgtggagatccagttcttccagcatcattattgaagattatcctttcctcattgtgtgtttttggcatctttgttgaaaatcaattgactgtaagtgtgtggatttatttccaggctctctatcctgtttcattggtcgatgagtctgtttttatggccagcactatattgttttgattactatagctttatattagatcttaaaaaatctggtagtctgatgcctccatctttgttatttttgcccaagattgctttagctattctgggttttttgttttttttgttttttgtttttttgtttttttgtttgtttttggtggttccaaacccatcttagaattgttcttttaattttagtgaaaaatgtcattggaattttgaataggacttgcgttggatctgtagataactttgggtaatatggatattatagcaatgttaattcttctaatccatgaacataaggtatcttccatttatttttatcatcttcagtttcatcaatgttttatagttttcagtgtacagatctctctctttcttggtttaattattcctaagtcttttattttttgaagcatattttatcacacgtttgattacttttattaatgcaactttcattaaacaaccagaaatttttgttttaagactcatctggtaattcttttctatcagagcagggttaaagtttgctttgaaaatgat

SEQ ID NO: 63556 - DNA, 1007 bp, Homo sapiens
cactgcctgtaaagtggcacaggaagagaaatttgtgtgtgattgaaagaggtcgtattctattaaagtgacagtgttgttattaagacgattatccacgggacacatctcattgtcataaggagtagacaagatacaaaggcagcctttcttgagctgaatggtatgccaaatatttatatgtttcaaaagttcacaaattttgccattttactaatcattgcctcaatggaaaacaagcattatttagctgtttccctgaacaccaacttggaatctaaatctcagcaattatcatcattcacaaataatttatatttctgggcaaatggaagatatcatatcatcattattgtgtttgttcaatttgagtaatgcgtccttcgaggactcatttggaagtagatatgtgtactataggtataaaatggattggagaaaatattggattttaacatttcactgtaaagcctgtattccaaattaatataaaagacatttaggcattctgatatattgctggtaaaaggagagttagtaaaagaatgcaatttgagagctcatttaatagagaaaaaatagggacatgtctcaaagtgtgtttcatgctataattttaccaaacttgtactggcttaatgggaaaaaatatatatcctgtgtttcttaaaatgtcattaacttagggggcaatatttaaaagcaaggaaggctttacaatgttgttagctacaaagcctagcagtgagcaattgcagttaatggcaacagaactgcctagctcacaacccgccaccaaagcaaacacccttcagggcacgcaaacaaacgtgtgcacacccacgtccacacacatactggctgcctccatttgcaacagccggagagacgtttcagctttggccctttaccttccccattcttgattttctgtgttgctttcttttttcctccttcttttcctttccacccagctccgtctggtctgagaaactcccagctctccc

SEQ ID NO: 63557 - DNA, 1047 bp, Homo sapiens
tagggtttgccttcgtgctccagtagggtgcttgagtttatgtactaataacccctactagaattttaagtgataggaatgacctggtaggaagtgagtctgccaggtaaaccgaatccctttgtcacctcgaagaaaccgtttcttattaactgctttacttttgcttgagaaaggcatttctacaacatgtggtgggtgagagagaggccagtactgaatgtaattttccctattttggaattagactttcttgttcgtattgactacatagcgtgtaacaaaaccttatccacagttgtcagctactgagacttgtaacggaatttttaaaaattcaactactccagctcacagcttccctagtcctccctgcctactgtaccctctgctctcaggataataaagacatgaaaccagcatttgcatttcctcagagctagtgtagtttgcaactgtgattatcaatcgcttccaggcattcctctctgttggcataggttttgtgtttgagacttcctgttctttttcaggctaggctgggacctacgggaaataatgattagtgttttgaagcccacacactttcatagaggacttggtatgtcttgcaagtaaaggttcatataacatgaatataaaatagaatatgtaaaattgtagagaaaacgatgctttctagaagttgaaatactcaaagctgactgcaggataaaacataaaggcaaataagacggttgccgggttctcactggttggtgaaaatgatccttgccatttatcacgggaagctggcagtttacaatgtagattttttttttttccaagacagggtctcactctgttgtccaggctggagtgcagtggcaggatcatggctcactgcagcctttaactactgggttcaagcaatcctcccagctgagcttcccaggtagctgggactaccgacacataccaccgtgcccagctaattttttgtgggtttattttcttggagagatggggtttcgccatatggcgcaggctggtctcgaactcctgggc

SEQ ID NO: 63558 - DNA, 1035 bp, Homo sapiens
aattagagacagaagtcaagcctcgctggagtgttttgggggaataaatgagaaagcgcatgtggggtgctttgttcagagcctgacctccagtgaccttgcaacaagccatgtctgtgaccccctccatttttatgaagatgacatgatagtgtgtcattgtccctctgaatctgagaattgagcccacaggtaagggtgtgaagcatagacattgccctggagattcagagcactttgtacatgtattgagaaattacattataaaaaaatacaattctttgctttcatagattcactctcttcttgtgaggatatttgtatatattcaaattgcggtttcccttgatttataggtaattaagtcaacccattttgcttgctgttttcctagaagcagcatttgtgaattgctttatgtgacatggctgacactctgtcaagcataggtcttgtgcagttgtctctgttcagaagccagtcaccaaaatggtggtcctgtctgccctggcatcttggaaggacagagctgcagtccccagagaggatcctgtgttgtccctcatgtgcagatgaggttctgagattcaggggggttgaatgagtggctccgggccccctgtgtgagtagcaggagagactgcagaactggttgctcttaagccacatccaaggccaggcacataaaatgtggacagtgacgcccaccacccatgcagtccttgggaagccccgttggcataacgagaatagagagcttgacgaggaggtcctcagtgaatgaatgccagctcctgaccacgctcagttttggtaacagtaagtggcactgtctacagagcctctcaggaaccggggactccacctgcctcctctccttctcccaccctcagagccaatcatacacaggacccagtggataggactggagttccggaagccagctccccagcgcctcctccgagctgccatccttctctcctgtggcaggggtgtcttcctctgaaatcagtgtccatctcagtcctggccgca

SEQ ID NO: 63559 - DNA, 1041 bp, Homo sapiens
tgcagtgaacaaatacctcttattctctttaagatctattagccagagctaattccttaattgaatgttgttctaaatttaccaccaaaatgcatgagggcgatctgtgtttgtacgtttcagccaactgcatgacatcagttccatcacaactgcaggaggatggaggaaggctgctgtgcacgattacttgctgttttgtggtcaacctttcccataagacttcagagaaggtttttacttaatactgtacctgtcaaattcccagagctgcaagtaaattgaagatacaaattatgttgtaaagtgaaatattttgtgttattcgcgttattctgcagtttggttgatttaggaagaaaatgaactctgacagcttgatcttttcagttcagtggattctaatgtttcaaaacaaaagacctgcactgaagcctctttcctccatgctttggcagagacaccactgtgagctcttcttcatgctcaaacctcggcagctaccggctccatgtcatggacacacagagtcctaggaagagatagattctgctaaatgctaatgtttgtaaatataaatattaaccataccccgaaagggaaggagttcttttgctggctgactgaatgggtagcttttagcacctgccacttttctcaacatgcaatctattttttatagacagaaaaaatctctttttctagcttttctggtttgctgctgttgcctcagtgatattgcttgggatgcagaggtttggcaaagaggttggaggagcacccctgcattagtccgtgttcacgctgctgataaagacatacttgagactgggcaatttacaaaagaaagagtttattggacttacagttctatgtggcttgggaggcctcaccatcatggcagaaggtgaagggcatgtctcacacggtggcagacaagagaagagagcttgtgcatggaaactcttctttttaaaaccctcagatcttgtgagacattcactatcaagaggaacagcacgaaagacctgcccccatgat

SEQ ID NO: 63560 - DNA, 1097 bp, Homo sapiens
acctggggggcagtgtctctagggaagagaagccgacccaggctaatgcctcagggctctttgatatctaggggtttagcagtggaagataagtcagcaaaggagaccaagagcaggagtcagtaataggaagaaaaaaaaaaacacaggagagagaagacagtgctgaatttctgagagagagcatagaaattaacagagaagtaaccaaaggatttggccacatagtggtcactgctcccatggaccagagctgcctcagtggagtggagtggcagaggaggaggccagcctgctgtgcggcatggaggaaggcatggaaggaggtaggcaccctggctgtgggcgttcattgggttttcatggcgctcagggtcagacagatggtgtgtcgggagctgtgataccaggagagtttgtaggaatttgctgttgatttagggcatgttgggaacactggtggagatgagcggatgatgggtgaaggtggaaacgctgggatggaggaggttcatgagggcaatgagttctagatgaaagggatggtacaggaggggctggcctggagaggagcaaggtcaggtgatttgttgcaacaggagaggacagagggaggtacaggtgtcaacctgtgtgtagatgtaggtggtggttggatgatggaaaaaaacccatgtgacttctgctttcctactgcagaatgaagtcaggtaattagtgagaaggggtgcagagaatagtcaaatattatgatctctatatctctgtgatggccatattaatatttcacctttcaccaatttccccgctaatgcccacgcatggcgtacaggccgcgttggagatccctgcggctcatgctgccttattacgtaatgccctggagaggcctcacaagtagaagagtctaaaacgatagattgctttaaataactcatgctaaatcatcctcctgtgaacatttctcgatggatcttgtcttttaagcttcaacaaaccctattagccatcaaaatcctccagtctctcaaaatagccctcatcagacttgctcccacatgcttgcgtcatggctgggtggccactggagaggttgg

SEQ ID NO: 63561 - DNA, 1088 bp, Homo sapiens
gtctttctcaccctctgttcctttaagaccacaaagcagggactcggacactggtgacacggacatttcaggctctagctgtgggacgcttcaggcaggcagcctgatcttttttccattttgtttagaggtatagattgtacacctctgctccgagctcctttatcaggccccagaaatcatggatgcagcaaaaattttgaaaatgaaatttttcctatattatcccaattactctttggtctccatgaagccattgtttttccaattcctctattgcagaatgcatgcagggaatttagaaatcacatggtaaacgttatgggccatttcctattgctgactttaccttcctagttcctcagagatgtaagatgaatgtccctggtgccagtgagcagccagtcagtgtgcacagagctggaaaaactaatagactagatgcatcttactgatcacgttgatgtggaggggcctcatctctctggtccagctggaaatgtgattgctgcctggggtggccatgactaagggattcctgtctcagctgcctctatatggagaactgagctgaactggtaaacgctcagtttccctttcagaaaagaatgttactctcaagagcagcagtgattcaaatggccttttgactttaaaaaattctccatttaaaaatgtagaagcattttatcctatacaattataaacattattggtagctaataaaaaattttgatgaggcagcagatcattaagaaaatacatatagaccttgcacacttcattttgacttccaatagataaatagatccatttcacaaagcatgtgcatttgtcaggttgctttttcttggttttgtttttttatttgacttaagataggtctatagatgagtgtttgccttcgttttctgtgagccagttttcatacctttaaagttgaataagggctgggcatggtggctcacacttgtaatcccagcactttgggaggccgaggcaggtggatcacctgaggtcaggagttcgagaccaggctgaccaatatggtgaaacctcgtctctactaaaaaatacaaaaaattatt

SEQ ID NO: 63562 - DNA, 1006 bp, Homo sapiens
tatatatatataatttttttttttttttttgagacggagtctcgctctgtcgcccaggctggagtgcagcggcgcgatctcggctcactgcaagctccgcctcccgggttcacgccattctcctgcctcagcctcccgagtagctgggactacaggcacccgccaccgcacccggctaattttttgtatttttagtagagacggggtttcaccgttttagccgggatggtctccatctcctgacctcgtgatccgcccgcctcggcctcccaaagtgctgggattacaggcgtgagccaccgcgcccggccttcatatatttttatgttgtaaaaaggggaaacctttgttctttgagtaaaatgccctggtagtgaacattttttaaggttttttttattttgacagacatacccacatttcacgcagcatcatgcttacccattcacctcatcttgcattcagagagctctcaggcacttgcaaaattgaaggccagaatgaagggagctcagtcatccttgacaactgctggggacaaagttggcaatttgttcattgttcttgcaagcacttagcctcttgccgagcactttaacatcagagaattctgggcatagatcagaaatcagtggctgcagaggcaagctacgtgcaggtaagttaagggcttactatagaaatgcaaaatgccaccattcttcactgtgttctgagaggtttcatactgttgtcgacacctgtgctggtgtagaattgcagatctctttctgtcttttttttgttgtttttctccttttcattttttcattttttactccacgctaagaacatcggaatattttcaactttaccattggtaaaatagtgcaaaggaagtgaagatcacgtcagcccatggtccatattttattccttgagttagcaaatcaccaacactatttagtttagcgagttactcctttggaatttacagtaaagccatatttaatatatttccatttag

SEQ ID NO: 63563 - DNA, 1066 bp, Homo sapiens
ccaacctattatgttgccagacttttgtacctttgaaaatttatcacatgagaaatggcatctgagtgcagttttatagatctcaatgtatgttttttggtttgtttctatactgcttagagtttataatattttggaaaattctcagacagtatctccgttatcattacttctacctcattccctttctcttcttcttttggaactcaattacagatttgttagaccttaggcccacatcacatacatgtcttatgctttttttttttttactttatttttcattcattttctctctgtattttattctagctatatatttctgatatattttttacttttgtatttctttcttctgtcctataatctgctggtaaattcatgcatttttgttctctgtttctgttatggagttttcatttggttatttttgctaattggaaactaaaatttcctattcagtcttttggtcccttaaagactcttggtggttctgtttccgtggatgtgtttctgttgagttttttgggaagaagtcagtcttgttttatgatcacgtcctggtttctggtatgcctggattttcctgaaatgaatgctgtagatcatatgtaaaagatatacagacttaattgaaggtacgatgatgttatcttactccagatagtgtttatttttttccataatttcctgtgtttttatgttgtgtatatttgtttaataccatgaaactccttttctgtgatattcaaaatgaaggtcgtggtagttttgagtggaaggcagttttgtattgtgtttttaaaactttattttccagcaattaaagatgtccacagttatgagaaataatacaaagagatcctgtagcgccttctctcagtttcctctagtggtaatatctggcataactgtaatatatcacaaccaagaacttgtgtcactcttttataggtcaagcctcttttctcctcctcgccctaccccgtttctgacaaccactaatgccttctttatctgcgtaactttttcaccgtatgaatgttacataaatgggctcatacag

SEQ ID NO: 63564 - DNA, 1544 bp, Homo sapiens
gctcacggtcagacaggagctctcatcagcagctgagcctgcatccccaggcgtttgcctccttcctttggttttgctgatttcgcttccttgtggggagacagagctcggcctttctgctctcctgttgcgctggctgtgtactgtttattatagcctacgtagagagaatagagggacagacagcatttctggtgacagggcatatccagtgaaatgcagacataaatcatcttttaaacaagggtgggtttgcggtaggaaggcctgtgtgaggaaataggccctctctgggctccctccgtccttcacagagtgcctcctgacccagggtcgcaagccaggttctgtgccaggcaccactccagagcaggtatctgtggcttgacaaggatgcacagggcagccgatccttggaaagtctgtgtgtccaaagtgcctctggttatatttcaaggacctgcctgagctgagtcacagttagcctctgacaatatttctaatagaccactctgttgttggacagtttttaccatttgcacttccagtatgaccactccaggtctctgcattaatttttctttttaaatcctctgttttaatgttttcgggggagggggggcccacttctatctgaaaatgcccatccagacactgtgggttctgtgccaatgccagggaaggaagctcagggttctgccctgggccctaagaccttagtgactcaggcagccctgctactggttgggagcgctctccactggccacctctgctgcaaagctcttttctcttgcttcatgagaagtggaagagtgtgaaacagtacacggaggcctttctggctgtttacaagggagatgggccaccagtgtttgtcaccggagcttcagggtagcatgcctaggagaggagcaaacaggggccttggggctgtggagtcatgctgggaagatgaagaaaagacagttggtaactgacaaattgcaggtgtgatcattactctctgtgactccctgtttctcagatgcactgttgcttacatctttgtatgcttttgcattcctgctgattgattcaaggtgcaacgtgcctgcttgtcaggtatgctgttgatcacattatttaagaagaaataaagtcgttcccgcagctccacctgcagtgatgggctttaatgttttgtgcttcccgaggaaaacctgccgatgatgtgaagtgacattcaacccgccgagagctgatactggcagacaaatttcatgtcctgtctcctgatcaccagtttgctgcctccaagttgttagggatattaaaaacaggggtgggaagtccccacttgacaggttcaatttgtaatgtgaaaggtgctgagaaacaaagcaaggacccaggcagctttctgccaaggctgctggccccacactcagcaaggcaaagagaaaggggatctatctgctagtagcatgagtgtgggagaggagggggctgttgtagggtgccgtggaggactcatacatgatcctgggaagagcgctgctgctag

SEQ ID NO: 63565 - DNA, 1065 bp, Homo sapiens
aagtgatgacagcttggagcatcccaaagctatgcattattcagacgtgtcggagcgagagtgcccgatttcaccacccattacctattgggatgccttcttctctgcttgctaatctgaatattactcatttcaaggttttgtttatattatcttgaggggaaacaaacagtacctaattaatcccaccaaacataatattggaaaagcaattattcccaccacgtgtaataaaccatctgtagggaaaataatccattaagtgtgaatcagtgtgaattttaaaactattattaagatcagattggttcctcgttatgagcaccataattttagtatttgttcatgcatactgtgttatgccatgttctgtaaccttaaatccttaatgtccaaacaaataatatctatatgctaattagtgtcaaaaatcacaggtcagccaatcaggtgtttcacagatgagccccttttttgggggttagctcgaatctgtgattaattagaaagtgagtcccctattttgaaattctagtgataattgtagcagagggctgaatttatttgcattttcagtaaatcatccattaactgaaatgaaatctttttgttaaattactgctcctggttcagttaggagggagttttcccttcatttttaaatgtactggagtatccttcagttctccttgagtgagaagcaatcgctttgaccattgtcaaccagaaagaatttccccacagcatttctctctttcccagctgggccataaattgtctcgtgactgaggttgctgtctgctcctgagcaagctggaagcaatgatgagctcagagctgggctttattaaatcctaggaagacacataaaaattgttagcagttgatttcgcaggaaacacctagcaaacttgtcggggtttatattacaaagcccagggcctgcagttagcagatcatcttttttgaaaagcatttgggtacctttgtcagagcttttctgcattttgacgtaggaggatacctgagggccatggttgtgagaaaggagagaacccacccagg

SEQ ID NO: 63566 - DNA, 1050 bp, Homo sapiens
ggcaggagaatcacttgaacccaggaggtggaggttgcagtgagctgagatcgcaccactgcactccagcctgggtgagagaacgagactccatctcaaaaaaaaaaaaaaagaaaaaaaaatgcaagctttcgacaaagcctgcctgcctgctttgtgtgtgccttccctttttcttgcagtggccctgtgggtttgcatggccctctgtggccagcctcaggatctagggtcctctctgcttgtagtataagctttgaatgctgtggcccggagcttttccacagcctgtgtttcctgcttctggtctgctctagagaaattcaagtcaggtttggcctggcttggccaacccgagcttgccatgtacctgagtcccaagggtgtctgtcccctaactctagccacctgttggggaggtaggaaggtctgggagggagatgctgaggagagcagagtcgtgtgcagaccaggtgggactggactacaggagagaccaggtgggactagactacaggagagccctggggggccactcctggggccaggagctgctccctgagggaattctgaagctggtttgtgattctgtgtcacagccacctgcatcccagtgaaagctatggttgctttccataggtaaaggcaatttgaggacagcaaacatattttcccccacacaatccgtcattgtctggtgatgggctgtcagtccaaaccgtagcctagaaatcgtagctcaggaagtagagtgctgagaggaacaattcaaacaattttgtttcctaaatgtattcttcagttgaagtctttgtggttaatgttgatagtttgtaggcacaatcactattctatgcatagggacagcttttcctaactctggaaaagagggggtgtgtgtgtgtgtgtgtgtgtgtgtgtgtgtgtgtgtgtgtgtgtattgtcaaaaaccaatggaagagaaacacttcaaaatgggtgagaacagagaacagcatgaaatatggacagcagacagccctgtatgcaatgaaaatgcaggtgcatggt

SEQ ID NO: 63567 - DNA, 1035 bp, Homo sapiens
tctcagaaagaaatagtttagtggcaggtgagagagcatcatgtaatcgcgatgtgtaaaaacgtgcaagaatggaattgtgcagaaaacccagtgcgggcttatcaacccgaagaattccctctgggccccagggaacattcagcaaagaagctaccttggggattgttcttagattttaacaatttgctgggatgagagtatttgagagtggaaagagcactgggctgagggaacagcacgtgccaagcgatggggaacacaagagccgggttctgtggctgctcagggggcagagctccagccaggcctacaaggcacacaggatgggggtgggggccggagctgaggctgcggagcagtcggggaacctcttccatcattgacaagtgagcccaaaccatgccattccaggagtgttaccctagccgcttgttatgaagccctctgttacttgggatgatctgagtggccttccacgcacttcagaaaataaattccttttttatggtgagcgaaattctaatatatatttgtattttcactaaccttaccaaagagaaaaatgtcagcccttttcctgaagtttcttttgtccacttgtgactttcaattaaattttaaaacctccagagtaggaggaatcccccacagagacaataagttagctgattaattgaaaacgtggaagctatttttatgattaccacataccttgtattttatttttactgaaaacacataagtgaggtcaggtgtgttggctcatgcctgtaatcttagcattttgggaggtgaggtgagaggcttgcttgagcccaggtgtttgagaccagcctgggcaacatagggagacctcatctctacaaaaaataaaattagcttggtgtggtggtgcatgcctgtggtcccagctactcaggaggctgaagtgggagagtcacttgagcccaagagttcaagattgcagagagccatgatcataccactgcactccaacctgggtgacagagtgagactttgtctgaaaaaaaa

SEQ ID NO: 63568 - DNA, 1054 bp, Homo sapiens
tgagccaccgtgaccggcccattttatgcatatttgatttggagttggtgaatcaactcgaaaacctcaaaagggggctgtgagaacactgggctttttagggataggtttccacgttcaccgatttcatctgaatggactgttgatgcttggtgctgtggccatgcccttggctcctgcatttaggagcagtgaatgtggcgtccatctgcagacgtggctcagcatcatacgttacaagcacagcttttggtacaggagctctcgggtcgctgggagattgaggattatgagaacttccttctttcacacaggggtttatcccctattcagcattacatcagctttctctgactttggcatggtgttaggaatttatcagggaaatacgttctgtttatactgactacattacgggaagcttggataactgtatgggggactttaaaatttatctctctgtgatagtttttcagctattatgaaactaaaccaaacgaaggcagtgggggccattataaaggaagtttgagaatctgaaagtcttgatttcttaaaaggaattttaccataatctctctctcgataagaattaagaaaaatacttacatgtattatgtgcaaagtgtacccgttaaattcaccataattgaaagatgcaatactctgtcaatagtttgggaattgttttaggattaaaagtgagatccatttgtaagaaaatgttttcattttagtaatgttaatttgataacttcattatattacttctcaatatattactttgagagcaggtaaaaagagttttccagagcctactggaactatgctaatcagatttatggtacctcttattttcctggcctttcattttgtttttgtatttaagtcttctgtgttgacagctgtcatttgatgtgagacaggtgaagctccttcctgctttggcccacagttgggcagcattgtccccggcctgggctggcctcatcaagtgaaacatcatgctgccatgtttcgacattttaccttttcaggttctgcactttttctg

SEQ ID NO: 63569 - DNA, 1089 bp, Homo sapiens
tgggtttccagtcctgccctgggtgggcctggcttcgcctcatgaaaccccgagtactgtttgactccctgccatagctgagtgcctgccccaaccccactctgagttcagcgcacatcctggtgtgaacgccaccatctcagggacatcctgctgcaaagctcctctctgtctccttggtctcttgccacctacagtctttctcatgggagccccacccctcagaaggctccccgtctctcctgtccgtgagttttcctggaattgtcacaatgcagagaatgagttctgtggggagggtggggaatgtagccctgtggctgtcccagcaagtggcccctgtgggctggtggctggctccatttgagactgccttgaaccatggggtctcctggggaggggctggagctgtcaggcttctttctgctggatgacgttgctgtttctggcagcaccattggctgcatctcagactgtgtcccttccttcaattctgttgatgtctcagtttgtggaaattcggaaaccacatgcctttctctctaggggtgacagcattgttggcctccatcctcctgtcagtccttacgagtgtcttcatgccaggtggtgccgtcatggcatgtgttgggcagctaaccagtcccttcagtgtggggcctggcctcctccttgccacctcgttggtggaggtgacctgggatgctggacccactcttgtttggactcagtgtaggattctctacctctttctcccagttacacagccttgaccaagcttctttattcctctgatcttttttgtttgtttgtttttactttaagttcctggatacaagttcagaaggtgcaggtttgttacataggtatacatttgccatggaggtttgctgtacctatcaacccatcatctaggttttaagccccacatgcattagctatttgtcctaatgctctccctccccttgctgccaaccccctgacaggccctggtacgcgttgttctcctccctgtgcccatgtgttctcattgttcaactcccacttatgagtgagaacatggagtgtttggttttttgttcctgtatg

SEQ ID NO: 63570 - DNA, 1031 bp, Homo sapiens
attggattcattctgaatcgactactaaaaacaaaaggctttgcttcatttcttctttcctttttatatttgaaagcactgtttgggttgtgatttttgtgatgcctttattttattttctgggactgtgggtgattttggcaaagatgtatgacccttaactcaaaagggcgcggtttacaggctaactgagggtgggtttatgagcagcattattctgcaggaacacagaactgtacagacaaggcggaccacagagtggggcctgaagcagcaacctgtcagcctccccttgctgcaaacacctgctctgccccactggatcccaggtacactcgtggccatgtgtgtgggtgggcttgaacattgccactccccctccaagaacaaacaccccctctccaacactaagaaaaatatcagcatggaacataaacgttcccctcagataatcaaataattcaccccaaactgtccactgtgccgtcactggctaaagcgagctgacttttctgtatacacgccatatcattttcctggattatttcccaaaacttgacagaccttaggaaagctatttttgagactttgctgacagtttttctggacccacagtatgtatttcagacatttcagtaataactctgtgacctcattatatgcgtatttttgtatgatcctgtgggtattggtgtgaggacacaccttgtattcttatttaaaaatcccaagttaaaaacagccctggccttttcgagtcacgtccgtacatctgagtttggactaggagagtgacttagttcactacaacattttaccaaaagatattgaagcaatgttttttccaaaatatggcataacacagaattcttggatttgctgaaatcctacagatttttctgtgttcgtttgtttgccatattcatgcaggtgatttgcaggtgtgcaacctggagtccagctgtcttgctcttcatgctgggcactgtttgttctctgctcgcccagcacaatttatattacagaactca

SEQ ID NO: 63571 - DNA, 1704 bp, Homo sapiens
catggccagggcgtggggagcttctccaggcacgcttggctgaagagataatgctgtcagaggacagcagttactagtaagtaacctacatttcccttctactctggctgctccttgctgtctaaatagagaaagtggaattaggtttatcatctgtgacctaatactaattcctcttacatcctgcctttgtgcaaagggaaaagggccatttaaaaagtagtggacgaagctttagtattgtaagcactttcaagcgttataaaacaaatctgttgaatgaacaagcatgtgagagttggtattctagagtcacgtgtgatcgcccaaattgtatatttcattacaaaaagtatataaagtcatggtattatagagtgttaaaattatactttatcaatgaatcaagaaattaaaatttctgagaaaattcttgtcaaatcactttcatgtctactaaagcttttaacttcttctctagtaaaatagtggtcaaaattagcatgtggaaagtaggccaatgatactgaagtcgtaagccatgcttccaagcctggagatattgcagcaacctcttccaagcctgacagctccttgcgaagagtgctttcaactgggtagcttgaaaaagccagctaagcaaagatcagtggaatcatagaacattaagacatggcaacttgagaaaacgatttaatttgcacctttttttttcttttttttaattagattttgttttaagtcatacttttcaaatgttactttcagaagctgttattttggtctgtttctttcatcctgcatgtgctaatttccttgattaatttggagaacatctgcatataattccgtgatcttttcgttggcaaaacctcacagctttgcgcaagacttggagagttcacattccagacagtctgggattgtatctaattgaaatgccaaacctaccgaagtgccagagcgtaagtgtgtaattatgtaattttctcttgatctttcagagtcttcctgcgagcaattaatcagtatgcagatatgctgaacaaaaaatttctggatcaagccaactttgagctacaggtaagagaagaggtagacacgacctttgtggagaaatcatgttaaaacaaattgctggtccgagccagtatcttacagtatttctaatccttgaacttaattggtctcccatccaagatgcggaaacggaatttgtagtatgtactattggaacctgaggagtgaaaattatacttttggagtattcgcttaatttagcaaggaaagagatagagttgtttcagagagaagctattgaatcagagtgacaagaagggactcttcaagcagggaggccaccaagtcccggtgtgtgtatctgccaagattgtctcagcccatcttactgtggagggaggatcagcagaggaggagacccaggtctgcacctcgagctcagcttgcttttataactctgtgttccctccatatcctctctcggccttgtgctactagcagtggcttttaccaggccagagaccctgccccccagaccccatggtcctcagaaatgctcctttggtgaatgcagtgtgtgagagagagagagagtgtgtgtgtttgtgtgtgtgtgtgtgtgtgtgtgcgcgcgcgcatgcatgctgtaaggattgattttgcctggcctgatttgtgtgtgtg

SEQ ID NO: 63572 - DNA, 1027 bp, Homo sapiens
tagcatgcttacccctaaactcaggactctaggaatctccatttgtttgaaaggagaggtcctacttgggaagatttcaggactgataagctggcaggggaaatgtggagaggcattggggtcttcgcgccccttatcccatccacctggatgagcctgcccttggtcacaggagatgagccctctcctggccttaagctgactctccctgcctcaccaagaaccctgccctcccgtggaccgcactccaagtctcaccctcatactggattttgcttcataataaaaagcatacttttaaattccctcctggcatctttttaaagaattccatttgttacgcctttggaaaatacagaactaacagctgagaattgcagcaaatgaccatatgggccatagaccattaataaaaatggaatggaaaaagctgcccagcaaaaataatattttcaatcatggagctattttctgtcatctttgtgaggctcagtaaaatgctgcacaacttccagaaattcccatttagttgtaacagtattagaacatgaataatctttgtgtcatcagtgttgccgagctcctgtttgaataatctcttcacactgcccatgccagtaaccggaagccagtaattgaatagccgggtgaatgtcagcggctctgccacttggtggaaaggccaatgtattttccactgtaatatgaatgtgaatgagtttggtagcaattctatcttgtgtattctttaattcattaggattttatttgttggtttgtttatttttgctttcaatgtcaaaataattcttgcctaaagaggaaatatggcacaagaggcttctgtttcattgaatccagacccaaagatggtctgagaggccatggaaaccaagatccttgactccaggagctgcgattatattgaatttcattcttaaaagccctccagcaaagagattcttccataatcccctttaaccagattaaacaggactaattttgaggccatgttcccagagtcctc

SEQ ID NO: 63573 - DNA, 1085 bp, Homo sapiens
ggaagataataagcatgattttgataaaaccagctctgctctatcagcaaatgtactatctccaatttagtgggacaggatcatttaattctgattatagtaacagttcatagcacactagcgaatcaattcgagtgtattctataaaaatgaacgaggatcctggaattagaggctagttgtggatctctggtactgaatccttgctaataaacagatcagggtggccaggtgtttgtgtaaattacttagtttggactagggttagtaaaattagaatcagctgtgttgtgatttacttaccactcatccacctttgttggaaatcattaagttcatcagtcagaatttgatcagcagcatacctaggtagctgtagcttcctcattgcctgtgtttgtgacagctagatttacatggaagcagagaaaacatgccgttttcataacctacactctgtgttcagatccctttggcttgaccattgatgggcattttaaatgcctgtatgtttgcccatgtcaggagaaggcacatttctctgcattctctgtacctttcttgttgtctgtactcattaaacatacatgaaattgaatcatgttttgattaaatttaatttaattttgtgtctctattatttgtcctgaagcatcagccctcatcaaacatttaatctttgaagtctgtctggatcatggcaccatctgggagatggcactgccttgaaatgccaacttttgggctactaccaagcgatctcccttgtatgtgattccaaaaagaactaccttttgcagaattcttttctgtaaagggcaggatagcagtggttagtatcaaaaggttgttattttacagtaaaaatcgttaatgtgagatttcaggagaaaaaaaatctaaagcaattcattcctccttcttcaatagaaccatctgtctgtgctgctaaaatccttgaacttcttaggccagacagaatcaaaaagaagtgtttatttgggggaggagaccatggagaagatcaagaagaaaattggagagattcactaaggtccgggttctggggatgttgctgagtcctt

SEQ ID NO: 63574 - DNA, 1050 bp, Homo sapiens
tttattttgtagaaaattgtgaaacgtataaggtagagtttggtggagctcccagatacattctcagctcttgcatagcttgtccacaccagtgcagagttcttggtggtcaccattagccaactcaaaagcaaaactacaaataattgtttcacagcgttttgtacctgttgaccaactcatgtggcccttttgcaaaaagataagcacataaattttaatgtttcacagtaagttatatgatccagtgagaaatccagttataactttaccagacataggggagttataatttttcagtctgctcttagttaactgacgccatagtcccgtgttttttatgtctttcttccatgaagaagagaaacattttgcattgcctgctggattttgcttccctactcgccttgctccctggagtgagggactgtgattgagcccttctctcttggttacttctaaagtctcgtgtcaaataattagcaagattaccactctggagactaggagaaggatgtaacctacacagcatgagtttttagtgatgtgtttattacactgagggtgattgtctaattttctatttctaagattgtttttacttctcctttttaagaacatactatgtgaatttaataactcagttacctttatttctttatggcaaagaaattctttcgatcacattgactgtaatcattggagctctttattctgatggatttgtatttttacggatttttttgtgcatttggactcagtagaaatgcagaaaatcacaatcaagtattgtgtgtctcattaaaaatgtttaagggaaaatgaaaaggaatgaaaaatttgaaggaaaattctacctttgtgtatcatctttatttttttcctgagtttttcttagtgctttctgtaccaaaagtttttaaggcattttgaattatgaacattgtaaaaaggaagtgtagccatgatttactgttgaacatagaatttagctcttgcaatcctcaacacaaattatttagtgacattttaagaacatacctctgtttt

SEQ ID NO: 63575 - DNA, 1711 bp, Homo sapiens
ccgtctggggcagttgaaaccagttgggagattcccctggttccagacgttgttcatttggggtcctgtgtttccgactccacgggagtcactaatagtgtgacatctcttcatcacggcacccagaggatacagacctccccttaggaagggcatgtcactgttgacaggggagcaccacagttctggcctgctctaggaggtgaggctggctgcccactcagtgtcctgcctggtgacggaggcgtctggccctgtcctggtcactcctggtcactgctggtcagcttctcctcttgccttcatcgtgcagcaaagacagcggttgatcagaagcacagattctgaacaaagtcttcccttccaaagaatgaataaaggaggcttagttacaagctctaaattagagacaaatttgaaattagcttcattctcaataaaaaacaaagctgaagggtggaatgagcttggagttaaagccacttactgttgctaaaggctttaattcgagtgtgtgtgtgctccggaacatacatctttaggaaagggaggcaggtggaccctaagccatgcagccttgtgcagtgcttggtgttagatggtgcgtgtggcccctgtggatggagatctacctctggtatgtaggcaccaactctggatccgtgcaggatggttatcccagaatccagagcaagggagcagcctgcgtggaatattatgtgagggcagtgccgggtgcggaggacacgttgcagctcccgagccaatagatgccaggttgtgccaggagctcacacacagcaggctccaggggcggtgctgggtcatctccaccaccaaaaggacaaaatgaaaagtctgaatggaggttaacaggctcgattaatattgaactgactttcccgccacacctggatcattctgtgggtctgcagcaatatatttatcacacttcacagatgagctggcaggggtcaatctgccaatgacactggcagttaccaaaacgtgggcagaatgtttgcgtgcttcatgccctgctggagaggagcctccaagaactgactagctgtcccttttgctttgtttttctctaaaaattggtctcactgttttttgtgctcatgttgatatttatagaccttacaaggaataaatatctttgactatatgtacatttcccccttgttttcatgttcaaaaggatcacttcagaatgcaaagtaactgacattttcagaaaatgttattcgtgtttttacctataactcactagcttttttctattaaagtctttatatacatttttattattatgttttctcatgtaaagcataagaaaaatgcttgctagtttgatagtagtctgttatccattaaatcttactgaattttggaagtgcgtggctttatatagaagccttagaagttgctcagactgtatttaagatgacatattatctggtttctgcttgacttttttttttcgggggggcggtggggagaaatagagcatttttcttccataatggtacttctaagacatatctaagcacaaagtgaaaaagaattcaattcttaaactggttctttttttagcgatttaggagaactcagaataagctggggcaagggaaggggactgtcttagtccactggggctgctgtaacaaaataccttagactgggtactttataaacaacaggaatg

SEQ ID NO: 63576 - DNA, 1056 bp, Homo sapiens
atggccctgaaatcccctaatggccctgttgaggtccgggcacttggacaaagtgttcggaagctgcaggatttggtccttcacatgccccacaaagccttagataagtgcaacgtcttttgctctactgggaagccagcctcggcccctccagcggggagcctggctccaagtgcagggggctggggaagctgcccaccaggccgagagcagtgcgaggtggctcatccctgcagacctggcaaggggtgactgatgtgctggggagtgagggcactgacgaggaggaagatgagacagggcctgcgtgaggaggagctggccgtaaagcccaggatggaacccagaggtccgtctcagggcatgttgacatgagagaaagcactggaatctggtctagaggtggatgtgagagggccagacctgtttccattgccaggacaaaaacctgagggagccgtccccatggggcaaagaggactggtgtgggacacggaggccttgcctgtgtccttatggcttcagccagctccttccctttcctcctatggaacgtaagaagtttgggataaatgctttccaagatccaagtcagttttctgaaaattttttttttttgagagagagtcttgctctgttgcctaggctgaagtgcagtggtgtaatgtcagctccctgcaacctccgcctcccgagttcaagcgattctcatgcctcagcctcctgagtagctgagactataggcacatgccaccacatctggctaatttttgtatttttagtagagacgggattttgccacgttgcccggcctggtctcgaagtcctgagctcaggcaatctgcccgccctggcctcccaaagtgctgggattacagacgtgagccccccacgcttgtcccagttttctggaatgactggcattccattatcccatctgcttaagtctagattcctgttgacactcagactgctcagtgaccctgcagtgcagggaggttggaatggcagaagattgttgcaagctagacagtacgaacgaggcagtaggataaa

SEQ ID NO: 63577 - DNA, 1026 bp, Homo sapiens
gcaaaagttctattgattttttttttcctataagcttttacagcaaattggattttaagagtttcaagtcctacagaggaaaataatttgttccccagagagcagctttatgtcagcactatgtcatcattcctaataactatattaaaggatgaattttaaagcaggtcacaggaaaggtaaaagaatcagttttctagtaacttcattaaatcaaagagtgatgaaaaatgcatattccaaacattacctgtgattttgctttcatttgcaaatgtttggaaaacccgtatcttggtattggcaactgagtcatatgttcattaaaaataagaagtttgaatttatcagaatgctttgttctctttttgtttattagttcatctggtttggttttttcctgaaactatcagggcagagtgaggtttttctcctgggagtcccaggactcatgtgcagagttttcatcaccgatatataataagctcagctctgatgcataaaatggtttgtgaaggttggttaataagtcccaggcagctcctcctcagccctgcttgctgcctcagaaacagaggatgggctgacctgctcctcgctgggtgggaggtggcagtcagggtgcacactgtgtggtgcctcttgtaggtttgcggctggcaccaggtcatgagtcactttctcaaaggcacaattccatctttctccatacacagctgtcattgtggagcatccctgccgagtatccaaagacaaatccatacagtctcatattaaactgctgtgatgtatacatatttctcttttgaaatgtacgaagatgaaaggctgaactcagccatcatccccagctgatgacaagcatgactgttgtgtccaggggtggtgctcctggagcattaagcaaggcttccagatgttctgtgctgctttcagggcatgaatctgtgcaggggacagacaggagcaaacttcaaatacggcccatcaggagggcgtctttgtagagcaggctgcaggctcgct

SEQ ID NO: 63578 - DNA, 1039 bp, Homo sapiens
aatggtttgttgcaccacagaaatggaagccggaccttccccggccatttctaactacttgtgagagtaaaaggagattcgggggggtctaacaagaatattgggttgcttggagtattgtttccctaacagcttcgttaattggtcacattctcttctctctattttattgcaaaggcaggaatgttccccctagtctccctacactagtaaactgaaaattctaaacttagaattacagccaattcctcttcttgttacaaatcaactccggggtaacattttattgtctcaatttcttggatacaccattgtgggttactgatgccacatacagttgattaagtaagggataacatggattagctctctctcaattgataaagggcgtgtgaattcaattagattaatgacccaggtgtctttggtctttgtttcttgtttaatttacttgcagcctgagtgcatgctcaggtgacacgctggtggttagtatgtcatcattaggcagaagcggttgcatttcctggggtgcctccctttgcacaggccctgagagctgttctaggataatgatcatccatctgccatgatgggggtgtgatcaatatcctcctgtcactctcattgatcagcctcaggcttgtaggcaactctgtctttagttgttgccactaagctgtcatttctttccaaatggctcttcctgtcagtaatctgagcttactgagtttatcaccattaatcattttgcttaatggtgataaacttttgacatgctcatacttggcatagaggtcatttgcagcgctgtgttggtatcaggctgtgttagtgtggtccttacctgctcctcattggcctatcagtgagtgtggctttcacatgtaaacaaacagtttcatcagacctcaaaatagatgtctcttttaacggttctaaccaaccttaaaaagacttaattgttgttttaccttccttaatataaggtcatacactcataggacatctttatatcagctttacttttccacattta

SEQ ID NO: 63579 - DNA, 1027 bp, Homo sapiens
tccccatcaccaaagccagagggctgtggggctgcagatcatgtgggcctcttttcagctgctaatttaagaaagggctttggttaatgggtgtgtgatttagctgtagaggtctggacatggagagctttctccagggcctatctggctggatctggggtggcaagaaacaaggaaggcagggggttctcttctcaatggacggggctctcacctctgctcctgccagacgtgtggaagccataaggatgtgccctctgcccatctaacccggcctagaaggaggctgctgtggagcccaggaagctgggaggctcttcctcctactcaggtgctgtccccagcgtattcatgcttgtaaatatccagtccacccctgagaaactgtaggcctgtgtgaatgtgggatttttttcttcaagaatctttactgtttcaactgttgcaccaagataaatattcatcttctgtcgagtgtgtgagaaactgaatattatccacaaccctagaaatcatcgaatgggcacacccatgtaggcgaccacggagagcccagcctggggacaggttgtttttgggcagtctgtgcctcacattgtataagcggccaccagaaacggaaagaataggccgggcgcagtggctcacacctgtaatcccagcactttgggaggctgaggcgggcggatcagctgaggtcaggagttcaagaccagcctggccaacacggtgaaaccccatctctactaaaaatacaaaaattggccgggcatggtggcaagcgcctgccatccggtaggctgaggcaggagaattgtttgaacctgggaggcagaggttgcagtagctgagattgcaccattgcactccagcctgggcgacaagagcgagaaatctgtctccgtctctatctccatctataaaaataaaataaaagtatttatttttataaatataattgtatttataaaaaataaaaattataaaatttataaaatgatataaaatataattgtatttataaaaa

SEQ ID NO: 63580 - DNA, 1054 bp, Homo sapiens
ttgtctatactaaatgtttacagagtccctgccaagcccagcccggttcagacttggtaccgaggtgggcaggacaaacgtctccaaagttcctccaggagacgacaggcaatattcaaggaaccaagtaaggccattccacatgaccattagaactagaaggggtgagacagggtagtcatccgaagggcagggctcacctccccttccaggggtcctccctgaggctgggagacttcagcagagacctgtgagctcagtgagaatccagggtacagggtggagaaagagcaggcacacaggccttgcctgggcttggactgacctgggaatatctgcaaaacagaagcaggaggtgaaggagggtcgggggaagagccagtggatggcactgagggcagggagcttggccagggcatgccatggccttgtcctctagaagagcttgagtttcatgacaaaggcaggaggaggaagagatgaccagccttcctcaggtgagggccaggtgggagggagtgctccccctgcagtgggctgcagaaagtagaaggtgcggccataggatctcctcacccccccactgtgtgtccggaattggttccttctggtggcttcttggtcttgctcacttcaggagtgaagccgcagaccttctcagtgagtgttacagctcttaaatgtggtgcatccagagttatttgtttctccccgtgggtttgcggtctcgctgacttcaggagtgaagccacaaaccctcacagtgagtgttacagctcataaaggtagtgcagacccaaagagtgagcagcagcaagatttattgcaaagagctaaacaacaggcttccacagggtggaagctgacccccagctgccactgctggttcgggtggccagcttttattcccttatttggccccacccacatcctgctaattggtctattttacagagtgctgattggtccattttacagagcgctgattgttgcgtttttacagaatgccaattggtgcgtttacaatcctttagctagacatagagcgctgatt

SEQ ID NO: 63581 - DNA, 1052 bp, Homo sapiens
tttttggagatggagtctcactttgtcacccaggctggagtgcagtggtgcaatattagctcactgatgcaacctctgtctcctgggttcaagtgattgtcctgcctcagcctcccaccaacatacccagttattttgtatagtaatcatttaatttatagcttttgctttgctctttcatgttgactaaattatttttttaccataaggttataaaaatattcttctaaattttctttggaattttaatgtcttcttttttttagatttatccctttaacacaattggaattttaaaaagttattttttgaagttaatcggcatacgataaaatgaatgcacccatactaagtgtagatttgatgtattttatatttccacttaatatattaaaatctatataccatgcatgtacacactgtcaaatgtaaacatcactgtataccactatttagacattcaactattgaagcataattgagttgcttctgttttggattagaaataatgttttgttatattgttaataaagctgataggaacatttatatacaagtctttttgtgaacacagttttaaagattatatattcaggccgggcgcggtggctccgcctgtaatcccagcactttgggaggccaaggcgggcagatcacgaggtcaggagatcgagaccatcccggctaaaacggtgaaaccccgtctctactaaaaatacaaaaaaaaaaaattagccgggcgtagtggcgggcgcctgtagtcccagctactcgggaggctgaggcaggagaatggcgtgaacccgggaggcggagcttgcagtgagccgagatcccgccactgcactccagcctgggcgacagagcgagactccgtctcacaaaaaaaaaaaaaaaaaaaaaaaagattatatattcaaattggttgttactgatataaaggaaagttgctttgaaaatgattttaacgttatatgcaggaattttaagaaatgctcttgttaaggagttttaatcatgtttcttagaaatgctcttagatttttctgggt

SEQ ID NO: 63582 - DNA, 1009 bp, Homo sapiens
tatttggcctattgtggccaaatatatgcaaacttacgttaagtgcttatgttttggggtataggagctataaaaaaagattgttcccttccatatgtgtacagttcttctggggaaatgaagacatacacaggtggaacggtaagaacagtggcgaagaagggctgcacggagtttctctccagccttttgcgcatggcacgcaggctcatcattgcagctgcagttttttactctgctttccctgcagcaacagagacaggagggtggagaagggcgcctgtgctcttttgcagctgtgtgtgctcatgccaccctcccactcaacactccctgctcagattcctcacgcagcagtgacaaagtaccactcactcagtggctcaccgtcagagaagcctgggcctggcctggcccagctggttctctgctcatcgtctcacttgacgaagttgacgggctgcagggtcatgtgcctttccagaggctcaggatgaattcactcccaaactcattcaggtattggcagaatgcagttccttgaggttgtaggactgaggtctcagcttccacacaggctgtgggctgggggaggtcctcagagctagaggctgtcccgatgctttagcgggtggctccttcctccatctttaaagcccgccatgtgctcccagtctctctgaccccctttctccctcatctctctggctctcctgctcctcgtctgcctttaagggctcatgtggtaacacagggtgcacccggatgatccaggataatctccctacttacagtcagccgtttagcaaacataatcccatctgcaaagtcccttcacaacggtacctggattactgtttgatggaaaaaaacaggactggaaatcttgggggacatttttggattctgcctaccaccccctccatacacacataaacagcaaaatgacaaaattcaaggctctcctgagtgactgtttgcagcaaagaaagttgtttccatttcagag

SEQ ID NO: 63583 - DNA, 1028 bp, Homo sapiens
atggctcagctgcaggacagtgactgtagggccagtgctctgtgcacccgcagctgctccgctggacacagacctccccggggaagcagagaccaccctgcatctgaacggggaggggtcgatggagtgtgccctggtgacatgggctctgcagggcggggtcaggcctcccgctcagttctgcatcagtacttgcaccacagaggcctcaatgaagccgagggagctcaggggagcaggagtctaagccggaggccctcagcggggcggctgtgccctccccaacgcccaggacatcagcagtgtctggagacaggttggattgttatggccaaggagggagcagtgtcattggcagttagtgggcagaggccggggatgcagcggaacagcctacagtaccaggcagtccccagcccccgcaatgtccacggtgctgaggtggagaaatcctgggcttaggtcacgcccaggtgcacaggaaggatcttgcatcccaggaaccaggggctgggagagaggagagctgggctgggggctctggaggtcccaagttggggtgcccttggattcctatgtagaggtggaaacctgggtctataggccttgactaggggtctctggctgagaaacactggctgaggctgcaggaaagatgtgcctctgaggagcaggcctgtggaggccagacactgaggcagctcggtccccctggggcctatggaaatgcaggtaacccatgatatcctagggtcctgctcccacccaagagagggctggggtgagtgatcacagctgagggcctgcaactgtatggacccattctccacaccacacacagaccagcagaaacatctggcatgttcccccagcacccctgcatctcactaactcccattcctccctctcctgtcagccaaggccactccctacaggatgccttccctgactgctgctctgggtcaggttgcatcttctcaaagaactgtatgtaatttacatcctttgttaatatgagcatgtgatta

SEQ ID NO: 63584 - DNA, 1045 bp, Homo sapiens
aaagagtgggcgccaccagtgtgagacaagccatggaactgcagtttcaggagcacattagcaccacccaaggatagaaacaccccaagctcctgcttggaagaaccttgccgggtgtcgaggtccctgccagcagaagtgtgcagcaggatcagaactacagaggcacagaaggcaggcaagtgggtggccagtgggcttgaccagatttgcgtatctgcccctgggcgtgctgtgtttcacgccttcacctgcggactaagcatgtcccacctgcccagggtgtccctctgcctttgggcctgacttgggagccaggctgaggctgcaggaccagcgtggctacaatcccagttgggactcctcatatggccaggaatcccagcccatgggagagggcgggtgtaggccaatgcagcccagtaaggcagtctctcaaaacccacccaggaacttgaagtccaggagtgtgttcctccgagccctgcctggcaattttttgatgacttcaaaagcacatggaaatgtgtgtttgagtggtttcccaactccaccctctgaagtgcattctgcatttatgttaagatgacacacatgcatcttatgtatgatacgatgacatgtatgtacttaagtgaagtcgtgtgtgcatgtgtgtaaggagaggtagagaggagactctagggaataccatggccaggggcagcgaccaggctctgctgcccacagctgcgggtactgggggggtgcagcctgtgtccaccccacctggagggcttcgggctgggggctcacctgcagtgcacggtgatggggtggttgcctgtctgctgctgctgcttctgcacggctgcgatgaggtcaatcatgcctttgccctcggcgggaatcccgatctcaggccagccgtggaagtgaaactggcgcactactcggacctgctcctcctggcgggcctggggctgcagggaggagagggggtctcagcgtcgcctgcctgccggggaacaggccccagccccatctgccctctcagggattggcc

SEQ ID NO: 63585 - DNA, 1028 bp, Homo sapiens
taaaaagcatatttaagatttaacaactgtatagcaggtggcctttaaggcataacaaaatatatacaaagaaattagggaagatattaatgtcaactatgaaataaattaacatgatttttacaaaatatactgaccattaaattaaaaaatattttaaggcaggaatcttcatttgaaattagcataatcagaaaatatatcaataaaatcttgtaccactttgtagcagaattcatactgttcctgaaaagacaaacaaggacacattaaaatgatattcccaaaaatatatttgattaatcaggagaaatactcaaaaacaagacataaataagtgtgactattcattaaaataccatatacctttatgcacatcgtaatttagtttttaggcacatgcagaattccaaataaagctgtttttctacgtagaatgtgtcagttagtgtattaacatttcaacttagtgtatttaatgggctgagttaaatgtctgtggctttcacattgaaactggaaaacaactatttttgaatttaaaaaaaaaaacaaaaaaccaggccaggtgcaatggctcaacgtctgtaataagagcactttgagaggctgaggcaggaggatcacttgagcccaggagttccagaccagcctgggcaacatggtgaaaccccatctctatcaaaaaagatacaaaaattagctgggcatagtggtgcacacccatagtcccagctacttgggaagcggagacaggaggattccttgagcccaggaggcagattgcagtgagccaagattgtgccactgcaccactgcactccagcctaggtgacagagtgagaccctgtctcaaaaaaaaaaaaaaaaaaaaaaaaaaaagaaagagaaaaaaatcagagtactaacattgccagataaatttcataaagcgatctataaaagttaaataaaatgcatatctagattattttaaagcctacatttactgtacaaaagggacattgttttatatataggctggtcct

SEQ ID NO: 63586 - DNA, 9181 bp, Homo sapiens
ctgtcacagagggaacagcttgctaccctgaagatgtttgcggtaggtaaatatttcctgtgtaatatggaccctaaccacataaggataatccatgttattttattggcgatttaaggcaagaaacagctgtttgtttctaatgtttgaaggaaaaaatgcctatatttacgtcaatgacacagggcatggcaacctttggaggaaccttctgaagcagtatttttaccttctatgatcatttcagcatctaactttgcttaatgatgaccccactatagcaccaaataacattattcttaattgtgcatggctcttataagacagatttatagacacataagtagcctcatgtcgttcagtgaatacgaagctaaatatttagttttttaccatattttatgaggctgtaatactcgattgacatgagacactaatagaatgtttttattgtgtatgtttttatttcaggaggaaatgtgttcttcagtgcacagaatgcagcaaaacagccatctgataaatgctctgcaagccctcccttaagacggcagtgtattagagaaaatggaaacgtagcaaaaacgcccaggaacacctacaaaatgacttctctggagacaaaaacttcagatactgagacagagccttcaaaaacagtatccactgcaaacaggtcaggaaggtctacagagttcaggaatatacagaagctacctgtggaaagtaagagtgaagaaacaaatacagaaattgttgagtgcatcctaaaaagaggtcagaaggcaacactactacaacaaaggagagaaggagagatgaaggaaatagaaagaccttttgagacatataaggaaaatattgaattaaaagaaaacgatgaaaagatgaaagcaatgaagagatcaagaacttgggggcagaaatgtgcaccaatgtctgacctgacagacctcaagagcttgcctgatacagaactcatgaaagacacggcacgtggccagaatctcctccaaacccaagatcatgccaaggcaccaaagagtgagaaaggcaaaatcactaaaatgccctgccagtcattacaaccagaaccaataaacaccccaacacacacaaaacaacagttgaaggcatccctggggaaagtaggtgtgaaagaagagctcctagcagtcggcaagttcacacggacgtcaggggagaccacgcacacgcacagagagccagcaggagatggcaagagcatcagaacgtttaaggagtctccaaagcagatcctggacccagcagcccgtgtaactggaatgaagaagtggccaagaacgcctaaggaagaggcccagtcactagaagacctggctggcttcaaagagctcttccagacaccaggtccctctgaggaatcaatgactgatgagaaaactaccaaaatagcctgcaaatctccaccaccagaatcagtggacactccaacaagcacaaagcaatggcctaagagaagtctcaggaaagcagatgtagaggaagaattcttagcactcaggaaactaacaccatcagcagggaaagccatgcttacgcccaaaccagcaggaggtgatgagaaagacattaaagcatttatgggaactccagtgcagaaactggacctggcaggaactttacctggcagcaaaagacagctacagactcctaaggaaaaggcccaggctctagaagacctggctggctttaaagagctcttccagactcctggtcacaccgaggaattagtggctgctggtaaaaccactaaaataccctgcgactctccacagtcagacccagtggacaccccaacaagcacaaagcaacgacccaagagaagtatcaggaaagcagatgtagagggagaactcttagcgtgcaggaatctaatgccatcagcaggcaaagccatgcacacgcctaaaccatcagtaggtgaagagaaagacatcatcatatttgtgggaactccagtgcagaaactggacctgacagagaacttaaccggcagcaagagacggccacaaactcctaaggaagaggcccaggctctggaagacctgactggctttaaagagctcttccagacccctggtcatactgaagaagcagtggctgctggcaaaactactaaaatgccctgcgaatcttctccaccagaatcagcagacaccccaacaagcacaagaaggcagcccaagacacctttggagaaaagggacgtacagaaggagctctcagccctgaagaagctcacacagacatcaggggaaaccacacacacagataaagtaccaggaggtgaggataaaagcatcaacgcgtttagggaaactgcaaaacagaaactggacccagcagcaagtgtaactggtagcaagaggcacccaaaaactaaggaaaaggcccaacccctagaagacctggctggcttgaaagagctcttccagacaccagtatgcactgacaagcccacgactcacgagaaaactaccaaaatagcctgcagatcacaaccagacccagtggacacaccaacaagctccaagccacagtccaagagaagtctcaggaaagtggacgtagaagaagaattcttcgcactcaggaaacgaacaccatcagcaggcaaagccatgcacacacccaaaccagcagtaagtggtgagaaaaacatctacgcatttatgggaactccagtgcagaaactggacctgacagagaacttaactggcagcaagagacggctacaaactcctaaggaaaaggcccaggctctagaagacctggctggctttaaagagctcttccagacacgaggtcacactgaggaatcaatgactaacgataaaactgccaaagtagcctgcaaatcttcacaaccagacccagacaaaaacccagcaagctccaagcgacggctcaagacatccctggggaaagtgggcgtgaaagaagagctcctagcagttggcaagctcacacagacatcaggagagactacacacacacacacagagccaacaggagatggtaagagcatgaaagcatttatggagtctccaaagcagatcttagactcagcagcaagtctaactggcagcaagaggcagctgagaactcctaagggaaagtctgaagtccctgaagacctggccggcttcatcgagctcttccagacaccaagtcacactaaggaatcaatgactaacgaaaaaactaccaaagtatcctacagagcttcacagccagacctagtggacaccccaacaagctccaagccacagcccaagagaagtctcaggaaagcagacactgaagaagaatttttagcatttaggaaacaaacgccatcagcaggcaaagccatgcacacacccaaaccagcagtaggtgaagagaaagacatcaacacgtttttgggaactccagtgcagaaactggaccagccaggaaatttacctggcagcaatagacggctacaaactcgtaaggaaaaggcccaggctctagaagaactgactggcttcagagagcttttccagacaccatgcactgataaccccacgactgatgagaaaactaccaaaaaaatactctgcaaatctccgcaatcagacccagcggacaccccaacaaacacaaagcaacggcccaagagaagcctcaagaaagcagacgtagaggaagaatttttagcattcaggaaactaacaccatcagcaggcaaagccatgcacacgcctaaagcagcagtaggtgaagagaaagacatcaacacatttgtggggactccagtggagaaactggacctgctaggaaatttacctggcagcaagagacggccacaaactcctaaagaaaaggccaaggctctagaagatctggctggcttcaaagagctcttccagacaccaggtcacactgaggaatcaatgaccgatgacaaaatcacagaagtatcctgcaaatctccacaaccagacccagtcaaaaccccaacaagctccaagcaacgactcaagatatccttggggaaagtaggtgtgaaagaagaggtcctaccagtcggcaagctcacacagacgtcagggaagaccacacagacacacagagagacagcaggagatggaaagagcatcaaagcgtttaaggaatctgcaaagcagatgctggacccagcaaactatggaactgggatggagaggtggccaagaacacctaaggaagaggcccaatcactagaagacctggccggcttcaaagagctcttccagacaccagaccacactgaggaatcaacaactgatgacaaaactaccaaaatagcctgcaaatctccaccaccagaatcaatggacactccaacaagcacaaggaggcggcccaaaacacctttggggaaaagggatatagtggaagagctctcagccctgaagcagctcacacagaccacacacacagacaaagtaccaggagatgaggataaaggcatcaacgtgttcagggaaactgcaaaacagaaactggacccagcagcaagtgtaactggtagcaagaggcagccaagaactcctaagggaaaagcccaacccctagaagacttggctggcttgaaagagctcttccagacaccaatatgcactgacaagcccacgactcatgagaaaactaccaaaatagcctgcagatctccacaaccagacccagtgggtaccccaacaatcttcaagccacagtccaagagaagtctcaggaaagcagacgtagaggaagaatccttagcactcaggaaacgaacaccatcagtagggaaagctatggacacacccaaaccagcaggaggtgatgagaaagacatgaaagcatttatgggaactccagtgcagaaattggacctgccaggaaatttacctggcagcaaaagatggccacaaactcctaaggaaaaggcccaggctctagaagacctggctggcttcaaagagctcttccagacaccaggcactgacaagcccacgactgatgagaaaactaccaaaatagcctgcaaatctccacaaccagacccagtggacaccccagcaagcacaaagcaacggcccaagagaaacctcaggaaagcagacgtagaggaagaatttttagcactcaggaaacgaacaccatcagcaggcaaagccatggacacaccaaaaccagcagtaagtgatgagaaaaatatcaacacatttgtggaaactccagtgcagaaactggacctgctaggaaatttacctggcagcaagagacagccacagactcctaaggaaaaggctgaggctctagaggacctggttggcttcaaagaactcttccagacaccaggtcacactgaggaatcaatgactgatgacaaaatcacagaagtatcctgtaaatctccacagccagagtcattcaaaacctcaagaagctccaagcaaaggctcaagatacccctggtgaaagtggacatgaaagaagagcccctagcagtcagcaagctcacacggacatcaggggagactacgcaaacacacacagagccaacaggagatagtaagagcatcaaagcgtttaaggagtctccaaagcagatcctggacccagcagcaagtgtaactggtagcaggaggcagctgagaactcgtaaggaaaaggcccgtgctctagaagacctggttgacttcaaagagctcttctcagcaccaggtcacactgaagagtcaatgactattgacaaaaacacaaaaattccctgcaaatctcccccaccagaactaacagacactgccacgagcacaaagagatgccccaagacacgtcccaggaaagaagtaaaagaggagctctcagcagttgagaggctcacgcaaacatcagggcaaagcacacacacacacaaagaaccagcaagcggtgatgagggcatcaaagtattgaagcaacgtgcaaagaagaaaccaaacccagtagaagaggaacccagcaggagaaggccaagagcacctaaggaaaaggcccaacccctggaagacctggccggcttcacagagctctctgaaacatcaggtcacactcaggaatcactgactgctggcaaagccactaaaataccctgcgaatctcccccactagaagtggtagacaccacagcaagcacaaagaggcatctcaggacacgtgtgcagaaggtacaagtaaaagaagagccttcagcagtcaagttcacacaaacatcaggggaaaccacggatgcagacaaagaaccagcaggtgaagataaaggcatcaaagcattgaaggaatctgcaaaacagacaccggctccagcagcaagtgtaactggcagcaggagacggccaagagcacccagggaaagtgcccaagccatagaagacctagctggcttcaaagacccagcagcaggtcacactgaagaatcaatgactgatgacaaaaccactaaaataccctgcaaatcatcaccagaactagaagacaccgcaacaagctcaaagagacggcccaggacacgtgcccagaaagtagaagtgaaggaggagctgttagcagttggcaagctcacacaaacctcaggggagaccacgcacaccgacaaagagccggtaggtgagggcaaaggcacgaaagcatttaagcaacctgcaaagcggaagctggacgcagaagatgtaattggcagcaggagacagccaagagcacctaaggaaaaggcccaacccctggaagatctggccagcttccaagagctctctcaaacaccaggccacactgaggaactggcaaatggtgctgctgatagctttacaagcgctccaaagcaaacacctgacagtggaaaacctctaaaaatatccagaagagttcttcgggcccctaaagtagaacccgtgggagacgtggtaagcaccagagaccctgtaaaatcacaaagcaaaagcaacacttccctgcccccactgcccttcaagaggggaggtggcaaagatggaagcgtcacgggaaccaagaggctgcgctgcatgccagcaccagaggaaattgtggaggagctgccagccagcaagaagcagagggttgctcccagggcaagaggcaaatcatccgaacccgtggtcatcatgaagagaagtttgaggacttctgcaaaaagaattgaacctgcggaagagctgaacagcaacgacatgaaaaccaacaaagaggaacacaaattacaagactcggtccctgaaaataaggtgagaggaagtattacagcatcactcaatatcgtcttggatagttgtgaatttctgtgttatactttgcatgtaacctgacgttataagtggttatcctttccccagagggtttcctttaacactgaataactgcaggccatggtaaagaatcttcttgggacctatagagggaatagactaatatgggaaaagaactagtcaaacatgattaatgcaaacttagaagagtttctcaaaagccaaatgagtaatgttcatcttcaaatgtttaaaaaattgatcagaggataggtgggtggttcagttctatgttctggatactgtcaccaagaccaggactgggttaaaaatcctatctatgtcactattttaactatcagaacaatatcaataaggaatgtgtattcttgagaaggggaaactgtctggactgttagatagagaggctcccactgcatgcagagaagtttggggaaactccagaaatggcaatttcctgttctgccttagcagtgatggttaaaggaataggaattcatttactccctgtaaatgaatgaataacggaccttctttctataatgtaaactgtaaaaattagatttgatatatatcttattaggcattgttattgaaatttatcctgaattccttatttataatttgtcagcagagacagtcatttctccataggagcaaagtaccaaggcattaccttgactatcctagatgacaagtctcttagacaattcatcagtgtgtgattttcaaatgatttctccttttaggttactgttgattgtgctccctgttgaattttgaagtttgttttactaattattggaattttgtggatgtcttctcatttctttagggaatatccctgcgctccagacgccaaaataagactgaggcagaacagcaaataactgaggtctttgtattagcagaaagaatagaaataaacagaaatgaaaagaagcccatgaagacctccccagagatggacattcagaatccagatgatggagcccggaaacccatacctagagacaaagtcactgagaacaaaaggtgcttgaggtctgctagacagaatgagagctcccagcctaaggtggcagaggagagcggagggcagaagagtgcgaaggttctcatgcagaatcagaaagggaaaggagaagcaggaaattcagactccatgtgcctgagatcaagaaagacaaaaagccagcctgcagcaagcactttggagagcaaatctgtgcagagagtaacgcggagtgtcaagaggtgtgcagaaaatccaaagaaggtaagccatttactgtttccctgttttaaaagacacagaatgttttgatgtattttttgcccaaggttgcaaaggcaaacaaaaagcattatcttcaacagcactctgccagctcccagttacattaatggaaggagcattatgctaagacataaatttggtcattttagttatattttgttgtgtctactttgggaatttcacttcaaatagcaaattcacgttatgaagactttcttcagaaagaaaaggaatttgtctagtggctaatttctgactgcttatgatgtacctcatgatacaattgtaggtagatgtcttcagcctttctgtagttcaaaatcacctcttgaaacaggaaaattctttttccaaaaaaaactattgaaacagaaaaatttccaaggcattctttggaaaggcagaaggaacagaagttgggatgtccctgagacacatgctcactatgtgagagttcctggtcagtgggggatgcgtctgccctccaaccctcctccagccagagactatctaagctaatgaa

SEQ ID NO: 63587 - DNA, 2058 bp, Homo sapiens
ttgtccttcctgggtttcacacctctgggaagtcatggccctatagctcataacctttgtaatagggcctgggcggtctttctttccttctcttcccagcaggagtggaaagtgatgtctggctccctttccattttacactggctcccaggggcaagcagtcctccctccatgtggactgccgggggctgggtgctcacagctggtatttactgggactgagatcagaccctgcttgtctttcactgatcaggatgttccttccacctttttacctgaaatgacctcacttcagacttggcttgcttctctttccttttccttaaatgactgagacagtctcacctctaccatagtcttcaaagacagtggcttaagcatttgatgcttcaagatttaaacagctgaaattcttaactgaataggtttttatcagtcattccagagatgttagatccttgttaaggcttcttgtaaacaattttgtcttgtcaggaacagcctcaaccatcaggaaaacaagagtcaggttcagaaatccatgtggaagtgaaggcacaaagcttggttataagccctccagctcctagtcctaggaaaactccagttgccagtgatcaacgccgtaggtcctgcaaaacagcccctgcttccagcagcaaatctcagacagaggttcctaagagaggagggagaaagagtggcaacctgccttcaaagagagtgtctatcagccgaagtcaacatgatattttacagatgatatgttccaaaagaagaagtggtgcttcggaagcaaatctgattggttagtctgacattagaatacatatattaaggtgaattttttcatgaatgctaatttttgaaaagtttcgtcttttccctttgacagttgcaaaatcatgggcagatgtagtaaaacttggtgcaaaacaaacacaaactaaagtcataaaacatggtcctcaaaggtcaatgaacaaaaggcaaagaagacctgctactccaaaggtaggggcctcactgaatggctgctttacacataccggtgtcatcgaagcttgcattcagtgtggatttatgctttaatgtcctgtttacctccttcctgttttctacagaagcctgtgggcgaagttcacagtcaatttagtacaggccacgcaaactctccttgtaccataataatagggaaagctcatactgaaaaagtacatgtgcctgctcgaccctacagagtgctcaacaacttcatttccaaccaaaaaatggactttaaggaagatctttcaggtaaaaacgtagtcttagatcttataaatcttttgactctactgttttttactgtgttaatgtttgttttgctaactttgtttatctgctgtgaaagagattataaaataaacgactcaatcacccttctggggtcttagtgttcagggaagataaagctgttttggcttgcaaagacaagtctctgctaatttttgggatcacatgtcctgcatgaaataggtgtggaaatgtcaaatgcatgtctttaccctggagagcagcgtatacatagaaagctggaaggtgctttacagtgaagagagttaacttgttaatctgcaggtacaataatagtttatcccaggtgtgggccagttgttgttgagcaacattttgcttcttcaggattgactttctaggtagcttaactttcttgaaagaaagccctatgagaagattcccataaacgattgttgaagaaatatttccattcaattcccactctcagtaaattgtggcctgacttgtgtaatttaaagtggggatggccggcgcagtggctcacgcctgtaatcccaacactttgggaggctgaggcctcctatcattccaaacagaatgataatgatattagattttcaaaaatatatattattacttgacagtactaaaaatgggcagctctttgtcattttctaaaatgtgggtacgtgttatttgtacttaaaatctagaactgagcacccaagactttgagaagcatgaaggcatttggcctct

SEQ ID NO: 63588 - DNA, 1089 bp, Homo sapiens
tagtggggaagcatcacttaggcaagggatttacattaactggtggctcaggaaaatgtgtggccgggactgggctcctgtgaattgactcagaaccacctggaggagtttttacagctcatgcattctggtcactgggtggctcaggctgagacccaagtgcatgtctttagagagttctctggctgtcgtccccctactctaaggtgaaatctgctgctgcagactcctcctttctatgtccacacataatgtttcaatgttttaaagaaagcctctgtactgtccagtggcaacttgacgtcttagtggccactcccgcaatcctttaggaactcttagtagcttagcttcaccaggattgcaagaatagaggcgtgctgtaggtactgtgtttcgatgacttttcacttggtttgtctttaatgctaacgtgaaataaatcactagtcttggtatgttttttcattgctctttccacatttgtatccgttactttagatgagagtgagggaatacctttgaaaagaaggcgtgtgtcctttggtgggcacctaagacctgaactatttgatgaaaacttgcctcctaatacgcctctcaaaaggggagaagccccaaccaaaagaaagtctctggtaatgcacactccacctgtcctgaagaaaatcatcaaggtgagttgaacaagcagcatcccattcacgcccagtggctcacacaccgggtacctattcctttccaaatactgacacaagtagaattatgatgaagacctttatttatttattaaagaaacaagtttttaaaaagacgaatgaaagctcattgatgtgggcaccagcaaaggagcccctgggtccctgaccgtggtgctgatgcgaccgagtcgggggagtccttgatgttgtccttttcgtgcagaagttcccagacacccacgcttacagcactgcgtaatcacctgcaggcaccgtcagaatagccaattacaaagattctggatacattaccacgtcgacccataaggattgttttattttcttttagagttacaaggctatagttaaggcatttacctggtgtgaa

SEQ ID NO: 63589 - DNA, 1712 bp, Homo sapiens
gtctagcctgtcagaaatggaggaggtgtcatttaacatgtcaacgacagacagatgcctaactttcccttggtgactgatggtatgctatgcttaggagagactctagatatgagaaaattgcctgttcagctgtcaactcagttctcagtagttagatagcatgtgctatttcatactggttattggagctgatatgatttatatatttgtatcataatactagtatcataagacttgcaagttttaggcattaaataatttgtaggccaagtaaaagctagcttataagacaacctgaaacaattaaaatattgaattccacaaatgttaatcattgagaaaatgctgaacttctgtttcttatttcataattcattgccaagatgagaaagctcaagattccaaggcctattcaaaaatcactgaaggaaaagtttcaggaaatcctcaggtacatatcaagaatgtcaaagaagacagtaccgcagatgactcaaaagacagtgttgctcagggaacaactaatgttcattcctcagaacatgctggacgtaatggcagaaatgcagctgatcccatttctggggattttaaagaaatttccagcgttaaattagtgagccgttatggagaattgaagtctgttcccactacacaatgtcttgacaatagcaaaaaaaatgaatctcccttttggaagctttatgagtcagtgaagaaagagttggatgtaaaatcacaaaaagaaaatgtcctacagtattgtagaaaatctggattacaaactgattacgcaacagagaaagaaagtgctgatggtttacagggggagacccaactgttggtctcgcgtaagtcaagaccaaaatctggtgggagcggccacgctgtggcagagcctgcttcacctgaacaagagcttgaccagaacaaggggaagggaagagacgtggagtctgttcagactcccagcaaggctgtgggcgccagctttcctctctatgagccggctaaaatgaagacccctgtacaatattcacagcaacaaaattctccacaaaaacataagaacaaagacctgtatactactggtagaagagaatctgtgaatctgggtaaaagtgaaggcttcaaggctggtgataaaactcttactcccaggaagctttcaactagaaatcgaacaccagctaaagttgaagatgcagctgactctgccactaagccagaaaatctctcttccaaaaccagaggaagtattcctacagatgtggaagttctgcctacggaaactgaaattcacaatgagccatttttaactctgtggctcactcaagttgagaggaagatccaaaaggattccctcagcaagcctgagaaattgggcactacagctggacagatgtgctctgggttacctggtcttagttcagttgatatcaacaactttggtgattccattagtaagtttatttaattgtaaatttatttttctaaaagatgaacaccttctatgtagctgtgagaccttcattctttcagtagtgattagctttgtggaagagaatgtaagcacataaggcacagggataagacagacacgcacgctgttttcgctaatagatgaatactgaaggcctaggtaattgtaacaaggaatgacagaagagatggaagttgtcaggcaatcatgaagcaggggttattga

SEQ ID NO: 63590 - DNA, 2786 bp, Homo sapiens
atttccatgtcacaatataggacaggggcatgcgctgtcatcgcggaggagaggtcagggtgggcatcctaccaggctcagggcagcccccacaatacagaagcatctggcccaagatgtcaacagtgccaaagctcagaaacacccatctatagtcgtcctcctgccaaacaaattctcagttgtaagggatagtctttcctttgctctgatgtcctgttaccttaaaatcaaattattttattggggttaaggaagcttttcactttccatagatacctttctcttgaaaaggaaaaatataaacatttcatctccagtggcagtccttttgcttttttatacagtactccttgaatatatcttcatgcaagattttataatttagaaataattcctaagtgtttggtcacatgacctgggtaggaagagagattcttagactccaaaggttcagatggagaacagacaggccattgcatagtttattcaaatttttaagatcacaggctagaacaggaacactgaagactccaagaacctactaacaaactcttctgattattagtttgtataggtttaggaattgtctcttctgctactttgccatggtgttagctttctgtggaaaaacaagttgaatttagattttttttttgtgtcgcttgcaaattagtatttttattgtttagagacttgaatctgtcagtaaattcagtgtagttttaaaacaacaatgaaaagcttacccataatgagcatttactatgtgctaggcaaattagtgacatgtacaaccatttaattgaacatcacatgatgtaggttctaatgtaatttctttattgtatatgaagaaactgatgcacagaagtgctagcatcaaataagcacatttggggatgattaaacctctaaacatatttaacattacaaacaaacgtttttgaaaaagcacagagtattaaaaatagtcattatccaaaattgatgtaagtattcctttgtgtcttttaagtatagcttttcatataaaaggtaattcgatttgtgttctagtgttttcccttgtttttacatactctctgttttaaagatctaatagttacatgtttaatacttccaaaagttctttgcaaaatgcaagatcgtttacattgcccattttgtttgttactcctttatgtcatatttacagatcaaacattctagtcaaattgtgttttattttgggaaattgaggtaatcttttaaaaagttgcagcaaccaaaaaaaccttcttcttttgcatgaaggggtattgaatgtgacatccgtatccagcttcctgttgtgtcaaaacaacattgcaaaattgaaatccatgagcaggaggtgagtgggttttttgaagatctacttttaaagctttttagttcacttttaatctgttcattagttacatatttccccttcttttcacttgcaggcaatattacataatttcagttccacaaatccaacacaagtaaatgggtctgttattgatgagcctgtacggctaaaacatggagatgtaataactattattgatcgttccttcaggtaggtaaaagctgattggtctaacagtaaatgtcatcttctgattaaccataaactagtgtcaaagtcaactgtcattcttctttaatgttcatggatgtcaaagtatttcaggttttcattctcaacactaatcttaatttaaaaggatatggatctaggaagatgactaattgggacaaaatgtgatggaattcaaggatttgggtgcaaataattatgcagagggaggttgaccttgtcctaaaggagtttgttattttcttccaagtgttttgaaactgcatgagatttttctattcttttttattttaaagcaaaatatacacagagaaaaaggtacaaaacaagatggacaggtcaatttatcatgtgaacacccttttgatcaccacctattatggactgatttgtgctctcccgaaattcatattttgaattcctaacccctcgtaccttaggatgtaactgtatttggaaagagggcatttaaaaaggcaatgaaggctttttgagctattagtatgggccctaatctgatgattggtgtcattataagtggagattagggaacacgtgcacagaggaaagcccatgagaagaggcagcaagaaggcagccatcttcaagtcaaggagagaggcacagagaaatccaatccagctgacaccttgctcttggacttccagcctccagcactgagaagggcatgtctgtttttcaaggcattcagtctgtgggactttattatggtggccctagcagactaatacatcctcagctcatatagaacatttccagaagctttttaaaaatgctgttgtctaatcactacttcattccctcagcaagtaaaccaccgttttggcttttaggatatcataaacgtctcgagtttcactacctaagcatggatctctgaacacgatagttttgtctgttcttataaaagtccttaacagtgatacaagaatgtatacatttgtgcctggcttgtgcttttctgtgtgtgagattcatagcatgttggacatctctgtagtttgttccttctcatggcataagtatttcactgaaaaaaaaatgtttaatatatacaataatatacataactatacagaattcattcattcttgatggacatttgactaatgtctagtctttgaaatgtgtcaaggtttgctttatgagcagatatggc

SEQ ID NO: 63591 - DNA, 1036 bp, Homo sapiens
ttagttagttagttattgagaagctttgggaagctttgagattaaactgctgaaaaggaatcttgtttgatttcatggctgatgttaaaatggaagagttgctgtgcttctcattgtagcccatggaagctacttaccaaacagccacataaagataaacacatttagctaaaaagaaagaagaaagaaagaaagaaagaaagaaagaaagaaagaaagaaagaaagaaagaaagaaagaaagaaggaaagagagagagagagagagagaaagaaagaaggaaagaaagaaagaaaagaaagaaagaaagaaagaggaggtagcaaagtttttcacagaatgtctcatccagcaaaatattttgagtacatacgacctgttatgcacatctactgaggcattcatatatgtgtaactttatacattactgtgattattattactaccataatatcaaagtatttttcaggtaaaataaatggacatttaaatactcagcacatggaacgctgaattatttcaagcatttcttttttgaagacactttcctaggaattcaaacaatgctaaaccctaatataagtaacttttgatacaaatacaccaatatctgctgaagactatctggggtatttaaataaggcctgaaaggctgtggtagaagaaatattaaaagtgagatggaggctgggtgcgggggctcacacatgtaatttcagcactttaggaggccgaggcaggcggatcacgaggtcaggagttcaagaccagcctagccaacatggtgaaaccccatctctactaaaaatacaaaaattagctgggcatggtggttcacgcctgtaatcccatctacttgggaggctgaggcaggagaatctcttgaacccaggaggcggaggttgcagtgagccaagattgtgcccctgcactccagactgggggacagagcgagattccatctcaaaaaaaaaaaaaaagtgagatggatagattggtaggattgagtgggaccttcacaaacagggattcccag

SEQ ID NO: 63592 - DNA, 1050 bp, Homo sapiens
cctaaaagtttcttggtagaataatttcctacctgtgatgcttgcgaagtcagcagaggctcccacccagccctgccgcccattcccagaagtctgggctgggggacaccgaatggatagtccaccagcggcgtggcttgtgaaaggaggtacttgttaaatctatgtgtttttattatagacatcgttctgccagtcgcaataatgtgtttatggacatttttctgcaagcacagcgcgggtggcagtttttactgacaaattgagtcatatgcatagaggtttagaaagcgcttgccttattgacggatcaggcaattctggcacgggatgttcagagatatttaggtgggtgaagagagtgaatgaatctcagggcagagaaggagatggggcattatatgttgaaatgcaataaataatcgctagttatttatcatttgtttttaaacttttagctacattgtacttcccagtcaagaggactccggtgggcagccggggatatcatgttcaggtgtctctcctgcttgtgtggggtaagagccactactggaatgcgattccagcaaggcctgacgagtcacagccccttgaacctgttgctctccgtaaagtgggatcttcacaggcaacagtggaggagcgtttgagggtgacctgggccctctgcatcagaattactgtgggtgctggctagagaggtctctcgattgcagggccccatgggagacctacaggaccagaacctggggatgccaggggattctggcagaccctaatgcttgagcacctctagggaaggccttaggatcctctgggaagtagcactctccagcccaggcaagatccgagtcccccttccagaagtatccatcggcagttggcattgctgcaggttttctgtgcatatgggtctgagtacggttttgtaactcctgagagacgtgaatctcttcaaattgcaaacccaacatgttattattgcttttgagttttcagttttgtggttatgacaagatgcagatgttaccaaaactttggcgtcag

SEQ ID NO: 63593 - DNA, 1043 bp, Homo sapiens
tcaggtttctccaagtggcccaaggggtgggcattttgagcagagcagtgggactatggatgcgggtacatttggggacctggccatagttgaatttgagcagggtgtggcaagcatgtggggctggacaggaaggcagagctagccagtggggccagggcctgcggagcccaaatgctgcgctgggtgaagggccttgggagtcttgtgagtggggaacactagcctgtcagtgcttcccagagaagatcacggggctggcaggggactgattggggcagaggatgcaggatggtggcagcaggcctggcagggcggggacagttccaggaggtatagctggggtcaaccctggtggcttctggtgagagcggagcaggtgggagtcgcagagtgtggttgtgagggactaagtttagaatcgcttttcttattgagagagacgaaagccttggtgtgtgtgctttttatgtgagggaagccagataaaggatctggctttggaagggtagacaggccgccctctgccctgcctggcatctgggttctgaggcgggagatttcccgactgcagccgcgttcaggcgaggatggcagcggtggacccaggctcattaccattgctcccaccccagcctgtccctgttgggggcaacctgtacgtcctgcaggagtcacggaattttaaaaaccaaaccgtcaggtgttagaggtacagtcacatcagaatgcaaattagaaatagtgtgtgctggggccttaaacaccatgacgtgtttcgtgggctggtgcggctgagtgtgcccctgggcagcagagattgacgagggtggctgggcttcctccgggccctgggctcgcagtggccttgtcttcaaggggctccccgtgtggtagggagacgtgcttgtcacacccatacattttgtaggtactggtgagggctggctagactgaatgaggtgaagagcctggcctttgttggggggggtgttggggagcttggtaagtggttgaagatgttgaagaagtcccctctgagg

SEQ ID NO: 63594 - DNA, 1049 bp, Homo sapiens
ggcccagctgtgcagggagcagatgctgtggtgaatacaggtgaagccagagtcctggcttggggaatgtgttctgcttcctgtagtgctctatttgaagtgtggatttcagttcttcgttatcttttatttatttatttacttattagcacagcttgtttgttgttcagttccatagtgagaatctctaagaatatgattaaccttgagggtcatcttatcctgtaattattaatgattgattctgtttatccttgaaatcaataagagaggcataatggtttggtctgtagttgggcgtgatttcttacatttcgtaaacacggttctgtgacagcagttgtatcagtttattacccagaacatgtttgatgaatctgaagtgtatgattagttttatataattattgtgatatgtagtgttccttacatgagttatgttaatatggcaaatagtgttaacatctcctgccactaatagttagggtggggacatataataattgatcttcctgggagtgctgtaatgtaaaaacaattcaggctgttggaagtatattttacaagtatgcgttgggccttggggatgttatattgaaaaacccaattgtacagttaccatgggaacccaattaaaatagattggttgatttttttttgtctttcatcttgaccaaaaatctaatgtattttaaatgttttcatatggaattgtagtcatatactgacttgctgtgccaaagtattctgctcgttttttccaactttaagctaaaatagtgaaaagttctcgagtggatccttatgagaacgtctcccaaagagaatcagtcatgtttttgtggaaaagtttgtgtgagtgatgatggtagagtggaggtggtggaaagcttttatgaaaaaagggagaacaagcattttcctacgagggcagacaagaaccctcatgttcttcctttggtggaggacatgagtgtgtttctccgttctcacgtttgtagaaggtgagattaggtccctaaagggccctctccgtgttgtggaggggt

SEQ ID NO: 63595 - DNA, 1017 bp, Homo sapiens
gagcatcttcacgtagttcacatgacatcagaacttcatcaggatgtaagttcctgcagaaataggcctgtgtctggtcagtaaacagagaatgtaatgacattcccagagcattcacaggccagagtctggtgtcctccccagcgtccagcaggctgcggatggatggcatgcagctgacaagattgatactgcattagacattcctggaggtccctgcggctggggactggcactcgcaggcctccccctgcacacagctgtctttggagagcacagagcaatgggaggcggttttgttttactatttgccatttagagtctcacttttaatttatcctcactctttaagaaataattggtaatttatttcttagagatcaaatgttgctacaagctgaaaactgttttataaatatttcaggaaacttgaatgcctggaattttcatcgtcacgcttaagtcttcctccaaaaggggatggacttcgttccatcccgctccaaaagctggtccgattcttgcctgggtgttgtatgctatttgccttttccataggctccaataacaataagtacatcttaaaattgatgaaagtttaatgaatggctagcaagcagagagactacttttataacaagattaataccttggctcaggggacataacattttagtaaaatcaaaatttgtatagttatcctagcggtgcttgcaacctctggcttccatataaaaatgtctaaataaaatactggcagccgtctctagccattatttccatctgctctaggtggcctgacccggaacccactcagggtggtgcactctgggccggggtctctgggatttctgtcgcatcagcttgtgcagccgtggaatggggatggggcactgaggctagctgtcccgtgctctagaggttcctgggaaaaaaatacagagagaaataactcacaagggagccagcatttggtgttgttttaaataaattcattcatcatctataccttttccc

SEQ ID NO: 63596 - DNA, 1045 bp, Homo sapiens
cctctttatctgcaacatgtttgcttatatggtggcttcctttaaaaagaatctggtaaaacctgtgtcattgtgtttcagccactagatgcagatgaggcttagtaggaaaagccctacttgtgaagaacagtatttcctatgcttgcttggtggaaaaagtcacagaattttctatagaattctctgtaaacatggttaggaatatagggttgacatttggactcaaatagaaaatgaaatccttttgtttcattacttatttcgttactcagctttcaccttgactcttggaaaactgatggcatgtttccaaatggatatgccagctaattagcttatttctcaaatatccatgttggatgtggaaaacaaataaaaataaagcaaggaagaccctctactgttgttatgtgaagaataacaattacctttaatagcattttctgctaatttagagatttttctttttcttacacttattttctaactcctatgatttgtgtaattcatatcttatacctacatctgattcattatgattcttaattctctttgttgtaaacagaaatattgaaaattcattcgatgaacctaaaaccctttaaaaggtctggttaaattttaacattaagggtgatacagtattcatgctatagaacacagacagtcagaaatcttatgaagtgttggagactttaatggatactgtactatgtagaatctgatcacgagactcctgcttcatcacgtttttactcgaattgggtttcctggtgacaaaagactgtgaagtagctgacggaaatacatccttatgtcagttttcacccgatgactgaaaattgttggatatatgcgtgaaataattaggtcttatttttggaagggagagaatataaccgactgaaaaataatttggagttaattgtcctgaaaattcacctactgtatattaataggttaggtgtttcctaattctttctttcttaagcatatcttccttttccttacactctttttgacacaaacttttgaatatgga

SEQ ID NO: 63597 - DNA, 1043 bp, Homo sapiens
tggtttcgcccacactgcttggatttttttttttattattatcctccagctcctattcttcaggtgtgcagctattttagtattatgaagaatgatggatgatgcaggaaagtttctttggaagcacttctgatattgtgcaatgcacttgggggtcagctacacttgactgatgcatgatttatccaatgtccctgccacttcccgagataaagctgctgctttatcgaaaatgccagcaactgtgatttagaatttataaacctccgttttcaaataattgttctgattactttctgccttggcaataaaatgataaaggtaattgcacacaaatgtgagatagcaccaaaatacaataaaattaacctgaattagcttgacttgtcgatgagaagtatttatgaaatgtggtgttgcaataagggagggagagtgatattatggctggaaggtgagttattgctttaatgtgatactctttgaaatttaaaaaagagactgtttctgttgagggtgattgtgcttttgaaattaagttgaagtgattcttataattggcaacgagaatgcattttgaaggtaatatcttttattgtgttatgcctagttgcatcaccttttatttagctgtttctggcttcagcttttctaatactcaggtagaagcagacttggaattctgtcggatccaggggctgaaatgttgtattctctttgtagcaatgcccctggtcttaatgttacagactttttcctcctacatttgattaaattgtttagatatcaaaggttaaatattatagctagttaatgtttttttaagtttaaaggcggttttagaaatgtgttttgtttccctgtctttgtgtgcactgggaacatctcattgtagcctgatggtttcaacagtatcagatcagggttccatgtctgatacccatagttcgtaatctgccttttacattcctgaaatgaaattcctggataatatccatctacatgtactatttaaatgaaacactttaggagcagtaatttat

SEQ ID NO: 63598 - DNA, 1737 bp, Homo sapiens
atattaaacattatattttcatttaaaccactataatttctcctagttcagtctgattccttcttgcttttttgcatacagtgagtactatggtccaaatgtttgttctcccacaaaattcatgttgaaacctcgcccgtaagttgttggtattaagagttggggcctttggggggagattaggttagtgcccttatgaaagagactccaaagaggtagagccctcgacgattgaggatgcagcaggaaggcgccatctgcgaggaagtggggcctcaccaggcactgaatctgccggcgccttggtcttagacttcctggcctccacaactgtgagaaagaaatgtctgttgtttatgagccacgcagtctataggattttgttatggcagctcagatggcctaacacagtgagcatgccccacccggagatggccttgcccctcttgctgtcagcatcaggactgacagaagctgggcccatgcagattttccggaagctgtgtcaggtattgggggtcattggactctaaccagtacccagcagacagatgggacctgagagaaagggttggggtctgccccttctccgctcctcagcttcctgcagtggctgggggcaggaaggagggcacagttcaggggattgagagacgtgtgctgactgtccagcagcagcagatccacctgcaggcacagtgcagcctggtgtctcgtctgagaggacacgtgtgcaggacaggcgggacccacagctgctgcttccccactcgccaaggccccgtcaggagcagcagctgcggccctgggagcccacagtccagccaggaggtggtgagcacagggcggagtgtggggttggggactccacttgtggtgttcccagatttgggggatttccgcaaggccccgttgaagggcagtgctccttagatacagtgcagagtccttggggtgagggtcctgtctcattacttgatagcacgtgtcctgtctcattacttgatagcacatgtttcagctggctctttaatgggaaagttggtgctttagtggaagctccagtcccctagatacagagtgtattgcggatatttatcccttcctggctgagcgcggggcagtttctgcctgcagatttgggctctggctctgggttatggacctttgaatgtggccatgccagagtttgtgaccttgacgtcttgaggcatcctgtaagtggtatgacctcaagggaagaaagctagcgtggcctgcatacaggtgggcctgtggactgtaaaagcaggtttacttagcgggagtaattacccatgttgatgacagcctctaacagaggtgcagtcttcaaattcacatttaaatgtctctgcctgctactgagaaatccacagcaagggaaaagagcaaaacagtctttctgtgaagggtctgttttattttttattttattttattttaattaatgagacggtgatcatccagggaacaggatctaaacgcagtctttgaacttgaactctgtatgtggtgtctacaggtttgggtgtgagcagcctcactctgtgctggttcccagcttaaacgtccaaggaagagctcatgacagtttttatattagttctttaaatattttattgtaagttcgtctcttcccagcccctcttgctatttttattgctccatttgaagttccagccaatagcccaggccctttctgtctttgatgtctgt

SEQ ID NO: 63599 - DNA, 1048 bp, Homo sapiens
agttttgggggagtcaaaaggttatgtggatttttgactgtgtggggcttcaacagcccaacccctgcactgtccgagcatcagctgtatacatacatattttgccgtttgtattatagtagctctgtgcatggggcatgtctccgcaggaagagggactgtcctgactcttgggcctggtggtgattgtctggggcactcctcccagagccctgactactgacaggtcacttcaagaatcaaagaacctcgactatgatgtcatttttctgtaagccctggactactataaattatgttttatctgtcataattaagactcggagactaccaagctgtcttcgaggggaaaggcctgtccctttctccagagaaataattaattgttagagtatatggtttttgaagaatttactgtaagataaaagactggtattttattcttgcatttattagtatttaatcaaatggaaagtgcactttcagcctggaaatcttggcttcagctgcaggattagactgaattattgtttaaagagtaaaaggtatagaattatatgttcaagttatcaagccactgataggttttgggtataatgtaactaatttagaacataaaatttcctgccttgtggactagagcatcggattaatcatttggaagcggggcgcacttcctctgctgcgtggccttgcggtgagatggagcctgtcgctccaggagcacgagacctttacggagttcagtgccgtcaaggcccacttgtccacagccaccggagcatgttgggaacaccgggagccgctggaacgtgtctggaacaccaggctcttccattcgggacactgagtcataaatcatcccatgtgtctcatgcaagaattcttccctgcagaaatttcatgaaacttagtctttgctaagggtaaagaggatttaattctctttgttctcagtggtgtgcaggcttaatgctcatgggtgttgactggtggccggcacatcagtggctcgtgggtgttgacttgtggctcctggcattgcttt

SEQ ID NO: 63600 - DNA, 1032 bp, Homo sapiens
cttgttgttagagtattctttacaaccaaagcatcattaatcagaaaggtgctgtgcggtgcggggccggctccgatgacagtaataaaaaccggcacacctcctgttccaggacccagaccctggaagtctgtgcctaagccaagacatgagcagcgtttgtggaatgcggcttcagatagaaaccttctttcaatttgcaggcctggttatgtaattctaatgcagaatctcccccttcgtgtttgcatgcgtgtagccgggttcacagaactttagccacaaacaggagtgtttccctttttccagggctcccgtgttaggcccccaccaggaggctttggggtggcgtttgggaacgccgtttggatcccttctcagtttgacatcctaggtggcagctccagttttgtttggtgaaacgatttcaatgtaacagaacccctttcggttgtgagagcagaatgaactgagccgcacttgactgtcttgtgctggatgtgacccagccgaatccacggggagacccctggttacagcggggaccacgggtggggtctcagccgtggccctttatacttggtgagcatcagccacaccacgtggccaggtttatgatcaggtgatagggatgaagtgtttttgacacatgcttttctttttttaaattaaaatactatctcatgcctgattttgaggtgggctgagcatgagtcctgaggatgagaggggcttccccaatgccccttattccctgttcagaagggagattgcaaagctagttttcatcttgtgatgtctttgtgggaggttgtgaggcagtcagacacggtcctcttcctcccccaggtgagccaatctcccccttcacacagacccgaagcccaggccacaagggacctgggctaccttgtttgtaaacagcttacaaggaggctggtgatttctcccttttaacatgttcgtttttatgtttttgaggtgtggtctcactgtgctgcccaggctggtctgcaactccaggactcaggc

SEQ ID NO: 63601 - DNA, 1087 bp, Homo sapiens
gcctgttctatgcccgttccatgctggcttggttaggtagctttgtgatacatcttttgttttgttttgttttgttttgagacggagtcttgctctgtcgcccaggctggagtgcagtggtgtgatctcgactcactgcaagctgtgcctcctgggttcacgccattctcctgcctcagcctcccgagtagctgagactacaggcgcctgctgccacgcccggctaaatttttgtatatttagtagagacagggtttcactgtgttagccaggatggtctccatctcctgacctcgtgatccacccacctcggcctcccaaagtgctgggattacaggcgtgagccaccgcgcccggcctgtgatacatcttgatgctaggtaatgtgagtccatgaatcctctaaatttatttatttttgaaaggtttggcttctatgtctcttaagtttgcctattacttttagaattcaggtgtaaatttctgcaatgattcttttttggatttcgactgggagttcattgaacctggttgtcaattttgggagggttgacatcttgatactgaagtgttcagttcttggctttgactggcgtctgcatttgtttgggttctttcattgtcctcggcagcgttgagtggtttttcagcctggaggctttgcttatctggcagactccatttctaaatactttgttcttgatggtattctaaattaggttgaaactttttaaccttttaatttattgctgcttgtgtttaacaactgacttgtatgttgatcttatattctgggatcttgacttaattcatgtattttttccagggttgttttgagattgcttaggattctgtataaaaattcatgatgtctatgaataaagacaataggcttcttcctttctgattgttatgctttaatttcttctattgagctgtccagaaccctccaggatgacttcagtaagtgtggtgacaacagacgtccttccctgtttcctggtttgggggagcttgcaggatttcaccagtgaggacttgctccccatgttgggtttcagaggcgtcttcctcactgtgtggaatt

SEQ ID NO: 63602 - DNA, 1519 bp, Homo sapiens
tgaagcttcctggtttagtagaattgggtgctgccttccctcatctcggggtgctcccacctggagccatctgtgctctgtgtggctgctgtcctctggttgctgagtgacagtggctgctgggatttggggcagcatcctgctggctctggcccctgccctcacccttctccgagtgcctatgagtcccagggtggtccttgcttcctctgaatgggtgtttctttagtagataaattacaggttgaccactgggccttcttcagtgacattgcatctgtgcttgtgtacaaagtgtgattcccgctccccaggtgaatccacttacctgtgtgtggcttcgcacggggaccaatgacttccttgcatagttacctttccctccctaaaaacgtgtgagaagcacatcagttgggaaagtggtatattttccaaaagggaagcaacataagctgcttttaagttagtttcataactgcctgacagtatcaggtttctgtgaatgccatcacgtccaggagcacttggcctctgcaagagcggagcagctcccccgcgccatcttcccgcagctgcagagctctgacctcgtcagattccctgcagtgcccacagtctaatgagaggggccaggctgtatgtgtttacttttctaatgttattttggggcttgtttagttttccataatgttgattgccgtatttgattacttgaaaaaatggaccgtatcaccctgggtcatacttagattacaaaaatagtagcagtaggacttgtagatcttggaagctggggagctaagggggctcatctttcacttaccaagggcttacccttgtttttcattcttttatttttttcacataagccttttcagaaaaatataggaaaagctgatagagtccaattgaactaaaccactttaaaactttttgtattttggaaaatgtggggactacacacagactgtcttctactgcagaggctctttttctgtcttcatggtagggatccatttacagggtttgtgggtctgcttttggcatctggcccagccagcccttggattgaggctgggtggggcatgcaggttggccctgaccctcttctgagcacctggctggctggacagatagggccttcagtcaccagctaggctggcctgaccctagaccctctggaacgtgagaacgtatcctgccgggcctctgtgttgaacctgggaggagagttgtctgatgtcattggatgccctatgagtttctgccctcgaaacgtgccccatggaaagcgtgaagatgcctttgagcttcccgaagggcagctgcagcaggaggtgacctgcgttttgcctctctcctgctcatctctaaatgtgttcaggaactcagtcgaccctcagccgtgcatggggtcccggctggcttggtatgtgcacctgccgagtctgtgctgccagttatccccacggcctctccgtgcaggtcggtctgaccagtgccagtcggatggttcctc

SEQ ID NO: 63603 - DNA, 1953 bp, Homo sapiens
gtagcccgtgatggtggcagctcttggaccttagtaaaataaagggaagcagcataacatatgcttttaagtgagggtatggcgtgaaaaccctgccgttgtgtgataggagacgggctctgcaggctgagccttccaagtcgtgaatgatgaggtttgctgtgctcctctgattggcagctgaaagggcaggtcagagctcctctctacagcactgcggagaatcccaggctgtggagcactggcccatccaccccaggacagagctgcctcgccacagaagagcgaggttctgggattcactgtgaaattgttgtatggtttctgatctagaaaatcaaacctaaacaatgcgcaacctcaccagcttcggtgctcttgatgttttctccctgcagctggttctttgctgacctgggggcagagtagacagtggtggcagccaggtggatagtatttaaacaagtgtcactgagatttagggtccttatgtgctggactcatctaagaaaaaaaaaagcaatgcaaaagttttatttctgtcaattttgtaactgtgttacaaggagacagagatggcaaacgtgtgtgcctgtgtctgtgagtcagaagcaaacttgttcatttcatttaattttaagtctgccaggaacttcttggaaggaagaaaagaatggttgaatgacagctacaaataggtgagttcagaatatgatccaaagtgtcagagcaaaagattttttaagtttccaacatttggagtaaaagagcactttagagtaacaggtaaatgggttaacttcaggcagagagaggtggatgtttctgcctctctggtatgttaaaataaaaccccttaaatcccctgctcttaacaataagtttccatttaagagtcattgggcttcacctctgttcggctctgtttgtgaagggagggcagcttttctggggagatcatgcccctctctcctttatgtggccacagagatcctttccctgttttcatgaggaggaaacatggaaccttggcacaatccagttctcatctagaattacattgtatgctgtgcaggccaggggaggaaagatcccggaagtggcagccaccggataggcacgttgccgccacagccagcatcggcgtctgttcaggtttcaggaaggtcacttcttggctcaaatccctggtatttccaggttgtcttcagactgcggctttcaccctcaggaagccccagcatggccttgggcccagcttagaggcttgtgggggtttgggtgtagccccgtgcacagtatcctgtctaggattcataatcttgcaacagccatccctgatgggattgggtaagatgacagtgtcctttctcgatggccctggtgccctgtggagttgggtcctggccctcactaccctgttgcgtgggtgggccacgcccctcctgctgatcagcctctgttgcagagagtctggccctgtggacccctgcccccggccccaggccctgtgtctgcgctgggcttgcattgcctgcctctcggtcccctcgcctcattgcagtttggtgcttctaattagttgtggtcttgaaaagctggtgaacaggcttgtccacattgtatgggaaataaggttcaatgaacccctgtgagaaacgccaagtgtgggatttctgacagtatcccacagaaacatctcagagcccatttctgtttcctcctggagtctctgtttctcccagaagaggcggcgtggccaggggtcaggcagatgtcaaggaagtgaggactcggagggactggcacctgtggaatagcccctgcttcgtctgtctggcctggtgggaggaggtgtccttccgtcactgcacttcgtccttgggacccctctgtgaagttgttggcatcaatgtgcgtttaccaataagagaaatggagatggggtgaggg

SEQ ID NO: 63604 - DNA, 1086 bp, Homo sapiens
ggtattagagctccttggacggtgatgtgctgttttagaggagaaaaagctgagatgaaacaaaaatggtggtggcagttacccagggccacgtctgtggatgccatcctcaggatgccattgcatctcgggccagcctccctctgcttttgcaaaagcacaaccgtctggcctctacgaccaccaacacacacctctcatactctggaatttgatttctggaatgcttttttattcttcctatatctgtaagattttctgatatttaaactggctgcaactaatgaatagttttcagttttgttttaaaagtgttcatgtcatttaagctctaaactctcacaatatacttggtttgttaaatgtaaaattttatcagtaattagatcagctccttgatattaatgtacagggtagctcttgcgtgctgatcagttcagaatttaaattgagttaaaggttaaatgagtttaatttttgaattgaactgaagcattgtcttgtggcaaattcatccagaatttttatttccagttgctgtacaagtgacggaagtgggtctttttgcgataaaaacattgtgaatacatttaggattcagtgagcttctgtcatttactcgctcattctctaaacgtgtgagtgccctgctccgtgtcagaccagatggcaggccctgcatggggtggggaggggccagaatgtgcagccccacctgcagcccaagcccagctcaggggcagacaggggcagacggggaagtgggctgttccacaccttgagattggtgaattcctcaagacagcggctggcaggggcccaagcctaggtgactggccacagagctgaatggggctgaccgagttaggacatcactgggtggtgaaccaggaggccctggctgctgacaggatgtaggggcatggaggggtagcagaaggaggcagttaagaggctgcgagccccctcttgggcatctgacggggtggtgcttcctcccagggctaggggagaggtgagcaaagaataacctcaggaaaagaaataaaagacctggaggaacagtttaacaagtgggtggccatg

SEQ ID NO: 63605 - DNA, 1040 bp, Homo sapiens
agctatcctcccgtccttggttggctggggcaggtgaagcattaggaaatgctctgtctctgcattctcttcgagtaacactggggagtgttcatggcttctggcagaacagcaatgttagccttcagctgctgaagcaagccttctgctcattctagaggcatcttctaaacagatctgcactggtcaggtggggctggagaaggactgggctgagagcacagctatgggaggcaatacttgttcttgttcccaagaagctgatgtgtcgtccggtgaggtctctcgtcagccgaaggttggcacaaggtcgccaggcaagggctttttgtatgtgaagtatgcacattctagccacagagttttctgccagggtgtttagacaagctaaaagtggaatataaactgtattcaatttgctaggttgcaattataaggacaaacatgtttttaagacttaacccattatagtaggaaaatacaaggcttggggtatgctgactctttcccttgttcgtctctcaaatagaaaaatggtgtgtgtaagtaggtgtttgtatatgtacattataagacattctagaaatttctgtcctatttctttaatattcttgccactaaaaatatatgctcctgaaactagggaaaaagaaactgtttatcattcttctgaattattacagataccccaaaagtagcctcctccaaatagtggtttttcttttctaaaaatcacctggaaaaatactgagctttctgatctttattttatccttttcagtggctctgtttggaagagttattgtacaacccagcactgcttttattaaaaagaaaactgggccactcatttccttcaaagtttttggtgtgtttaaatcttctctaggtaaacaaaacttttattgaaaataatattttgagaccgtgacacccttctcacaagaagcggtgctgaaagcccccttgttggctggtcctgcaggcagcctggcgtctgctttgcctgtgggccgtgcagggtgctgggggcagtgggg

SEQ ID NO: 63606 - DNA, 1057 bp, Homo sapiens
tgcatcgcaggcacatcgtctggttagcgggagacatgtttggccagcggtgaaagactgccttgcccgagttcctgagacttcggggctactgatggcagggagaggctggccgagggcagggccacgcggtccccttctgctgatgtccgtgaggactgggcacagctgccagagtcaagggcacggaagtgcaagcagtccgtccttttctgaagcctgctctttttgtttttccccacgtgtgtcaccttttaacgtttttttcctggctttttcattaatgtatgtaaaaatattaaaagcccttgtatattacatgaaaaactatgtcagctgccttgcttttttctatttattaaaacttttcaagcagtaaaaacattttacttgttaatgagggaaagtgggaaaattaatgacatagagcttggatccaccacgatgtctcctcttaaccatgcgcagccagcttcccaccgcatggagtttaatttctgcgatagggttcagtaagcaaatgcaaatagatttaatgatttgcatcagtagatcatttctcagtttaatatcctctgatattttgggtcaaggactctttctttgggagactagtataatttctagaggtagaattattaatattagtgatattacattatgttgaagtgaagtgagatagatgtatcattttcacaaagtcagatttctgcgtgacttttattcattgtggtgcaaaggaaaccctggctgctgaagtagacttaggagcaggcagaattcctggacgcaggtgccttggagtgaggtgaccctctctggcccccagcaccttgcgagcagtggtttttgcatctgttcaccagcgcatgtgaacctgtgggcccgggggacacgtggtccatttttgttgagtacgttcaacaaaggaatgaattaaaatgagaactcttttcagcaaacgctgatggagctttctgtgtctcgtgtgtggcaccatgctgacggaatgacgagaaaccacaacctggcctcaaggagctttgtctactgcggg

SEQ ID NO: 63607 - DNA, 3505 bp, Homo sapiens
cacatatttgaaaagaaaggtttgagaaggcatccattattaaaaccaaattcaacagagaatttaaaaactggctgtggtgagcaatgttagtcccaaatcactttttcacaacttgtttctgttctgtcgtagggctagtgagaccagctttcccttgagttctggggcgggacgtggaatgtttgtgaggctacccttcattgaaggggggcccgtgatgttgagtgttcaccgtctttcagaacgtttgtgcggtggcgtgtcccttctgtaaattgctgtgacctgggctgcatgctccacagtcagactcgcttcgccctcttactggtcttcattaattcgtggtccctggagtggagcgggaaatacagatatccacctcctctcattatccaaatacaataacaaattacgaagcatcttatcctaccaaccattatcctatcagaaagcatgtgctaatttcgaggaagcaagaggaactatgtcagatgtgccatgagatgtaaaatgtactcgccctgtatcttggtcttctcctagcagtatcttgtctgacaatctccttgtttaacttcttgggctttttctttgacatcttcccacctttccctaagggtttaactgtcttagatctccttgtctgcttctgcccgagactctgggtccctgtcaactcgggtagaattttattggtatttttaggctctttaacatactttaatcattgtgttgctgcatatatttcttctaagatagaagtaaattgtaattgtcctcagataataacctaggaccttaaaatacacacaaatgtacacactaatgaattttgtaaatattacataactcggtaattattgtttcaaattagataatgcagaaatctctggatttttatgtcggtgtttataaagcattttaatgataattggggaagttggttgtgggtttttagctagaacaggaacccattataatttttcccaattataataatgggacataagcctctgtaacctgaaattttcctctatgacatgttttcagaagtagaattattagatttgatgagtgtggatgcctaggtttgtagtcaactttttgaactgagctaatcaatgcatatttgggaagagcatataatccaaaatattgggtctacaaatgtaagattgcctttggtgatgagttggtgtcatctgtcttctgtaggaaatgaagggcctcttgcagtgtgctgtgcctcattttaaacctttaactggcaagtggtcctgatcttccctctggacagctgcgggaagaggtttcccggtttaccttggcccccgtaacaccacatcatcccacgtgtgcgtgaagagcccgcacaggccccctgtgcgcccggggtcaggtgtggatggggtcggggtatttccagtacttgcgcttcggagtctttttaaaattgagagctcatctattgttgataaatggccaaatataaatgtataacaccttgattaataggctgctatgaaattgaaggtggtcttttctaggaaatcctcattgaaatactgcccattttgaataagtctaatagtacgatgaaccacacccttagtggaaacgttataggatgcaaataggaagatttgtgggtgtttttccttcatgaatttgttgttatctttgcagaagtgaagaatatcaatattttatggcctttctttgggattcgtgtttattaccagtgatgcagagcgtggccctggtcctcagcgcctctgcctttgtggtggcgggggccagtttgcctggtggggaggtgtgtgtgttttcaccaagttagcaaatttcctgttttctcttttaaaatggaaggctagcttcctctcccattggctttttctggagattggaaatggtattacagtctttgttgtgttattgtggaaatctccggcgtctctcctgatgttgccgccctgcacggccgttggagagtacttgcaggcagccccgctccacaccacttttatcatcttcattttcattcttttgtgaaaatgtagttgctttggagcctttcgaaaagtgtgtcagatcatttttgccatttctctttttccttttactttctgttattttccatttcgatctcagatacccttcttaggaagctgcatccccgacgccgggctggtctgttctgctctgggggcggcgtgtgctctcatttcactcccataatcagctttggcatatgggattcagagacgcagtgcttggtcttctgagatgttttgtgcagcagctaggtgatgtcccagttctcctggaatatttgcatcgaccaggatgctgtttctgcgtcggaacgtggtgtctttgtttacccttaggcattatcttgcttgtttacctaaatctttaactctccttaggtgagtgacttcactgatactaagagtgattaaaataatgtgatgtatggagtcaacttaggcaatacatttacctgtacaccacacgtccaatatttattcagaatgatttttttcaaatatttaataagaatgaataattgaatgtactatagccttcttactttgccctgcgatcccataagacctttaaagctaaaactagtttgggcccttgaggggtttatagaaattaggtatgtctgagtatggaaatggctggcatggtgaaagaattgagtccttaagtaatttgctattcccagtgataattagaagaaacccctgttctagctccattttcccattttttttaatgttttaggggagatttctttaggtattagcggctgatcttttttttcttaccatgtactcccgctgtaaggtgagtggttttggcatattgtgttgccttgatgggttattaaatcgtcacttggaaggatgaatgtgggttatagagtatgttgtgccatatatcatcttagtcatcaggaatgtttcagaaaactgaataagagtaaagttttttaaatttatgattgaaattagcaattttattaggtccttttaaaaaaacctacaaacttttaaagtttttctcaaaatatacatctttgttctcagaagaggtctgcagactgccctaatttgtcttttgaaaggacacagaattttagcagaatacttatgctgcagaaatggacaaatgcaggtgctgttccttggatggtcagcatggaaggttgacgtgctccaagatttactgtgcgtcaccttagccatcagtcccatcgtattcatttaactccactaataagaaacggagcaaaagtggaattatgagttcagtagtattctatgaaaggtcagttgttaaaaaggcagagtctgacattctgtgaaaaaggtgccttcattaatcattctgatgggagagcacggggcgttcttgaccaataccagtgaaccttgcaatgcaaagtttcagggtctgatgtgtaagttcttatataaaaacg

SEQ ID NO: 63608 - DNA, 1352 bp, Homo sapiens
ttcgctctgtgggtgcgggcagcgacaggggtgggtcagggtgcaggcggtgagacggcgagcgaggaggtcgggaaggagcctccacaccccagcagggcccattccacacgagaccccagacgaggggagcagaagctgctggtgcctctctgttctttgccggatgctaccgttgtctgtggccacacttgcttcttcaggtgtggaaatagaagctcagagaagttaaacaatgcgccaaatgttacaccttcccattctaacgattttgtcaatttcggtgtcaaggtgatatcttgtctgatggtggaggtcatagttgtctgtgaggacatggtatccaccctcaagcatgtaattatgcatggagagggctcagttcagttttaccgagacacagtttattggagtctacaaatagcataaactgctatgtctgcagtgttaccattctctttccttattgtcataatttttgtttaatggctgtttgtgctacattgaccaggtccatgggttgcttaacataaatgattacatttgcttatgattaaaaacttcctccattagaagcactgcacccaggacttgtaaatgatttgttgttaaagttttctacttcattagccacgtcgttgactccagagtcattgtctaagagttaggaacacttgtaatgagctgtataatatggaccctcgaacgaaatttaaaaagagaccaagccttctaggaacagcttagcatgcagataaaaggctaggaaaatgtgtgaacagcgccaggctgtaggctgaggcacgttccattctgactcagaatggcatgggtgaataaagtcttttatgatggagcaagacttgttgtaaaaaattatataccattcatgaccaaaatccttcaaaacactccgtcaccattcccttctgaaccctatagcttaagttctaagcatcttgtgagtctcttgatagagcgttgaaaactccatgcaatggtctttgggacgccattcgaacctggcctgccccttgctggcaccttgttcgtctttggctccatccggggatttgattgtcagtgacccacctgattacagtgggctgccatggccctggcctcgtggtacaaaaacatggacgattttgtgatttattatcggaggacagctagcaaagagaacttcctggaataactgcattaaatgtgatgggcatttttgtgacagatgtaaaattcttaatcttgaaagcagttgcatgtgtcaggcagactgggtgttaattttctgacagcagtaggaggagctttttttccccattacagatggaattaggtctactttgtac

SEQ ID NO: 63609 - DNA, 1440 bp, Homo sapiens
aggccctcaggccagttcccggggcagccactgagcagaaccgcccctcccagcgcccacctatggccactgccctcagggtcccttcctccagcatggtgctggcggatggcgccataaacaggctgtcactcatctgcaggctgccttgtctttcccccagcagattaaagccttcatgaaaaaagatggagggcgcttgactttgcgacacgcacattctgccgtcttgggaagggggaaagaggggcatctagctgggcgctgcgtgtagcctgcccggcggggccggggtgtggcaggaccgaagcctgctcctcgtgtggggcccggcgcgaaaacagcttgtgcagccgctgagtgactgaggaccgtgtcccagtgtagtgtcatttcctcgtacatgtggagtttaaagaattataggtaccttgagctactggcaggtaaaagacagtaaaaaaaaaaaaaatagtgaaagacacagtctaccctctgaactgatctacaaggctatgaaagcatcactttgaataatatgcagtagatatgttagaaaaatgtaatattggtgtgtggacccctcagcctctttgacgagtgttgtaatatatcttgttgaatgatgaatatgctaccgtatgtttcaactattcctttcttgtggctgaaagaaaaatatattgaaaatgaatgtaaaatattgacatttagtagttgttatgctccactgtaatttcttgttgctttggatgtggtagacacctcactaattacacggtgtgtacatgcgcacctgtaacaggagccgcgtgaaagtctgattggaactctgacttgatcagcccatgttcttctgccatagccacaggagcatctgaacgtggtgatggaagaagaccctggcgccccgtctccccgtggattagcggccctactgtgagatcctggtgatcttgatgatcgagggttatttgaagcagttcattttgtgctgcagttcattgaaatgccaccacccagaagacccctgagtttccagaggtcctggtgctttttttgctggggcttggaccggagcgtctttagagtgaccactgccagggaagacaccgtggtcggggcctgtgattcctgccggggccccaggcaggctggagccacaggtctgagttctgtccagttcaggttcgtaggccactcttgcagctctgttccttcttcagctcctctggtcattcacacgtggcctggccacttgcctattgtaccagctctccagggctggggacttgctagagcagggttcccagtgcccccaggctctactttgctctgcctggtctcagggtgtaggggatggagagctggacttccagcctgcttcttggctgtctaggtgccaggggctcgggacacagagctcctggaggccgagca

SEQ ID NO: 63610 - DNA, 1022 bp, Homo sapiens
agcccccgtggcgaacagaggctctaagagaggggtctttgttttggggcagtgagactgagtggccagtgagcaatccgtcatcaatggagatcaatacccaggaggtgccatctctcttggcgggtgacacgtaactgttacaaatgggtgcctgtccctgtcacgtcaccggagtgtgcgtcttgatgccctggctccctgaggcagctcgtgttttcgagtgtttccattttagagacccggaaaagggatccttagagctgctttgttttcctttttcaccagaaacaaatgcctttgtgcttctcccgcctgcggactcccactgcgttcagcccgtgcgggtggtcatcggccagacccatccagcctgtggcccgtcccctccacctctcacagccacctaggaaagtagttctcagctctaaggggcattgtctgttccaagaagaatgactgctccctgccacctcccacccccatcccatgtccccatcatagacccagcaggacagacccccccagagagccagtggccttcttgcccataactcgttggtgctggagagctgtgggtagcgtagcaagtgccactgagcatcctggaaaccctgggaggggtcccggcgagaaagagccatcaccctaagaagattcaggaatgggatgatcatggggttcagggtgccccaacagtaggttgaaaatcctgtccctggccaggaggcagggaagtagcaaccttattcaaggggaaaaaaaacctcctggagtctagatacagtatcttagtagtaataaaagcacgggtacagatttactggtgtcggagttttaactgtaatactgtggaatggtaggttattttgtgttcaagagctacatttatcacaaaaatgatgatatacaaatcacttccatatcacaaaatgttcttggtcaaaattggcttgaggcaagtgatatcttcgagtaaacagtatatgaagaccatatcttaaaatgatagatcacctaat

SEQ ID NO: 63611 - DNA, 1049 bp, Homo sapiens
caagtaagtgcaagaatcaaaggctttgagtaggaacaaaaggctatgttactttgtatccttaactaagaattttgttgttcaagaaatcctgggcttttgttggtgtagctctgcaagtcagcagcacccgggttccacccggtgcttacaggtcacgagtccagtgacgctgattgaggtgtgtcaccaaatatgctgcagatccggggccagcccacctgggcctccggccacggtctgtgcccacgtgtcacgaggcacatcccgggtcatccggagagggacctacaaagtctattttcaaaccaagttattttgtgaaatattgtagtgaacttatcaaaactggtgaagttgatgaagtgaaatgaaaatactgccatgaaaattattttagtgcaacataatgagttctgtttttcatatctggcagatattacctactaaatctaatctgcaatgctgagaattatgccattttttatgatttgtttaattttgactgaaaaaaattgactattcatcgattcttgacctgcgagtattgagggaaaaatttagttaataagaattttcatgaggtgtaaatttaaatgtatgaggattctgcctatcctttaatactatagacattaatttaaaaattctataagggcctgagggcctggggtgtctgaagaacagaacatggaggcagttatggttgttaactggtagacaaggtctgtcaagataatataggaatattttggtgttttccctatatccttggttatatgtggctgagcataattagaagttaaatttgttttagataatctcttcggctgtgaaatggcatcaatacacttaagagtaacaagtcgaatagaaatcagggcctgttgttagtgtatgagcacacaccacacaaagtttcttcttggttccctatttccgcagttcaaagggggttttaaagaagtcataaaaaatgaaggatcctaatattgcagttggagactgagagtgaatgacatattctttacacacctcaactgtcaaca

SEQ ID NO: 63612 - DNA, 2155 bp, Homo sapiens
agattaacactgaatacattaaggttatttttcaaacaggttatagttcagagaaattaatttaaatcagttggcttacagaagacccagtttagttttaatttgccttaacagccagggtcttcctgctctacttacttagacgtcctcagagtgtcttctgagtagttggctaccatttgcatggcatgattccgctctcggagcttgatatctttccagattttcagaatttagaattaagtgtggaagtcaagcatactgaaagttttttatactatggatgctgataaatagaaataaactatgacaaattaattcagaaatctttccactcagtgtagatattaagttgtggtcatacggaagaagtcttgaaacacgatttacagtaaattatgataatttgggatagagactgtgccattaagagttgttaaacagcatgattcagacagctctgttttttccagtgactgcctattcctttattgtatatgtgtacccaagtgatgctctcacatttatcttaagtccctattattaatatacatttaaagtctcccgaggttttgtttggtttgctttggtccttttttggagtgatttgaagcaaagttaattgtggaacctatttatagacatctttctatacttgcacaagtctgtgtataatcaattctgagaagtagaatttaaaatttagtgctttgaaaattgtcctcattttaattttttggattttaattaggtaaggttgaacatttttccttattttcattgattgtttggggttccttggtaaaatgcttgcttttgtttcctgttgggttattttgtctttttcttattgatatgtgagaactttttgcatattaaagaaagaccatcatttctattttgattttgcccagggaatttttttcagaataagaaattcaactagatttttaaaaaacttttaattgggcaataatttcagatttacagaaaagtcacaaagattgtacagatccttcacccaggatctcccaatgttaacagcttacataaccatagtacatggtttgtcaaaactaggagattaacattggtccattgtggtcagatttttaagtcccttcctatggcttctaaatttatgaggtgcttacacaaaggcctttttaaccttaagattttttttttgttttgcttttgttaatcatatatgtttatttccttctactttttaaatgttgtttttcatattttcatctctatttatttatttgaaatgtgttttaatttaaagagtcttggttggaacctatctttattttcatctaaatgctaactaaccaactttttcagtatcttttgaattactcgactttgtgtttacacacattttacaaggacaacaaaaaagtgcctgctgattgactttgtagtcaatcataacccttgaccatattttttttggtggtacttcatatatgaaagagtataaaatctaggttatttaatgttgttataaaattattctaagatcaccgaatggagaatacttagattctaaataagtgactttgtgagaattgaatttttatatcattaaccaattctaagacattttaaagaaggcagaatgatctaacccaatacttcatatacttagttttactgtggaatcccaagggcaacatgtcccccgacccaacgacaaaataacatatattcctattaagtttagggattgatggagcttgtaattgttaatttgtcacagatgatactgttatttatgcgcagttactgtctccctttggagagtttcatgtgctaaattttcagcaaatagtttgagcctcacctacagcttcttgaccttttggggaaaaaactatcactttaaaagaccttttacgagtgagcaaatatatgcttttctgttttcacagtaactttcagagaaacccactggtctcagcatggcctatgccttggcagccctttccacccgtagcaggttgttctttacctttcgtttttaaggtggcttccagttcataccaagctcacatactgtggcgaagagctttctgagaaacttcataagattttgctaagatattaatgaataatttagtatattgttgcatatatgactgag

SEQ ID NO: 63613 - DNA, 1048 bp, Homo sapiens
ttcctccttcacatttgcttacaagtgctccttttttgagtgttgggagcacatctgtgtatgaaggacatcattcggacgctttccagggtggtgggaagcagcctcccttagcccggctacgtctcatgaatgtgcgtggaccccgcctggccttctgcccgacatgtactccaccccgccttctaccaggagccaaggctgtgaccattgtgatctgaacaagccgttgagagtgtgctctgttgtcagtgaattagttcagagagtccctcctcgtgttatagttctcatgaccactgcgcagtgttgctgtgctctgcctctgacgggtggctgccaggcattgaaaaaataacatcgtaagtccttactgctaacactgacttttaaaaacatttaattgtgtgccttttaaacttttgttctccgtacaacgtcttcccgatatttagattttaacttttaaaagacagttacaaattatttctaaagtataaagtctggttgttgtttttttttttgatggagctgtgaggaggaaaaaaatgagatatagaattttagtgtaggtgatcttgtgctttaggataaaaccatttttctgttactgctttttggtatctaaatccccggcagtttcccccttcggataaagcatcatgtaggttttagcacaccagcgggttcctggctctttagtgaaaaggtggctctgaggattgccctgtgcccgccatgaccatcctggtggcttggcgacttcatattgactgcaggccctgtggacagaaagaattatttcttttttagagaaaagatatttatgaccgaaaacagtgctaaaaacatgagaatattgatcatggttttgagagatgcttgcactgaatcacttgatatacctaaatatcggctttattctatcttccctaaaagacagattgccaacacaaaagatgaaccatcttgagggaaaaaaatcttatatctttctgataggctgtcttgcttccttccataacaatggggagaaaagaagtctgtg

SEQ ID NO: 63614 - DNA, 1788 bp, Homo sapiens
ctatggcctgcggcggggctgcttaacgctcacatgggtggtcaccaaggaagggctgctggacaggcagactcccagagcagttgctacttacaaatccagcttccagcagggagaccattaaagggctgcttccacctccagggcgggcagtgaagcctccagctgggagccgcgtgaaaatcagagccaatgggagctggcagcccatccaccaggagggtccagaagacagaggcagaggacgtgggatctggagcccaagggaggggtcccaggtgggttgaggctggagatggcccaggaagccctggtttggggtgagggtgggcgagactgagaggctgctcagacaggatgggtggttgaatggagtgcggatcatgagatcatcacagggccacagcatatcaggccatgggttccctgttaattcctctcccacctcgaggaccggagcttctgttaggcaggcgggggctctgccgcaggcccacattctctgctaattcccttctctcctaaaggtttcagatctgtctgtggtcttttgttttacttggaaacacatgtttaatatatcttataaaatacgtttaatataaaaatatagttcactttatagttcagttgctttgagcacatttagtaaaccaagatgtgcttatatgaacttttccctgaaaagtacctggatcccagagttctacatggattgaatacttatgtttcgattttaattccttagatggctaactcagcattatttaaattttaataaagagactggatacaatgtgagcgaatttctctctatattttgtgaatctctatcagagcaaaataaaactgtttctgttttgcaatgaatagtttctagccatggaattgctggtcgaggcaagaaagtatgaatcttatttttgtggatctagccaagaaaaagaacgtaaactttgaaaagtatgtcatttgccattcacagtctaatgagaaactcagagaggctagaaactctcaataaaaattctgatatcagcatttaagatccagcaagatagggtatacgggcatttaagggattcacaatccacagtttactggcactttaaatgctgtgaatcttgtactggcaatcacaatcttgattttattaccgagggggacccctcgtgaggaatatgtcggtgcagtgtgcaggttaaactgtgagctgctccagcctctctcccgccggctgacggaaaggtggtcaaattaccttcgcaaatctgaagggtgcttggctccagcaaattggccatttagtcaaaaagtgtctgaaaatgacgtagtcgttggaagtgtttgggaataagcgatgagttggccaaacgcagtgtgttttctgtaggcaagcacctgtggcagctggcagggatgggcaggcctgcagagatggcttcctgggggcgcagcgtggtcaggcttgagggtggtgacagtgcccccaggagaaggcgagactggccagaactgggacgggcatgatgagtggccgtgtttcaaatattgtccatttttaacttttgaaaatgccaaaagcaagtatgctgccttgtggaatctgtgcaagcagttctttccaggctgaccttgaatagcctgacagcagagcgaggagtgaaatgagcacgcctcaggctgtggtccactcgtgcgggaagacatggacctgctactgctccctgccctctgtctccccaggaaaggagcattctggctcagagattctcaaactgggtcttc

SEQ ID NO: 63615 - DNA, 1010 bp, Homo sapiens
ctttccttttgcataagaagtctgaggggtcctcagatgttttatcttcctttacaaagttgtgttgtcaacaccaaggaaacagtcttgattctgaacaaggaggtagcctgggtactgaaggtgaaaagagctcagatcagaagtttcttggaaagagatttaaagatttttaaaaaatcagattactaaggcatattaaaatatgttcagtcttacactgtgttctttgaaaccttgaattactctagcaaaaggctcagagggtactgctatgagaagctggatcttggacatctctttcaaatgcctcggtacctttcaaagggctttggatggaatgaagggacaccattgggtctcacagctttctcctgcctaacataccacagcagtgtatgaaattgttcccatcagctccagcgcgtgaaagacaatacgaacagtaacacccccaaagaaacagtggggctggagacagcagaatccttggagggttctctggctgaagaaatctctctcctaccacagatactgtccccagagaaggtgcacctctaccaccaatgccctccatcctcagttgacaaggattcaaaaagtttgttggtgacgctgacatgtaatattcccctgcgagttacacacatccaggtgaccttcggaccagcattgccggcacacccgtcacgccatcaacctgccaggctggagaagaccgctcagagcttttccttgactggggagaggggagccggagcagcgccccacgtctcacggttcacccctgccgtctctcggggccttccttcaggctttccctgtatcctcagatcttcgccagggtcctgtgatccagtgttagttcattccatgtgtcatatatgaatgatgtcatttgaatcatttcaagtccttttgtaggaaaactaaggcagaaaggccagcaccacaaagaggcatccagaattctcctcggcacaggagggtgcagccatggtgcctttgag

SEQ ID NO: 63616 - DNA, 1050 bp, Homo sapiens
ttgacattatgtgagttttagcatggtattttctgcattgggctatctgtataatgtcatggagtggtgacataaataatgctagacttttccaatttatctaccatcccagccccctccccaactcagtcatatgtggaaagtcagtttctttttccatttattatagttgttaactaaagattaaaattttacatttcattgcactgttcataaattgtttataaatacagtgaaatctaagcaaaccaagatgatcttggaaagaagtgttctgtatggaatttatctgttcagacccaacatgcacacccttccttcgggatgtatcaccaagatgaaggcgggcagatctcatgggcatgagcttgtgtgcaccgaggaagttcctgcaagcagtcctgctgcacctgggcgggggacaccctgtggagaaccacggtgcttgagtggaaggagtctgtgtctgtttttcagaatgccttcttgccttcacaactaatatgcaacaaaaataataggattgcacctgcttttgatgcctcaagatatgcagaaatacatttccctcacttgagcatgtctctggatatactaggacagctaggtcgtgcttgcgtttcaggccacggccctgctcaggagtcaggttcagcttcttgcattgagtcttatccgccacagcccaactttaacagtggatgatagccaggaaagagagggaagcatttttggagctggttgtggttttaatgaggcatatacagacactgctttagtggatgtaggagtgaggggggtggggtgtagtggttgaggaaggggcttagtgggctggggtgaaggtctctgctggagatctaggagttttccctaaatcctcatctgatcttcctctcctgtagattgttaggataaatgagcaagaagattctgcgcaacaaactgataccttgctttcttttgtgagcagcagagctggggcgtggagagggtacgtccagtgttggatgtcaggaagttcacgtcccagggtatctagtacatctg

SEQ ID NO: 63617 - DNA, 1615 bp, Homo sapiens
agtggtttcagatcttaatcctttttcctagtcacctaatattctaagatgtggctatacaaagcatttccaaccattgtccttcccccctcaaaaattatggtaataagcgtccttcccaccccacagataatactgcagtcagtgcagacatatgcttgtacatgctttcacacacgattcactgaggccggcaagtctgtgggagggagttctataactgaatgtttacacagggtgtgcatatctttctctttgaataggttgtttctatactgtttgtcatgaaaactcagaccattcccattttaccatcctttcttcaccagggagatagagtgacagagcaacttaattgttgcccatctgatgcggatcaagtgtcatattaactgtgcatatccctgcaacgtttgcacactaatgtacattggtctttctagatgcctgttgttacctataggtaagtaggtaggtaggtaggtaggtaggtaggtagatgtctgctagcaatttgacgggtcatttctttttgaaggataatgaacaaatttgaaacctgtggcacagcctgggacctaagtctgtgtggtgcagggagtctaacttctgtctaagtcagtagtatctccagggatacagccttacatccactgctggctgcggcttctctgagcgacccatctctgcgtccgcccatccatggctgccatctcgcacaaaattattttcctgggatggtcccttgagttagttcgtggttaggggtagctctcaccttagtccctacaaacccacctgaatttcctttgtctccgagccacatgggaaggagactgtggaaaataaaccaagagattctctagtaggtagagctagaggcaacaggttaaaatcacatctttataggagaatgtttggggaatgcattcagcagtcacccattctcattaatagacccagaaaacaattaaaaaatacacattgtgatttggactgggcagacatgccgactgtggagccatttcttaagagagggaggttggcaggtagctggtgagcctatttctttgctcattgagctagcaagagcaacacccattactttcattggattacttgtttgaaaattaaattaatcaagtgaggtaaacatccgtattgcctcttagcacccccataggctgcccgcaaaatggcctgcgtgggtatcctaagagcaggaattggctatgacctgccgaggtggccaactcagatgtggccagttttccatacaagtatgaagttcctgaattaatgggaaacctggctgcattgtctgatggcttactggcaagcagtaattagaaaacatttttcatagtggaacctcaggtttagctatccagagaaattggatatttcaaaatactcctagttggttagtgaaacattagtattaatgacaaattaatattaatatcaatatcagagttgagtatgtagcctttgggaagagaagggaaagattttaaggaccagatttaagtagcctccatatgcctttccttcttggtggcatttttcatctgaaagcattttttttttttttagctcaaaaacttagatgtga

SEQ ID NO: 63618 - DNA, 2481 bp, Homo sapiens
catatcaaatactgtttctcttccagggcttgtgtgtgcactgggaacagcaacaaaagttgaacagcaactgggtggggtttctttatgtcttctgtttaatcagagtttcctgatggtttggccacttcattctcctttggcttaaggggttctaagccatggggcagaccttgggtggctcactgctcttggaaggagggtgtccagccttcctggcagtgtggagatgagtaagggaaacactgcaggggcttctggcttcctggatcctgcccctcacctggggactttgtctaagtcctcatcctagcaccacctcgagatcgattcaggcctccccagcagtggcagaaatccaaccatgggagctagtgggttccattactgtggagtagggaagaagacatatgtcccttctaagtcactttaatttggtccaaaataaataaccaaagtccttggggagaccgtcagggaagtatcttcccacatcacacttggtctttgcaagaagtgctggtgggcgtgcagggcttcttgacacttcgcagcaacgtaaggatgtggtagtagagtgcttggtgttccagtggccactgcaatacaaatagagtgagttttgtcgccgtggtacattacagccatggaaattccccgtagttcattggtccgtgaccaacaaaaatccccctagactaacaattaatcaggctctgctgagcctttgactggcgacagttgcagatgtcacatcatgcgaaaagttaaatctcagctttccccaagaaggaaaaaaagtttatttttacagtttatggaactagttttccttttgatcaaatgacctggtctttaggggagaaatattttcatttttatgttagcaagtgtgatacagaatcatatacatttaaaatcttcatttttattgctttttttttaaagtacaaaattttaatagtaatagtgatttcaagaaaatgttgtgagtgtcactttactagtcaggcatgttgaaaaggaacgcgcttcctgaaatctccaagcgaggttggcatttgagacctctgggtacgtgagcttaaaattaatataagtacctgagcctagagcccaggaggtttagaaagactcagagatgcgcttaaagataattggtgtgctcctcttgtgagagcggattcaccaaaatgaagttaaaatttgtttgggaagttgcttgtactgtgccttgtgaacttacaaatctgtgtcacaatccaaagggttgagagccacacaaagcaaaacagatgggccgtgtgtcgtaggatttcctgctgtcctttcggcttcaggtaactaggacttgtgaagcacaagatacatgggaggcaaatctgaaaaggaatggtgagtgcgccccacgtgcctgggtaatacctgagtgctcccggcattacctgggggctgccaccctccctccccctccttcctttccagctcaacattgaggtgaactttttaccatgatcgatgtagctttctggtgtctacacagatttctggatggcctcagaaatgtcacatactgcttcgggaatgtctgcaagtatatttcatacattttacctggcaattaaaaaaaagtcatctttaagatattagcatgtggataccgaggttccacacaaagcaaacaaagaggtcattcttagcagctaattttaaatcttcaggcaactatacgaacctatgtcacagtctctcccaaaatttattataatgcccttgttataaatttagaatatttttgcaaactcatataaacaagtaattgatgcgactaaaattcttgtcacatatttattgcactatcagctaaaatttttaagtgacaagaaccaaaataatcgttaatttttatagggcaaggatctggctttttgtctgacacaaagctgtataaaaaactgcttctgattttatgcacattgtttttagttaatgattttcagctgtttgttgtttctctgatagcatgaaaatgtaccatatgctcagcccaaagacagatgattagcaagtgagattccgggcagctgtctgactgagcgcgttgggttgatagcattctgctatcataattagcttaagctttgggttaattaactttctacctggatatgcataataatagcaaactgcaaaaagcaagaagctttcagtacatcaacaacattgctgtcttttttatttggtatttcaagagcatattagaatttcaagagtgattaatcctgggaatattgtcatctactgtagattttatttgcaagccagataatactgaaacaattggaatctattatagagcagaaatagcattttaaaattgtaattaaagtttctaaaagcaattgctaatttcaaatgcctttgttggcaagaatattaggcacactgcttcttgtatgggcagcttgtcgggcacaaaaa

SEQ ID NO: 63619 - DNA, 3194 bp, Homo sapiens
tccatcctcctccttgtttgcatgatttaccaaagcactctctacgacgctcatcatctgaaggggctgccggggcctttggagagcacaagctagtgaagtggatggtggatttggagtaaaaattgtagtttacatttcccaaagcaccagagagcctagcacttaattctgaaataagtcatgcctgttgttacactcagaaaaatattttatcttctgaaaaaaaaattctttacatatgcagtggatggtgaagatttggtggcggtgaatttgccctggctccagaggactttacttacagaatcagcagtcgtgaaaacgtgctttctcagatgtgtgacttgtggtcagtctgtgggctcaggagcacccatttggtcaatccatgcaagttttatggggctgtcagaagccatttttcaaaattggcttcatctgaggacacgtggaggagccactctcttggtgtgggtagtgaaaggagtggctccctgtggctctgtcttgggagttgggggctgcagtggttcactgggaggagggggtgcccctgcaggccccacctgcaccccacctcgccgccccaccccctccccccggctttcaggctgtgacctcaaggccttttatcattttcacaatgatgtctccaacagacctttaccccagtctcaaaaaagatactgccagagcctgcctttgctttttgtttagtctgcttcgggctgcgtcaataaagatagcagaggggtcaagagaaaagaagtgaacggaatcacagttttggtgttgaacccttaaatgggggccccactgtctctgctgtgtagcaggcacaggattatctgtctgccttctgagatttcttttaatgttttaccaaattaaacatgaacaatttcaggatgcaaaaacttgactgcatcttgttgtttcttaaataagagcactttaagaaggcaatatatggagattcttttgtgggaaagatgtttcaaatgggttattactggccattgaaagaaagaaaaagaggaaatgcatcgaggcctcattttttggcctgcacatttgattattttattttaaatgccatttcaaacatagtgtaaactaatgatattattttttaaaaaacttactctactatttgcggtccttgatctttaatttcttttaatgtcaaaattatttatttggccagttccattccagatgtgactgttgagggcacattaatttctattctgttttcatgggcccctgtccccatctgtacatcatttctgacttccgtgtgctccctagggagttcacttattcatattgtaggtttcatttgctgtgtaaacagaataaacagacaatgcaaaaatccccacaataccagaaaataattcttttcaacaacatagtggatcatatttaaaaaaaaacatggaaaatgcaatacatgtgaagcccattttttccactttattgtcctcccgaggaaaggcttgtgttaccagtgcatttcccttgaatttgataagttcatttttattaaaaatccatcccaaacagcattttacgataattctcaaacacgtgttgtggacatttctttgttttgcgtattagcttggtcttgcgggttaattcggaatgtgttactcaactggtatgtgcttgcgtggccaaaaacacccgttgtgctgtgtgtgtgtgaaaagcaacattcaagaacggtgattttttttttttgacatttacaaataaagagggacatgagttatttatgctccaatgttgctgcaaagtccttatctccatttggcactaaacaaggatttgttgtgggatttgtgagggctgcgcagtgcctctgtgctaagcacccaaaactctaggggactggcactaatttcctctctctcgtaaaacaacgtagtattcataacaactcaagaggcttgacataagtaatgatggcatgtgcaggcgaagattaccacccaacagtgtaatcaaggtgctaggtactaatgcaagttaaattgagacaataatgccgaaacttgcattgtgggattaggagggcacttgaaatgctgacgtgagcacatcctgcctgcctgcctgtctggcgctccgttcctgtttatacttaatgacctcaaaatttgtatgtcgttaacaccgtgtactgaagtgggagagaacacggtttgggagggagaagactccctgtcttcgttgacttttgtctcttttggtaattggtggcttttcctgccgtattagggagcaaagcgtgcagcggggaggcccctgaggtctctgtaaacatgctgtgggcaccgagggcctccgcacccggcgctaggcagtaatttacatactttgaatgaaaagtcatttgtgcctgcaaaattgttattgctggaagaaatttaaatactagtcatatggaaatttgaaataaagtcatattaaattttgatgctcagatcaatattgtggagccccggtaattaaagtgggtttgtttatttggctccttataaataaaaagggcttaatacagactaattacacagaatctttcgtctacggtgggataataatggcagcaatttaaagtgatattaaatgagaattaataaaggaatattgagtcactttgactgtattaagctgtgaaatgattcctcatctcaatttaactttctgtcttgagcataatgtttgataagcaatgcatttttgtaggaataatctataacagtatttgactgcaatatttaataacaactagacttgtgactttatgttgtttttaaatgggctgggaaagcccgttttttctctgcaaatttataggacaacttagagggttcttgccctatggtagcttcacaagagttctgagttggcaccctccggtttgggaggtaggtggagatggctttgacttttgttcaacttacaagggagtaacttcttggaagtgcagtccgggccagcagaaatggtcatagtaggccatggtggaaggagaatcagaaccacgcgtaaatcctcagaaggaagagggcagtcatttttttttttttctcttggaggaatatcccgggaagaattacctggaagaaatcagagtggttttggaagatggattgtcggataacattttaacttaaggg

SEQ ID NO: 63620 - DNA, 1756 bp, Homo sapiens
acttgtgtgtaatttctttccactgtgccgcacagcatgtcatgtccacgttagcatttctgcccttttaaagggtcctgctgaaggtcaggacctcacactgaacaccctttttatatatattacaaattgctggaattgttcattaatttctgtctttgaaatgccatgtcaaccctctaaaggaattcgcagtgccagtttcccttggacagctgctcaccatggtccagtgcgaatttctgatgaaattacaggtgcagggaaatgcagaattagaaatatatctgatgttgcaatacttgtgaagctatagctttgttgatgacaggacaattccatttttgacagtttaatttactgttgccagtggacaagagcaagaggaggacgtggggttagccacctgccccctcgtaccgtgtttcacatgcgaggttgccaaatcatgactccctcaacctgtcgggctcaaatgagaaggttttcagctgggaaaatggaatatatcagtgcatgtaatattgcctgacctcataaaacaaaagggaaaattgcagattctgacagccattatgaatcttgtatcagcatccaaaacgacttggagccagggtatagtacatgtttataatagaaaaaaaacggggttgccacgttgacttgcaatatggagcaaaaaatgacttgtcataattcgttctcagatgttaaagaggctgttgaatttactagtatatacacagaagaatgcgtagcccggagcagagtgtggaaatagtccctacacagaggggtctgctgaagttagtcatcgagttagattagaatggaaggcaggaggggaggaactccgggtttgcgccgcagctgcgtcggtggggccagatttctcattacaagatgtactgaacctttccactttcacccactgtaaatctataagtaatcaggcttctaaaataaagcaaacaaccttgttttgagattatgagaatcatttgaattgaatgtattctgttggaaaactggtgtattgaggcatggctttttatcttacgcttaaaaagttttatttatattaaaataaggcataatctctctgcgtataattatacgctcttcgatttagtttttctatttaatagtctattccttcaccttcttgcccatttctttatgttattccttaaaaaataatttctaagtacaataattgtctcagctgcttttggtgatttctttgggaggggagatgtggagtgacagtccaggaactttctgcccaggggcaggaggcccagcgcgtgctccccagctgaggccccgtccgccttggccactccctttcatctcccgggctgaatgcggagtgtggtgacttttattttttcctttgctattggtttagaatgagatgtagcagttgatttaagtgaagtaaagcatgcttacgcagtacactgtgtccctgtcggggcctgctctctcatgtcacctgccggcggtggcatggagacaaagccttctctcctctcttactgctgctgggcctctcctgggcaggtccgggctcagtggcttgaacaggtgatgcagggaggggcagtgcctgtggccacagtgatggcacaggtggacatgatcctgagagtccagtgggggctgtagcacaggaaaggaggttgtctacagcctttctcaccacacctttccctcctcagtggaatctctggccccatctggagtccctgga

SEQ ID NO: 63621 - DNA, 2262 bp, Homo sapiens
aggcggcaatggtggaggcgttggctgagcagggcctttagaaaaaggcccgggagcttggcagcagaaaggagggtggaagtgcagaagcatcgagatgcccagtgacgtctgtgcagtttggattttgctgttgaaaagcaaaggagatgaatagaaagctttaggcagacactgagagtttttgctttggaggtattttgatatatggtaaactattgtttggattattttggagtatgctttggtctattattaaatatcccagtcaaagatagcagatattcaatatttgagttaggatttttcaaatacttagaatatttgaaaatatttttatcattagaatttattgattttttgagacactatcatattctaacaattgcaccttattctttggcggtatcactgtcattgtattaatggcaaaggcttcaaaatagcctgtcaggcccatgtcatctgcaagtcaaccctcaaccctttctctctaaactcctctcctccagtttgccaaaccactgtgctccagccatgctgccctccttgctgttctggaacttgccaagtatgccccaccccagggccttggcatgtgcctggaacacttgagcccccaccctgcacatggctggccccttgttttcttcagctctccgtccatatgcaatagcgattcctcatgcccctcatagcacttctggactttttccttgctctattttttaccaactaaaacaggggttggccaaccatggctctcaggctggccacctgttttgcaaatacaattttattggaacacacttataaagacttgatttcttatggctgttttccctatgatggcagagttgaatagttgcaataaagtctgacctgcaaatctaaaatgtgtgtaatatctggctcattaggcaaaagtttgcaaagccctcatctaggatatagtgcattcatttgcctctgtccctgactggaatgcaccctcccttaagacagagcctatctctgtttggcccactgctgtatccctagagcctacaacagtgtctagcacaaagtatgttctcgtgagatacttgaatgaataaatgaacaaaagtgaaagttccagccaacaggatgatgggcagtagttaactatgcctctaattctggcttaaactttggtatttcagcctttatgtatgttctattttgcagtttttatggtgcacaggatgaaagaacacatcaactcctagggagtagaggaggcctggaaatagactcagatgcagaattgtgtgcaggtggctgttggggagtgtattcattcattctcacactgctattagcatctgagactgggtaatttatgaaagaaagaggtttaattaactcagagttatctgggctggacagacttctgcttctggagaggcctcaggaaacttacaatcatggccgaaagcaaagggggaagcaaacacatcctcatggatggagcaggaagaagagagagagtgaagggggaggtgccacacactttcaaacaaccagatctcttgagaactcactcactatcatgagaatagcaagggggaaatctgcccctgtgatccagtcacctcctaccaggacccttctccaagactgaagatcacaagtcaacatgcagtttgggtgtggacacagagccaaaccatatcagggagtattcccaggatacactctgtaaggaagtgcatactgcaggatcgggcaagggagaagcaggggcttgcattatgacctagttgcagttgaggtctcatcctgtcctgcagggaactctggagagagaatgacctgtagagtcatcccaaattgaggccgggggcctaagtcttggctcccgggtgcgctctgggggggccataaccttggatgagatgcttctccctcgagagcagcggtgaagtatgcacctgcctctgagctcctagagctggggtgtgatgcactggtcctgaaacaaggcctgggcaagtacccagaatttcagttgtcaatggaaagagtcaaactctgtaaaatacttatagggatttattctgagccaaatatgagtgaccatggccagtgacacagccctcaggagatcctgagaacatgtgcctaaggtggtcggggtgcagcttggttttatacatttagggagacatgagacatcaatcaaatacattaagaaatacattggtttggtccagaaaggcgggacaccttgaagtccag

SEQ ID NO: 63622 - DNA, 1026 bp, Homo sapiens
catgtacgtgaatatcttgtttgagaatgaagacagttttgtttcttcctttatactatgtatgctgttagtttctttttcttactttattgtactggctagggtctccatactgcattcaacaggagttggggaagtaaacatcctctgttcctaatcttaggggtgaagcactcagtattttactgttaaatataaatacacattcttgtaaattcccattgaagttctattcttgtaggctgagagttttattacggaagggtgtgtcattttgtcaggtgcctttttgcatctgttgtaatgtttatgtggtttctgtcttttattctgatcatatggagaaatgcagtaattgattttctaatgctcaacaaaccttgcttgtctttgataagtgccacttgctttgagaaatgcatgcatacatctctctgtatatatatgtgtataattccagcattatttctatatacatagaaataataaatatacaaataatgctggttatatttgctaatattttacgaattacgggatactggtctgcagttttcacattttgtcttttttaggctttattatcggggtaatgctggcttcataaaatgaactgatgtattctctcttgtactgctttttaaaattgtttaggattggtattttttttatttaagtgtttaaaaacatctgggcctggaattttctttgtgggaaggttattacttaatttaaaaaatatatgcaatactattaagattttgaatttcttcatgactcagttttggttatctgtctttcaaagagtttgttttatctaagtggttgagtttattggcattaattgttcgtaatcttctcttatccagttatccctctcaggtctctagggcacgccatgatgatgctattccactgcccttttttccattcctggaatggtacttcccaccttctaaatcagtcttgttacaggtttattcattttctcagttctgtattttattgatttttatttttttgtta

SEQ ID NO: 63623 - DNA, 2545 bp, Homo sapiens
tgtactgtaattattgtaaatggtgattacactgttccatgtgcatttgcgagaatataccctgccattgtgtgcagtcttctataaatgtacgttgggtcaggttgttttggcgtgttgtgcaggtcttccctatcttctgactttgtctccctgttcaatcagtcgagaaaggagtgtcgaagtctgcaactcgaattatggatttgtctcttttcccctttggttctgtcaactcttgccttgtgccttctgtacatttgctagtaggtgcctaatcacatgagatcatgacgtcctcctgatgtgctggctccttaacagtatgaaatgtactctttatctccagccatttttcttactctgaagttactttgatattaatattgctagctttcttgtgatttgcctatgcatgtgttatactcttttccatccttttgcttttgatctatttctttatatttatagtgtgtttcttggaaccaggatatagtgatccagtatgcaagtctgtactttttatttgaaatgttttagttaatgtactcatcaataggtatgggtttagtctgccgttttgctgattttttcatttgtactttttattcttcattcctgttttcctaattccctgccttcttttggattgaatccttttttgatttcattttataattactattgcgttattagtgctacctttttttaagtagtttgtttagtacagtactttttgttagaaattccagaaatgatggaatgcgctgtatccacactgtccagtatggcaggcactggccacctgtagctgttgagcacttgacatgtgactcgggcaactgaaggaactgggtatgcaattacgtttaattttaaataatttaaatataaatagccacttggggatacctgctaccacactgggcagggtgactgtagggtttctaatattattgttaacttctcatgatctacattgaaaatggtgttctgtgacgtcacatgcaatgcaagaccttcaccacagtgaacttccatttgccccttgaagtcccatgtacacggccattgatcttacttctacatgttatagactctcaaatacatggttgtgactttttcctttaaacagtcatttgtcgagaaataatcatttagaattgaaattgaaagtgagaaagtactcttttcacgtacgcattttgatgttctaaatatgttgaaagggcgcaggggggtttaatgcccttcatcagatctgtgctaccttgtggacagtaattggaaaggatggggaacagggacgcacgagtgggtagatgaatgcgaggctgttgaaatggttccatggtgagcagtgcatggttgcttggaacaggaaggagcggaggtgttaagaagtggttgaatttgggatctctttggaagtatgatgctccagctgttatcagcagagctgtaagtgaaatgtactttgattgtttgttgaacatccttgccacctttcctatcgaatttgcttttcaaaaatagtgtggacattaaaaagccatccccatgtgcctaatttcaattagaaaatgttgaatcactgtgaatttggtgagtcatcctgcatgtaagtagagctatccatctaactcttagaatttgttaactattaagagaggaagacagaaggtaatatagagatgactatttatgagtcattttatttattcattatccatctaaagagtagcaattgattgtatcacagaacggtgtttgttttacatcttttgattaggagcagtggtttatggcatagacttgcttaatttcctcctgtttcttcctctggagtggataactgtttcacaacagaaggcgataaaagatttctggtttattcattaattttgctttgagacggaatacctgatctcaaggataagatgctgattggtatgacctgaatcgaatgattagcagtatgttgcccttactctgatctccccacagtgtgagagattttctcatcttcgcatcagtttttagccatgttttggtgtttaagcagagatacgattccactttgaaagctctggaagtaattctcagatcacatatattcatctcaaatttgaaatctggagtgtttgtcttgaaattaaattgtggtattgtaagctgtcagtggcatgatctgtgctggaacctgatgcggtctagtttacacggtattgaatcatgtaagtatctcatctttcctctttgaattcagtatgacttcacataggtgaggttagcttttaagtgtacacagaggtatggttaactatcagcagacttcagttatcaattgctgatctcagaaagctaatttatctttagtgtccaataacattacatggctttctttctttgttttatgttttgtgtatatgtgcttaactgtttaaataagttctggattgcatccaaataaggtttgatatgctctcattaagaatatgatattgtgaataaatgtaatcctgactttcaataaatggcctgt

SEQ ID NO: 63624 - DNA, 1947 bp, Homo sapiens
ctcaaagaaaaatctaggcccatacagcttcactgttcagttttatcaaatagttaaggaagaagtaattccaatcttatattagccctttcaaggaatagcagaagagagaataattcctagcttgtttcataagaccaacacaaccatgacaccaagatgccaagatgtgtcaaggatgtttgagaaatggtaaccacagaccaatgtctctcatgaacccaaattttaaaatcctaataaaatattagaatgtcaattttacaatatagaaaaatatgtatatttccagtggggtttattccattcaaaaatcaatcggtgtaattctccacattcacagaggaaaagaaaagaactttatgatgataatgatcatagtaaccaaaaaaagcatttgacaaatttcaacatccattcacgatgaaaatgcactgcaaagtaagaatataaaggaaattctcttacatgacagcgtgtatacgagtgtgcacacgtgtgtgtgcgtgtgtgtgcatgcatgtatgtgtgtgtacacgtgtgcacctgtggttttctctccatgtttcttccagtactgatcagggttgcttgttttcaggagttttcaagtgctctaccttcaagttttccccagctaaatctttcccatttctttctctaaatccctttttgatatttgcagttcttttcaacttaccaccaatattttagtcttgattagaatcttcccagaaaagacaagttttccttctgattcccacatgtcccttcagctcgtgatggcgcagaatatgtttgcttgccagttaggggaacctgaggctgccttcctgggcagagtggcgatttgtactgggccaacggggcagccactgttacttatggacaggtggactaggctctttttcatcctgaggaactgctccgcgcttgggaagagccactggagtttatcagcctgcgtgtaagcatgtgggaagggggatcaggaacatttagtagaatagtccgtgctccaggtgatcagtccccacccacccgcatgcctctccttctccatcccacccgcattttgggtcattgggggattaatttattcgtgtctcgtaagcactggcagaacaccacccgtgtgaacagcattggtgaagcctggggagttctttttgagacttccttgagcttccggcagcacgtgtgagtttcgggggtgattggaatgtttctccctggagggaggcctgatgccctggagctggctccagcccgagccccgcggcatgttctgcctgctgccgcctacctgcagggagacgcctgagctgggaaggttctgagggttggcagggtgctctgctgtgctctttgggaggatccccttggctgttctgcatgcccagggccgtgctctccgtggaaatctatgttggagacgacaggctccggttccagctacaccagcctgacttccactggacagtgccattttctgcctctgataacaccgtggtgaagcgccttacgtaaagcaacagattttttgttttaagatgcactataattactcttttcagaaccaataatattaacccagtgaagtcaaaactgaattgttttataaactgactatggagctggtgtaaggagatgcagggaaggcttctcatctgagtcggtagcagagtacatagtgcaagaagcgtgggcaggctcccagcgcacccagagatcaaggagagtgatgggtgctgcccgcctctgaggggacggaggcagctgccacccgccgtgtccctcacgctggctttcagaaggcttcacgcaagtgggctcacaggcaagaagaaaagctgtgggccgtgtgtctcccttggctatggctcagttttaatgtaattagaagctcaacttgaaagtgagatatcaaaggaagccttcagttgc

SEQ ID NO: 63625 - DNA, 1006 bp, Homo sapiens
tgctttctgtgcatctccgtgctcacctttctggaacacagcccctgaacagaatcatttggcaaaacatcccagtacaaaaaccagtgggttttacatggggaaagaactcaatgagtccacagttcgtgtcgatgaaggaggcactgcgtgttgggctcaaacgcatctgtaactgtgggtgccaagagacaagtagagctcagactgctgggagcgttggctggaataaagctggccctcacggggctgttaaaatacttgaacttgaattcaaagtcagatttaagctgacttcacccctcttcccttgcttctgaagattctggtttttcacgagacagaaaaaagggtggaaccaggagcttatccccttccttccttccttgcaagcagcagcaacagccattgaaactcaaagacagcaagagctctcttcccgcccactcccagcgccactcccgggggaacccatgtgggaagggctcttcctgacacctctcctgcagcacacagcacacgtcagccttgccctgcatgcagccttcccagctggagcaggtcccaccagcgccctgccaggcggcaatggtctacaccgccattttaccttccccaggtctgtggcattaggtcttcccttgtgagtggctcgtattcttttcaagatactgtaaataatttggcatcatatggaccacttgatgcttctatatgaaacatgccttataaacccttagtactgcatgatttcagattacggaaatatctgcatgagtattggctgcgatatctctgtactagaaatttcagtgctacctctacacaaacagacacactggggatgtgctgtgtgtattgtatgagtgtatcatagaatatttcattgtccgtggtagtacatttcacatcataggctgtctgtggctacttttaaaccttagacatttgaattttccctcaagctttattctggtgaagcgtgggatggggtcttagctcactt

SEQ ID NO: 63626 - DNA, 1791 bp, Homo sapiens
agattcttctcatttgcatcattgaaaaggggtctttgcaatgatgcttatagcccagtttggggtgaatcatacctctaagcaactgtcattgaaagaaggccttaatgctgatagtcattgtttcagttttactttttatttctttgtcttggctctctggctaggcctttaatacagttttgaatagaagtcgtgataatgggcattcttgtcttgttactaaatttagaggaaaagctttcagcattccactgttgatttcctgtgaactctatagattgttttgtggatacccattttcccccagaatgaaagatctttttgaaattatattattctttctttaatgaggccattttcatatttgcatttatgagaaaatgtttaaaaaagtatgtgaacataaattatataatcttttgagtcaatcagaattatacaattgaaaaatagtctacaattaatgatattcaagtatctttagattttaaactcattaaatgaacattgaaagttctgttttctaattatagagccgagtttaaattgacaagagcagccacactcgagttgtctaagtcagaggctttataaacctgttggattttccaagggttgcttctcttgaataaaggtgtttttgtttctcacatattttacattttcaatgacctgtttaggcagaagcaccttttgtcactaattagtgtggtgtgacaagtaacataatgcgtatctgaaaagctccactgggtgtaagtggagttcacacctcttaatgagtgccttcaagagtgtttttgtcattcccagggagaactagtgccccttgaatagaaaactgctgtaaatggaaaaaggatgtgtcttaggagcctggtgtaagtgcagatgggcccaccctgtcctctgactttagggccttcctcaaagccaaggccctcttgtgcgatggggctcttctccttcttagaattcctacatccagagtaatggagacgacttgggatcatgcttcaggatatatgtaggtgctcaacacaggctggtttctgtttttaatttctggcagaatgaaccacttgaaaatgaattttcattacgattttaggagggctgagagtagatgaggtaagagatctgcctagggggcaggatcgaaggaggctgtcactctcagatttgtgcaagtgacttgtgttccccaaattcacatgttggagccctagccctcagtacgtcggagcgtgactgtatttggagatggggcctttaagcaggtacttaaagttaaattggggttgttagaataggccctaattcagcctgactagtgtccttataagaagaggagattagggcacagatataccataggcttctgtgcacagagatgaccatgtgaagtggcagcaaggggtggccgtccgcaagccaagaagagaggcgtcagagaaaatcaactctgccaacaccttgaacctagacttgcagcatccagagctgtgagaaaataaatgtctgttctttaaaccacccggtctatggtattttgttatggcagcctgagcaaattcattcagcaagtgccagccttgcactcgcgggagagtgagtgcctcctgcagtgctcagtctggtctcaggctgaaattctaggtagatgcacattttcccagttggcaggtgctggctcatgctgaaggggaacatatgctcaggattcctgctttatgtacttcaaaaggagacatgtgacatgtttcacttaacttcatctaaatttcc

SEQ ID NO: 63627 - DNA, 1174 bp, Homo sapiens
tcctacagctattcagtggaaggtcctagccagtccagtacatcaagggaaaaaatgattttggaaaagtaagaaataaaactttatttatagaaggcatgattgtctatacagaaaattcccaaaaacctacaaaactacgcaacatacaaaaaccaattgcctttctatatactagcaatgaatattggatactaaaattttaaatatagttccatttataatagatgaaaatgtgcagtagttcatgtccaatgatatttgcaggatatatatactgaaaactacaaaaccttaaataaaataacatttaaagaaatggagagatatactgtgttcttagattggaagactcaatattctccccaaactgatggatttaacatgattccagtcaaaatcacagcaggtcttttcctagaaactgataagccattctgaaatctatgtggaaatttacagttgtacaagttttccaaaattatttttgacaacccatcactagagaatgttaaagtaactgatcatataattccttcaagaatggtcattaaattctggatttcacagtttcttttagttcgtatttcacaagatagaagctttacatttttcagattaaggtagttttcacctttgtgcatgctacatcttggggaaaatactgagacaaaatgactcattggaattatttttgattttttgatactcggctgacaattatagtctgtgttatgacagttatagcctgtgtcatacgtactcagaattaactaacatagtcttcctcctaacttccctgcatattggaacattagaattcttttggttggttgaagaaacatcctagaattttaaaatattttgtatctaatgtaatgctgaaaacatgaaatccacataatgtatgcggcatagctaatattagaagcatgttcaaggagcagcctctggggttaatagagtttaatttgcaagacaaatgaaagcttattttctcctaggctctctgctcataattctagtagggccacttttgaagaatagtaccttcaacagacacagagaacccttgttggacagcaacagaacttgctcacagtgagacccgacatcccctccgctcagtgggcatttcctacagtgcagagttgtgcgttgaaaagtgcctctt

SEQ ID NO: 63628 - DNA, 1050 bp, Homo sapiens
agctacttgggaggctgaggcgggaagaccacctgagccccgaagttcaagactgcagtgagccgcgatcccaccaaggcattccagcctgggctgcagaataagaacctgtctcttaagaaaaaaaaaagaaaaaaaggtaataaaagagcaccaggaagcataggtgatgcacctcccatgtagagaaggctgggcgagcgaatgtgtagtggtttctgcggctccattgttagtgatgacttacggatggaaaagggagttttgtagctgagtgaaaactgttagaaaaccaaatgccgctgtcatgtttttgtctcgtgcgcttccccttcaccttcatccttgggcccatgctgtggccaactgaggagtaccctgaggttaagcgtcccccatggcaggtgaggctgtggggtgggaggagggctgggagatagcagattagagatctacaagagaatagaaagtttgattcaaggagaaaaactggagtaagcagtttggagaagtcagatgtttaaaacatgaaaagaaatgtaactttgagttgcagtggttttgagtttcctgatcttgatgtgccagtaactccctgggggctgacaaatccagggggaaggttcaaaggcagagagcctgtttgagctgggccagggcacagaggcttgctcagaagacgtggacggcagcagagcctgggcttgagagtcgagctccaccttcttcaggctctttccagcggggcgggacaaggacccacacatgctaagcgagcagggaccctcaagcctgtgactgttcgtgccagtgaaaagggcaccagtgcactgatttcttccgttcacccagaaacaacgatttcttcaatgttcacagtagtctgttaaccacctcttcgtggtgcatctttgagcctgtgtttacagcagtcctctctttggtcttaacaacccaacgtgaattttgtggcatgctacaaattgaggcatcaaagctatgctttttacattgacttttgagaaattcgacagagttctgaaacccaaa

SEQ ID NO: 63629 - DNA, 1026 bp, Homo sapiens
gtcggccgagggcctgtctgctcatggggaagtgtcctctgatggcagcccagtgtcttgctaaccagcagaccactgcagaaggcaacgctggcctcctagaggtgtggcttgtttgcatctctatgtttgtgaccaagtcgtttccttccttggtctcagaatctgcttggcacttactaatagcatttgttcaacatgcatgatcccggtatgtgaagtacagatatgacatttataagccagacactgcgtttgactaatgttggcaaagtcacactaagagcctcccagtgttcagatggcggaagggaaggcagataggagtccagtccccaggactctgaggccccaccttgtgccttggtagaagtgaagacagatcgcctggggaagttggaagaagtagccgagacatttctcctggctcagagcagagggggatttacgttggcctatgaaggaagagtaagtatgtagaaccttcacttgtagagagctgagactttactgtcacccttgttttagggagcctacatggcacctaagactcaaatttacatttttaactaactgaagccaaataaaagaccttttatcccaactgggtacactctaaagtctcgacatgattatgcctgtgatcctgcacaaatcgtctcaaagatcttggaaaattggttagtgtcggggcacggtggcagttagtactggggcattggaagcaccagagcttaccttagctagacgtttccatcccgtggcagcttaacacgtggcatcctcactggtcttacagcattatggggaatgcaaaataaggacttgtctccttccagaagcctgctgcccatcagaaatatatatatatatatatatatatatatatatatattttcagggaatggtagagaacagtggagaagtagatgcttgtcaggcgtcttgtctgctgggccaaggtgaatcaggaggtgagagcggcggctttcctcttgtttgggcagcgggtgaaggacaggcgtg

SEQ ID NO: 63630 - DNA, 1026 bp, Homo sapiens
ataaagcctgcgagtctgtgaaggaacataaatgtgctgtgctgtttacatactaacttaattgtaatttaaatgcccttttcattccataaatatagccataggcttttcatttccttcaagccttcagctcacagagcagtttatatgtaaactggagtcagttgcttcataaagtgaatttctggaggaaataatatagtatatatcaaaatctagataggtaatgggaaattgattgtgacaatacaatattagaaacacatctccataatattttatttattacactttccaccttttgctgtcaagggaaaatatttcatcttgcaccgcgaactccagtctgtagagattttgacctcaatattctcacacaaatgaatatagtgtgtaaggtagcacaattttccctgtgtaaaatcatgcataaaaaacaattcatttaaagcatctaaatgtttccaaattactgcaggtaatttttacagcttaattcctccgagacaccattttaaatgaacccataattcaattttcagactttgcatttcaaatttttatgttgaaagtaatttcctttcttgcttaagttgtgctcagaaccagattcataaaatgtgtatgatgtatgtctgtagaatcagtgactgttagaagcttaataacaaatatgcaaggaagaaattaaatgatttttctcttcagtagttcagtttaacattgatttctaaaagaaatgattctgactttgccgctaagtttctttctttcactttttttcttttcttttttcttcttgcagtgttccaggggataaaactgtccttgtatctgtattttgaatgatttggaatcttttatctttgcatattcctttagaccagaaaagaagttgaataatgttcagactggctcccatgttaaggtagcacttagagattctctgaatatcatccctgaagctatggcttcctaaagacttttgacctcttaaattagtgaagagtggacaccaccgcttaa

SEQ ID NO: 63631 - DNA, 1050 bp, Homo sapiens
tgtgtcgctgtatcttcccgcgacgtggtaatgcaaacttagaaaaaaaaataagatggaaatggtgctgcaagtttttaaaatcaagggttgggcagtgcagggggagctattgtttaaaaaataaaagttgggaggaagatataatggattttgtcagtggtattagggcgatgaggcattcttgagttcagcaaatattggcagataattctgctttatggaaactattaaatgtaattggtcacatcagagacacaattggcatctgtactttgaagctgaatctcctcaggttgagagagagaaagagagattaagacggactcttcagagaccatggactacagggcccaaagttataaatctggaagatgtaaataaaggaatattttaggctaacgttgctccaagaagcagtatttgcctgtaagaaatgtaataatagaggtgccaatacaagatagcaaaagttacccaggaaagatgttaagtgacatgctgtcttcatttttaaacaggacaaattatttaattgggaattttgccgacactgttgaagcaattatcatatttaaactgtttatcttctccacattctgcctgtattttttttcttctttgcattaatctttttcctctttagcatctagagagggtccctttctcgtggagatcggcattgtagaccttaaaaggtctcacttgagaaatatttttgatattattgaataattattaattcatgcaagaaacaaaaggaagggcactcaccggctcgtggccagagcagactctcattctttacttctgagtgtttgggggcttctagcgaataatccctggatgacgggtcctagtggttttgagaccaccagtgggtagcctcgccctgggaggggcttgagcagccttgaggtgcttttgtgctttgcacgttcgtaattgtgaacctcaacgcaaagcaggtgttgttgtaaatctggtgtctctgtggaagcaatgccagtcctctaattcatcttcgccaagctagaggacgcgagcaca

SEQ ID NO: 63632 - DNA, 1004 bp, Homo sapiens
tttgttctttttgcgaggaagagatccatgggttggctcttactgaacatgaaatgttggaagtggaacactgcagtgttaccagtgagctgtgtaatcgccacctctgacagggatcctgctcgaggagcacgtctttccttggtgtggccgtctccaagtactttgggtggtggtaaatttacccttctcggtcacacactgtgaagatgtgagtttcccaatttcagcatttggagccatgtccttggtgagggcaggaggaatttgtcaccctttctcgatgtgcctgggactagggcagagacggttagtctcaggagagccaggtgtgccagctgcccctgcctgccatggctcccgcattgtggccaggactttttctggcagtggtactgcccgagggccgcagtcctggtcacattccacttggggacagagtgtgcaaggggctgatctgaagatccggctggaacctgggagccacaggatcctggggaccctctttggctgtaccccgtacctctgtatttgctcccacatgctgtctgatttctctggatggcctggatgcctctgttcccagcatctcctcggcatgctccctgcagcccttggcctgtgtccagtgggccccgacccggaggctcctgccccgtagctcaggtcccgtcttggcctcagccttcccttaggtgctcgtttctccagtacctgcagcaccggcgcttttagattgcattctttatgcattaattagtaatgtggtggtcccaggtgactaataagctaaagaaagaactagtgtgagtgaatttctttaaaggtcatttggctctaggaaaaccttttttttaagaaaaaaaaaagcattttatagaaatgttcaatggcaaagtgaaatgtaaagtattacatgttttttactatagcgaacaaattgcccctttttattccgtttatgtcttcatctgctacatttagccagatatatttgtctacct

SEQ ID NO: 63633 - DNA, 1066 bp, Homo sapiens
ccaactctcgggcttcttaacccaaaagaacttccacgcagaaggcagcgaaaatagtgcacttcattttctaagacatctaaagctgccacaatgactgtgagttaggtgagctctatgaattaggctagggatttgcaaccacttagcaagttctaagtaactgtaaaagatcccatagactgcaaattgtgtttcatttggggacagataccctgtcttggggatttaagtgtgtttacctgcccagagttgacacagacgactgtcccttagcttcctttcctcatgctggttttaagtgcttcgaatcgggattttcctacccatctgatgcattccattgaaaattcaggaatacacatgtatgtgactgtttattggcaagtaattgtgaaataggccagaaatctaccagcttcctttaattaatgtaacaaatacttagcaaggacctcctgcattctagggattgtgggggtgggggggggagcaacaaacaaaacagataaaccctgccctgaggcgccccttgtcttgtctgggggtggaggtggggcaggcgtgagacagaagaaacaggtaaaatacagttcaaagtcaggtgctggtcagtgtcttggagaattctaaagcagggaggagggatggggtgagttttaaatgtggtgactgctgaagaaatggcctctgacagcctggaggaggagctggagctgggggggggacaggctggccagctcctccaacacacacacacacacacacacacacacacacgcacacacacacacacacacaccccctctcccccaaggacccacaaggactgcggcctcttagcgtgtgtggagtcatcacactgacccttagcagtgtggcctgacttcatgaggcccccgttgtcatggagatgctgggaatgggaggatttgccaccctccagtgaggagcccccatcccatgagtgcaaagcctgaaccggcccttccctaattggcacctctatcctattttctttggctgaggaaattctcgtaaatgtatatttaatgtggtgttgaga

SEQ ID NO: 63634 - DNA, 1071 bp, Homo sapiens
tggctggagatagaacagatcctgcctctatccacggcgtaagggagttagcttcatggcaagctctctggagaacacaggccattgtacctgctcatgagaacagaagtgaaagtcacacagcatgcatattagttccgaggctactggcattattatttaatgatgagttagtgcaaattgaggggtgaggaagtagcatgtacaaaggccctgaagatgaatgactgtgtgaaattttgaagagcagtttagcccgaaaatattccatgagtagctgccaggagagcttttctggaacagtattaaactttagaaaaagtgttctgacatttatagactgacacgaaaacagaagtaaaagtctaaattgaaccaaagtcctccttaaagattgcctttgaaattgagtaatggcggatgcccagcacctgatgtttgggcacgggcgacaggacgtagggtggtcatccgaatatccctgccccactccccagctctctatggcattagtagatgctggaagatgaggccgtgttttctctttcatcacccgtgcagtgaaggatttgcgtggtctttggtgcttttcttctaaataatgaacaattatttcttgcgacattttggttttttactgccaattccaacagccatttgtcttttcagagctaagtttataacttcctcctttctctcctgtcacttttaccccattctgatttttcatctccctgccaattgtggtttcgtttctgagcactcatttattaatccttctttttcatttcccagaacacgtgctggtgtaaatctttttgcagttaaagtattacattaacctttttgatagcatggggtggtatctcggcggatgggcgagtgctgttcgcctgtggtctgtctcaggggttctagttggaaggcgtcctgcagccatttcttcagaggctaaggtgtgggggagcaccttggggaagaagaaaacatagtttctgcccttacaaagctgataccccatcaaacttgagattaaaacagacaaaaaacccaagaacctacagagcactg

SEQ ID NO: 63635 - DNA, 1037 bp, Homo sapiens
accagccctctggttctgtccacatcggcttgatgcccattcaggggttgcaagttctcctggtctggatctattagttgaagaaattgccacctcgtaatttcaaattagtgggaattaaaaatttaatgggatgtatgtattttttggatcatatgaaactatgttttatgtggtatttaatgtgagtttaaatatgcttactaaatatgacttttgttaatatctcagttgatgctcgtgcgaaaaaagtctgcctttctacctttctttcctacctttctgccaaacccagtccttttactaatattttaaagtattgatttgaagcagcagtgtggttgcttctgtctgggtttgaacaagtaactgaattttaattcctgagacctcttacatatagcaattgtcttggctgttgtaggaaggcagcaccctcattcctctgatttagctctctttgattctacaggaagttgttgccactgtctctttttattaaactaaatgccagaattctttcatgtcatcataagatgttaatgcatattgctttggggaccaaagtcatacaattagaaaccactcaaatgcttttttattctaattctgaggttaccaattccttaaaattagtaaattttcactgattttgcaagccagttgtaaaaaaaaaaaatagtataaactcctcactgacggtagtttggaagctgcattgtttggatgtgatgtttcagtgccacacacgttagcggtgggaactggaagccagtcacgaatcggctatctgcttcagggatctggctttgcactcctgcccctgcccctgaagtggctctagggacagctgtggtttgagtggactcttgctccttcctgacctcttaatggccacatggacccccttgcttatctttgagagcagggccttgatggaaatgcaaatgtgtttctctttggtaacccagataccaaaaccaagtgcagtcctggaaggtgaaaagagtttccaaaggaaaaataaaagacacatt

SEQ ID NO: 63636 - DNA, 1053 bp, Homo sapiens
gaggctgaggtgggaggatcgcttgaacccaggaggcagaggttgcagtgagccaagatcatgccattgctctccagcctggatgacagactgagactccatctcaaaaaaaaaaaaaagaatcgtgatattcttgataggaagtaaatgttagtcataggattacaagattttattctaagctcttacaagcaagcagttcagattaatgtgttttcttagaaaacttgatttgattaaatttcatactttttatctattccccaaaatttatgcggtccttgtgtgcttgagggttctaggaacaaagtgattggggaaacaccggtcccctctgctgtgggaccctgcgggcttccagaactggcgtgaggtccgagtcgctgtgggaccctgcgggcttccacaactggcatgaggtctgagtcccggtgtttcacaatattacttgaccaaagagcgtttttttcacaaacacatgaggcagcccatgtgactccagggacccgcaaagcacagcttgagaaatgttggtatgtttcaatggaaatgtatgtaattaagaatattagtacaatatttattaaaagtttctgtcttgaatgaagtaataggatatcctttaggaagcctgatgtcgggacgtgctgtggggtatttttatgttaggtgttaacattcagcaaacaaatccaggctctacttttatcctttaatgaaagattttattttttattcagcattggtgcattgaggacttacagccatcttatcttacctcgatgccattgaaacaaaaaaattagtcatagaaaacaaacctaatgccttcctttgcaagttccagtcagaagtgtcgcatataccagacaacacatcatttttatagttatagagagaactcctatgtacttcatgggaatacaaaaatgtcacaaaattaaaaggaatttttccaaaattactgtgactgaacagatcattccacgctccgttataccattctgatcctaatcccatagtttaagtgtagaggctggaaaatgtcttcga

SEQ ID NO: 63637 - DNA, 1050 bp, Homo sapiens
tgctgatttttaaatatgccatatgtgtcaaatgtatgaattgtgatgatggacaagaacactttcgcagctttaatgggagcatgtaatgacttgaacaagactgcttagttttggttactgatgatcaagtacagaatcttgctggtgtctccaaaacttcctgcctggcctgggcagctgtcctggctccctctggccagttctctgccaggcagccagtgtgaatctggaaggggctagtcctgtcttcccctccctgtctagtgcctttaacgtctccgctgagcctgccacctcctggcctcctcgaccctccacctccccgagccgtggaggtgagtcctagaccttcttctgtgggctcctctccccggggccctttcggctcagccccacttctcttattcacccacttgtgttctctgtagctaaatgatacataacaggaactcgttaagtagcttgtgcagtgaatgagttaatcctaggtgttttcagaacagtgaatttcaggttcctgactccgctttgagctcattcaaagaaagtcatgtaaataagacctaatcattgcaagaagtctaatgaagaaaccattcattatctctggagatgggcaggtacacctcacagaaagtgaagtctgttgctgatgaatagtctgcatgcccacatcttcctctgggtttctaagtaattgaataagaaacgtttctatttatattcttatttatgtgcaactgtatttaattattccctagttttgaggattggccaataaaccttttcttcccttttgccattgattattcttaagtttaagacaatgcccagtggcagatgtgcttaaccgccatccttcatctagttcatgtgactttttaatgtcaattataaagaaaattactcctttggcttcagaagtttatttaaatctcttctgagaaaattggcagctcttcggagttaatgtccagagcagcagaaacagaaactggagggcacagactggtggatatgtgaacagaagcactttttttaaacaaa

SEQ ID NO: 63638 - DNA, 1039 bp, Homo sapiens
ttcccagaagctcttctcagcgggaggctccctgtctttcacctctgctcttctgaggtaccagttgaagggtttggggggtgaaatcaaggcatagggctcctggcaacactacccctggctccggggtttgcatgccggggcttcttccttgtcctggctgtcagagaacacctggaaataaatgctgcattgttttgctggaaaatcctgacaccacctcctgccttcccctgggagggctgagacctggcctaggcatggagcttacggtccacagacctgcctgcctgcagcatgacagcctcccagagggctgtattgatttttgaagaggaggaaaaaggcatacaaaattggacttgccagccttctttgagtagaaattggtgcttcctaaagggaatcttaattggctagcttcgaagctaaaatgttttctcccccttcccttctcagaactctccagcccccctgtttgttcttgtgagacttttccaagccccagttacttttctttcctgctttggaacataattggattcttcgctgggtagagttttgcttggaagacctgagggtgtagctgaaccaagtttgagcaccctggaaggaagacagaagatgccgggagaccagccagctcaaaggagaaagggagggggacagcatctgaactctggcctccagcatgatttcatcctttaaactgaaaaccctgagtttcagtgccagcgacgacacttgttgaaaaagtacaaatgttttctgcttcttgtaatctacttcttgcaaatattagtactctggaaaaaagatttattttaataatgtgagtttcagatttttttctgtagttaacgttgttttattactctatatccttgccagaaagcgtgttttaagagtttcaattcaaaattaaatatgacctcagtgttttaaaatacaattatattaactgtccatttaatagttgctgaggatttttttggccactgatggatagtcaagatacttgtctgagattaaatgcagt

SEQ ID NO: 63639 - DNA, 1123 bp, Homo sapiens
agaatgttgagcactctaaactgggaagagcctggtagccgtggtaccaggaacactcactcttcctgcttgctgctttcctcatgctgagctgggctgagatcaagactcctggggcacttgcttcctctaccctttgtctgtggccaggtgggattcccacacagtcaaaggaagcccgtgtccaacaggggccatttcccttaaatttctctcatcacccccagctctgctgtgcctcaggtgggccgctgccactcttccttcacgttcttgataatatcagtgtcttgaaaggaagcttcttgcaggtagggaggacgcttttccctggaatagctgctgtgctcatatgagtttgtgctggaacattctaaccacctttctgtgccctggtttgggttgaagggaaggcgatttaaatcaaaataaatctgcaaggcagttcatcactgggacattgtttttccaagccggggaaggcgaatgggttagggcagcttcccacagacggcaactccgggagaatatcaccggggccttccagtctgccgcagccccgggagcttctacccagggcaggtcagtgttgtccggtttgattttaaggaacccctggcattgccaacagttgtgtttttcttaaagaaatccttgagccaggtccacatggctctagctttgctgtgttaaggtgcccgacgccctgttgtcacatgtacacacgcccagcaaagctgggctgcttcacccaccagccaccatcctctcgtgccaagtcaaagaaagtgaaagccaccagtgtcatgatatttgcctcgggattattctgtgggtgacacgtgatgtcctaggagaggcctaggggaggtgcgactctgatgggctctgagtgtttccccaccaatgctgggagagggtcttgtctcctgctgggttcaagggatgggataggaaggggctgaggtgccaggcaaaagtcttgtctcctgcagggtttgagggatgggacaggaaggggctgaggtaccaggtgagggtcttgtctcctgcactggctcctgctggcatcatgagctggcatccgtggcagcccccggagctgcaggatttgggcttccga

SEQ ID NO: 63640 - DNA, 1031 bp, Homo sapiens
tcctctgaatcatacagaactgtctccagaagggttcagtggggatctctaggatgggcagataggaagctagagtgggtgggcctttacatggaaccacaaacgtccaagaaacctctcatcatctctgcccaccaatgggctgctgccaggacaaaggcactaccaaagcctcctgggctgccgccagctgggggccacctctccccagcgccacaagccagtgagccaattagacggtgtgggggaccttgctcactgtgcacctgatgggccgggcacagggcaggatgttgctgaatggcccaaggaagtcagagattggttttgtttattaaagttggggcttggggatcttagagtggtgaactcttctctatacgatctctttttgggggttcgcctgccaggaggagcaaggctgaagagctgtccagaggcttttcttctccttaagcctgtgaaatatgtgagctgaaatgtaaggtctcaggacagaaaagttctcttacaaaaccagggcaggaggtatctgcataatcatatggaggctgggagaatgagcctgcaaacccctgaagtttacctaaggtttgttgggcaacttcatgaaaaacataggggcaaaagttccatgaaaatcgttagttttctccaagtcatatggtggccctggccatggagctagaccctgctggcctggtctcaccagggtccagagagtggtgtgctctcaggcaggccaggaagaaccggaggaggaggcctccgcagctgctgacaggagctccagggcaggagtggccagcaaggaaggtggcaccggaaataatcagacactctccaaaccacccctgcaagcactgaacccccgctgagccttttccccctcacttctgcccatggcagtgtttgctgctcctagagccgaggacaggcgggcccctggggcttctcagtcaagtccctagtgcttaagcagagttgggattggccacacctacccctgcctccctggctttcagcccacg

SEQ ID NO: 63641 - DNA, 1613 bp, Homo sapiens
tgagtctgtgaggccagagaagagaagctatgaccgtgcaaacatgcatgttatggtgttggctgatgcggaatcaggaagcttggaggagctcttgcatgaggaattgcagaacttaggggcatgaatttgcacttccagatgtgaaggttgcaggcaccgggcgttgcagaggaagtgggcaagctcaccttgtagagaacttacttggggtttgtaatttgtatacacttcttacccagcagaaacagcttactgaacacccctcgggtggctggatgatgtgctagcaactgaaaccatctctgcgacttaagcttctctggtgcgtcgcgccccacgtgcttctccagaatcccgtttggaggggccaagcaagtccaatatagataggtttatactgaagccatcagttttgtttcttacatcgtttgtaaacagcagtattatcctggaacttgtttcctacagaactgtaagataaggataaaatcccatccacctgaattgctgagaaacgtaagaggtggtgtgacccgctggagccctgtggagtggcggactctggggagtagctggtcagtgagattctcgcagcaatgtgaggcatcctcctcacagaaatgcatttacggatgttgctgtatcccctgacctggcctacaaggacagaacagccctgggggccacgtcccctcccggtctcatctgccgcttgctcaccttggctgtccatgcacccgtagctgtgaccatgggcggtggcgccagctcggacttcaccccgttggagcgggcaggatgtcacactgagctaatgtgagattgttcatgaagctacagatcttagtgctacttgggcttctcacagcacagaggaggattctgaagtgagagataaattggcttcatgtatgagcaagggggaaagtgttttattttactaggaagattttactgaaagaccaatcccgaaacggcccttgcttcggccacagctgctgggatgtcctcgggcctcccctgtttgtctgcatgtcttcttgttgccatcggggcagtggagtccccggaaacagtccaaggccctggggtgggggatttaaatttttggcttccctcagacctcagaccgtgtgggtttttttttctttctttctttcctgttcatgggcatttgattaaaagtttgtgtttaaagagctgaacttcacatcagttttacttatcagtttgaaagacattgagatctaaacacggctctgcccaagacctctgccaagcagcgccgtctgtctgtctgtctgtctgaagggacgggaaggtggagaaactgcaggtactgacctgtctctaagccactgagggcagccatccagtgtcctcgggaccccatggctccagctgctgacagatgtgaaacgtctggcctccatcacccgggtcgccccgacaaggatctgtaatgggggcaggggtgggggtggatgagaaagtaggaagtggatgctgggcagcgaggtgtgaactgacggcagagcccagcccgacagcacctttgattgatgaaaggacattgttaacaagcctttaaagtttctcattaatgtttt

SEQ ID NO: 63642 - DNA, 1865 bp, Homo sapiens
ttctaagaaagaaatagttgttatcactttgaaaatatgatccatgattgtgttttaaaactatatatatggccatgttgtaacattttttaaaaagaccatctgcagagcaaggtgcttcagtgattatctcagcacgaggaaatcacttcattttttgtgtgcttaactgtacattctcaatttttgccatggaaatgcattatgtttgtaatcataaaagaacacacttactgggtgaagaggaaggaccctgacacatgtactaagaagacagcatgggcccacgcatctgaccacgtgactggtgtcacgtgcttgaccagctgtttatcagcttcgcctctccacttgcagggcagctgagcacaaatactccaggtgaggtcatgcccagcctgtcatcagatagcacatcaacataaatgcagtatcacttcagggctgtgaggtctcagagggaggggaaagggtgaactagaaaatgaagaggggcgtcctgaaggaggtggcaatcaaactgcatcagctggagctgggcaggacatagagggcatcttgagtaaaagaagcaactggactccagggaagaggagaggagggcccaggtgccacggtccctacaagatgagacttggggactggagggccaggctgggagagggcagacccctttgccatgagcacaggcaatgtggggccagttcttagtgacatttcagatggtgaccagtcagaggacagcaggacgtggtggtcatctactctctttcacaggggacacagtgggcccagcaccccggccacatgtgatggagcctccaggcctgcccagcacctactgccctgggacaggctctctttcaagtcagctcctctgtccaggaagcatctgagaggccctgtggtcctggccaaggaggcaggccgtaaggagggcaggcccgaggacgtaggtgtggcaacactccgtgtggagtagtctctgaggccagacctgcggttcctgtttcctgtgccctggggacccagagaaagaagacggatgggcgctgcagtggggcggagcaggcctgagcccagctcgaggaaagcttgccttctcgtctagtgtccccgtgttttacataattaggtaagtcacttaatgtcgctgtgtcttgttagagaagctactaatccttagagctaacagaactaactaattagtgtagaacacttggaaaatataagaaattcagatgtagagtgtaatgtcccagtcctcccggcattgatgctcgcacagtgtccctggtagagccgcgggcctggctgcatcaggagggatgggtcttggaggcggtggcataattgagacacctgttctgaagccccagggctgccggccacacaccctgccctgcttagccagctgtaggccacgtggggacaacaaaaagggaactatccaggggccatctgccttgctaccccggcaccttgaggcaggggcagccaggtcaggggaccatgggctcagagcccgtcggagccacagggaggtgctgacatggcctgagggctggagcttccccctgggagtgcctgggcttccacagactggtggtggccgaggtcaggggagccggatgtggcaagccccgggtttggctctggacactgcccatgactggccatgcctcagcaaacctgctttgccctccgccttctcttctctgaaacggagctaatgacgccgcctcgcagctcctccagaaggtaaagacgggattacgggacacctggcacacagcctggcggatggcactcactgctgttttcctccgtgacagagaaccgcagaacttccttcacagttggcg

SEQ ID NO: 63643 - DNA, 1009 bp, Homo sapiens
aaaaaggagcagctcttcctggtggaaattgcgagcagaggctgcgtgagttccgtaactcgcacacagcctccatttggagccagaatgagcacgtgagggaccccgggcagaggggccagtgctgacattatgctccatgcaacctcccatcctgttgtgggagatggtgcagaccaggggagggagtcagtgtgtgaggggatgaggctccagtcctttcctgggcaccaaagccaaatcccccctgagcacaaggatcttccctgggtgactgcagaagcaaggagacctggcccaccgtccctgctggcttcctactgcccagccgcgtctctgcctccctaccccaaagcctgcagctcctaagtgcactatttgggctgtcttgtttgcagcggatgtttgaaagacagaccctcttctctagtgctggccttgagtcctcagagagctgctgtttcctgggtttctagctccatggaggcagaaagagaccccagggtggcctttggaggaagatgagccccctgggttaaccgagcttctgcagtggtgctcctgggtcatcactgttgccactggtcagagccagagtgtgtctgcctgtgctctcctgaacacagtggagctatttccaagttcaggtgaaggggacatggaggttaagcaaggccagaaagacagagacgtcctcttcccctggtagcaggtatttagcagatgggaaaatattagcagatgggaaatcagcagatacactcagctcaagatgcaaatttaaaagccgccagcccctgtactaaatatttacactgaacatctctactccatcatccgtcttttatttttgtgagcccgtacaactgctcttattacaaagtcatgtaaaagttgaggaaagaaaatttcacccttggaaacaaattcatgatgaattaaatttcagcatgaaaatagaaaaaaaaaattcaaatttctgttgacttttgggcttatgtcctgaaag

SEQ ID NO: 63644 - DNA, 1092 bp, Homo sapiens
ctctcccatgcagctggctgcattgtacctcacctccagcaccactctgcctccacacctgccctcccagtcctgccagggcagggcctcctcccttttgtcttcctgctgggctccaggctcctgagaagcaaagcagtgtctcccttggtcactgcccccaggcgccagccaacggccagcactgcacaggcatggcaggcccttgataggcagcgatgctaaatggggtagctctgtttgttccaatcacctttaaaatgctgttttatagacagtatttgataggcttatttcagctgatttctagacctaatttttaaaagcaattattaatctatttcccaatgactttgattgtaacttgaaaaccaaaatctaataagaaacattttgagaagacagtgaagttcaaggtcaggcatcataaatggagaagtgaggagccctaaaccactggccgtgcctcgtcagctctgagctcctcattcccacctttcctcctcgttcagctttatccttctcttccttccatcagaccagaacagttttcccaatggcaaaaacatattttcattctaataacactgagacatgactgccctttctcctttctgtctgtatctacatttaagttacacgtagttacatttgaataaaacagatttgaaagattatgtcataaacctggtaccaaaacctaaccaagatattgagaaaaaagatatgtcaatatttttatgtacagaaatgaaaaaaatattttacaaaatattagcaaaggaaatcaaatcaagcaatgaacaagtgggtttatcccaggaatgcaaggtttgtttagggtctggaaatcagtcaatgtaatttgacacattaacagaataataaaggagaaaaaaacaatcatctcagtagatgtagaaaaaatatttgatgaaattcaacactcctttattataatttctcagcaaactgtaaatgggaactatcctaatctgataaaagtcacctatgaaaagtccacagatagtatacttaatggtgaaacattgccgtgcttttcctctgagatgggggcacagccagtgtgcc

SEQ ID NO: 63645 - DNA, 1030 bp, Homo sapiens
ccccccctaccctgcacagccatactttgattcatatgtgcgttttaagtttacacctttaaagtgactgtggaacggtagcccaacgattggagatttttttttctgtctttcttctttcttttctttctttcttcttcttcttctttttttttttttttagtcaacagtgtttcctttcacttcctgtcacaaaggtcaaagagagccgacctttgctggcagtcctgctcactgaattattcatgggattgactttttgtcagcacacacagttgtgctctgggacattttattcatttacctcatttaaagcgcctttctgcacctgttcaagtattaatatcgtgtaatttgggcctaatgccgattttgctgaacactcattatattttttattagctatatttccaaacgattatgtatgattattaccaagccttacaaacagcaccgggttattccctagccctttacatcttcttgtcaggttgttttcagaagcggggaggataaacatttgaccagtcccaatgtttttattcctactccatctccaagcagagaacttaaagcttcctccctcatggctttgcacgagcgtgattaaatccaactctgctgaagctgtacaaatgccagcatttataaggtcaacgcttttgttaaaaatgctatgtaaatgaggatctgcaaaaagggacattaaataaaattaaattcattgtcttctttaatgtcatttacattttggctaagccccggcctgtcaaggaggattttaaaaataatattaattacacatcatttagggatccaaggttttctattcagtagcatttggataacctgcaaaacggagactgtttattaacttcttaaatgacaacttgtcatttcatctgcataatgcaatgaaaacagtatagtttggtgttaatttttccttctcagttttcttaaagatgtgaatataattatcattggataggccttggggtcctggagatcctctcttggcggaggctgt

SEQ ID NO: 63646 - DNA, 1052 bp, Homo sapiens
ttgataagcaaaagattgagtcaataaattatggagatcctcaattgacatactgtaagctactgtgttttacgatgataagcactgattttgtttcaaacggagacctgaaaccatgacagccatcaccgtgtctgatgacagggtgaacctctaattatctgaagtccttagacaaataggaaaacaaagtttagtatgtaactcattccatgaaggtatactttgctactttttgtactctctttagaaaaattttcataggttatgttgcattctatggtgtaattctgaacaatgttgaaattaaagatccagcaacttgaatttagtatgcttatgttgattcatgtaactgttaaacataccctagaatacaaacgaataatgcttactttgagaactatgcctccattggggttgcattccttgtttgccgatgactgaccggtgccttctttgtccccaccccatttccatggaatgtatctttcacatccccccatctgttggaagcaaacacttggaatgtagtacagattcttactgctttgagagcttgtgttctggcatgaatggcttaaagaaaaaaaaaatttagttcaagcaactgattggatcattttggctaatattctgtttgaacaacagtacctatttgattagggtttttcctttctttgtaattccccaagcttgcctctgttatgtttcgtaggaaatgaatctatgagcagaaaaccttcattgatatgtaaatatcatttttttgttaatactcaatattcttttcatctaaatttcagaaactgactttaaaaaatcagtttccttttatttgtagttattctcaataaaatttcacccaggcttgggcgttttaatatttacacccactacttctgaaagtctaatgtaaataaagattgaaatgtgaatttgaaaagtcacacctcttgatatttgaacagactatagctgcatatatcttcttcttctaataatatggctagtttctctcctaagcttttaaaataataagacactatttt

SEQ ID NO: 63647 - DNA, 1030 bp, Homo sapiens
gtgttgtgtgctttatgagaccatctaaagtaaaattttgtttgtttcagaaacgggtatgcaggagattagaagccagtgggcatgagcgtggctgccaccaggtgaatgcctgtgccctggcgtcctggggcccagaggaccgggagcttccatcaagaggctgcctcccagcaccaaggccagagagtggccaggggaggctaagtacaggggtatgttcctcttcccaccaaactacttgtgagcatgttgaaatattttaatagaaagtgtaaataatcattgttctgatatatctgcaactgtgatttgttaactagatttctcagaatggtggaaggagctcagcccagccttgcccaagatgtattgcaggggaatctgtaagtgcattaaccttcttgctgtgacataaaagatagacttcttcttaaatattagatccataaaacaaagttaataaaaactgcaattatgtttctgaagaatgaggaacataaataaaaaggtgaaaattgatttaagcttttcttagcattctatcggtgtacaaactaatttgtgtccagcttcagattggaaatataaattgcaaatacatttaaaattccttctaaaaaacagggtttaggaaagggaccaggccactggatttggttaaaatagagaatcatttaaggacatcttggagaaaagatctttctcatttaattttccaaatagcaatcaacattgcttttttcttttccctgtttatgcttttcttgcatgtttctatcataaacttcacataaatcacagatttcagaagcaaacacagtgtttacaccattaattcaaagtaaagggaggtcagaaactgccagagtcagattctcagtctcttctactgggcagaatatcataaagtatatattagcataataatacctttgttattaattttgaacttactccaagaacaagttaatatgtctttgataacctctataattcttgggtttctttaattttacatttggaatct

SEQ ID NO: 63648 - DNA, 1055 bp, Homo sapiens
ttgtggacttattaattgcattactgatttctaatgatttcctttggtattttatttatataatttatttttttgaaatggagtttcgctcttgttgctgaggctggagtgcaatggcgcgatcctggctcactacaacctctgcctcccgggttcaagtgattctccttccttagcctcctgagtagctggaattataggcacgtgccaccacgcctggctaattttttgtatgtttagtagagacggaatttcaccatgttggccaggctggtctcgaactcctgatctcaggtgatccacccgccttgacctcccaaagtgctgggattacaggagtgagccactgcacctggctagctcctttggtatgttaatttgctgtatatttgcttaactcatatgctcgctcacgtgttaacacatgtaatacatatgcttaattcagtgtgtttgatgttgaagagtgtgccattttcttgctttgctgactgaagagagtatgtggtgcttttctgttgaagaggtcagagaaccatgcctcttctctattctccaccctcctcttgagcccagagcggaggctgccagcatggcagagccccaccggtggcagagctggcgctgggctctgctcaccctgctccgtgttctctggctctgctgtgtgtttctaggggctttggggagatgtcccctgtctggttcatataagggctggctcttctcagcacagaaaccaaagctttgaatctcatctctggcaaactgttaggtcttcaaccccctatcccttatagacacttcactcattaagctcacttgggaccatcacctccggaaaaggaagaagtccccctcaacaaatggttggtcttgcctcctcaggacaggcagcaagacttcctgagatctgtggcagcttcgtgtgtttctatcattgaggcagcaccatccctgtttgctattttaatttagcatcgtttgaaacagcgtctatttctcggccacgctcctgcttcacctttctctgatgaggatgctggtcacttgat

SEQ ID NO: 63649 - DNA, 1573 bp, Homo sapiens
gggctaatttgtgtatttttcgtagaggcagggtttcctcatgttgcccaggctggtctctggaactcctgagctcaagtgattcgcctgcctcggccttgtaaagtatcgggattacaggcttgagcccccgtgacctgccctgttgatctaaattgagtgaaattttgccgactgaatttgaattagaggcaagtagtactctgattttgcaatggagagtgcaggtgagatggggtgttgcctttggaaatggggaggggtgcgagttactgactaatggttagaaatgctttatgggggtgatgaaattaaagtgttatttaaacagctctttaggcatttcaggtttacctgggaaattgttacggaaaaaagcaggggttggggagggacatgtgacatttactcactgatggaagctgggctctgactcatccagtacagatcagcacaatcacaggagtcaccagaagtggcctcttgaaatgagcaggtcttgtgtggacctgccctaagtaaacgttttgaatttaccatcacctgaaaggctgttttgtctgttttacatgtttgttttaaatgcttcatgttttaaaaagtccttaaactatcaaaatgaataaaagtgtttttttttttttttttttttgggggggagacagagtctctctctgttgcccaggctggagtagagtgcagtgacacaatcttggctcactgcaacctctgcctcacgggttcaaatgattctcctgcctcagccttctgagtagctgggattacaggtgcccgccaccacgcctggctaatttttgcatttttagtagagatgggtttcaccatgttggccaggctggtcttgaactcctgaccttaggtgatgggcccgcttcccagcgtgctgggattacaggcatgagccactgcgcccggccaaaatggataaaagtttaaatgtaagtaccatttggatgttgtatccttgccgctggcctgtacttgaaatggcccaggaaacaatgtgcactttccttagtgactagttcaaacggacacgtgataaatgatgtgtggcatctggggaaggagcacatttctgcagcttttttggtgaagatggagacatttaagaatattaggccgggcgcggtggctcacgcctgtaatcccagcactttgggaggccgaggtgggtggatcacgaggtcaggagatcgagaccatcctggctaacacggtgaaaccccgtctttactaaagaaaatacaaaaaattagccaggcatggtggcaggtgcctgtagtcccagttactcgggaagctgaggcaggcgaatggcatgaacctgggaggcggagcttgcagtgagccaagatcgtggcactgcactccagcctggacgacagacgaagactccatctcaaaaaaaaaaaaaccaaaaaaagaatatcatggtggcttacaccagcaaacccagcactttgggaggatggcttgaggccaggagtttgagagtagcttgaacaacatagaacccatctctacaaaaaataaaaaaagtagccaggca

SEQ ID NO: 63650 - DNA, 1087 bp, Homo sapiens
ccctagtaaaataaacatataaggattttcttgtattaaaaaggcccatcccttgattttgtctttttctctgcctgtacagatctcttagagtacatctctgcttcctcatcttcacttcagtcctcagtggactgcagtctgacctgtgcttctgctattccattgaaggtactctctctgttagttgccctttcctgttgcattggatgattgtcactccctcttgacactcttctcttgacttctatgtgacccttcaatcttccagtaccgcctaggaccccttaatcttccagtaccgcctaggaccccttctctgctttactacataagttccttctcctccatctgtcctaacttaatgttgataagccccctgaggcgctgacctcgggtctcctctgtgtccctctgtaaccctttgcggtgtggtgctggcactgttcctttcttgattcccaaatctgtatatcaggtgcagacttcttccctgagctctagacatcatactaacaacccattaaacttcctttcctcaggttggcagcttctgcactatgatttgaggcatagtgccaccactagccatcagtctctaagccagaacttggagccagctgtagactgccttatctgtcaccaaatcctgccccttctaccttcgaaatcctcatgctgctctttgcttctgctttcctgacactttattgtaggcttattctcttctcgctggtattatttgatcagtttttacagtttgttattcctttccttacccataggttagttgtccttggttctttttgccatggaacatatttctgttcgtgatttttcagatttttttgggaggtggtattatatttgaacagaattccataaaactgaaggattttttagttggatatgaccatagatatctttgccaagataattttgtgtgaaaactaactaaaatagatactgagttattaatatattctgtgtgttcatactataaatgtttagaattttttttttttaaatgggtcttgctctgttgcccacactggagtgtagtggtatgatcatggctcactacagc

SEQ ID NO: 63651 - DNA, 1034 bp, Homo sapiens
gacagagcgagacgctgtctctaaataaataaataaataaaataaaaaattagattttattaactaatataaagatggagtggtatggaattccaaatatgtataattggtgtgggatctgttatttttgcacatcattcttaaaaatcttaaaataattttgcattttttttttttttgagacagagtcttgttctgtcgcccaggctggagtgcagctccagctcactgcaacctctgcctccccggtttaagcgattttcctgcctaagcctcccgagtagctgggactacaggcacatgccaccacacccagctaattttttgtatttttagtagagatggggtttcaccatcttagccaggatagtcttggtctcttgacctcgtgatctgctcaccttggcctcccaaagtactgtgattaggcgtgagccaccacgcctggccaaatgtacacttttccttgatcatcctcgggtgtgaggcatgactaccaaatgtcaaggtggctgtgggctggagttttggagagcacaggcagacaaattagttccctgtgggtaactgtggttttaaggcatttaaaatagtaacacaaattatgtcattgaaaagctaggtgtgctgtagaaaataattcaggaaggggtatgtaaatgctgctagggaccagggaacaggaagttgctatcttggtttagatgaaggcagacctccgggagaaggtgaaagtctttctaacctgttcagaatgtagaggaagatggaagccagtcagtctcttccttgcctcttttgtttttcactctggttatgtgtactcctacattcctgctgtctctcttgagtggatgagtgctaggaaagctgtagttttgactgtggattaactcaattggtttagcacgttaaagatattattcaggacttagtactggtttaggcagcagggccaaaatatgtgttgagagtcttagaaatgaattatcaggaggggaggtgcaccttgtattcccaagcctgaatcctta

SEQ ID NO: 63652 - DNA, 1054 bp, Homo sapiens
ttgagaaggcccaccccgttcctctgttgtcacccttgtgtcccaccacataagtaactgcttgtattaattttgtatgaatccttctagtgtttctttatgcaaatagggcagatgtgaatatagtgattagctttttaaaatttaaggacttatttaaaattccaatgaaatgtataatgtaactgtagagtgtaaccctaaaatgtccaatataaataatagaagggggcattaaaactgcatgtttggtcagtgataaaagataatgattacaagtgaaatgaatgattaaacatttcaatcataagattaatcaagatgatggtaattgttctaagtctgcttttatgtgtatcatgttactggtttaggtaacacattgttcttagctgctatctgaatgatttatttaaagtgactatagaattacttctcacattggtaccagacttggcagtgagattttaagttgttcaagtgcttaagtatctctgtgagccaaaggttggaggagccctcagcgattttgggttgtgggggatacctgagcctgactgcacctgccactcatgaggatgatgacagcgtaagattggtcattcttccaggagtcatcactttccagaaattcactctataacatagtttttctttgattagccatcattaagggcaaaggtactttccatggcatttgtaaggcagctaattaaaaggcacttgccggacaatagtaagcaaaagagaagtagaatgagagatcatcgttctttcccagtaagagaggcgtgcaggctgggcgcctcggctcacacctgtaatcccaacacctcttgaggctgaggtgggaggattgcttgaggccaggaattcaaaaccagcctgatgcacatagcaaaaccatctctacaaaagaaaaactaaaaaagttagctgtgcatgttggtgtgcacctgtagtcccagttacttgggaggataaagcagaggattccttgagcccaggaggtctcaaggcggtcacaccactggacgtagagtgataccatgtc

SEQ ID NO: 63653 - DNA, 1050 bp, Homo sapiens
ttgcccaggctgtagtgcagtgatcttggctcactgcagcctctacctcccaggctcaagcaatttctccaccttagcctcccgaatagctgggactataggtgtacacccctgcccagctaatttttgtattttttgtagcgatacggtttcaccatgttgctcaggctggtcttgaactcatgggctcaagcagtctgcctaccttggcctcccaaagtgctcagattatagatgtgagccactttgcccttcagtctttttttttttttttttttttttttttaatgatgaaatggtttggcatttttggcttgtgaagtaaagggatcagttcatttttgtgactgggatttataaaatcattaaataagtgatcatacactagatatttttaaacagattgtaaacttttgtgactatcaacaatttcttattttgtaggagctggtaaaaatagagttagaagagttagtcacccatttttggtcagagtagttagtttgtgctctttggaattgaatgctgaaagacaaggttttcatatttattgcatctgaatccctcattctctgtattgatgatatggtcgtaaagtgtatttggggtggggcacagtggctcacacctgtaatcccagcactttgggaggtgtgagtgggaggattgttcaaggacaggagttcgagaccagcctgggcaacatagggagacttcatctctacagaataaaaatttaaaaaactagctgtgtacacctgttgccccagctacttgggaggctgtggtgggaggattgcttaagtccaggagttagaggctgcagtgagctatgattgtgccactatactccagcttgggtgacagagtgagaccttgtctcttaaaaaaaaattaaaaagtgcatctgtactccttttgggtgctgtgtttataatgggtggtgttccatttacctgagtcactgccatgtctagtgggctcttctgggctccgtcctgagtttgtcacacctcctagggcccagaggagatgatgtggtatttctat

SEQ ID NO: 63654 - DNA, 6738 bp, Homo sapiens
aaatagcttacagtaattgtgccctaattatttagaaattgtgttactaaatgtgttttaaattcatgcatcagatatcacatcctgtcttgttcaggggccttaaggaaattatcaaacacaatgcagtcatcttatttaaaaggtatttacattgtaaatagaccggaagcaagtaacctagcaagatatctgcctagtgtccagcagccttgcaggagttaaaagcaaaatttatcagacatcaatagtttattgaagaaatagtcctttttgcttcataatttgcagaaggctgcaactgtcagtcatgatgtactgcctcttgaaattagtcaatagagcaaacagcaagaattgctgtgggcagaaaataagcactgtaatcatgacataactggggtcagtgatttatggatttcaatatagtagtagctgcatatgattgaaaatttactaggtcactagtgcaccaaaaattttattcacagcctccaggcatcttttgaaatgtgcaacaaaataaaaacctctgaacctgttttgacactgcaaactcagtggatgacatgccagcccagtgagtctcatttaaatgtaaatgtgtcataaacttttgtaccatgctctttaaaaaatgccagctacttgaagggataatgcatgtgaaactgatttacatattaaagtagtgaaaaaggaccttgtaataatcaagcttgaattcttttattttaaagttggaagctgaaggtgttcctgaagtatctgaaaaatatgaaattagctctgttcccacttttctgtttttcaaggtaaggataaaggtggtacaagagattatccatttgtagggtgccatggggctacctattttgtttctttaccctctctctaatccccgaatattaggtgtttggctgtttctggccctccacctttcttctgatagtctcatttttgcaccgatgctgagaaagaagaccatgccagctgcttgccagcatcttagaaaagtagcatggactgtgtagggccagcagccagaatcagagcttcttgatcaaaattcagatatgtggctgtggaaccccagtgttccctgagttggttaaattggttgtttagagcatgtgcctggacataatggaatctctggctggttctggtttgatgaatgacttttaggaagcaggtgcacacctgtgcttccaggcacccatgggtgtcatcgtagttccccaaatacctcatttatacttagtaatagattcattccagccaatgtgggggcagtcttttttgtattatgttagactgacctgatttgactttgagatgttgcagtgttttctcagtgtgtttctgagaaaagaaaaaaattatgtatttctaaaattgagatgcagtgcaggcaattggcaatgagggtttctttttttacatctccggtaatactgttgtcccctttaaaaatctgctataacaatgtcattattatggaatgctgcatgtattctaaataactttttaaactttagaattctcagaaaatcgaccgattagatggtgcacatgccccagagttgaccaaaaaagttcagcgacatgcatctagtggctccttcctacccagcgctaatgaacatcttaaagaagatctcaaccttcgcttgaagaaattgactcatgctgccccctgcatgctgtttatgaaaggaactcctcaagaaccacgctgtggtaagaagctgcctttaacataatataaacaaaatgggtgctttcccagaatggggtatggttgagatgggcatcctgtttccaaggatgctataccatacatcttatacttgtgttcacatacttttagaaaatcaaaaaggttataattcccaatgacactatataagaattagtttgcattatggactcagcatgttggaaccaaaaggggtctcagaactcatctaattcagatttttgttttatactgaagtcctcagactcaaagatagaggtgacttgcccaaggtcacctggtaagcagagttaggattaggttccaactaccatattgctgtctcttttgcctgtttatctacttttgctgttaacagttattttttctttcttggcagcctcctgtttttcacctagttcagattcagcaattaaaaaatttgcggaatttttcagtgtttttgtgtccagcctgtgtgcttttgcctcccctgtgtcatcactgtctaatgattctcttcctgcattgctgtcatttccagtttatagctgctggtaatggaaagattccgaattcttggcttgtagtcactcttattttctgtacacatggatgcttataattttgtccttaagtaagttttagagttatttgacccctctggtagtgggtttatgttattttctttttactgtgcctagtacaacattagtatgctgcataattgagcatttaatgccatttgatgatgctgttgagactctaagagtatttgtatcaactacacaggagggactttattaagataggggcagtaacattgagtatgctcttgatatgattacagcatgtccagagtgactttataaagatagccaagcttctagtgtgaatttgattctaaattcttccctgtagggttattaaattacatattagcttatgataatgtctagttttaaaaataaagtttcatgatgaattcttattttttcgagatggaatttcgctcttgttgcccaggttggagtgcaatggcacgatctcagtgcgacggaacctctgtctactaggggtcaagcgattctcctgtctcagcctcccgagtagctgggattacaggtgtccaccaccatgcccggctaatttttttgtatttttagtagagatagggtttgtccatgttggtcaggctggtgtcaaactcctgacctcaggtgatccgcctgccttggcctcccaaagtgctgctgggattataggcgtgagccaccatgaattctgtcttaaaagtatctcttagttctgcctaaaaaatttccctgccagtatttatgtgtcagataatgcctgctatttgtgtattgcaaagctaacttagtctgtactaaactaaaggtagcaacagatagtctctgttgcgtttgttattttgtttttaacgggggttgcaaatggttcacattcaccttcttccatgaaacatgaaaattatttcttgtactttgtgcggtggccactaaatgggaacttaccacttcagttgaatggattgtattcagcaccttcattcagatctcaggtacagtagaactggctgtgaaatgtgggtgaagcacacctacagtgaaatctctacagtattctctcctttggggttgaacagcagcagtctcagtcttttctgaatgataaacctaatgaaaaggcaggtggcaacactgaagcttggggaaggagtgctcagaggagaaggatgtcctgggaagtgtgctgcactgggtgtcatgccaggcgagcctcaggcccacccctgcggccttagcaactttggggacaagtcaggtaccctccttgtgcctttaattccttctagtgctgttgggaacaagattggctgttggagccaatcttggagggccttttcagtgtagatattgtatgattattcaagtaaattagagagaaacttagacattttaatttttctgcttaccttttactttattaaactgaatttaaaatatactgctagcatttttatatttatattaaacttatttaaattatgtttattataatggagtgagatttggaagactgtacaaataacagaataaaaaagaagctttgaaatatttcagggctgggcgtggtggctcatgcctgtaatcccagcacattgggaggctgaggtgggcggatcgcttgagatcaggagttcgagaccagcctggccaacatggcgaaaccccgtctctactaaaaatacaaaaattagctgggcatggtggagtcctgtaattccagccacttgggaggctgaggcaggagaattgcttgaacctgggaggcagaggttgcagtgagccgagatcgagccactgcactccagtatgggtgacagagtgaaactctgtctcaaaacaaaacaaaacacatttcagagccatctgaaaacgtagtattatagttatttaattaataaaagacaataaatattttgagatacatatggttgaatggttacagtttcttcttttaaagtacttctatataatttttataactacattttcagtgggtttttctgtttcctgatattttctgtttcatgtctttctgtcacatatagtaaatagatcatttaagaatgttgctgttctttaataaaatacttaggattaattggaaaatatttttaaactgttttcttatgggaacataagtcacctcgaccctctgctgttcctttctgagcctggttagtggagcattgtttttgctcttcttctggcattttagagaagggcgtaggcaaagctccctttataaaagcactggccatctcatcttgtgaacacgcacgtggctgctctttccttattttgcaccaaattagctttgaaagtgctatctctgctaacaccactgaactcccactgcggagtattttgatgtttgttttttgattagtttgtccccaccttgctttctgctaatcagaaaaacatgaatgaataacatttaaattttatatctagaaaaccttgaaagccatttttagggtctctcctggagccccactggactcagcctaacccctgcacaggtcatgtctccatcttcttatccttcatgtgggctctacctgcagaattgtatggtgtgttatgagcctgacgtgtagatagggtctcagttgaaaagaattggattgtccttactctgtgctcctcatgaagatgggaaaatgcttgttttaggaagagtttccagaagcactgaggtatatgtcatcttaaacagaatcttaaatccttgagcaggttaattatttgggaattcttataactatttcagttaacaaagcttttagcaaagcaaaaggtatttgaggcatagtcagatattccttctgcagtgagagtcatccagccgggctcttacttttgaatcagccacagaatcaggtttcagagatgttttttagggtttattgttaggtagtgatgagatgcggtgttaggcacctattcatgtcatgagtagaaatgactgggggtggaaatggggattctgtggcagttaaacattacttttctacatttaaatatttttattgcatgcatgcatttttcttaaaaaaaggtgtgtaaatattttgttactagaataaagccttcttgccatcttatccttaagcgtaacatttctagtctgccactttaactcttaaaaatgaaacactaccaatcaatctttctagtctgcatgtaattgcctaaagctaaaataaagcttcttctcagccagttacagtaaaaatgagttaatatattggcaacagaataaccatcagcaatcagccgttagctgtttactaatgaactcccagatgaataaaaaaatttcagaatcagtgttttacttcaggctgtacatgaacttaacacttcagatgtaggaaaagcaacttatatgctatacaaataaatactagtgcttcatctcaataaactgcagatttggaaaatgtttagagctcacttgtagatccatgttttaatagtaaatatgattttgggtgacatcagtaaagcccattcttgcaattaatcttatattgaattttatggtttgattttatttaaaaacaattgctgacactgctaagtcttatagaaattttgaatctgaagaataggttcttttccagtgaattacaactgtgtttgagaagaagaatgaggcgtgaaagagtagggccctacatagtattgggaacaatggagaagaattagcttatggaaagaaaaatactttttttttcagactaggctaataggtttataaaagactgatattcacactcttattcttcagttataatgtcataataagatgatgtcaaaaaagtacagaataaaaatgtgtcacaaaagtataataaaatcatggaacataaaattgtcgctatagtgtagtaaaaaaattacattacatactttagggaatgtaaatagttttaaaaaagaaactgtcaagttatgacatgagatgagaaagaataccgtcaatctattgatggttcatatataacaacagagaagatagctttaaaattcaatgtactgtgtgtattttagactacaggagaacacatgccttcttgatttctaatttatcctacttagagatagtgaagattgagaactactgaagtgggaactcaggaagtagtaaaatggcagtagaaatgcaacagcattgggttttaagtatagtcaagtagtagttaaaaataacaattgtagaattttttcatctgcccagaattgattctcatagattcataacagaaaggctgggagggactgtcagagcatcaggtcagtctcctgattagtaggaaagtgctgagcggaggccacccatggcctcatcatgtgtcaccttggtgggtggagggagcaggtgtcagattcagattt

SEQ ID NO: 63655 - DNA, 1447 bp, Homo sapiens
gcctacctatcctcagctctatgtttctggagagctcataggaggacttgatataattaaggttagaattgagaagtctgtgctttgtaaagaaattccatttagagcatactttttaaaatgttgtgataaatctaagatacaaatttcttatgaatctatatttactaataagaacctgcaatgaatacacagtatttctgattagttgattgatcaataatctgtgttatggtatgatcaaggagatttatgttataataatttttttcataaaactggtatgtgtgcttattttaggagctagaagcatctgaagaactagatacaatttgtcccaaagctcccaaattagaggaaaggtaagtgttttagaaggtttcaaatagcctatcatttaatatattaaaaatattttaaagtcctcaggttttgcattgctctttctgtgtagaaatcaaggatttggtatgccagacgtcataattgtttagtcacattagccattcaaactttggcaaatctaatttgtattggagaaattttagcaccaacttagtgatcatgtggaggatctgctttgcttttatagaaatgtcattgtttctgtggaacaaccaagttttgcttacctctctgcatttcagagccagggtccagttgttttgtcactgctccttggcgtaacctcagcacactcgtgttttactgggtgcagccttggtgactgctgcgggtgctgccccaacgccagagcactgagtgacaagtggtgagtgtgaaaaactcatcacctcgcaacaagctttgagcacttctcatggcctttctagaccacgagaacttacatgaacagattttggaggtgtgaaacatgtatttgttttatcaaggatctcacttggcttttagagacgttctcttacagaaatgttggactttggtgtgtaaggcaacttaatgggatttttattgcagtaaaattaatatagaactttaaaaaggaatttattatatcagcaatcagccattcatagttggggctggagattgtaagataaaccttcctttggtaatttttttttgccatgtaacatcttgagaatttctaaaagtgtttaataataataaatacctcatttgtctgtcgttaattaataatttctataaacagcgtccaatccacgtatgtcaggctgatctttgagtgccgcattctgtcctgtggttggtaccatttcctgtgttcttcatgagaaaatgatactcctcatcccttttttgactctgggcgtcttcatgtgtggttcttgcctgtagcctggtgatgcccttggcccatggaggctgtgtggtctccaaagacagctgtgttttttatatgcttgtatttgctcttcagttgattttccttctctgctgagtgcacttgccgctgttaatggcc

SEQ ID NO: 63656 - DNA, 1973 bp, Homo sapiens
gcaattctcatttttaatgggatggttcttacagctttttgatgtaagtacatattgattatgcgtcattttgaatatcaagtttgatagattacttccaccgatagtttgagcagaactaattttctttcagattgagatcagagtggtaatttccagaaaccagccatacacatttatatcatattttgtaattttcatagcaattgaacctctacttaattctcaatcagttgttgaagtaggcagggttggacagactttggcctgttttagagataaagaaaccaaagttttgaaaggtgaggctgttggaataaagaaactgcctcacttgttagcaagatgcaccgggcaagtgacatggagaaccactttgctcattgggaaagggacacaatacttcacagggcagactctggttgccataactagtgtataagttaacataactagtataatgaagctaattagttaacataactggttaatataattaggtaataatgaaagtaacagtaacaaagaaaatgttaatataaatttcagcatgttggaaacattaggttagggcctaaattctttgattttggttcagtgtattgaaacaatagaggaagttaataattcctagtaatgataaagtgacattttttcttattctcggtaatggtttaagtggatatttattctcaaaactatttttttctggaaacctagaaagtattaatacattttggaaacaatgttattggggctattaaaatgttgacatggtaccatatcttttccacaagattgctggaatttggagtcctgtggcatgaaaaaagcttaagattttcataaactcaaaaaagtgttagtattctgtaatgtaaaaataaatgaggctggatgcggtagctcatgcctgtaatcccagcactttgggaggccaaggcaggtccgaggtcaagagatcgagaccatcctggctaacatggtgaaaccccatctttactaaaaatacaaaaagtttgctgggcgtggtggcgcatgcctatagtcccagctactcgggaggctgaggcaggagaatcgcttgaacctgggaggtggacattgcagtgagccgagatcacactccagcctggggacagagtgagactctgtctcaaaaaataaataaataaataaataaataaataaaataaaaagaaaaatgggagtcagaatccagttggaaatgggaaaataattgtcataatcattgcaaaaaggctaagtgagttaagatcattttgcatgagtgaattaaacaatgaactcaaatctctgtagaaaatctcggtttcacttagaggaactttttgaccacagagaatataaactgttggaacacatgtcatctcaagtggttacaaaccaaaggaaaaggaagtctgtgggtcacgtgtgcctgggttgatgtgtagatgggttcgtacttgaagaggggatgagcagaagctctgggagctgagtgaaagtagtggcagctatgctggacaagtgctgtgctggttgacaagagtattaggtacaaccatgctgcttgggtcatacaaaaattgtaatctttgcaaattttttttcatttaggaagcaaaatgtggattcagcaaacaaattctggaaatactaaatagtactgggtatgtaaatgttgttttcaaatggtgtattaaaaaaattccaacctggccaggcgtagtggctcacgtctataatcctagcactttgggaggctaagacaggaatattgcttgagcccaggtgttcgagaccagcctggacaacatagtgagaccccatcgccacaaaaaataaaaaaattagccaggcatggtcacatacatctatggtcctagctacttgagagactgaggtgggaggatcactggagtcttggaaggtgaggctgtagtgagccgtgattgcaccactgcact

SEQ ID NO: 63657 - DNA, 1015 bp, Homo sapiens
tggcctgtaaagcctgaagtgtttagtgtctgactctttaagaagaagtttgcccacccctggtctaacccaatattgtccggagaaaaatccagataaagtcatatgttggaatgactaattctgtgtagtaccagacagattaagaagtaaaatcatttccattggtctgtagtacattttgttagcagtgaaacggttttcttgattattttaaaaacatcaaatgcatagaggttttacactttgatttaactgtatttccagttaaaatgtcttctcttttttgcagtgttgaatatgaaacattcgatatattggaggatgaagaagtaagttctgtgtttgatgtttcacccttgtcttagctttaatcttaagggcctgataggatggtttcaggattcctgttgtttctttaggttcggcaaggattaaaagcttactcaaattggccaacataccctcagctgtatgtgaaaggggagctggtgggaggattggatattgtgaaggtaaggccagttcttctgctgttctaaagaacggaaaagattttggtatgtttaaaaatgatttcatattgaatggaaacttgagagttgtttttgactcctgtttccagcctgactctcagacatttctagaccagtatcaccgtttctgtgtgcatgactaccctgccattctcactgtccccacgtggcagcctgttcttactttcacacctgagctaaccattgcatctcctttctgtggggtgatcttccctgtcactcagggtccttgttagatcctgcttcagctcccagacaacaaattgttttttcttgccttactcatctgcccttgggtgcatggagtgacagcagtgtgaggcctgtggcccggtgctgcccatccttgccacagaggctgaggatcactgcccctggtcccccgaaagaaaaaatgtaggtcctttttggttttgagatgcttggaaatctgttatctgttagattgtgttttagat

SEQ ID NO: 63658 - DNA, 1576 bp, Homo sapiens
tttacatttttttttgagagagtttcgctcttgttccccactggagtgcaatggtgcaatctcggctcactgcagcctctgcctcccaggttcatgtgattctcctgcctcagcctcctgagtagctgggattacaggcacccgccaccacgccccactaatttttgtatttttagtagagatggggtttcaccatgttggccaggctggtcttgaactgctgaccccaggtgatccgcccaccttggcctcccaaagtgctgggattacaggcatgagtcaccgcgcctggccaaaataaaagtttttaacacgtgcttttgtaaagtgaagcactagcctaccactgaaatgacatcagcactttggaccaatatgttttataaaaacaaagcttgagttccattgatgcagaggctctttttgtcctttggtggcctctgtgtaggttttgtttcctgtggagttccaggtttgatatcatacttcttaaacaagccagtgagacatttttcctggggaatggtctcactcctggaggaaaaaatttttaagactattgctcttgaatagccctgaagcagcagaaacagatctgcatttgtttcttccctccctccctccttccctccctccctccctccctctttctctctctctctctctctatatatatatatatagtcttatttttgtaagacacaaagaatactcaaaccccaaatactcttgagcctgttcttgtctgaatgttttatagcctgtaccttagccattggtaactcttgggaagatacaatcaataaatctcatttaattctaaagctaagctgcgtgggtaacttctttttagttatataacagagtgttatatgattttttatgttcacctgctaagaacatatacgtttgaaatgtgtgatattgttaacgtttttccttgagaagatatatggaatagatcttacgatcccattttgatctgtttcttgcagaatgcagttcttcatgttcagttcaattaaaagatgtttgaaatggtctaatctggctggcctctttggagcaatgagcgtttgttttgttgaatgagggactgaatgatgatttagttactcagctaatctagtgtcctgagaaaattgtgagttgttattgcctctgaagagtaaacggttcactactgctgttccagaatgtttggacttaagacagtttgttgagagagatagaagatttggttaggtttagactttccacctgccggctcgcattaacagcagtgagggtggcgaggactgccttatttggcgcgctcccaatgttccaggcacactgctttggtgctttaagaggctgcttcacgtaatctcccaagcagcctcagagagcagaattcttcttagtcagtagatgaggaaacagagacatagagaggtcaggtgaattgtccaccatcccataactagtaagccattgagtccagattccacctgagggccacctgcccttgcccactcagctgcgtggtcctctccgtgccttcttgagtgtgtgctcagaaaagtcctgctgg

SEQ ID NO: 63659 - DNA, 1051 bp, Homo sapiens
caactcctgacctcaggtgatctgccctcctcggcctcccaacgtgctgggattacaggcatgagccactgcacccagccttatttatttattttttaagagacagatttcaccatgttggtcaggctggtcttgaactcctggcctcaagtgatctgcccacctcggcctcccaaagtgctgggattacatttgtgagccaccacacctggccaagaataccttgttaaattttttaacctgatagtgtattcagggtttatggctcatttagtttgagagtgttaagagactggagttttaatccaataggtgtttcttttggttctcagatatacatacaagctgtgattgtttagatgtttccatctttttatatatgcatatacatattattattgttgttttttatttttaggaactgaaagaaaatggtgaattgctgcctatactgagaggagaaaattaataaatcttaaacttggtgcccaactattgtaagaaatatttaattacattgggagcagttcatgatttagtcctcagaaatggactaggaatagaaaattcctgctttctcagttacatgttttgtgtatttcacaatgtcgtgctaaataaatgtatgttacatttttttcccaccaaaaatagaatgcaataaacatcttcaaattattaacaataattgtatgaaaaaagtgtatctttacagcagtattaaacatacagctactataattaacccaccttaaatctctttttcttagtacatgagtatcttctagcagttaagaaaggcagtcttcagaaaatggagaactgtggcggaatgcagtacacaacagtatttaggacaactcctttgccaacacaatggctcccctcgctggtgaaagatctctttacagcttaggaaaaacaacggaaattagtttctgatgtcattgctgagctcggcactggttacattgcagaggcagtgtaggatgtctgcaggtttagagactcatttcacaaggcaccagtagtgaattatcaagaaacattt

SEQ ID NO: 63660 - DNA, 1030 bp, Homo sapiens
tctggggcttctgaaatgacctggtatttttatgttcctgttagaaatggtgtggctttcacaaattaagtgccaggctgggcacaatggctcgtgcttgtaatcccagcactttgggaggcggaggcaggcgggttgcttgagctccggagcttgagaccagcctgagcaacatggcgaaacctcatatctacaaaaaataaaaaattaactggtcatggtggtgtgcacctgtagtcccagctacttggggagctgagatgggaggattgcttgagcccaggaggtcaaggctgcagtgatcgtgccattgcaccccagcttgggtgacaaaataagagcctgtctcagaaaaaaaaaaaaaaacaaaaaaacctaattgccaggacccgcaaattctgactgaaaaagaccttcttgttctccccacggtcattcatctaaatggttgtcagtggtacagtgttcatcttttctcaaaaagtcaagttttatttgaggaagttacagatttccatatgaactcctagagagagagcctgcccttgttcagggttgcccgggggatgcctgccatgtggtaaggtaagggtttctctgcccctcatctcccagcctgctgtccccaggagcgagttccttaacccctagccgtgtcgttgagcccaagcttgtaacctggatatgggagctgtctatttaggaagaaggcatgtgtggtaatttctaaaagaattaaaatagatttttatgctcttgtattatgttttgtgcttaaaaggaagagccccgatataatggagaaaagccagaaggagcttggatgccctcagagagccctgtcacctgtctgtaggggcagaaaggaggatgcctttcctcacccatcacaaggggcacagccaacacctagaatagattaccaaggaaaagtataaaatgtatgtaaagacttaggtgacacaggagccttcagaaataaaaacccaagagaaactgcatgttcacactcagattcaacgaagagtgg

SEQ ID NO: 63661 - DNA, 1043 bp, Homo sapiens
gtagctggcagtgggtggctggaggcttggtgggggctgtcagtgagcatacctacatgtaagatacacacacacagaagggcaaattcccagaaaactgtgtgacccaggcccaatgacttgagaaataagccattataggggttggtgtcctttgaagatatggccatggactttacctaggaggaatggcagcatctgcacaatgctcaggggaccctgtaaagagatgtgatgctggagacctatagcatcctcgtatcatcgagtgagtgaaacctgccagtaactccaaggagcaacactttattccttcctgataaatacaggaacctgtataaatttactgctatttaggtatcagattccagtccatgaagaatgtgtcatcctctccaacgaaaggctgaaattggctccttcattgcacagctcctgaagccaagctgttgtcattcttcaaaggacctgacttagcattttgacaaagtcttacattatttccaattaaaagggcattgcattaccaaacctgaactgatctttgagttggagcaaggaacacagccacggagggtggaggaagccccaaatcagagcctctcaggtcagtcagcatgtgctagacagggacacctggagcagtaaagcccagcagatgccaatttgttttcaccaatttttacccaggtcctagacctgagaacagttagtctgcatgcaccaaacacaggcactatatagaccccaagaatacctctcatacatataacccagccttttattttgatgaatagtctatttgctcaaaacctaattcctgccttcctattcttagacatcttcctttgctttttattttctcaatattctcagttgtcctcctttcctctatttgcatggacgggtcttttttcagacatgtattcatacatcagtttattctttcaacacatcttaattcagcacgttttaaatattggtaattttatagttataactgtgatcaaaataatgctcctttttcatggagtttctgttct

SEQ ID NO: 63662 - DNA, 1059 bp, Homo sapiens
tttttttttttacaatattttgcagttttcaatgtacaaatcttgtcattctttgattaaatttattcctaagtatttattctttttgatgatattgtaaacagagttgttttcttgcttttatttctgaatttttcattgctaggtgtagaaatgcagttgactttattggccttgcatcctgtgtccttgctgaacctgtttattatctctgataggttttgtgtttgtggattccttaggatttcctgtatacaatataatgccatctgtgaatagagatatgttactcctttttaatctggatgccttttatttattttctttgcttaactgccccagctagaatttccagtagaatgtttactagaagttagcaaatcaaacatccttgtcttgttcctgcttttaggggaaaagccttcagactcatcatgaagtgtgatgttagctgtggttttttaggtactctttgtcaagttgaggaagttgcattttattcttagttggttgagtgtttttatcatgaaaaggtgttggatttgttaaatgctttatctgcatttattgagatgaccatgtggtctttgtcctttaatgttattagtatggtgtattacattgatttgtttttgtatgttaaaccaaccttgcattcctaggatatggtatacttctcatatttcaaaaatattgtttgttcctgtagcagagaaatttttagttctttctgacttctgtattttagaataatttgccacaaacttttttttagtgcttaagtgactagaaagtagtatgcagaattttctattttgtcacattttatccagtctagtcataatgatgcaagattttttttgctccttagttcagctaaattcagcttcttgtcttgcaaccaggaaaaattaggcatgcggatacattgaagggtgaggaggcagaatttattaagcaaaaggaaagctctcagcaaagatagggattctccaagcaggtttccccctcacaaattgaatacgaggccaccacgcagaggttgaagaagccaggccc

SEQ ID NO: 63663 - DNA, 1021 bp, Homo sapiens
ggggtgtgagacaacagagagcccccatggagagggcctgggagaagctgctgtcagggattgcaagtttcagactaagaggatgaatggagccttcagagagggcgggtgcgcgggtcggacgggtgcgcgggttggagtacaggaggcccagagcttggcggcggtgagagtccgagtgaagacggatagctgcttgggcctgaagtcagcgggatgatgtttgctgcagaatggaatacctgcagagggcacaggtcccagatatgcagtactgactgtcgcccagcaaagacccccagtaaatacccagccccactaggagcacgttgccaggacgccaggccctccctccctccggggcagctcctaccccagctggcatcgcacatcggacaccccgttcttgaatgtggtataagtggaattgcaccctaagtcctctgcagtgtttggctttctgtaactaacctggggtgttacgcgatggtcatttgttttcattgctgtgtgatgttctgttgtatgaatatgccacagtttatgcatcttttctactcttgacggacatttgagttgattcttttgtgaacgtgctgtgaacattctcgtaagtggttcagtgatgcacatatgtagttctgggggctgtgtgtctggagtggagtttctgggtcacgggatatgcatgtttcaccttagtggatattgtccgatggttttcagagttgctgtacccatgtttgctccaggagctgtctacgagagctgccgtggatacctggaaaagtcagtctcatttcagctggtgtgtgagtgtgacattgcagggtggcttgtactgacccttccctgacagctagggagggtggacaccagttcatctgcctactagcctagggtccgatttgctagtgcctccggtagggcgctagttttccttataaccacctcctgggctgctaggccacctcagttcctggtggccaggtggagaccatcaggaaggggcagtggcctc

SEQ ID NO: 63664 - DNA, 1033 bp, Homo sapiens
ggagtttgactatttgaaaagtctagaaattgaggaaaaaattaataaaattaggtggttaccacaacagaatgctgctcattttctactgtctacaaatggtaagaattgtgttctaagtggctgtttgatttagttttttatttttaattttctgtgtgtgtgtagattcctttttattttagaagttattcctgctttaaattttggggggagggtaagttatctagggtagcaagtgataggttgaaaattcaaagtatgcaacaaaaaccacacgtgcactttattatgctgttactctgcacgtctgcacatctttctttattgtacaaaacacctccaattggaaatattcatgttcagagaccccatagcttataacccaatataggaccacaccgctttctaataccagtactcaaacagtagtgatgcatgttatagtttttcttttcatatggagaatgaggtttttattttcagataaaactataaaattatggaaaataagtgaacgggataaaagagcagaaggttataacctgaaagacgaagatggaagacttcgagacccatttaggatcacggcgctacgggtacacgttgcctttgctttatccaatgctgttgagaagttaagaataaacgtttcagtctgctgtctggagagtgctgcgcggtggagtactgtgaggtctgctgtgaggtctgcctcgtgattcctgaaagtcgtttgcactcatgtgtgtgtttaaaagcaaggtctttctcctgttttcacaaaggcagaaagtcacatgtggtccttaggaaacacagcaatactaaggggaaaactcatatttaattctacagcagaaatctttgtggacatagcaaccacccttctctcagaaggttcagaacagcacctgggaggttggagttcagatgaaattcagaacacctcacaggtgcagtagcacaggttgcaggtcgaaagatgagctgtgggccacaggtacattcaggacgcttctcggggaatttc

SEQ ID NO: 63665 - DNA, 2200 bp, Homo sapiens
aagggggtgccgttactagattggaaaaccgttggttgtttgggtggttgggtggtttggttgcggggggtgggtggttgagttgggtggtttggttggtttttaatgagatttcagccccttttacactattgtttatcaagtgaagactgagtgagtgagcccattccacattagtcttggagagtgctacagaggacgctgtaccgcagaagcctttccctaacacatgtgcctctgggagtgatgttgggtctgttctgatgccatttctccagctttgccgtgtggggtggctacacctggggttgtgcattcctcaggaggagtgtcctcagacttctcacatcgatgttgtcaccgtatttcctatgagttcatcaaagcgagaaaggctgtggcatttgctgaaaatctagtttatagggtcctaatttgaaccaagatgttttgatccaaaatgttggtgatgtctgatacacagtgctgccgcctttgcacccctgaattagtgtaaatcacttttagtgacagtaacacgagttgtgcagttccatcatcatgaaactgctgatcctaaagtagaagtgtgatgggacccccgagggtgggcacttgaccccctccagccttgtccatctcttctgcagccaacaccacctcccacccagttacctgtgcacaccccaccctcagaaacccctgttcctcctgatcagaccctgccacaacccatcagctcacgtgctcattttgggagaacagtaggcctttactaggcccagtcttggttttattcaaggctgcttttgtaggtttagcctaaataaaacgggtataattggtggccctactgaaggtgtgtgagaagtctagttatttcattagttggtgcatggggaagagaccacagacaggtaattctgtacattgacttaggtcggtatttgagatcttacctctctaacagttcagagtgggctatttatgtatctgagcctaactgggtaagagtcagacatgttgctgtttttaaatttttgctcttaaattattttagtgccagaaaagggatataattaaaagaagaaatcttggccaggtatggtggctcatacctgtaatcccagcactttgggagaccgagatgggaggatcacttgagcccaggagttcaaagaccagcctgggcaacatagccagaccccatctctaaaaatgaaagcaaattattttatatgcaaattaaaatgttttcaataaaagaaggaatctttgtaagtattgcagctatcatatgttttgattaatgggaaatttgttagaggattggggtaggtgtgtgtttttaagcctgaacttggtagaactgactcttcttgctctagagaatccaagggtgtggtcagcactacctgggttaaaatgagggaagcctccctacacacacttttccaagttggttttttacagaattcagccagacaagactcagttgagagcttttctttttcccctaagctttcaaggctctcccttttggtttctaattacaagaataacaaaaaatactatcattaattttttgttttgattttaaagcttatgtttttcttccagctggatgttagtgagacacaggcctttttccttttttcatgtgtgatgctattcctcacgcctgagctctcacctctgaccataggcggcctgcagccagcgcccactcctctctgtcctttctatttctgtgcgaattgggcttccctaggaagcctccctgaccacagcactcaacacagagatgggggcgggaggtaccttctactttttgttttaacctcaagtgaagtgtaatatataatacatacctccagataagacatctgccctataagtgaccagctccatgaatgtttgtagggtgcacatgcccatgtagccagccccagaccaagaaatggaatatcctcagctccccagcaccctgctgtgcaccctgccagtacctggagccagtggaggtttgtggggtttgcaccgagaagcatagtcctagtgcagtgagaagaggtgtgtgcatctagctgcaaggagaggacaaagggaggggtgcagctgagccacccaggaggactttgctgtccagcgcctcagtgtggccactggaggacacacaggagagggagccgcaggcctc

SEQ ID NO: 63666 - DNA, 1011 bp, Homo sapiens
gacctgagaattaatttatggcacttagaaatcacagatagaagctttagtatccttcctcagagggacactggcgtcttcccgagggtgctctttagatagtaatttctctcgtccctttatacacctgtatctcggagtctagtcttgtaaataccatcactgcacagcagcctgtgatgtaagttctctgtgatttgaaatgtttgtccctaaaaatacaaatttctttctacctttgggaaaaagttatctgtataatgggaattacctgaagtccactgcctgcctggtttaatcagaggcagttttaaataggctacatttgaaaaaccaacattatgtgttctttttttttttctaaatttgctaatgaataatagaaaatactggcttaggttagagcagtgtttaatcacccatctgagcagcagcttccagttagaacctgtgttcttctgtggctgtgcacagtctgggtggccccagccctcctcacatgggcccctttccagccagcagccgggagcatggggcttgcttcgtctgcagcctctccagggtccctgccgtcctccctctgctgtccagtggcttgagctggggttccatgtcgtatgttggttttcttagttgtttcagcttgaagggtgaaactgggactgctagtctgaattggcccacagctgaattctgccctttcttatttttttcagttgaaggatttctgtataggatttctgttggatctgttctagctacacagaataagctcttcatgtcaggaagagcagcatcttttggaatttggcggcattcttgtgttgtagttttgtgtgggagtgtgggattttgcacagatggtactagcttggttttcctatttatatgattaagtatgtactatcttgctattaagggctttctgtataacattaataatagcagcaagatgaaagcggtgttcgcttgtctgtgtctccccctgggccggggcgttgctgtagtctg

SEQ ID NO: 63667 - DNA, 1599 bp, Homo sapiens
gaaagatcagaagacctagtgttgaggccaagcccttccagagtctctctgaaggggccacttcctacttgaacttgaaaatgatttgttctctgatttttaaacagaagctgaaaacattttattttgtttttcagtttttgaagagcctgaagatcccagcagtaggtccttcttctcagaaataatttcatccatatccgatgtaaaattcagtcatagtgggcggtacatgatgaccagagactacctgtcggtgaaggtgtgggacctcaacatggagagcaggccggtggagacccaccaggtccacgagtacctgcgcagcaagctctgctctctctatgagaacgactgcatctttgacaagtttgagtgttgctggaacggttcggataggtaaggcctgcgtggagatgagctgtcgccccaagcttgctggtttccgagagtgcaaggtcagtgagggaggcgagctgtcctccagcgtcagaggaggacgctcatagggtgttgttttccagaccttttgattgatggatgatagtatcaaggtagagaaaataggatctctgagcaagtttctcacctagcttgtcattccatttatatttagacaagaagtatagcactaggtacaggccggctatgtgttaaatgcttagtgaatgatagtgtattactttttattatgctgataatgagtgaaaaggaaggaagtggggaagtgattcacctcactggaatgaccgcgttgcagtctgcctttccttctggagagaagtagatgaaaacaccccagagccactgcctgtcatgcccagacacagcgtggtcatggctggtctgaaacaccaatgtaatttgtaatgtgatggttctagtaccttgataatttattttgtatacattctttaaagatagctatgattagtgtggttgagagttacgttttttttattatgcaaaaagttacgtttcagatgatggaagattgtcttgcaccatttttatatagaatttttgttcagaattcaagagaacagaggagtctattggcaataagtgattgactggatattctgcaaaaccctctggcataaacacctagaaatgctggatatgatacagcaggtgtctcttcaggtgcatagttgagctcacagataagcaagggaaatctcacaacggccagaaactaagagggagctgaaaccagaatggcagcctctgaaggcgtctattccgagagcagccttgcagccccggctggcctcaggagcatcagcccatagcaggaaccactgcccctgtgaacagcaggttatggtgcaaagctgaagccttgtcccacacgaggtgacttgctcatggtggcttttcctgtatgtgcttggtaattttcaagagctgaagccttggcccacacgaggtgtagagttggaacagggacccctgaagatggtgtctccctccactggcagatagggtccaaagggcagtttgtctgtctgaggccttgcatgggggtggccagcactgccctgagaagtggaagcaaaacctcccctcacaagggtttgcagtttgggtttgtgc

SEQ ID NO: 63668 - DNA, 1354 bp, Homo sapiens
ctgtctgctcttgttttgaacagcgccatcatgaccgggtcctataacaacttcttcaggatgtttgatagagacacgcggagggatgtgaccctggaggcctcgagagagagcagcaaaccgcgcgccagcctcaaaccccggaaggtgtgtacggggggtaagcggaggaaagacgagatcagtgtggacagtctggacttcaacaagaagatcctgcacacagcctggcaccccgtggacaatgtcattgccgtggctgccaccaataacttgtacatattccaggacaaaatcaactagagacgcgaacgtgaggaccaagtcttgtcttgcatagttaagccggacatttttctgtcagagaaaaggcatcattgtccgctccattaagaacagtgacgcacctgctacttcccttcacagacacaggagaaagccgcctccgctggaggcccggtgtggttccgcctcggcgaggcgcgagacaggcgctgctgctcacgtggagacgctctcgaagcagagttgacggacactgctcccaaaaggtcattactcagaataaatgtatttatttcagtccgagccttcctttccaatttatagaccaaaaaattaacatccaagagaaaagttattgtcagataccgctctttctccaactttccctctttctctgccatcacacttgggccttcactgcagcgtggtgtggccaccgtccgtgtcctctcggccttcctccgagtccaggtggactctgtggatgtgtggatgtggcccgagcaggctcaggcggccccactcacccacagcatccgccgccaccccttcgggtgtgagcgctcaataaaaacaacacactataaagtgtttttaaatccaaacagaagtattgtctttttatttaattttattgcatagaatgaagttatgcagggttcttctttggaactaactgtttgagaaatgtgtgtccttctttggcagcgtgggggtatgtgtgcagcatttctgtccccaagctgctgcccgctgtgtttctgtagaagtagcccatcagatacaccaggtaaggtctgggaaaagccagaaccgaggccacctctgagaaagaaaattgcaaggaagaaccaaaattgctgccatccagtaagcctggtttaaagtagcttcaaattcactacagttgaagaaatacgtgcttgctttctaaggcttttgaaaaagcactttggggaaagtatactttttaaacattgctaaaattacatgcatgctaaatttcatcctgcatttcaagccagcaaaattaagcaattttaattacacgatgccaccagtacgttgg

SEQ ID NO: 63669 - DNA, 1610 bp, Homo sapiens
acgatctgatgttttctaagttaattaatacaaaatacatattgataaaacactagataaaagatcacagatagattcattacaaaatttttataatgggtataaaatcaccagtccccttgcataagctctaaccacagtgagctaccctgtttcagctgtaacacagtctcctgtgaatcacaagatacattaactactgataatttttctgtgaaggatctatattggaaggcgtctgacaacctccaccagcaccttttgatgaagaactggagtctgacttggttcgttagtggattacttctgagcttgcaacatagctcactgaagagctgttagatcctggggtggccacgtcacttgtgtttatttgttctgtaaatgctgcgttcctaatttagtaaaataaaagaatagacactaaaatcatgttgatctataattacacctatgggatcaataagcatgtcagactgattaatgtctactgtgaaaatttggtagtaaattttcatttgatattagatataaatatctgaatataaataattttaatatactagtcatgatgtgtgttgtattttaaaaattatctgcaaccttaattcagctgaagtactttatatttcaaaagaatgaataacattgataataaaatcgctactttaaggggtttgtccaaaataaatattgtggccttatatatcacactattgtagaaagtattatttaatttaaatggatgcaggttgtctactaaagaaagattatatataactatgctaattgttcataatcaacagaaaccaagatagagctacaaactcagctgtacagttcgtacactaaactcttcttgcttttgcattataaggaattaagtctccgattattaggtgatcaccctggatgatcagttttctgctgaaggcacctactcagtatcttttcctctttatcactctgcattggtgaatttaatcctctcctttgtgttcaacttttgtgtgcttttaaaatcagctttattctaagcaaatctgtgtctactttaaaaaactggaaatggaaaaaaaaataaatctttgccaaatccttcagattactgtatttacatatggtttaaaatcagacgtcatgatagcttcttaatgaaaccaggactggtccctattttgacattatctttcctacagcaaactttttagaaaggctgcctgccgccttgatgtttcacctttccacgcttaattcgggtgttaaatctaacgttttcatttgtaaaaatctttgttgatgctaccttggaagcagtcatctctcagtcttacatttggagaatgtggatggcatgacatcagaattcctttatataatttaacttcagaatagtctgagatcatcgaagcacgatggtcaagggaattccgtttttgttttagagcaaatatgtttgctgtttgtctttcatcacaaacatcagtggagtttcagcaccttacagagctcagtgaaccccctggtcaccatcaaagttagcacacaacaaagccaaccacgtgtccccctcacagatgacaatggctgaactctgagtgaaaccacct

SEQ ID NO: 63670 - DNA, 1057 bp, Homo sapiens
taaatcattcctgggaatacagcttttgggcccaaagtcattagccatggacaatctggagtgagttttttttccttgtttcctggatttttaggtcctttctggggtgatgtttaaaaagcactgctttggttcgaatgtgttcctccatgttgccagtgggatggtagtaaaaggtgggcctttaagaggtggctcggccataggggctcctctctagtgaatgggattagtgctctaaggggctggatggagggaggtgggtccctctgtagcctcattgaagggatgaggcaggaaggccctcagccgacaccagatgttggtgcgtggatcttggacttcccagcctccagaacagagatcagtttctgttcgtaaatcactaagtctgtgggattctgttgcagtagcgcagaggatgacagagatacacttgtctctccttcatcttcctctccctgttgtcttcagcctgccccttgtgtgatagattacagtatgtgtttggtcttgaccctacctacttcctggtgcagagcacctaaacccctggggcttcctgagcagtgtcttttttttttgtttgagacacagagtttcgctattgttgcccaggctggggggcagtggcatgatctcggctcactgcaacctccccctctcaggttcaagggattcttctgcctcagcttcccgagtagctgggattacaggcgcccaccacgcccagctaattttgtatttttagtagagacggggtttcaccatgttggtcaggctggtctctgactcctgacctcagatgatctgcccgcctcggcctcccaaagtgctgggattacaggcatgaaccgctgtgccaataagtgtcttaagcatgtttattaaagaaagtaaaacagtaaaaagatggtgactccataggcagaacaacctgaccagtgtgtgcgttattcataaagtcaccctattagcagtgtactccaaaagtgctccttggttaaccatttttggtgtaagttgtaaggagccccttcagaatacactgctaata

SEQ ID NO: 63671 - DNA, 1021 bp, Homo sapiens
gagcctcggctgcgcccggggagaacccggggccgggcggcctgtccctcggagcgctagcggctcctttctcccacggcggtcgggtggcgaggcgggcggacgcggccctttgttggcccgggctggtccggggcgcggggagatgccgttcccggcgcagcccgtgggtcgcccgccccttggacgcactggcgctgcgtcgggagctctttgtccgagacaaagcgatttagccccggccgctctggccggagtccctggtggccccgaacccttccagtaacctgggttcagcgactccaaggaaagcgagcggtcaagggccactggccgggaaccctggcagcccctgaaccttcgagagcagagacccctccccaacacccacacgcaccggcgcgggaggtcccgctctgccagaaacaaagcctccccgctcgggcggggggagatgggggtgggaggaaggaggcttcgggacccggcaggacctgggcgggggagtccatggggtcccagacccgactctggacttggcctcggcgggagggccgtggggtctgacctctggcattagctcgagccgtgggctgtgggctccactcccccagactctgagcgaggaaggagccctcccctctccagatgggaggggctgctgcctccagagggttctgcccggctgggtctggtcttgatgcaggaggtcttgccagtcagctggcatgtgggggtcgagtttgggggtggcaggaggaccccttcccaggggaggtcaggcaaccatgtcagtgcggaggggcagctgcttcccgggaactttcacctccatccggatgagtgcagtaagaagagcacagccccacaccccagctgcgtctcctctgggttccaaacccagtctcagtgcgggtgcctgaacacttgggcgcctatgagcagagagcccagaccacacgtctcctcaagcctccttctgcccggttgcgttttctagggcttccttgaaaatgcgtgg

SEQ ID NO: 63672 - DNA, 1099 bp, Homo sapiens
cttcccggccatctggtaggattcttagaagtggatttatgactgccaagcactggagtcaatccctgtctaacgccacagctctgtgctgccagggctgacctacaaagagcgggcctcaccagcctgacgctctgtgtcccactgggagtgcgtccgagctgcactggaaccgaggtcaccccatctcttccccatcacccccatggcctcttggtcagcaagtcctgccctcctgactcccagcctctctggaatccactctcctcccgtcccttcccatagtcctgtcccagagcccctcatctcactcagaaatcaccccagcaatgatccggctcccactgttacctgtcacaagctactttctaacacagcagccaaaggtgatctctttaaaacatcaaaccaggattgaaacctgcttaaggcccccagtcagggggcagccatggagtccccaggcctacatatcctgcccctgccaagctctgggcaccgacttgcctctggcaccaccaccccaccagaaggttccatccctcggcctcctcccaggtctgctgatggcagctcaagccctttcctgccccaaggccaggctgcttcctggctggaacgctcgccatgtctgccttgcccctgtatcagccaccctggccccagaggtccttctcccagcccctctctcatggccctgccatggcgccctcactgtgctctgcgcattcgtcaccgactgtgatgatctgtgcacgtgtgtttttgctgccgttggtctcccctcagtgggaggcagcctcctggggtggggaccatgcctgtgggggcgctgtctgcctccgcctcctggcaccatcactggtctgtagtgtttgggtggaaccaaagtccagctccgtccgctcccagcctcctctgcgtgggtggaagacagggtggaggagagcaggatctctgaggctgcacaggaggccatgaggcagcgttcgcctcccacctcaggctggggctcctcaatccagtggtaaatcagaagatataaatatgacctgtggcactaccacactttcaccaacacgggctttgccctcagcga

SEQ ID NO: 63673 - DNA, 1412 bp, Homo sapiens
gtgcagggggcaggatggcccctttcaagtcttgtggggcactcgggaaaccagcccagctcccactgttctaggaaggcacccagaggtggggcccagcaccttggacagcgcactggcccagcctggccctcggggtgcctcacccagcctgacaggagctggaggcagggcaaagccccgacctcctgtgctcctccaagtgcgatgtgggagtagggatggtttggggtggggcttttcctttctcccctctcccttctgtgctcagagggtggctggggcacttgggacagaaggttcctctttgaacaaagcaatagaacgggttcgtggcagcgtcatcctctctcaggggccggtggcctctgctgtgtctccctcaaatggtcctctggtctcttgggaacatgaaacagaatctcccatggaggaggcagaggtgggaaccagggaccagtgggggaagctgctgaccatgctgccttcacagtggaccacgtcttccccgacacgggtgtgagcctgctggcggcctacgagcagtggcgggagcgggcggacagcgcggcctgctgcgactactccctgcacgtggacatcacccgatggcatgagagcatcaaggaggagctggaggccctggtcaaggagaagggtgagggtggctggaggggctggagggcgggcatggagcctggtggaggagcctctgccctgaccctgtgttctgccgatggtgctgctctgccctgggggctggtgtccaggtttgagtggaagttggagaaaagtcatttgaaggcccatcccaccttcaaaggctctagaccaagaggccttctctttcccaatccgagggacccatcctggaattgtcctcctgatgaaaagatgcagcagatccgtcgtttcttagaagagaggctgcccagggtggaagagcagcagttccccagtctcctagcatctggggatcctttcagagggagacccttttaaatccatatctctttgttgtcaccaatgctaaaacagatcagtctataaacaagttaacatttttccccacaaaaaaccctgaagctaaaactacatcagagtttcatagtgggtttgacaagtggcatatctgattatagccgatctctcctaatctgagtccggcccacagcttccagcctggaggtgggggcgggatggggtccaagcaagcccaggagcctgtcaaggccctggcactcccagggatgcctgctacccgtcccctacagacctgaaggaggcaggggcatttcttcaaggccattcctctgggttcccattcctcagagggtgacggtcatcacataggtgccccttgatgtcaggacccctcacctccctgcccgggggctggtggagcccgtcaa

SEQ ID NO: 63674 - DNA, 2053 bp, Homo sapiens
gatgagcaagggggcggccgacgccatcgctcaggccaagcgcagaggtgagcacccagccccgcctctgatgccgaggggccatggtctcggcctcctgggtgcagccctggggagatgcaggttccctgagtccctgcatcggggcggggcactggaccctgagtccctgcatcggggtggggcactggaccctgagtccctgcatcggggcaggggctggacctgagtttccagccttgctggagcagcagctgctcaccaggggccctgaggcaaaacatggggacgctcatcccatttccagtgggggtgggtgtggggagaatggaatgatgaggagggtctccaagagagaattccagttccaacaaggaggccctccctacattgctatttgctgtgtccagagccggggtgctacctgcccacagaatgccagccagctggagcctggcactgcagagagcctcaggcctgggcgggggggtgccacccagagctgtgattggcagcggcttgactgtggtgtcccccagaggctactgggctcagagggtccatggagccccagcaatcactggggctggagagggccaaggatccaggcacagaacccaggtgacgggtaaatgagggggcatcccctaggcggcctctggatctggtctggtttcccctcctcctgctgtccgcactgagtcctgagagacctcgttttctgggcctgcctggggctgtgcaggtccctgggcagggtggggggcggggtggtggtggtggtgggtggtgcccttctatgtgtttcctgcatcgagggttgaaactgaaacccactcagttaactgggaaaaggactctgaggcgtgcaggtgaatgggggtctgcaggggtgaggcccgggcctcactcaggacaccaagcagcctcggggcagcaggccaggcccttctcaggggtaccccacccgccaggctcttctcggggggtgccccaccccacctgggagcatttctcccccacccactggtgggagctgcctcagctgtgagctggaaccctggtgaggccatggccagggcacccccggccagtcagccgccatgcagttcactgtgcctcgcagcccacaggcacgccctggccccgctggagtgcccggggtcctggggtggggtgtgggcagagagaggacttggcgtccgcaggccagactccctttcccagaaggacccccagggccaaccacgtctgcccgcgacccaggcctctgccccacttcctgcccagggccagggactctagactgggcacaagctgtcccaggcaaggaaagtgaggggcagtcgtgggtgtcagcagcagcagttctcggggccccagggggtgcaggtggtcggtggggcacctctcatgggcctcgtgctgcaggggtggtcgtgtttggggagcccatcaccgccagcctgggcaccgacggttcacactactggagcaagaactgggccaaggccgcagccttcgtcacatcaccccctgtcaacccagaccccaccacggcggaccacctcacctgcttgctgtccaggtaagcagcctctccaggtggccccaggttggccgcccgctgcacaccctgccaaggctgtggccccgacaccccaggcctctcccacggctcccatagggcagcccggacagtggcgggtggggaagtctgagccctttggtcccagcgggggctcccctggcaggaaccagtccccgctcccctgcacagaggcaccagctctgcccagcgagagccactcagatgacctctagcccctgcggctgtgctggccaagggggctggagctgacctggcctctgccggctcaggaaggccaggaccctctgaccctggcttgtttccagcggggacctccaggtgacaggcagcgcccactgcaccttcaccactgcccagaaggctgtgggcaaggacaacttcgcgctgatccccgagggcaccaacggcattgaggagcgcatgtcgatggtctgggagaaa

SEQ ID NO: 63675 - DNA, 1064 bp, Homo sapiens
gcctccgggctgagcagggacaaagactcctgtcccatccatggccccagctccccgtgagcggtaagagggcgcccagcagcgcttcctccatctaggcgggtctcgggggcccacgggaaatgccctccacaggtgtcccctgcacccacagcctcttgtcccctgcaccaccacgagcctgaggtgtgaaatgtgtccggggcactgtgggcaccgccagccaggctgggtgggaacgtgaatgccaggcctcggcccatggccctccctctggcagccgagtctccaaagcagctcaaggggtgaggaccacgggcgtcccggcctagccgctcccggccgaggggcaaatggggccgcacatgggcagggcggagcgttccgcctcgtcctccacaggctccgcagcatccctggactcaggggcggggagaggctccctcgggaggtcctggctcctcttcagcctggggtggcaggaacacatggagggcgttatgcccccacctccctggcctcacggtcccatgacctgcccacgggctcatggggtaggccatggcgtggatgcccaaacgtgggccacaggctcggtgtctgctggagaggccatgctcccgatacactggcagggagcctggggacgggtgggggcacgtgagcatgctggcgaggctcggcgtgtttccagccagaagccgaaaggcctgactgtgcaggtgccataggtcagtgacttgggaatgaggctcggctaagcctcattcttcacccggtcatctgatccccagggtgccagtcagtgccctcagccgtctgcacgtgctgccctgcacgtcctgtccataagagctcagacccacctcctccaggaggccctccttgccccgtgcgggcagagggagcatccatcctcccttgggccccaccgtggcagctgctgctatttctggcctgccttgcctgctgccagtcatctgtgccctttctgtcccctggggcctgacattcaggaaaggtctgctgagagactgagggcgtgcctgggtgggggagttgac

SEQ ID NO: 63676 - DNA, 1016 bp, Homo sapiens
cggggcggcgtcacgcgcggggctgacccggcggcggcggcggcggcggcggcggcggcggggcgggggcggcctgggacgcggcgggagcatggagccgcgcgccggctgccggctgccggtgcgggtggagcaggtcgtcaacggcgcgctggtggtcacggtgagctgcggcgagcggagcttcgcggggatcctgctggactgcacgaaaaagtgagcgggggcgcgggccgggacacccccggggtccccacgcgacacccgcctccgccgcccggagacccgggacccgcctccgggttgggggtggcgtggccccggcgcccgctttcggtttctgccgagcctgagtttcggggcgcgcgagcgcggccgccactcgggggggcaaaagtggttctcaaagtcgtcgcgacttttcggggcgggcgccgggccggggcgggccggggcggggggcgcggggccggggtcccggaactccacacatctgccataattaatgcacttttctttgttcagagccactgttgaattcgactgttggcagaattgtcgttaaagcaggggagggtcagatgcgccgtggccttgccctggcagttcctcacaggtgggggtgccctgtcgaaggccacgggcccctggctgctgggagtgactccgcggctgaggtttggattcggggagagcagttgcgcccagctgtgcgatttaagaacagtttcaggccagggagccctgagtcatgggggcgtgaagaggtacaagctgtgggagccgtgggcacatcccccgggagccctggcttcctgggtggggggcgcagggcagggcggggcggttcctcctgagaggcacctgtgcacgggctgcagggacccatgcggtgcagatgagcctcctggacaccgcgtcacatggcagggagctgtcgctgccagatcaatgattaggcatgaatcaggctgtggcctcgctgcgctcctgcagggctttcttttgaaactggg

SEQ ID NO: 63677 - DNA, 1045 bp, Homo sapiens
ttggcctacccccgttggctccgctgccccaggtcgatgagtcccctgtcaacgacagccatggccgggctcccgaggagggggatgcagaggtgatgcagctggggtccagctccccccctcctgcccgcggggttcagccccccgagaccacccgccccgagccacccccgcccctcgtgccgccgctgcccgccggaagcctgcccccgtaccctccctacttcgaaggcgcccccttccctcacccgctgtggctccgggacacgtacaagctgtgggtgccccagccgccgcccaggaccatcaagcgcacgcggcggcgtctgtcccgcaaccgcgacccggggcgcctcatcctcagcaccatccgcctgcggccgcgccaggtgctctgtgagaagtgcaagagcacgctgagccccccggaggccagccccggacccccagccgcgcccagggcccgcaggaggctgggcagcggcccggacagggagctccgcaagccggaggagccggagaacggcgagcccacggctgcggccaccgccaggaggagcaagagggagaggcgcgaggaggacagggccccggcagagcaggtcccgcggagcccggtcatcaagatctcctacagcacgccccagggcaagggagaggtggtcaagatcccctcccgcgtgcacggctctctggagcccttccgtccccagcaggccccgcaggacgacggcagccaggaccccgaggtgctggacagagagtcccgggaccggccgtcctgcgcgccctcggcctccatccccaagttgaaactgacacggcctgtgccggccggcgcggacctgccgccccctaagatccgcctgaagccccaccgtctgggggacagcgagcacgagcccgtgtaccgggccgagctggtgggggagctgaacgggtacctgcgggacagctcgccggcgccctgtgcggacggccctgccggtgggctggcggacttgtcttctggaagttcgggtgaggacgatgacttcaagagctg

SEQ ID NO: 63678 - DNA, 1075 bp, Homo sapiens
agccgtctggaaaatggttgccctcactggtgatgccatctgcgcttctgattcacacaagaggcgcactgcaaggaggccagccaccgctggtgcttgttggaagcacacagcgagtttgtgtttggcagccatttttcaaaggccggaagggagcttctcatgctctcagtcgttgtttggagtcagggatgtggtttgacggatcctggggaggggagagcccaggctgaggccctgtcttgcgttactcactcagggaacaaactctcactgctctttccaaagatcagagcgggcatctccctcctcctgcacgcggataggccatcccaggacattaaaggagggagggcgaggtgagcttcccaccctcagatgaagcccccaccccaactccccagactggcccagccctgccccctgtgaccccccaaatcttcctcctgggtcagtgcgcactccgtcgtcagcaggctgtgtgcgtggccaggcgcccgggacctgggacatggtgtgggggcctgttcccggggacggcgtctcactgtcggcctctactacgagcactttctagaatctccagccaggccttgtgtggattctctgtgcctggggggcactacgctgtgtggaggtgtgggggtgtcaccttgtggggctgggggcaccacccatgcccctgtaatcaccacgtggggcatccggagcctgccgaggggctgttttctgccctgagctcctgaaggccactctcccagctccagaggccttctcagcacctcctagatgcccctcttgtcttcccagcaggagaaggcaggccagggagcagtcctttctgggtgggggcagctggtggccctctgtgctcttcttcctggctccatggcctaaccaccccatggatgcagagattccagggccaggggctgtacgcagagggcaggggcagggctccgcctaggccttggtgacgtctggtgaccttgtcttccctggccacctgcccagaggccttagagtttcccaggtgaccgtcctcgggcctttgttgggggcggggactggagcg

SEQ ID NO: 63679 - DNA, 1022 bp, Homo sapiens
agcagcagaggcaggtggagatgacaggtgactggatgtgtgcactgtgcgggagcaggaaggagggtggcggagagtgggtggcactggccagccgtgtggggaggacctgaggggctcgggaccttgcccgtcctgcacctcagcaccactgcaggggaggggggcgtgcccagaggggcggcgggctgcctggtgttttgggagccatgagggccaatggggacacctggtcctgggagccgtgagggccaacggggcacctggtcctgggagctgtgagggccgacggggcacttggtcctgcacaggcacctcctgtgcttccctgtcgtggccagggcaggccgtgctccaccgacgtgcggactggaagctgggcacctccctgaagtggggactcaatgctctcctggtgtcccggcctcttgggcaagggggagatttcacagcttccagacagtgcaggctggaggggtccagcctcctgtggccccaggggcccaaccctttcccctcctgccctggcaggggacttttgggggcgtacccagcacagcctccgtcagcagttgggagcacggggtttctgcgccactggacggtcagtgttcctggggtcgtccttgtcttctgtgagtttcctgtagctgctgtaacaaacctccacacactggggctctgagaccacaggcgtttattcccacgcctctgggggtcaggagcttgagtcaaggcgagcagggctgtgcgccttcagctccagacaagaatccctcttgcctccacagacctgggggtccaggcttccccctctcatgaccacgtcgccccaggctctgcctccatgggctcaaggccgctgcctcttcgaagtaccctggtggcatctggggacccgtagatagcgcgggaggggccgctcatctggaaaccctttaatcacaacgcaaacacgatgtggcagaaggtgccattcccaggctcccaggacgaggagcacccggtctcattcactccac

SEQ ID NO: 63680 - DNA, 1048 bp, Homo sapiens
ctcagggtctagccctcccttcccaccctgggatccccatgcgtggggctgtgtcctggtggagggggcttggggctcctccccaggctcgggtctccacggggccgtcagtgcgaggcgagggtccccggagtcatgtatgggggtccttccacaccatgagcccggcacaggcatggtcgtcagcccccaccaagaggccacaaggctccaggcccgctggcttctccgtggccctgcgtgtagggcctgtggactgcgggacttcagggctgtggtctgagcccccaagcatggaagaccctgcactctctcccagcacagccgggctgtgggccctgagggaaggagggccggcaggagctggggggcggtggaggtcccgggtgagcctcaggccctccggggcaccctgacctgctgctcagaccttgaggggctggtcccccatactcgaccctgagttaaatctctgcccctttttgctttcccccaaggtcaccgacgatgagggcgcacctgctgtcctggagcttccgatctctgttcggggaccctgtgagccttctggccggctgcgtgcagagcccactgggcacggtggtcggcctggtgtgaggccccccggggaccggcagtgtgtccagggaggggatggccctgagcccagcggctcctcccgctgagtgtatttcttcccaccactcagcgcatggctgccctggctcacgaggcagtcgggactcgtgacttgctggctgctggctgctgctgcctcgcgcgctggggttccatggaggaactgggcctgccgccccggcctcacctgctgcccgcatgctggggtcccatggaggaaccaggcctggcgccccggcctcgcccagcggctggtgtgggcagctgttccctgcctcgcagtgtcctggaggcagctgtctcgcagactcagcttggtctcccgcaggcttcagaaaaacccaattgcacgtgtgggattcttccccagcccttgggtgcggggtctctgtgcacttgagagctgggg

SEQ ID NO: 63681 - DNA, 1099 bp, Homo sapiens
cggcctgaggtgatgagagtgtggatggcacctgcactgtgtccactctttaggctctaatgttcatggtgtgtttggagacgtggaagtggctctggaggagcgtccaccaggtcctgcttgtgtacgggggccggcagcaccgttgtgttgggatgagtggccgaggcgtctggggacgtcctggagcctgcagcccttggccgtgtcacgccatgtgctcatgtgaccgaggacgcttccgaggatgtggaagccaccagtcgtcctgggtgggttggggctggacaccacttctggggcaggtctagggtgatggcgctcccagcccgcgggggtcttggcgttggcgcagaagtggtttcccagcggcgtgccctgagtgttgggaaaaggccctctgctgccgctccaggttcagaagatgccgcttctggtttttccccgttgtgagtgagaacagccccacctccaggagcatggcctccggatcagcctgttacttgaaccctgagcccctggtgggtctcggtgaccttgagccggttgtcttcttgatccttctctccgacaggagtgtgagactcctcttcaggggttgctggggaccagctggttgctgtgtcggggggccgtgctcccccttctctcttggaaggtgtaagggcttagtagggctgcctcggctgctggggcagctttccccggccccttccccgcctccttcccactctggattgtcctgggcgtctctgtgtggggtctcctggctcctgcagatctgtgtagcctgcactgaactgcccctcttcctgggtgcactgcataccccgggccccctgggctctggcctgtccccttgtccccacctgaccgcccagccactgttctccctggcccttccctctcgtttctgcctgggcctgcctggctggtcttgcctggccctgcttttggtcctgtaggcaccaggactgcactctggcaggggcagactctgtttcctgctcagcagagcccaggcctggccctggttagcaggctgtgtcatctgccgcagacagccttcctttctgcgtcctcccctctcggggtcccg

SEQ ID NO: 63682 - DNA, 1044 bp, Homo sapiens
tggttgcaaggccgtggcaactcaaccaccattctcgctgccacttctgggaggagcagatggggacagaactacctgggccctggggtgcatgtgccccaacctgtgtgtgctggtggctactgggggtccaatttctctcttaagaccaagcgtgagctatcaggagagcccccagagcttggagttgcgcttccctggcatgagaccttgggtgagttctcaatgtctccatccctgggatgcctcagaccccggcatctcacaggctgcgtggagaccagagcctgtgggagcttgagctctgcacatgctgagagctgaacgtgaggccagctcctgcggtggctgccgccattccctgccctctgcctgtcacgggtggatggtctcacggtgatgtacctatgtgctggagcccctcttataccttgtggtcatctcatgaggtgcaaggcgtctgtgtggcttttcctcaggaacctactttcttccttccagagaactattgtcgagtgatgcgatgaaagaatataacagggctcgagtctacctggatgaaaactacaaatcccaggagcacttcacggtgagtccctcccgctgcctggtgcaggggtcagacaggctggccttggcagaagccagcccttctcctgtgtaaatggagagaggtcggggtgctccctgcctgaagcctcactcacgctgccctgcctggcactcccgcagcctgcttggtggtctgctcgtggtctgagcccatggctggcctggcagggaaggtggcccagcacgcacagggtcttggggctccagaccaagcccaagagggaattggggagtgacaggtggggagaggcccagggcctcagcgtgcatgaaaataagagggagtccggggctccaggcgtgtagatgagaggttggacagcagccggtattgcttcaagagccaccgtcgccagccctgctcccatgctgggtccgtcccttcctgatccctgagtgtgcagggctggggcggtgtcctgcctcggagag

SEQ ID NO: 63683 - DNA, 1118 bp, Homo sapiens
cgaagtttttgggtcagccgagaaatggtattcagcaataaatgtgtcagagtccagggttcttgatctgttttttctttgaattgatttttcattatttacttcctaaaagtgttggaatttggtcctccactgtgaaatcccagtgtttgggcacattatttctttggggcttatgaggtgctcctaatccactcccttattgatggattgatgtttgactccataagcctgctttatttaggaccttccatcataattttttgtacatttaggcttgactcttttatttccttctaacagatgagctgacattgggctatcaaacgggtgggaaaacaattgccatgaggttaatttcatggtcggctccgtgcgttctgagcagacgggtgtttcctggctgcaggccgggccttggatgcagccttgacgcgtgtcgatctgtttacacacagggctgagtccgccggccccccgggggtgctcatgggtgcccgggtgtctgcaagctgcccgcagctgggtggtctctgggcacggatgctctaggccctctgggctccaaggaggctgggttgtatgtctcttgagaagctttcctttcgaaaggccaccaagaccaccgagactgctgagaccgccaaagccaccaagaccgccgagactgccaagaccaccaaggccgccggctgctcccggtggctccatgcacccggcaggagagtggaaggcgtcgggcctggggcagtttgaaaagataggtgccgccagcatctgcgcttcctcgtgggtgctcaacaggctgcctgggaagctccttctgccatcacctggagtcagctgccgtccacagtggaagctgccagccaccaaggctaccgacctgggccctggggatgagcagcccaggaggcgaagatgcctaggtgggtccccagctctgcaggtgccactccccacgccagtgttctccaaacttccggggagacctgtctgtgctcctgtaggtgtcaggcagactcagaggcacaggggttcagattgaggcctggggctgaggaagcaggaagtcctgtcaggagctggagcactgagaaaggcaccttgctgagagc

SEQ ID NO: 63684 - DNA, 1047 bp, Homo sapiens
tggggaccattacagagttcagggagagaggtgaggcagtcagaactgggggaagatggagaagggacaagtgtgttgtttcaaacgtagagtcctctgatatctaccttttaaattcttattgaagtaaatgcacagagaggaccagaagtggtgatccatattggtgcacatttatttttttgactctgattcctttaagcctaaaactagggcagtgtcccatactgagcactaaagagaagtagggtcaaacccaggagggaggaaaaccagatccctgcaccttggccaagatgaggatgccggatggagcatagccagtcctggaatgaggcctgcatctctcccttgcacaatgcccccacccacaatccagccaggtctctctgtgtccccagctgcatgctcccacctcttcgtgatatggtttcaaaaacacaatccagcaccatgtgtaaattgtttgatgcttgagatcaactttactgaattgcctacattgaaagtgatgaggacaatacctccttcaggaagaaaaaggcaaaatgaagtgctttcatgaatagtcagaagggtcttactaacataaaaatattttgattatgtcttcagaatctctttatgtagttagtggcttgtaagctgtcaacttgtaaatgatgccgttggaaattgaaatgtaaataacattaccatttataatagcatcaaaaatatgaaatatttaggaataaattaggtcaagatgtgtaagacctgtatactgagaactatgatatattgctcagagaaattaaataagatctaaataaatggagagatatactatgttcatggatcagaagactcaatcttgttaagatgtcatttctccccaaattgatgtaaagattcagtgcattactaatcaaaatctgagcagacttttttttttggtagaaattaagctggttctaaaatgtatatgtaaatgtaaaggaattagaatgggccaaaacaactttgaacatgaataaagatggagtccttatactacctgattaa

SEQ ID NO: 63685 - DNA, 1059 bp, Homo sapiens
aactcctggcctcaagtgatcctcttgccttggcctctcaaagtgctgggattacaggtgcgaaccactgtgccctgccaaaaagacatttttaaggttaagtaaggctttgttgattttgaatgtaacattattcccactcaatgagtgattttggtcgacgttcacctgtactttctctgcactctgagccggcaggtgccacttctagcttctggctggggttggtttgcagtggagtctgtgcctgtggcagccgtctgcatgactttgggtcattgcgctttccttgccttttggggagggtccctggtgctctgtgagcagattcgcccctaggggtgaagtcatctcgctcctcttctgagccgtgagctgggcagggccgcgctcacatcattcctctccccctgtcgccgggtgggaaatccgtaacaggctctgtggcaaaggctgggccaaggtgcctcgtgggcagccgatccatcaggcggccgacaggcgtgatcgagtgccgtgtcacacgcagcccaggaaacaaacacgccgcgcgaaaggtattggtgaacgaactgaaaaattgtaaagctcttaaggactttcatgcttgttagcattttttgacagaaaatcactgaagcagtgaacataaagaaatagccatggttgattcacagtttagcttgttgttctgttcatttggcctcaggtgatgtttcacttccggagccccgtgagctgctccttgctctgcctggctttctttcctgtgcaaattcttgcgggtccctcagctgtgctcacccaaccacagcctccctggagatgggtttttatgattttgaaggagaccgaaggaaactgaatgaacaaatattttctccaaagcccgtccaggtttggcttcagatgctgtgagccgtgtgtacatttctaggcttaatccacagaatgaatgtgagcttttatgtcacagcctgcccaggaccctgctgtgtgcctggagggcacctgacctgctcttgaggcttcactacctgatgtcccaaagggaacatc

SEQ ID NO: 63686 - DNA, 1936 bp, Homo sapiens
ccggccccttcctgggctctggggtccatcagatgtttgtcctttgggagcctgcctgaagtgctgagataaagcagtttttaaacagtttcccgcagatgccttttgggagacagagccgtgaatttcctgagccgcgtcctgggatggctacaatggccgtctgcctgccaagccttctcccattcagggaaagcagcttaagccacttaagcccattagcatctggatggggccggacctccttgggacacaggggtgggcagggtggccccgctgtgtggctgtttgggtgcttgttctaatcctcacgctgtttgaaggctccagactgatttgtgacacatgagtccaaaagccactttggggggcttgaccccatcagccggtctgtgctcggaatgtcaatggcctgccctggagtgtgctttggggatagcgggtggccgcctcctggcccaggctgagacactgcacaccagccaccaggaggtagacgctgcatcttggcaagaggcgggtcgggctgccgaagggctccagagttcctctcagttcctgctgagcgcatgcccggaacctgcacaggaaggccgggcaccggcccaggggtgtcctcctgagccctgtctccgagccccggccagcgcccggggcaccgaggtgctcctcagcagcaccagctcccaagggccctttcagggagaaatttttaaagccaaagttacttttggtgcagtcatcattttataaaacaaaaatcatatattattttcttaaaaaaacagatttataggccaggtgcagctgctcacacatgtaatcctagcactttgggaggctgaaatgggacaatcgcttgagcccagaggttcacggccaacctgggcaacatcatgagaccctgtctctacaaaaatttagaaaattagctgggcatggtggtgcattacctacagtcccagctactcgaggggctgaggtgggagaatcacttgagcccaggaggtcaaggttaaaacgagccttgatcacgccactgcgctctggcctggatgacagatcaagaccctatctgcaaaaaaattttttttattaaaaacaagctggattgaggtataatttacacacaagctataatccaattctagactctctctccatataatccagttctagactatccctccagcccccgccccagtcagttccctcccggcccccgcagtctccttgctgcctctgtctctccgacttcgccatgtctgggtattttgtgtaaatggaatctacagtctgtggccttttgtgtaaggcagcagctgtgccctcctccacccacaccagcgatgcagaaacgccggtgcctctgcccgccatgagcacgggccctcgctgtccacacagagctttgatttctctcagatgtgggtctcacacttcccttgttcggtgaggttctaggcattcttgttttcatgacttctgccaagctcggagagctcagtgcccacaaggcccctgtgtcggggccaggggctccccgtggccagtccacccaggtaggggtctccagctctcttacctttagggactgaccctcagtgaccattccctgcattgtactgaggttaagacgagaagaattttcaaaacaggcctcaatgtaatccttcgcggtgatctgtgccggctgtccgccagccaggaccgtgcctcctggagcagctcagccatgcagtgtgggagagagatcggcactcactcagcctccctctcctctgctgcccagatgactgccccttcccgtagctggtcaggccagtgagcatccacaggcaccagaggccgcaaccctgaccctgcagcactgctgccccagcccctctccttggtcctcctggtcggtgtgatcgctgggaccctggcgggagcc

SEQ ID NO: 63687 - DNA, 1072 bp, Homo sapiens
caggcggcattggagtctaggagctcagctgtgtgtccatcaacacacaaattcgtaaaaaacacacatggcctcgccatcgtgggtaaaatcggccccacagcacgtctgcaccagcgggccgttactcccatgccgttcttctgtgtaatattaagaactgaatgtgaagtttatagctagcctgggtgtaccttttaagaattttgtaaaccgtttgtctgtcttttgttactgttttatggtgccaagtatcctacgttacaacaataatatcatgggagaaatagaaatagcctagtttgcttccaatagaaactgcttttaacatgggctgtatataaaaatattaaagagaaacaaaactgtacatttcctcattgctccgctacagacaacccatgtcataaccttgttgcaaatatttttctcctatagcagtaagtacagcattagaaggtgattagagagtctgttgatgaaacacaaatgtatgttttattgattttactttagaacactacagagttcctggaccgggtgaaggcattagctgggtgtttgtgtgggataaatactaccactgcaagtgactgctgtccgctgcggaatctgttcttggtggaagcacaggtccgtgtcgctgctgtggttgccgctgtccgcggttcaacacggagtccgccccgcgggtttcagctgttggtcgttctgaggggcctttggaagtgaccggtctggttcctaagcaataaaattgaccgtggtgaaaatagtcccgtgttgctttttcttcctttcccttctcctgccacctttgaaatgctaactcaggggagcggcctcctgtatagcctgttatttgagatcaagctcattagaaatcctggaatttcactgtatcacacgctgtcacaaaacactaagccgttcattgagaggagaaacacagccttttggactttctactgtaataaaggatttatccctcaacattttaaaacgggattatatcaacgctttgccttcctcaaaactttaagaagcccctctgctctgagctgagaggggc

SEQ ID NO: 63688 - DNA, 1012 bp, Homo sapiens
ctggtctctgggtccctgtggtggggggggtctctgggtccctgttggggggtctggtctctgggtccctgtaggggttctggtctctgggtccctgtgggcgggtctggtctctgggtccctttgggggggtcctggtctctgggtccctgtgggggcggctggtctctgggtccctgtggggggttctggtctctgggtccctgtgggggcggctgatctctgggtccctgtgggggggtctggtctctgggtccctgttggggggtctggtctctgggtctctgtgggggttctggtctctgggtccctgggggggcggctggtctctgggtccctgtggggggttctggtctctgggtccctgtgggggcggctggtctctgggtctctgtgggggggtctggtctctgggtccctgtgggcgggtctggtctctgggtccctgtggaggcggctggtctctgggtccctgtgggcgggtctggtctctgggtccctgttggggggtctggtctctgggtccctgtgggggggttctggtctctgggtccctgtgggggcaactggtctctgggtccctgtgagaggttctggtctctgggtccctgtgggggggtctggtctctgggtccctgtggggggatctggtctctgggtccctgtggtggggggggtctctgggtccctgtgggggggtctggtctctgggtacctgtgggggcagctggtctctgggtccctgtgggggggttctggtctctgggtccctgtgggggcggcttgtctctgggtctctgtgggggggtctggtctctgggtccctgtggaggcggctggtctctgggtccctgtaggggttctggtctctgggtccctgtgggcgggtctggtctctgggtccctgttggggggtctggtctctgggtacctgtgggggtgtctggtctctgggtccctgtggtgggggggtctctgggtccctgttggggggtctggtctctgggtccct

SEQ ID NO: 63689 - DNA, 1001 bp, Homo sapiens
cccgggatggcagggacctgggaagaggccacctgagggctggctgtggtggcggcagaggaagttgggcagggccctggcagctgggtgggggcacaaggaaccgggttggcccagctccggtggaggggctggggggagagactcagcgccccatgcggccctcagggcatcctctagtgcctgtgaggccagagtgctgggcagaggcagggccaggcccagcgggcagtggtctggagaggaggactcagctttgctggggcctcccattgaggcagcagccgcctggacctgtgcacctggcagccacccccaacctgtgcacctggcagctggccccttctctgcccgtctgttcctctggaagcagccgctgagggccctatgggcgcggagtgtttctggggccccgactcgcaggtgacctgggcgcagatcctcgccctcctcacctgctgtagcagcgtgagctggctgaagagctggtgagtgctgtactccgtcaggaagtagggccccttctcactggtcttggcgcaggggccgtagaagtcctcgaggaagcagggcttgggcagggcggcagcaatggtgtaggggcgctccttgtgtggcggcagcaccagcccgttgcctcggggcagcctccaggggaagctctgcagggcaggccgggcactgaggggcctaagctccgtgtcccctctgggtcaggggtccagggaggcagggttggggggtgaggaccaggccaggtgcaagcccagtactcctcagactggcccagccagagccagagagcagcctgcccacccgcagctgtgctggcacaaggatgcctgtcctggtcgtttcagcaggtgccccacgggcaggacgctgaggtttaatggagagggcatttctctccccacactggcttctgccttagtctctggcccgtgggtcaatgagtcacagcaggaccctcctcccctgagcacccgggatggtgcagg

SEQ ID NO: 63690 - DNA, 2073 bp, Homo sapiens
ggggcgggggcagcactgggggccggacaagggggcgccagcgccttccggagcgggaggggctccgcacacacctcgacgggggcgggggtaggctcggcacaggctaaaaacgagcggagccgccggggcttaggcatcgcggcacctccgttgaacgggtctaagaacagaactcctgaggaccctccgtttccaaccgaagccagtctttgctctgcgtcttcccggccgcagcgccaggaccgaccccttaggacccggcgggcggggcggggcgcgcggggcggggcggggatggtgggagggtcgcgtagacccggctgggacggagggacggcggcgcgggatgctcagaacgcgtgtgggcggcccgggcggcgtctggccctctccccatcctcgcgcgccgcgccccagccccgggatgctgctccggccccgcaggccgcccccgctcgcgccccccgcgccgccctcgcccgccagccccgaccccgagccgcggacacccggagacgccccggggaccccgccccggaggcccgcctcgcccagcgcgctgggggaactcgggttgccggtgtccccgggctcggcgcagcgcacgccctggagcgcccgggagacggagctgctgctggggacgctgctgcaaccggccgtgtggcgcgcgctgctcctggaccgccgccaggccctgcccacctaccgccgcgtgtcggccgcgctggcccagcagcaggtgcgccgcacccccgcgcagtgccgccgccgctacaagttccttaaagacaagtttcgcgaggcgcacggccagccgcccgggcccttcgacgagcagatccggaagctcatggggctgctgggcgacaacgggcgcaaacggcctcgccgccgctccccggggtccgggcgcccccagcgcgcccgccgcccggtccccaacgcgcacgcgccggctcccagcgaaccaggtaggcgggggactggggggccaggtggggccgaggactgcggaggaaccgggggctgccgagggctgcgggggaggggcgggcgcgccccgcgaaaatccgcccgaccgcctgctccgcgttcccagacgccaccccgctgcccaccgcccgcgaccgcgacgcggaccccacctggacgctccgcttcagcccgtccccaccgaagtctgcggacgcctcccccgcccccggctccccgccagctcccgccccgaccgccctcgccacctgcatccccgaggaccgcgcgcccgtccgcggccccgggtccccgccgccacccccggcccgcgaagaccccgactcgccgcccggccgccccgaggactgcgcgccccctccggccgcgcccccgtcgctgaacaccgccctgctgcagaccctggggcacctgggcgacatcgcgaacatcctgggcccgctgcgcgaccagctgctgaccttgaaccagcacgtggagcagctgcgcggcgccttcgaccagacagtgtccctggccgtgggcttcattctgggcagcgcggccgccgagcgaggggtcctcagggacccgtgccagtgagtcccggctgcggccagtctcccctctccaggccgaggcccctccgccctgacccctcctgctgccttcccacccccgttcttgggtatgttcaataaaaggattgttttcctagagtccgggctgtgtaggagtgcgggtctggagacggggagggagtggcgccctgcagtgctggggctgcaaaggtcagggcagggttgcgacgctctcatcacagagaggggctcccactcgctcctaaggtgtagacagagctccgtggggcgcacccaaatgtaggccgaggaggccaggctcgagggtggtgggcgtggtgcctgctgccgggtcctggtcacacactcggttctcaaggccacaccagactctccctgcccctcccggggagccccactgagtaaaacgaagtgaacgggtgggctccgctgggggtccggagagaacctgaggctgaccccacctcttcactcaatgcaggggtaggggtta

SEQ ID NO: 63691 - DNA, 1056 bp, Homo sapiens
accagtacctgagccctctggagcggaagaggctggccagggagatgcagctctcagaggtccaggtgaggtgggccgggcaggctggggtgggcaggggtgggcaagggtgggctggtggcctagtctcacccctgttctgatcttgcttttcctacagataaaaacctggtttcagaatcgccgcatgaaacacaaacggcaaatgcaggacccccagctgcacagccccttctcggggtctctccatgcgcccccagctttctactcaacgtcttctggccttgccaatggcctgcagctgctgtgcccttgggcacccctgtccgggccccaggctctgatgctgccccctggctccttctggggtctctgccaagtggcacaagaggccctggcatctgcgggagcttcctgctgcgggcagcctctggcgtcccacccccctaccccaggccggccttcgctgggaccagccctgtccacggggccccggggcctgtgtgctatgccacagacgggggatgcattttgaggaggcacctctgactcccacactcgcggtcttgctgatcgcacctggctcctacctggaggactcagttgttctgtttacatcctggtggcacctctcaccctgacccacacaaaggttctggagattactggagaatatatataaatatatatatgtacgtatatatgtaaatacacatatacgtatatataaatatatatatacatatgtgtgtgtatatatatatatatttttttttttttttttttttttgagacggagtgttgctctgtcacccaggctggagtgcaatgacgcaatctcggctcactgcaacctccgcctcctgggttcaagcgattctccagcctcagcctcccgagtagctgggattacagacacccgccaccacgcccggctaattttttctatttttagtagaaatggggtttcaccatgttagccaggctggtctcaaactcctgaccctgtgatccgcccgcctcggcctcccaaagtgctgggattacaggcatgag

SEQ ID NO: 63692 - DNA, 1016 bp, Homo sapiens
tcaaggctgcagtgagccaagatcgtgccactgcactgcagtctgagcgacagcaagaccctgtctctcgaagaaaaaaagaaattagaagaaaaagaactcatcttgatgatgaagcacaaatatgcatctgttgtgtggcactttcctggcgtgggctccgaggggtccgtccaccaaggagcccgcgtcccagtctccaccgtccagctggctgggggtgtccctgcagggcacaggttggtagacggtgacagcttgtgctgggcagacgcaggagcagcggccgtgagtgtctggtgtgctgggaggggcgcttgctctgcagaggaaatagccacgtccagagaacgtcctccatggctgtcctccgtcctccgtgtcacttggtgggcgctgtcggggccgcgtcctccatggctgtcctccgtcctccgtgtcactcaggtttgctggggctttcactctgcggcagcgaatgctcaacttcgtccagaatattcaatactacatgatgtttgaagtgatggaaccgacctggcacatcctggagaaaaacctgaaatccgtgagttttagctccacagataataacgtttgaaagccactttcctttcacagggagacaggaagtgcaggagaggcagggcgaggggagaggcagggagtgcaggagaggcagggaatgcagggagacgcagggagtgcaggagaggcagggagtgcgggagaggcagggcgtgcgggagaggcagggaatgcgggagaggcagggagtgcagggagacacggagtgcaggagaggcagggcaaggggagaggaagggatcccccagggcggggctgcacccacactgctggccacacacgggaccccttgctgcctgccgtcctagggggactctgagccgtctttgccccgaggttgtctctcccacattgcgcatctgaggctgaggggcctgaaggcagaatctgttggtaccaaattccagaagctgccgcagcctcccttc

SEQ ID NO: 63693 - DNA, 1258 bp, Homo sapiens
ctgcagaaaatggcggacaagatcctcagcacaggtgcggcgcagcgggcggggacttggggtgcgcagcacagctctgcctggagagtctcctgcagcccaggccctcccaccgggagcctgtgcctcaccctgtggttgccctgagccctggtgtccgtgaatgcggggctgaggtcaggactggcccgtgggctgggctgcggcgctgagttaggccttgagatggtctctgttgccaggttccctcaggtttccatctccgggactctgtccctgaccctgcgaggctctctcacaggtgccttctctatttctgtttctgatttctaaaactccgctagcatgtcaggaaaaaccagcaaagacacacgcctggcggccggcagtgtttcctatctctgaccacacaggttagggcctgacctggacccagggcagtggcgcggggacttggactcggcacatcggggccgtcacgaaagggttgggaagcgattagccatccggttctcataatgcctgttcgaaattatttctgtgcccttggttagaaaattccagatgtgcagagccacggcaaagccctgccaccaccagctcagtctgtagccgctgacagtgatttaccgggaaggagcaagggtgtggagccgcctcatgcagcccagtttccattccactgccttctgtgtagacaaagacagctggggcctcagactgaccgtgtggagagcccattcaatgtccattccactgcctcctgtgtagacaaagacagctggggcctgagatcgaccatgtggagaataaaattttgaatttctgtgttttcaggaaaatatctaaatgtggtcagagagtgtggccatgacgtcacctgcccggtggctaaagagatcatctacacgttaaaagagcgggcgtatgtggagcagatcgagaaggcgtttaactacgccagcaaggtgctgctggacttcctgatggaggagaaggagctggtggctcacctcaggtgattccgtgccctgtccctgtgcgggcactcacctccctctgaaaccggaacctgtgggacgtggggctgagatcgctgggtttcttctggcagctccgccttgtctttttgaaagtgggcactgctggatggtctctagctcaaggacctggcactcacagtgggtggtgtaggcccccggtcaccttgtccaggggccccagctcccctccttgcccagggcccaccagccccttc

SEQ ID NO: 63694 - DNA, 2021 bp, Homo sapiens
gcttgaggaactgaggaagcagcttggcagcgtggccacaggctccacgctgcagcaggtactgcgtccatggctgtccacaggctccatgctgcagcaggtcctgtgtccgtggcgtccacaggcacccacactcagtgctgtgccgggcccctgctggaaggacatgtctctctgtcatttattgaaaatgaatcccttagagaggccaaggcttaatgcttgatcatgacctagctctatatgtttagttttttttttaaccaagaattctggaccacaagaatcaatagcagcaaggttctgacccacgtgggagttgtgctgccaggtggccacgtgactctgagcctacccaatcctgactccccatttccctcctccaatttttgacaattttgagggaatgctttcagatcattatattttcaagattctcgaaaatacagtaatttttattattccttctgtatttgctacttgctcttggttttgattttatgccctaccctggtcttttgacgtaagtcatctcccagtctctctcattagagctgccacgttcctgcctttgtgacctttaaactccctttggagctgtgtccctgaggcgtcctagcctcctgggtgcgtgttgagtgcagcggctcccaaggacccagccggttcttgctgggcacgttctgtgctggacatggtgctaggcctctgtccacgtctccctcagccgtggcagaagactgggtcttactgccacgtgcagagacagtttgcatctgcccgtgtccctgaccagccctgagtgggagtcagtgcttccgaaagctgggccagcccaggccgaccccatcagcctctggcggccactggcgcaggagggcaggctctctgaccacatgtcaggagccatcctgtcacgctggggcccttctccggcagggtaaggatgcatgtctgttgctgaagcctgtcttcacccatcaagtggtgttcagacctagtcactgccagaaagaagcaattcagcttgttcacagggcgccctcctttgaaacagcggctctgtgcctaggtgcaccctctcccgtggttcccactgctggtgctcatgttttcccaggggggcccttgcaggacctgcactcctgagaagaggggctagggctccccatctgccctgttgtccccagcccctcacgttgtggcaggcagggatgtcgaggcgcatttcatttctatgtggttgaccctttgtgggtgttgaattgagtaatcatctttgccgtagatgctagcttctatgcatgtctttagttgagtgtttgcgctaaagtgtatctttctggttttgttttttaaaatgtccttgctagtctctggaacttaaaagaaagatgcttcgagacaagcagaacaaaaaaaattcaggccagcacctccccatcttcccagcatgggtgtatgagagacctgccctgatcggggatttcctgattggtgctggcatcagcacagacaccgctttgccgataggtacgtgatgcgttgatttccgggctctgccgataggtacgtgatgcgttgatttccgggctctgccgataggtatgtcatgtgtttatttctggcctctgggcaggacactttgcaggcccagccctcccccgggcctgcctttcctcaggttgtgaggctcaatgctgactggctgccgcctccatattcccatcccaggatggcagcagagaacggctcacccgggtccttgagggttcttctcctgtcccttctgccagagctgtggggcagcctgcagcaggcccctccccagccggcatcctggtgccctggtgcagacctgcaggcatcagaattgtgtgcagcacttatttctgaacagcgattcatgactcccatagattctgttacagcagtattctcagaggcctcttaagtagtgttcgtgtaaacaagatgcgggtgagaccacacagtcatttcaagacgttgttattggggac

SEQ ID NO: 63695 - DNA, 1063 bp, Homo sapiens
agcccagtccggaggctcgcggaggccgaggcgcactgtggggctcggcccggccccttccccgcccctccccgcccctccccgcccctccccgcgcctccccgcgcctccccgcgcctccccgcgcctccccgcccctccccgcgcctccccgcccctccccgcgcctccccgcccctccccgcccctccccgcccctccccgcgcctccccgcgcctccccgcccctccccgcccctcccagcgcctccccgccccctcgctccgcctccggcctcctccgagagctccagacctcccggctactcagaagccctcggactgcccggaccgcgcgatggagtcgaccggcagcgtcggggaggccccgggcggaccccgggtgctggtggtgggcggcggcatcgcggggctgggcgcggcgcagaggctctgcggccactccgccttcccgcacctgcgggtcctggaggccacggcccgcgccgggggccgcatccgctcggagcgctgcttcggtaaccgcccctcccggagcccctcccggaacccaaccggctgcgcccgaactcgccggccccaacctgccctgcgcgcagccgacctgcccggccgcctcaccgggctccccgagggaatccccgctcgcttaatccgccagagttcaccgccccgaaactcagggctcagagttagtcaggagggcgccggccagggaaggcgacctacggctccacaaggccgccctgattctgccccacgggggcccccccagccccggggtacgcccaccctgcgcccctccctctggtccacaccgcccgacaagtgccctcctgcccaggtgctccccttaaactgggtctgacagggccctgccctgggggaccacagggcccttggggacagtgtggtacatcctccttgggaaggccagcgtgggcgtggcccaggagaagggctcggggtgacccttctaggaaagggacctccaggtggcatctgctgtcccctcgcaggtggcgtggtggaggtgggcgcgcactggatccatgggccctcc

SEQ ID NO: 63696 - DNA, 1071 bp, Homo sapiens
cctgaagctggtggactgtatcatcgaggtccacgatgcccggatatcctttcacagagcaggggaggcccctctgcctgaagtcatattacacattagaattacctggggaggcttttaaaaatatgaattgcgaggcccctttctagaccagttaatcagaatctgtgatgtggggtccagactgcgtgtctttgaaacttcattgttaatacatatatctgcgtcactcaagcctgacggtacggtgcagcagtggaatcctctagatgggctatgaaactgtttaaatgttcctgccaactggggcttttctcctgtacttgaggaatgaattggcaggatgtgatgattcgttcactgatggcaagaaaaaaagttggttggctggtaaagctttggaggaatttttaccttaattttgccacatcccactttcaggccgcaaccctctgtttcaggaaacccttgggcttaagcctcacttgctggtcctcaacaagatggacttggcggatcttacagagcagcaggtaaaggcctttctctcagacgccttcagcagtgtggctgtgttttcccgaggtcgcttgttctaacggaagagttgccggacgcacacttgtcagtttgcccaggcaggctctgctttagaaacagccctttgctttgcagaagcgtgccagcatcgtttctcatatggcgtgcccccatctaatgtgtggttcgtgacctggacacccagggagtgcacgtctcctgtgggaagtggccaggttgtgctgccagagcccgagtggtcagtgagtgcgcattgtgggcagcaagccacccaggtgccgaggcaagagaccgaggacacgagcttttccagtgtaataaaacatatgaaataagaatagttatactagatataggtcatagatatgattgtatatgaatattactaatcattagtttgtagcaattactcttcattccaatattattataattcttgctctataatcataacctaggaaaaaccaggccatacagagataggagctgaggggacatagtgagacgtga

SEQ ID NO: 63697 - DNA, 1047 bp, Homo sapiens
agaggatgcaggtgtactggctgcctggaagttaccgagtgccatccttagcagcaaacagagtatgtttgcagatggtctgctgtgctcctcttttagtttccaggacctgggcctgcacagaggcctgcctgtcctaccccggatagagtggatgaagcctgtgtgtgtgaacagctgttactcctcccgctgcggcaagggctccggtggtgggagccgccccccatgctgctggccgtggccacacaggacgaagctcagggatgattcttagatagtggctctcccccggggcccagcaccggtcacctgcagtctcatcttggtcatccacagcgccgcagtcactgtcacccacaggaggtgcctggccgtggcctttgtggcattcaggaggaagggcccggcctggctggccgcgcggtgtcagtgctgggccccctggtgctgacctgcagcctatgtgcaggtacgtgcagcactacggcctgggcagtgcctgtgacaacgtagagcgcgtgctgaagagtgtggctgtgaagctggggaagacgcagaaggtgaaggtgctcacgggcacgggtgagtgaggtcgctgatgcgggcaccggagcctcaccccatcaccctgggggaccccggccatccctggaggaggcagggaggagaggaacgtgtcaaggagcatgcgccgggtcttctgggaatgggtttcagggcaggggagctacagaaagttctggagaggaagggcttgtagtccaggcttccgagggtgagaccagccctgccgcgtattgggcagtgctaggtggacacctgcaggcctcacatgcctggccttggaggctccgggcagcgtagctcaagctgttttctttctgagtgtgatcccgttccctgggcttccctgatgccatcatggagcctcttagggctggtccctcaggtgggtaagggctgggcctgtcctgctgtgaaggctccttcctcactgaaccctcccgtcccccaggtaacgtgaacattattcagcctaactat

SEQ ID NO: 63698 - DNA, 1037 bp, Homo sapiens
ctggggccaaggtggccagaagctatgctcccaggtttgaacacagagcactcagcagtagtagctgtcacagtgtctagggaaaagggcagggtctctgcttccatgtccctgaagggttacctgtgggcctagtgctggaaatgtacagggtcctcagggtgcaggtgcctcccatccccaccccacccctccaccccttcttggctgtgtccttccatagcctgaccctgtttcccctcgtctgtgtcccagcccccctccctgctctttcctacacatccctctgggccaggaccctgccccaccctgacccctctgagctgtgctcttcctggaccttctcagggctgtgggcgcctggtcctggcttgagggtcttgtcccctgggggctccacacgggcagccatggtgtactgcggagccttgaacttggtcacccgcacatcagtttggcggtaggctgcgggacctggggtctgagaggtaaaggaggctcagaccaactcggcctacccagggcgtgtggccctagaggacagggagcaaactcaggctctgagtcaacagggtcagctacaagttggtgcccgtgcatcaaggtccccttctgtcttctgtcacactgtggagatcacaccccactgcttgtggggtacctcatgtgggggtcacttcctccatttcagcctcacgctggcaatggcatccccagtgtgtgccagtcctgggaacatcgctgagcgtgtgtgagagaggctgttgctgccctgttggacctgagggcctggggctggcaaaatcaacatggacgagggctgttgggtgccatgatgctgcttccccatctcaggcccctcaagctctcaggcatgtgccacccaggggctttgcactggctgtttctgaaaccaggaccctcctcccccaaatagctcatggtttattttttcctcctcctcttctttccatgctaccctatctaagattgcctctctctctccagacagtgcttcctaaaccccatctcttgtc

SEQ ID NO: 63699 - DNA, 1025 bp, Homo sapiens
tccttccgggtccgagcagggccgggtttcggccggcactgccgttaggaccgaaggcgcgcgtggcggcccagcagctccagcgaggggtcgcgcagcagcggggtctccccactccccgccgccccctgtgagatcgttctgcatgggttcggggtgagcgggagtcggcattcgacaggtcccgaggccaggccctaggagtagaggctgtgctccgctggtgtccaagcaggactcttactttggcctcggtggccccatttcccctcctggagcccgtgttcttgtctgcaaagtgggatattgatgcctgtctctgtgaggtgttatgatgattaaaggaatttataaatatgaagtggctggaaggacgctggcatcccttcctgacactgaagctagggaggaggtggttctcacgcacctgatgtgacagaacttccttatcccctggcccagcctgtcacaggccaggcctctgcgagcactctgccctgggtgttgcaggaagccccatgcgggatgcagaccaaggatcccgctcctggtcgacctcagctcccgtctcggggaaattgggaactttgctcagccattttctgtgcggtaaagggccttcccaatgttctgtcctggttccttgccacctcttcaggacctagctcaaaggtcgtctctgcaggagcctttctgctgccttgctgggtacttttcccaagtcttttctatgctcttagcagagtttactctttttctataagaatgggctccacatacacagatggtgacctccctggatgcaagtgtcacatcatactagcaccccagggctgggtccagtttttgctacacagtctcagaaggtgctggttggaccgaacccattgtgggtgcttgcccatccccaccttgatgtgtacacaggacatgtgttcacatgacaggcccttacacacatcgtcctttatgcagcctgtctcatgtgcaagattcacctgctggaaccttggttagggccccct

SEQ ID NO: 63700 - DNA, 1822 bp, Homo sapiens
aaggccaaggagatgccagttctgggctgggacctcaggaaaggcttctgagggaagtagaggccccttctggctcttgctgcctggcaggagggctgtgtggtgtctggggagactgtaagagatcctccaccatgaggctgtgagtggggctgagacagagtgtgacttcatccctaaggtatgtgttagcattcctaatcagggaagtgctcttagaagaatactcatggagtttttaggaagacagcagtggtcatcttttgcccccagcactacccagagtcacctaggaagaccccaggggaccaggtatgcagtacaggaggtgcacagtcattgccacacagtcctggagtgcaacagacagtggagcctcagcaggcagcagtgggatgagtggggctcctcacaggaacccttctttctttggtcaggaagacgctgccctttaccgacacctggggacccttctccggcactgtgtgatgatcgctactgctggagaccgcacagaggagttccacgggtgagaatggggctttttctgggagggaagtgtgcccacatgtctagatggtcgtcctcaaccccggctctgaaccagaaccacctgagagcccaggccccaccctagagagtctgacgttgtctgggtgagtgagactggacatagccatgaatttgggggcaggaatgtgccaactgggccttgggtagtggcaacagtatggtacttactagggcacattggttccttgtccccgtttttggtctacctgcccctaggctggtctgggtttccagagatggtctggcgctttggctcagacagggtcggggaggcagtgtgtctcagtgcccccacttccccaggggaccccactgtacagctgagtggcagtgcctctcagatcagtccctgcccttggctttggtccctagcgctgcccctttgggactcagatgccagctcatgtaatgtgtggttcagcggagtcacaaagattgcacctgtgctcagggattagccctgttgaaacccctacctccatctgtccccagccacgcagtgaacctcctggggaacttgcccctcaagtgtctggatgttctcctcaccctggagccacatggagactccacggagttcatgggagtgaatatggatgtgattcgtgccctcctcatcttcctagagaagcgtttgcacaaggtaggctggggatggctgtgcaggctcccccagtggctctggcactggttctcctgcacagatgtggtcagtgcttccacactgtccacactggtacgtggagattgtcttggtggtgtgatatgggcgactcttccggttgttctgtggtccagcctggcaagaagccagacccttcctccatgagaagcatgtggacaccttccacacacttgaaggtttcacttcttaaatctttggggatctttactgagtggtccagagaagccccccagtccctacttttaagtcttaaacacaggcagcccttgattacaagcatagttgtccctcagcatcctgaggagacccataggaacctcagatcaaagcttccttctgattgctgtgactgcactacagggcatctggacagctggggctctaaccatcttccaggagcttgcagaaagcaggctggagtacaataaaccgagatttagtagacctcctgggaatctacctgcctaagcaagggacacacaaggtgcctgcgagccagtcaggatagggagctggcactggacacacagctagggggttgtctgtgcccgtcgctgccactgc

SEQ ID NO: 63701 - DNA, 1050 bp, Homo sapiens
taaggccgggcgtggtagctcacgcctataatcccagcactttgggagactgaggcaggtagatcacaaggtcaggagatcgagaccatcctggccaacatggtgaaaccccatctctgctaaaatacaaaaaaaaagttagctgggcgtggtggtgggcgcctgtagtcccagctgctcgggaggttgaggcaggggaatcacttgaacccaggaggcagagcttgcagtgagctgacattgtgccaccgcactccagcctggcaacagagtgagacttcgtctcaaaaaaaaaaaagagactaatgtcgccagatttattggagatggcccagtgtccaaattaagagcctgcttaaggccaatttagatgtttaaaataggaaactgcttaaagccaggaggcagcagttagggtttgggcccagttaacagaaggtccaaccaggcttccccagtaaatgggagcagcctacttggtagagaggaaggtagcagccacgggtgagtaggacccctgcctggccaactgggccccttccccagccccactgcacctttccccaacaggaacagagtcatccagccaatggggatgagtccccggggtcatcttacgtccctgcaggatgccatgtgcgagactatggagcagcagctctcctcggaccctgactcggaccctgactgaggatggcagctcttctgctcccccatcaggactggtgctgcttccagagacttccttggggttgcaacctggggaagccacatcccactggatccacacccgcccccacttctccatcttagaaaccccttctcttgactcccgttctgttcatgatttgcctctggtccagtttctcatctctggactgcaacggtcttcttgtgctagaactcaggctcagcctcgaattccacagacgaagtactttcttttgtctgcgccaagaggaatgtgttcagaagctgctgcctgagggcagggcctacctgggcacacagaagagcatatgggagggcaggggtttgggtgtgggtgca

SEQ ID NO: 63702 - DNA, 1064 bp, Homo sapiens
gggcacaagtgtcatctcatgggaggctggcgccacctcagaaggtgaatgggttcagcttgggttccaggccagagtctgaagttgagaggactccgttgggtgctgggctgtgagcccaccatgggggcaagactgggagcagcagacccagcagggcccttgtaggtaatcaccggctggcactggctgggggccaggtaaagccagcagaggctgaggggtgctggagtctgggtgtgtgtgaacgcagagtgggtacgctggcacagtgcatgggaggccgtggattcccaaggaccccagggctgtggctggagcagctggaaagacggagccgccgcttcctgagatggagaagcctggtaggtgggtttgggggagctcaggaactcagccttgtttccacggatttgaggatgtgctgcggactggaggtgttgagcaggtggacatgagtctggagtccaggaaggcccagaggcaggagctggggtgctggagtgagcagacaggagagcccagggtgtggacagacatgagaatgccatgctaggcctaggatggagggacagacacaggaggagcagtcagaggggccatggtggtcagcacagtgtgggctgagaccagctgaccgtgctggccaccaggtgtggacacttgggccaccagccatctttattgttgaagtgaaatgaaaatggcctttttcctgattataagtgtatcatgtgtgtctttgaaaagattcgtacattatataaagatataaagcaaaggatcaactttttaatcccaccaactgttagcattttattctgtgtcctctcagctttcttttttttgtacaaatgcatacgtacagatggtaattttaaactaaaagttggacagcactgtacattctattctgcagcctgctgttttcacgtaacaatgtgagtccatggagatgtgctgcgttgttaatgccaacagtttcccttacacggatatgaggtcccaactgagaaacccatgtctgtaaggctggtgccatcatgaactgaatgagctggtgt

SEQ ID NO: 63703 - DNA, 1014 bp, Homo sapiens
agtcagtcgttcatccaagaagccctgactgagctcttattctgtgccagactctgttctaggtgctatggatggagcagggaccaggacctacaaacacgtggagcgcattctaatatctgtgatactctgcaaaactgttaaaacaaatccttgcggccgggcgcggtggctcacgcctgtaattccagcactttggaaggccgagacgggcggatcacgaggtcaggagatcgagaccatcctggctaacacagtgaaaccccgtctttactaaaaatacaaggaaattagccaggcgtggtggcgggtgcctgtagtcccagctactcgggaggctgaggcaggagaatggcgtgaacctgggaggcggagcttgcagtgagccgagatcgcgacactgcactccagcctgggcaacagagcgagactccgtctcaaaacaaaacaaaacaaaacaaaacaaaaatccttgctaccactggccctaaagcaggaggcatagggctgcgtgtgaggagtagtccattgcatgggcttcctccagtttggctttggatttttgagctctctgaatttgttgtttgtgtcctttgcacagtgtccctcccaggttgcacccatgcctgcccctcagggtcccccactcccagtgaatttcacaccatgcagcatgtactttaagccatacatcttacgtatgttccagacatttggtaaaacgccgtttatgtgtttttcagtgactcacaaacattttatttacgtaaatgaggaatgtactcaggcacccttcgtgataccttgccctcagcaggcactcaacagcaataataactttcattccttttgtgcttctcttaacagttcgtgtttagtaggagcacagtagctgtttggggaacgaccttaagtgaatagatgtctgaaatgctgtgtgaagtggggcgcttaataggtggtgagatggttttagaaccagggttttccctctttgcttcttgactccttaac

SEQ ID NO: 63704 - DNA, 1023 bp, Homo sapiens
ccggcgcgcccaggtagacgtagaggcgagtagaggaagttccctagtctggtgtctcatctctcgccccggaggtcaaacctggagccagcatttctgtaccctgcgctcacacctttttcaacccggatggcggtgatagttaatactttctgagcgcttttactatggtcaggcattatatttacacctaatcctcgcaaaacactactgggaagatcctcatttgacaggagcaattccgggtcacaaaggctgacaccacaaagctagtccgtagcgggttcgaccacaggcgcccacactctttgacgcctcaatggcacagccaagtgcgcgggaagtgggctgcaaacgccggagagttttgtccggagcgcagagacgcgctgtaaccgagcaaccagcggggcccgcccccggcctgctacggcgctcccagcctgccccgcgccgctcggcgccggaagtgagtgagcatttccggcagccatccccgcggtgctgacatcccggttgttcttctgtgccgggggtcttcctgctgtcatgaaggacgtaccgggcttcctacagcagagccagaactccgggcccgggcagcccgctgtgtggcaccgtctggaggagctctacacgaagaagtgagcgccgagcagacgggccctgggccccggcgatagagggagacggagggggcaggcgggcggaggagcggacccttgatgggctgagggcgcccagacccaagttggggggaaacggggacgtgtagcgaccggctgtgccggcaaggtttgctgaggaaccttgagtggcagggtcgaggaataagagggatgacagaccacgagggccaagagctgtagccaggatgtttcggtctgagattcactgcttccttaacgggggactgagactgaggcttctgaactcctacctcgggtcttactaaaacggttcaggagtagcctttgattttagctcttgattccatctaacaagcaaacacactttcagggc

SEQ ID NO: 63705 - DNA, 1031 bp, Homo sapiens
atagaaatgatcatgtgtgtcctctggttcggccttgcactctggacagagaccaatcttcagtgcttcctagtctgtgtccctcagaaatgcccctgaaacataatgtatttttttcttcagtgcttttgcacatgtttgttactgtctggaatgttcttctctcagcttcttcccctcccacaccaaatggccacctctctaaccgcccttcattccttgaaactcagtattgccacttctacagtaacctttgaagcctctccctttggctgatgcacttctgcccctttttttttctttctttctttttgctcttaaactcactgtattgtcatttatttgtttaaagactgtcttcagtggaccaggagctccttgaagacacatcatttgtcttacacgttctatgttgtagtatctagtatggagtctgaggaagtgctcaagtgtgctgaatggctaagaaatttgaaaacggtgcataattagctttaattaaaatctgaaggaactccattctgtttgattagcaaacatttctctttttgttttaaattttatttcattaacttaataggtgaacaaaatgtgtatttcaaatctaattgaaattcatctgaaacatgtttacacagaagatagatataagatttcaagtaacttattgtacagtccattgtccattttaagatattctttcttccaaaaaaactgcgttgaatgtcaaaaaaaatcttttatactccataaaattgagatgcaaacttctgatataaatttttttcactgtcaactccgatgataaagatgggaggcacaagcgttcacagttcagttaaatgatgcaaacgaaaagcttctgttttcctttgatacaaattagaagcctccattcaggtctcttacagtagtaccgcatacttgatcctgatactacattatgtctttttctttttctcttttttttttgagatggagtttcactcttgttgcctaggctggaatgcaatggcacaatctcagctcac

SEQ ID NO: 63706 - DNA, 5239 bp, Homo sapiens
actttgttttataaaggagcagatccaaatggtggttaaaattgaaatataagttaactgaacttttgtgttttctgtatcagatattatgtttttattatactttatggtcaaaacctaaagattaccctacctaagggtgtcttggttagcagaaaccagtctgttgatggtccttctgattgttccttcttttccagatcctaatgtggctcttacttttctggaaaagactcgtgagaaggtaaatgtggcatgtgggcaataccttttagtaccttttagagtatgtatgacttaacagcttgtgttcatgctcactgtccagacctttagagaccacaaggcctctagtcatcaaggttaagttaatgtacaagtagctagcttcctttgttagtcaactgcccacattctgaggtttcttgtttttgtttttgatgtcttaggtgaaaagtagtgatgaggcagtgatcctgtgtaaaacagcaattggagctctaaaattaaacatcggggacctacaggttacaaaggtgagatcaccataatacagatttatctttggtttaaaattatttaaaaccctaggaaaaaaaataacctatttttcttctttactgtttattttaaaacatttttacattacagaaaagttgcaaaaataacacaaagaactactataccccaacctaaatttcccattgcaaacctttttttttttttttttttaaagacggagtctcgctctgtttcccaggctggagtgcaatggtgcaatctcggcccaccgcaacctccgcctcacgggttcaagcaattctcctgcctcaacctcctgagtagctggaattacaggcgcgtgcctccctgcccggctaatttttttgtatttttagtagagacagggtttcgccatgttggccaggctggtctggaactcctgacctcaagtgatccctctgcctcagcctcccaaagtgctgggattacagccgtgagccgctgcgcccagcccccccgattgctaaccttttaccgcttttgcctttgtgtgtgtctgtagcttttttccaaaaccacttaggagtaagttgctgatacaatgcctgttgcccttaaacaaaagagcactcccctgtgtgaccacagcacatccgtctaataatgactccacatggcctcagtcagcccaaagcacattggttctccctgaccaaggtcagcctacacaccactggcatgtcacgtgctatttctccatcttccttctgcctcctaaatgttgttgaagtatcctgtctatttttatgtctttcttatgttcaattatgttttggtgcagttgggagacaggtatggatgtgggtggcagtgaaaccgacatgtggctggtccacctggttgaaccagaacgtgtgtgtgtgtgtgtgtgtgtgtgtgtgtgtgtgtgtgtttgcatgtgtgttcgtgtgtttgtgtgtgtttgtgtgtgtgtgtttgtgtgtgtgtgtgtttgctaatcacaatgttaaagaaaatattgggggtaagggttaaagtgttcatgtcctcattgccctgaaaagatactttttattgtttattgtcagtcctaacccatatgcatacttagtgcattttattttcaaatattttaagacatattgaaagctataagtcacagtacagaatgctgtaataggcatccatgtgccccaaccagcttaggaaggaatgaagccacacggcacagtcagggtcccagtacccttcagaccacacttctcccccagccaggctccctctcatgcccatgcatttccttgtccttcattaaataggggtgtgtaactcaagcgttttaacattggctcaatactaggtttcagagtcatgtgggtatgtgtaaccaatgtgctgttactcctatacggtatttcattgtataagtgtttcacaacatatgtatccagtctcctattgaagagatttagggccaggtgcgatggtcacacctgtaatcccagcactttgggaggctgaggcaggtggatcacaaggtcaggagttcaagaccaacccagccaagatggtaaaaccccgtctctactaaaaccacaaaaattagccgggcatggtggcgggcgcctgtagtcccagccactcgggaggctgaggcagcgaattgcttcagcctgcaaggcggaggttgcagtgagccgagatcgcaccactgcactacagcttgggcaacagagcgagactctgtctcaaaaaaaaagggagatttaggttgttttttttactatcacaaacagtactgccataagtatttctgtgcctggtcccttgtgtgtgggcagaatctcaccaagatgtatgcctagagactacaggtacaagctgtgtgcatctctgcctttcccagatacatgctccctcagcaccatatgagtactctggaagctccatgtcttcaacacctgatagtttcaggctctaactcttgctgatctaatagaagtgaaattatatcttgttgggggtttaatttgcatttcacaattactagtggtttattggccattctgtttgtgtccccaaatttgtcaattgcctgttaatgtcttttgcccatttttctactgtgttgcttgtctcctgactcatttgtaagtgtttttatatttccttggtcataattgctggtgggttataaatgttgtaaatattgtttcccagtctgtagcttgtctttgtacttttttctgtgttttggattaagttttccattttaacgcggtcacattcatcagtctttgccttggtagttgatgcttttcatctcacaatatattactttaaaaatcttagccaagcacagtggcttgaacctgtaatcccagctactacagaggctgaggtgggaggatcacttgaggccaggagttcaagaccaccctaggcaacagagtgagaccctgtctctaaaaaaataaaataaacttttaacttaaaaagagagatgattttccttcctgtgtataggaaacaattgaagatgttgaagaaatgctcaacaaccttcctggtgtgacatcggttcacagtcgtttctatgatctctccagtaaatactatcaaacaatcggaaaccacgcgtcctactacaaagatgctctgcggtttttgggctgtgttgacatcaaggatctaccaggtaacctaggccattaaatccatgtcacacaggagcatattctccaaacttagcatctgtgagttgcttgaggtgacagttctcagaaattactaaggtggggctgggcacggtggctcacgcctgtaatcccagcactttggaaggctgaagtgagtggatcacctgaggtcaggagttcgagaccagcctggccaacatggtgaaaccctgtctctactaaaaatacaaaaaactagccaggtgtgatggtgggtgcctgtaatcccagttactcaggagtctgaggcaggagaatcacttgaactcgggaggtggaggttgcagtgagccaagattgtaccactgcaccccagcctgggtgacagagcgagactccatctcatccaaacaaaaaagaaattactcagatggattcatcctgttttgaagaaaaaaatgggaagatttgtgtaacctttagtttctacattatatttgtctccagcatttaatttacatgaaaatgaggctaattcctcctcgctccttcactgtcccttctccagtccctcactgttacctaagccacaggtatttgtaggaagcaccatgacgccaacaccttctgagccctccccgcccacccctctgctgcagaataaagggcacgtgaaatccctgtagctgagacccttgttttgaaaactgaaattccagacccatggggacaaattattaaatctttcaaggatttgagagtggaaagaaaatgacctgtgagttttggaaaaagtgtaaggaatatatgttcagaaaataaattttcagcatattttagatgtttctcacaaaacactgttgaagctaaggagaccagcaactcttaacagtgttgatgcagtttttattactgtatgtcaagaaaaatatatcggaaaaggaactaaggtggtcaagagaacaatagacttgctgtctaggaacagaaagtaagttagttctggtctgaaaagaagctaggttaggtaacttaaatttattccttgccatagcagaaaagagatttaaggcacttcctggaagtggcacagctgaaaatatgaatagattcacatatatttaggaaaaaataaatgaatgctcctcccaaaaaacccatgtatatatggttcttggtataatctaagtcaacccaatacttcagaagaggtgactaatgtcaaggctttgtaataacaaccattacaaacaatgtttttttactttttgttatatgagatttttaaagctaaacaggactgattattatgactggattgtaagtgggcctgtgttgctaccatagtgtctgagcagcaggagagagccttcacgctggggctagcaggacttctcggcgagggagtttttaactttggagaactcgtaagttgaccctgagctcagcttccttaacgagagagactaaagtgttactagctgaccatctccatcctcacagctcatgcaccctgtgctggagtccctgaggaatactgaccggcagtggctgattgacaccctctatgccttcaacagtggcaacgtagagcggttccagactctgaagactgcctggggccagcaggtaggactcccacgatgcccagcccttattcccccatgtatctactcgctcatacaacagatgttcattgagcgtcttccctaggcacacaggaaagaacagggcaaagaggagaccaagataggctagtccttgctctcatagagcagagagttaagtggttggttagctacagcattactcagtgctgcagacaaagagtgagggtgttctgagaaaacagaatcgaatgtgggccctgcatctacgctgggtggagggggtgtcacagaagatgtagaagtcatagtgacctaaggtctgtgtgaccttaggaatgagtgaagaggtacgggaagagtgcactcagcggagaaaacggaaaagtttagtatctttgctgaactgaaagagggatgtgtgaggct

SEQ ID NO: 63707 - DNA, 1490 bp, Homo sapiens
gtccatgggggtgtgtcaggctatcttgtcttacacacgcctccctctctgcacaggtggagcttctggtgatgaaggccctttcggtggggctggtgaaaggcagtatagacgaggtggacaaacgagtccacatgacctgggtgcagccccgagtgttggatttgcaacaggtgatgtgtttgaaacccattattcacctctgtggattttgaggggttgtgtctataccgtcttagtttcatttggatggaagccatttgggaagacagcattattagacaagaggttttggagaaggaaatactgctgttgggtttttctaagagcctaatttaatgcaagcctagggtttgaaccctgcatttaaaagcttatgatgacaatggcactggttgtgctgacggtgccttttaatcttaagataggagctctgatcagatacgttcctggttctgtgatttgagctcacgtcgctcttacatttgctggaaatgcgatcctgtggatttcctctgtccttgtctgctttctttcatgcaagttttttctaacgttcctgtgaaaagaattaacccggcaagtcccgtcccactcccccagctcagaggtcctttttactagagctgccctagagagttagctggagatgtagagtcaccccatcaggtgctgtgccggccgctcggcctgtgtctcctgcgtgtcttaacgtcccttgtgtccggatttccatttcagatcaagggaatgaaggaccgcctggagttctggtgcacggatgtgaagagcatggagatgctggtggagcaccaggcccatgacatcctcacctagggccccctggttccccgtcgtgtctcctttgactcacctgagagaggcgtttgcagccaatgaagctggctgctcagacggtcgacattgaatttgggtgggggttgggatcctgtctgaagtacagactgttcttgctctaaaaacaggactgtccctgatgggagccaggccacagggaggaggcttctttgtgggtctctcctgcagagggtgggggtctcagggtcttaggtgatacgggagagaaagaacgtgccaggcaggaggccccctgaagtctgtgtactccgaggtggatctccatccccatccacctgtacggacatcttttccgttgcggtttgagaatgttcctataataaacccctctgctttgttcttcttgtggctctgttttcttgggcttagcttccaggccaagcctgtgcctggaggttaaaaagcatgagttggaaccttgggaagacacggtgggggtagccttggcccttctcctccctgcacatacagtagacgggcagaatccagcaccaaggactaacgaagacgctggtcctatctttattgttagtcaagagagacctaggggtatccactcccttctccagccctctcaggtacctgccccgacacaggcatccatccacatc

SEQ ID NO: 63708 - DNA, 1038 bp, Homo sapiens
cgtggagcccggtactggaggccgacgggggtgacggggacgctgagggcacagagcggaggggcatgatggctgctgggcgtggaggtgtcgagagtgactgtgctggggctgctccatcgttgtctgagcctcccggtgctgccgctgtggccgtttctttgatgaggctctcagaggccgagtcattcactgccagcctgaagctgcccatgcgcatattcgggctggagcctctgaggccacacaaacgccggctggggaggcgaagtgtggggctgagcaccagaactccaggagcgtctgggctggagacagaactgggtgggcaggtggggagggcctgcagatctgagtgggcagccgaggaggaacccagaagacgccagcgatggagctctgccggggcggaatgtggccaggaggggcgggagcagtgacggcctgtccggcgctagaacgagggaccgtgctctcaggacctctggatgttcccgagtatcctgatgttccacccagaagccgccagggccatcctggagtaccgcatccgcacgctggacggggccctggagaacgcccagaacctgggctaccaggtgaggggacctggggcactggcccgtagggccctgcagggcctgcagcccccacacccctcccaggcctgtatccctctccccaggccccctctggacaaagctgggacatcctagattccccaccctgaggcttgtggggcctcagcagtgccctgcagcccgcacctgagagagaggaggtgggaaccgcagcgggctgggaccctgctttggcccaggaccccctggggtgcccttgctgccctgcaccagggtcagcactcggtgagaactgggcagaagccacctggccccgtgaggacgtgcagtgggccttctagcagtagcacccgccagggtacctggcgcaggccgagccccccctcctccagggcgagggcacgggaaagttggggggccaccgctcccctccaacaaggtcaagtctgccccctcc

SEQ ID NO: 63709 - DNA, 1454 bp, Homo sapiens
tgatctggggcactagccccaggacactgaccccaggctgctgcccctggggcccaatactgactccccggagcctggccctccttctgtggggcctccatccctgccccatcctgatcctggggccctccagccccaacatgggcacctaaggctgaaccagtcagaccccggggtcttcaccctaacccgagagttcccgggccctaactctgcccccgatcctgcccctccctcctcacactccaggcccctcggttccacgattaaaagtgcctggttccagaaagtgcctcctggcctctttcctgcctagcgtgggggaaggagctgccctagggaccaccaaagccaaatgccacagggccagcccccagagtcagtggcgggagcgccccccgcagctcagcagccctgcttggccccaactgtccccttctctcagccactgggcggcctgtggcttacggggcggaggcccagagtattttagactaagtttgagagcccaggcctttgatctctgctgctctgtggtttagcggcctgtgctccagaacatcatgggtgcgtcccaaccccacgtgtgtccaccccatctctctgtgcgcatgtgtgtgcgtgctcgaagtctgcgtgagagtccgtgcctgtgggtgggctccatctgcggtctggtgtacacctccttcctttctgggtcattctgtctgtccccatgaccctgcgtgcccccttaattctgagaaatcccagtccccacggtggtttccctccctcctgggccagtgagggtggctagaaaggcagggcggggacgatcccatgggtggggctggacacacacacaaacacatgtgggaaggatagcagcttccctttctctctcacacacacacacacacacacaccccaaccaaactatatccagaaaggcagaaaatgggcatgtgtgcaacattctctgagtcccctggtgctgggtgcatgttctcatattattttacctgcgttgtgtaccacagcctccccacacacccaccacagcctggtgatgggagagggccagggacatgcacactgcgaggctgcggggaggccctggggcctcgctgaggccagccattgccgggaggtggtggttaacagcacagtggcccagggttctgagcaccccactccggggcccttcccttcccggggaatcgccgttgcctgcctgctcttcctgggctgtgggcaggaatcttttggtctactcggagccctgggcagcatcccctatctgtgatatgcctgcagccaacggctggcgtggcagggactctgagggcaggcccagccagccctggaggcagaggtgtgtggaggccatgctgggcgctggagacagacaggaccagtcccacagtggaccaaggacaagggcagtgtgcccacctgtgcttgccttg

SEQ ID NO: 63710 - DNA, 1766 bp, Homo sapiens
gggcctggagtgtggaggcgtcagcgcaggcctggcaggagccctgaaccgggacagtgaggtcctgcagctgctggcctggggtgtggagactcccaacacaggggaagtctccaggaccccacaccactaacaagatgagacttgtgctcctttgggctctagagaggaagcccctcttagccctcagcccctctttcctccctctcctaaagtaatttgatcctcaggaatttgttctgcccttatctggccctggccagctctgcatttgacaaatgccaggaagaggaaactgttgagaaaacggaactactggggaaagggagggctcactgagaaccatcccggtaacccgatcaccgctggtcaccatgaaccacattgtgcaaaccttctctcctgtcaacagcggccagcctcccaactacgagatgctcaaggaggagcaggaagtggctatgctgggggtgccccacaaccctgctcccccgatgtccaccgtgatccacatccgcagcgagacctccgtgcctgaccatgtggtctggtccctgttcaacaccctcttcatgaacacctgctgcctgggcttcatagcattcgcgtactccgtgaaggtgcgtatggccctggcggaaatccagggggtgccggtgagcctggggctccacctgcccacatgctgcctggggtggggacttgtgtgtccctgtgactgtgagtttgtgtgcacgtctgtcctgtgtgtgcccacgtcagtggctttgtctgtgtgatctgtgtgtgtgtgtggcttggggaatctgcccagtgcaggtctaggaggaggctccaggaggctggctggctggctcagagtctgtccccggctatccactagcccagagcagttctccctatagcccagtaagaaattacaccttcaccttccagactggcacccaggctctcccagaaagtgagaagggaactcacaggtgacttcaccccatggtggggagaacagcctgtgctggggccaaggcagaaggaggatgagccccgaggctcctggagagtctgagccgggtgaggaaggggaggaggtggtccctgatctcagggcagggaggagacagtgaggagctggagccatagcacgcggctctcagctgggggatcctggtcccctcaccatctcctctcccccagtctagggacaggaagatggttggcgacgtgaccggggcccaggcctatgcctccaccgccaagtgcctgaacatctgggccctgattttgggcatcttcatgaccattctgctcatcatcatcccagtgttggtcgtccaggcccagcgatagatcaggaggcatcattgaggccaggagctctgcccgtgacctgtatcccacgtactctatcttccattcctcgccctgcccccagaggccaggagctctgcccttgacctgtattccacttactccaccttccattcctcgccctgtccccacagccgagtcctgcatcagccctttatcctcacacgcttttctacaatggcattcaataaagtgtatatgtttctggtgctgctgtgacttcacctggggagcggtcctgctggttctgagattaaatgtaatgccaaacgttcttgccttagccacaccaaagaattgggtgtggcggctgcccgcggcgagtgatggagacacagaccaagagaagaaaaaaactgtaggttttattgagcagagtgacagtacaaagcttacac

SEQ ID NO: 63711 - DNA, 1649 bp, Homo sapiens
ccagggccccctaaacccaacacttaggaagtcactagtcctgacttgagtttctgatgaggaagcctctctccttagccttcagcctttcctcccaccctgccataaagtaatttgatcctcaagaagttaaaccacacctcattggtccctggctaattcaccaatttacaaacagcaggaaatagaaacttaagagaaatacacacttctgagaaactgaaacgacaggggaaaggaggtctcactgagcaccgtcccagcatccggacaccacagcggcccttcgctccacgcagaaaaccacacttctcaaaccttcactcaacacttccttccccaaagccagaagatgcacaaggaggaacatgaggtggctgtgctggggccaccccccagcaccatccttccaaggtccaccgtgatcaacatccacagcgagacctccgtgcccgaccatgtcgtctggtccctgttcaacaccctcttcttgaactggtgctgtctgggcttcatagcattcgcctactccgtgaaggtgcgtatggccctggcggaaatccagggggtgccggtgagcctggggctccacctgcccacatgctgcctggggtggggacttgtgtgtccctgtgactgtgagtttgtgtgcacctctgccccgtgtgtgctcacgtcagtagctttgtctgtgtgatctgtgtgtgtgtgtggctttggggaatctgcccagtgcaggtctaggaggaggctccaggaggctggctggctggctcagagtctgtccctggctatccattagcccagagcaattctccctatagcccagtaagaaattacaccctcaccttccagactggcacccaggctctcccagaaagtgagaagggaactcacaggtgacttcaccccatggtggggagaacagcctgtgctggggccaaggcagaaggaggatgagccccgaggctcctggagagtctgagcccgggtgaggaaggggaggaggtggtccctgatctcagggcggggaggagacggagccatagcacgcggctctcagctgggggatcctggtcccctcaccatctcctctcccccagtctagggacaggaagatggttggcgacgtgaccggggcccaggcctatgcctccaccgccaagtgcctgaacatctgggccctgattctgggcatcctcatgaccattggattcatcctgttactggtattcggctctgtgacagtctaccatattatgttacagataatacaggaaaaacggggttactagtagccgcccatagcctgcaacctttgcactccactgtgcaatgctggccctgcacgctggggctgttgcccctgcccccttggtcctgcccctagatacagcagtttatacccacacacctgtctacagtgtcattcaataaagtgcacgtgcttgtgatgatgctgtgacttcatctggagtgggggccctgctgaggggtcccggcctagtcctgagacagcccagtgctcagcccctgcacagccgtatccctcctctgtgaagctctcaggggagcagggatatgctcagaatctgctggtttccgcctcctgctgtgggcagcatctggaccaggaacgtggggtgggc

SEQ ID NO: 63712 - DNA, 2241 bp, Homo sapiens
tcctcccacctcagcctcccaaagtgctgggattacaggcgtgagccgcggcgcccggcagaggtgagggctttgggggaacggttgtggggcctggagtgtggaggcgtcagcgcaggcctggcaggagccctgaaccgggacagtggggtcctgcagctgctggcctggggtgtggagacccccaacacaggggaagtctccaggaccccacaccactaacaagatgagccttgtgctcccttgggctctagagaggaagcccctcttagccctcagcccctctttcctccctctcctaaagtaatttgatcctcaggaatttgttccgccctcatctggccccggccaaatcccgatttgacaaatgccaggaaaaggaaactgttgagaaaccgaaactactggggaaagggagggctcactgagaaccatcccagtaacccgaccgccgctggtcttcgctggacaccatgaatcacactgtccaaaccttcttctctcctgtcaacagtggccagccccccaactatgagatgctcaaggaggagcacgaggtggctgtgctgggggcgccccacaaccctgctcccccgacgtccaccgtgatccacatccgcagcgagacctccgtgcccgaccatgtcgtctggtccctgttcaacaccctcttcatgaacccctgctgcctgggcttcatagcattcgcctactccgtgaaggtgcgtatggccccagggaatgctcagagggtgccgctgagcctggagctccacctgcccacatgctgcctggggtggggacttgtgtgtccctgtgactgtgagtttgtgtgcacctctgtcccgtgtgtgcccacgtcagtggctttgtctgtgtgatctgtgtgtgtgtgtggcttggggaatctgcccagtgcaggtttaggaggaggctccaggaggctggctggctggctcagagtctgtccccggctatccactagcccagagcagttctccctatagcccagtaagaaattacaccttcaccttccagactggcacccaggctctcccagaaagtgagaagggaactcacaggtgacttcaccccatggtggggagaacagcctgtgctgaggtcaaggcagaaggaggatgagccccgaggctcctggagagtctgagcccgggtgaggaaggggaggaggtggtccctgatctcagggcggggagagccaatgaggagacggagccatagcacgcggctctcagctgggggatcctggtcccctcaccatctcctctcccccagtctagggacaggaagatggttggcgacgtgaccggggcccaggcctatgcctccaccgccaagtgcctgaacatctgggccctgattctgggcatcctcatgaccattctgctcatcgtcatcccagtgctgatcttccaggcctatggatagatcaggaggcatcactgaggccaggagctctgcccatgacctgtatcccacgtactccaacttccattcctcgccctgcccccggagccgagtcctgtatcagccctttatcctcacacgcttttctacaatggcattcaataaagtgcacgtgtttctggtgctgctgcgacttcacctggggaggggtctggctgagggttcggagcgtggttctgagactgagcaggttggtcagcccctgcactgccccttccggcctctgtgcatctcttggggaccgggcaagtgctcaggccttctggtttcgggcctcctgccgtgagcagcagctggatccaggaccctgggaggagttcctgtgtcctgcaggtctcagctcctactcaacgtgggctctttccgggaacgtcagtgctgagtccgggacaccctgggcccaaggccacgctcgcggcctgtcggcaatccaggctgtcggctcaggacagagggaagggttaagcccccagcagggccagggaggggcaaggtggcaccggctccccagctgctcccaggccctgctctgtggtgctggggacctggctttagttcctcggggtggagggggcaccgcgctgcctgcctccgagctgtctggagcagccagtcctgcagatgtgggcagctcagggcccgtgggagggagggggctttgtgcccagggcagcagctgaaggagccccgggcctcgcagcccctcctgggtgaccaggtgctgcttcgtggcagctgccccctcccgtccag

SEQ ID NO: 63713 - DNA, 1126 bp, Homo sapiens
gtgtctgagtgtatgtgccaggtgccacaggtcagggtttgcatggctggggctcacgggcatttagggctgtgtggatacatgttggaaggggtctttgtgaaggtttgtcttggtgtgtgtgacctcctccctgcccttccaaccctgaccctgttgccttttctctcctgcagcccgaaggtcgggacctagacatgctgtttcctgggggggctgggaggctgccactgaacttcacccatcagacacccccatggcgggaggaggtgagctggctcggcctgtaatgggctgggaggcagggcgggggctggggcgggggggcggcgggccgtgcagaaggtaaggcccccccatccccagtacaaggggcaggtgaacctgcacgtgtttgaggactggtgtgggggcgccgtgggccacctgaggaggaacctgcacttcccgctgttccctcatgtgagtgccggggttggggggtgccgggtgggcagggcacgcagggggcttcgacagcaacagtcactgcccccccagacgcgcaccaccgtgaagaagttggccgtgtcccccaagtggaagaactatggactccgtatttttggtttcatccacccggcgagggacggtacgggggtgagggtgccccgggggaggggtgccgtgaggctccacccccctgagcctagtcttgtggactaggagacgtccagttttctgtggcctcagacgacaactcggagttctggctgagtctggacgagagccctgctgctgcccagcttgtggcctttgtgggcaaggtacccccaccccagccctggtgtcgtcccgggcctcctgcagctcagtcacctgtgcccaccagcctcttgggaatgaggacccgatgggtttggtgtccccagggagagagtgaacccccccccccaccaccacccctgctctatcaccccccagactggctccgagtggacagcgcctggagaattcaccaagttcagctcccaggtgtccaagcccaggcggtgagtgactgtggggtgcatgtgcgtgcacttgtgtattcgtgggagggggttacgcgctgtctccttatcctgtgcacacttgcgcacactct

SEQ ID NO: 63714 - DNA, 2892 bp, Homo sapiens
gaggaagggagggaggaggaaaggtgaggaagggagcatggtggggtctggccctgctcccagggtccctcagctttctgggcttccttccccagcttccctgctgccccttcttggaacgccccggacccctctgccatctcctctcctgcatcctttaagggattggtcctattagtcccccggccctgagccagggtagaccctttcttccctggacccagccaccgccctgtccctgacccccaccctctctgccccgcagtggcgagctttcctgcccggcctgaagttcgaggtcatcagctctgctcacatctccctgtacacaggtgcgagcggacgcctctggggatgtggggctcctcgggatgggctctgggtgtgagtgggaagagtggaggagggggtctgagcactccctggaactcttctgcccccagatgagtcagccttgaagatggaccacgtggcgcacgtcccccagtctccagccagccacgtgggggggcgtccgccgcaggaggagaccagcgcagacatgctgcggccagatcccagggatacctttttcctcagtgagagggggcccgcgcgggggcgagggcgggggtgcctgccccagccaccctgtgaccgcacctcctgcagctccacgcatggaatcttcgagcctggagaacgtgctggagccctgcgcctacgcccccacctacgtggtcaaggacttcccgatcgccagataccagggcctgcaatttgtgagtgcggctggagaccccgtctcccgtccgggactccgcggagccttctccagccccttgggaggccgccccgggaggtccgcgccctgagccctgcgcccccccaccccccaggtgtacctgtccttcgtttatcccaacgactacactcgcctcacccacatggagacggacaacaagtgcttctaccgcgagtctccgctgtatctggagaggtgggcgcgcggccgggctaatgcggggcggggtgggcggggcgggactcggctctgatgccccgccgcgccccaggtttgggttctataaatacatgaagatggacaaggaggagggggatgaggatgaagaagacgaggtgcagcgccgagccttcctcttcctcaacccggacggtgagtgtccgcagcgcccctggcccgcacccacctgcgcagggagcttctaacccgcgtttcccgcagacttcctggacgacgaggacgagggggagctgctcgacagcctggagcccaccgaggcggccccgcccaggagcggcccccagtcccccgccccagcagcccccgcccagcccggagccaccctcgccccgccgacccctccccgcccccgggacggggggacccccaggcactcccgggccctgagctgggccgccagggccgcccgccctttgccgctcttcttgggccgagctccgcccccgcgccctgcagtggagcagccgcccccaaaggtgtacgtgaccagggtgcggccgggacagcgggcatccccccgggccccagcgccgcgtgcgccctggccgcccttccctggcgtcttcctgcaccccaggcctctgcccagagtgcagctgcgggcgcccccacgcccaccccggccccacggccgcaggaccggcggcccccaggccacacagccgaggcccccagcccgggcgcaggccacccaagggggccgggagggccaggcgcgcacgctgggacctgcggcgcccacagtggactcaaacttgtcctccgaagcgcggcccgtgacctccttcctgagcttgtcccaggtgtccgggccgcagctgcccggggagggcgaagaggaggaggaaggggaggacgatggggccccgggcgacgaggccgcgtcggaggacagcgaggaggccgcgggcccggcgctcggacgctggcgtgaggacgccatcgactggcagcgcacgttcagcgtgggcgccgtggacttcgagctgctgcgctcggactggaacgacctgcgatgcaacgtttcggggaacctgcagctgccggaggcggaggccgtggacgtgaccgctcagtacatggagcggctgaacgcgcgccacggcgggtatgggggcggccgaacgcgcgccagggcggttttggaggcggggacagccggggagaggaggtcctggccttggcggactcctcagaccttccccagggcccagtggtgtaccggcctgggggctgaggcaccgcgccccaccccagggaagccccagcttctctccttccttcctggcgtcctgactgcccgggcacttgtccagcctcagggacctccctggagccccacccagggctggcgccccatccttgcacctgtgtaccccacttctgtcatcctggacctgggcccagggatgagtccaagctgcagagatcagcgtcagtcgcatccagttgctgcgcagacagccccattccgggggggccaggcagagacccttagggcaaagctcaagacccctgggcccctcctcctctcccctcgcagtgcccctgggcgttcccagactgtcaggacccgactgcagaggaaggtgcagggcttctgccccattggcccctctggtctccctgaggccccaggaatctagtgctgtctgccctccctgcaggctggtgggcaggagtggggagtctaatttggccttggggaggcctgtggagttctaagaagaggcagtgtctgctgtgcccagccttgaaggcgagttaggagttgcacagtgatgacaggcagaggcaggggcagaggatggaggcagaaccgggactgtttctcctgtgcgtgatggaaggttgcgagcagagcaaag

SEQ ID NO: 63715 - DNA, 1050 bp, Homo sapiens
tgccggccactgcgcctggcctggcgccaggacgtgatggttcacttcatcgtgccaggttcgcagggcgggctcggggtgtccgggagacctcgtggaaggaacatggaccctaatgactaggaaagggtgtgggtgtccgggatgaagttcttcggagctgggaggccccaccgtagagtcagcgtcggctcagcgccccccccgccttttctcctccagtgaaaaaccaggcacggtgggtggcacagttcctggcggacatggctgcgctgcacgcgcgcaccggggactcgcgtttcagcgtcgtcctggtggatttcgagagcgaggatatggacgtggagcgggccctgcgcgccgcgcgcctgccccggtaacgacccctacttccacctgggcggacccagcgcagctttcctccccgggagatgggttttcctgaccccacccccagagatcgtgcctgtgactcgccctccccaggtaccagtacctgagacgaaccgggaacttcgagcgctccgccgggctgcaggcgggagtggacgcggtagaggtccgagggccccatgggggtcggggagcaaaacggggcgtgcccggggaggagcggagggcggggctcagacctcccgcaccccccaggacgccagcagcatcgtgttcctctgcgacctgcacatccacttcccacccaacatcctggacggcatccgcaagcactgcgtggagggcaggctggccttcgcgcccgtggtcatgcgcctgagctgcgggagctcgccccgggacccccacggtgaggccccgagcgtcccaccctgtgataccagggttcccaccaaccgccgcggtaaagtccaggaacccggggcctctctcaattcccaggggaggcctgggagtccatcagtgctccccgtagtgcccagagccccagtccccccgcaccagcacacccagggccatgccaggggccccaggaacctcctccagtatcccgcgtttatgcaccgcgctccagggtcatgacccagtaccaccgga

SEQ ID NO: 63716 - DNA, 1248 bp, Homo sapiens
tcaagtgccgtctcaacgtgctgctctggtaccaggacgcgtatggggaggtggagataaacggtgcgtggggcccgcgtgggcgcgaggaggggtcgccacggcctccctgagagtgcgctgctgagctcggctttggaggcgtgcggcggggaggggttagcccccgggtgctctgtgcggcccggctggggttaaagtccggggcgggtctgcccctgtgcacgtgggagatggttaggggtgttggggaccccgagggctggtgtgaggcctcgggagccatcggggtgactggccgccgtccgcagacgggaagctctacgacgcctacgtctcctacagcgactgccccgaggaccgcaagttcgtgaacttcatcctaaagccgcagctggagcggcgtcggggctacaagctcttcctggacgaccgcgacctcctgccgcgcgctggtatcccgggccccaccccgtgccccgcccacccggagggcccgccccgccccgccccatgctccgtcccacccggggccccacccccaccatcgagctccgcccccatccccgcccacccgaggccccgcctcaaaaacccgcccaccccgcaggccccgcccctcccttagagctctgcgtccggcaccgcccctgagcctccggccccgccctcccccgcccccgcccctgcgccgccgacgcccgccctcccgcagagccctccgccgacctcttggtgaacctgagccgctgccgacgcctcatcgtggtgctttcggacgccttcctgagccgggcctggtgcagccacagcttccggtgggtcccgcgcggggttgggtgggccccagcgtagcacccacccccctgacggtcccgccccgcagggagggcctgtgccggctgctggagctcacccgcagacccatcttcatcaccttcgagggccagaggcgcgaccccgcgcacccggcgctccgcctgctgcgccagcaccgccacctggtgaccttgctgctctggaggcccggctccgtggtgcggagcaggcgcgggagggtccggggctagcggcgggttagagatgggcggtgcccgggctccaggctgggacccctccgtggggagctctgcggcaccacgctttgtgaatgggccctggggggaggttccgctgcctggggccccgatgcggggagccgcccttgaggcccccggagccacggaatagctgtcgcagggcgtggaa

SEQ ID NO: 63717 - DNA, 1065 bp, Homo sapiens
aagggggcgctgccctcccaccccagcctgaagggaaggtccacaagatgccatagtcccttgtaactgctcacccatcgggggagctatgtctgggagagggacggggagagggcggaagagttctgctggagccccattgttgaccgggagtttctgaaggccctgttccccggggtcagaggtcaaagacacatgggggagcaaaccggccccttggctcctgagtgtgagctctagtagcgtctggaaggcatgccgcgcggtccccggtcctccttgtatgtgtgcagggtggccctggcgggggtctcctggctggaggaccccccatgcattacccctggaacctgcccctttgagcaccccccaccccacaacacacacgcacacacacaaacgcacgcacacgcacatactgcacacacattgcacacacgcagacacactgcacacacacacacacacacacacacacacacacacacacacacgctgcacagaggaaagtgccgtgcctgggtgggttggggcgggctccagaggaaggagccgcttgactcagagctacaggaagagccggggcaggcggggtgagaaccaccaactgcccgtcctcccgcccgcctagggaaggggtgggtgcctgggtggggtttagggttaggagaggatgtgactgcaaggccaggaagctacagggaaagttctgatcaaaatacacaaagacacaagccaggtccccaccgcgcttggcgatgcatccatagcagccttggtgctgtggacactccctggggcccagcgaaggggagagtttgctcccaaaggcgcaccaatgaccaacatttgccccccggaggaaagaactggaaccaggtgactgccttccccgctgctctgagtgagcctgtgtcagggcctggctgagaggaggcccacggcgcccaagacccatatgcatgtgtgtgcatgtgtgtgtgagacagagcgaggggcagcaggaggctgtgtcgcatcagcggccaagggtgggtgtcaggtgcagtgtgtgtgctgtggggt

SEQ ID NO: 63718 - DNA, 1144 bp, Homo sapiens
cctgtgtgtgtgtgtgtgcgcccacgtgcaggtgcggttcgtctgggagcctgtggcctcccctgtgtgggggtgtgtgtgtgtgtgcgcgcgcccacgtgtgggtgcggttcatctgggagcctgtggcctcccctgtgtgtgtgtgggtgtgtgtgcgcccacgtgcaggtgcggttcgtctgggagcctgtggcctcccctgtgtgggggtgtgtgtgtgtgtgcgcgcgcccacgtgtgggtgcggttcatctgggagcctgtggcctcccctgtgtgtgtgtgtgtgtgtgtgcgtgcccacgtgcgggtgcggttcatctgggtgtgagcacctgtgccccgctcacctgcagggcctgccccgcctgttctgtgtctttcctacccgcttctgtcctgctgcacccaccctgtcagaggcagggcgctgcccgcagtgccccagacttccccttcctccccaggatcaacggccaccccgggaagtccacgcgcctggcgggcttgtggaagctggaagaggtcagtcacccccaggcttcatgccctgtccctgagccactgctcccctgaccgtcccccaggacccctccctgatctcctcctgtctggccccgcagtgccacgccagcggctgcatgatggacctcttcgtgcagatggccatcatcatgggcctgaagcagacgctcagcaactgcgtcgagtacctggtcccgtgagtgccgacccccgcccagccccgggagccccaggcccctccgccccctgcgccctccctgccacgcagctctccccgcaggtgggtgacccacaagtgccgctctctgcgggcctccgagtccgggcacctgccccgggaccccgagctcagggactggcggcgcaactaccttctgaacccggtcaacaccttcagcctgttcgacgagttcatggagatgagtgcgtgggcgctgcggggcgggggttcgcggagacgaatgcggggcgggggtccgcggacatgagtgcggggcgccggtgagcctgacccccaccgcgcagtgatccagtacggcttcaccaccatcttcgtggccgccttcccgctggcgccgctgctcgcgctcttcagcaacctcgtggagatccgcct

SEQ ID NO: 63719 - DNA, 1055 bp, Homo sapiens
cacaccctcacagatgcccccacgcccacagatgtgcttcccattcagactcactgatgccaccaaaagagagaccccctcccccacccccctcccaccctgtccctcccccactgccccctccctcccccatccctcccctgccttgccctcccaccctcatccctccccgtccctctcctgtccctcccccgccaccccttcccaccccgtccctcccccatccctcccctgctgccccctcccacccccatccctttcctgtccctcccccaccgccccctgacagctggccttgacccctgctgcctgcaggaactactttggggaaaaggtggccctgtacttcgtctggctgggctggtacacctacatgctggtgccggccgccctgacgggcctcttagtctttctgagcggattctcgctgtttgaggccagccagatcaggtgggccgcagcaggggccgggcatggggggccggggtgggccctgctgcctggaggagccgaccccagcctcatccctgccccttcagcaaggagatctgtgaggcccacgacatcctcatgtgtcccctcggcgaccacagccgcaggtaccagcggctctcggaaacctgcacttttgccaaggtttgtcgcctccgggtccaccccagggcctgcggaagatgggaacggtgcatccacccgaagcgggggagatcaaggcctggagccctgcagagctgctcagctttccccacagggctgacggggaggcccagccccagcccacccgcccatttcctcagcccacctgcccccttccccggctttcctgcctccctccctggctcacctgcccccctccccagctcacccacctcctctccggcccacctatcacccccccagctcacccacctctttgacaatgatggcacggtggtgttcgccatcttcatggctctctggggtgagttgctgcgggacgcctctgcggggccaggggaagtgccagcccaagctccgaggtccacctggcgtagtgcagtgatgcccctccttgc

SEQ ID NO: 63720 - DNA, 1050 bp, Homo sapiens
ctggacacctgtgagcccagctactcgggaggctgaggcaggagaatcacttgaacctggaggtgaaggttgcagtgagctgagattgcaccactgcactccagcctgggcgacagactccatctaaaaaaaaaaggtatccaccaaaaacctactccaaacttaacggcgcaagtttagaagcatcactcgtaaacacaaggcagggatgtgtgctgactgcttctgtgcaacaatttatgggcaaaagatttgagtactggaatggaaaaaatgaagaaaaaaaattcacttttcagagagaaattgtgcctaattctgagttacagctttctttataaaggctctcccaggggcctgtgaagggcccagaagagacactgggtgtgaaggagccaggagccggcctggggctgagcggggccgtggaggcctggaccgggcgcactaacgttctgtcgtctgtctttgtagcttactggaggttttggctctgcgtgagtgtggtctacgagctgtttctcatctttatactcttccaggtaagctgtttttctgggttggatacctgggaacttaggtgacagtgtggccccaggcatggtgacaaaggaggccttgcccacacagccctcgagtgatgggaggaagcagggctagacccccacaaagtaggccgagctgcggggggtctccaggagcatctgtgcggcccttgagtgatggggggcagcaaagctagaccttcaaaacgtaggccgagctgcggggggcctccaggagcatctgctggtggggcgctgactgtggccatttagcagggccacacttaaggagggcagggccagtggtgcaggcacagaagagggcagggccagtggtgcagctgccagggtggctttgcccacagctgtcgtatctgagtgctggtggggactgggcgtgaagggagccgcaagtcaggtcctgcgatgcaggccagcgtctgcatggccggggcaaatctgggcctcagaggggaccccagcgccaagagggacggggtctttg

SEQ ID NO: 63721 - DNA, 1029 bp, Homo sapiens
gtgactgagatgcagtttacaaccatgatctcctggccgggcgtggtggctcacggctgtaatcccagctctttgggaggccgaagtgggcggatcacgaggtcaggagatcaagaccatcctggctagcacggtgaaaccccgtctctactaaaaatacaaaaaaaaaatactagccgggcgtggtggcgggcgcctgtagtcccagctactcgggaggctgaggcaggagaatggcgtgaacccaggaggcggagcttgcagtgagcccagttcacgccactgcattccagcctgggcgacagagcgagactccatctcaaaaaaataaaataaataaacaaccatgatctcccgtttcaagttgccaccactaactgtagccccgctgacgggggcactggccttgcagactgtccaggacggccggcagtttctaaagtatgttgaccccaagctgggagtcccactgccagagagagactacgggggaaactgcctcatctacgacccagacaatgagactgacccctttcacaacatctgggtaagacgccgggggccctgaggcgagcccctccccaggtgtggccccgtgccggaccaggcgccatccacgctcctgcctcgcacccctcagcccacacttggggtctcctggtgcagagatgtgctgaggccctgtccgtctggatggtgctcatggtgggcagggggcccctgctctctaggctgtcgtggacgtggtctccacaggccacggcagcacctgtgagtccctggccttcttcccggggtctggcaggtgctgctcaggtgtgggctgatctgccggtgtggggagtgggggtggctgtgccccagggtcaagggtcataccctgtcgcccacaggacaagttggatggctttgttcccgcgcactttcttggctggtacctgaaggtacggcacctcctcttcccggcctccccgccccggttctgaggcctgccgtgggctctggaccgtttctgtccatggagttgag

SEQ ID NO: 63722 - DNA, 1139 bp, Homo sapiens
ctgcccaacttcagcgagtgctggtgggatcacgtaggtgccagcacagcccccggggcagtcggtgcaggctgaggggcattctcggaacccctgtgcccagcgcggcccctggaccccctcattctccccggggggcagtgggtgcaggctgaggggcattctcggttcccctgtgctcttccggggtcctcctcggggggctcgttacccctcacccctgcaacgagtgctggcccctccctgcagtggatcatggacgtgctcgtctgcaacgggctgggcatctactgcggcatgaagacccttgagtggctgtccctgaagacgtacaagtggcagggcctctggaacattccgacctacaagtacgtcgtgggggctgcgagggcagggccgggtgggggttacctggaggcagcctcagcgtccgtgctccagcagaccccgagcaccaggcccgtccagtgtgcggctcaggaggggtgaccgtggggctttgcctcctggaacctccctctgacctggtgtcactcaagcccggccgcccctcacagtggccatggcgtctgacccacgtacctccctcctcaatccctggccggcctggcgcaggggctgtgggatcattccgtgcttctccctcccttggttgctttggttatgaaatagttgcaggtactttgtcattatgactttggaatttaaaaaagaaacagaagtctaaggaaaggcctgggggacgggggtctcccctcctgcctgtgggtgccccggctctgcctggctctgcagacatggctagctcacggcaccgtggagcgccctctgaggcgctgcagccactgctcaagctggaagagactgaacagcagagggccgtggagaagcagggcttgtagctgggtggccagacctcggagaacagccgggcagcagctgggtaaccaggaacagagtctgtggcccgatggcacagggcggggcggggtgaccaagagcagagctcgtccgatggcacagggcggggccgggtgaccaggaacagtctgttgcccgatggcacagggcagggttcggtgggctgccttcctcaggctgccggctctgtggttcccaggggcaagatgaagaggatc

SEQ ID NO: 63723 - DNA, 2264 bp, Homo sapiens
agttcacgccgtacagctgggttcgcttcgagtggaagccggcctccagcctgcgtcgctggctggccgtgtgcggcatcatcctggtggtaaggccgggctgcctcgcgacggcgcggcgggcggggggccagagctggtgctcaccctctcctcccctagttcctgttggcagaactgaacacgttctacctgaagtttgtgctgtggatgcccccggagcactacctggtcctcctgcggctcgtcttcttcgtgaacgtgggtggcgtggccatgcgtgagatctacgacttcatggatgacccgtgagggctgcggcagtccgggtggagacacccccggggggcaggggccggagggctggggagcagagcctgggaggccggagcctgggcaagtccgcctggaggaccctgcggggcccgggacgctgaaccccctgctgcccctgcaggaagccccacaagaagctgggcccgcaggcctggctggtggcggccatcacggccacggagctgctcatcgtggtgaagtacgacccccacacgctcaccctgtccctgcccttctacatctcccagtgctggaccctcggctccgtcctggcgctcacctggaccgtctggcgcttcttcctgcggtgagtcagggcagggcgcgtatgttctgaaggagggccgctgtccgggtcccttggcacaggcactgtgggagtttggtgtcgttggtgtctcactgtccctgcttcaaccctctggccgcctctgcgggaggcgcctttcctgacccagccctcggggccttcgctctgcactgacagatccaggctcctcagggctccagtctgccacggctgccgtcccagggccagggtacccggcacccacccagtccattccggacctccacagggactaggtgccagctgtccatggggcctgcagtggggctggtgtgggggcaggtggtgacgctgcatcccgctccccagggacatcacattgaggtacaaggagacccggtggcagaagtggcagaacaaggatgaccagggcagcaccgtcggcaacggggaccagcacccactggggctggacgaagacctgctggggcctggggtggccgagggcgagggagcaccaactccaaactgacctgggccgtggctgcctcgtgagcctcccagagcccaggcctccgtggcctcctcctgtgtgagtcccaccaggagccacgtgcccggccttgccctcaaggttttttgcttttctcctgtgcacctggcgaggctgaaggcgaggggtggaggaggccccagcacagcctcatctccatgtgtacacgtgtgtacgtgtgtatgcgtgtgtgtacgcgtgtgtacgcgcgtgtgtacacatgcgtggccgcctgtggtgtgcacgtgtgctctgggctccgaggcttctccagagctgggagctggctggcgtggcaagggcatgctctggggcagtgtgtccctcaggaaccagggtcctccctcccctttctgcctggtcagccccgtggcctctggcccaccaagctccctgtcacccagccatggtgtggtccaggcagggacatctcggtaccctttctgcactccgtgggccctgggtgcgctgaggcctggaggcgtctacactggctccacatccacttcccccgcagctcgtgtgggcgctcgtccacaaacactccgtggctgagaggcagcggatccaggcagcgatgctgagccacctcctccgagccttcctttcacacagaccaccccggaggacacgtggatgatggggtcagagatcactgagctgcccctcaagggggcctggaacccgggtgctggggtcatgctgcctccgtggctccaaggtgagggtcatcttcacgagcaaagagaaccaataaagtgacaacgaacgtctgaggcttccagccctccccccagctccccgtgtcctgctttggggtccagtgcagccctccagcctgccctcatgcccagtgcccacttggggaaaaccacacagaggacaggaggcactcagcctctgcacctgagcaaagacttggcgcctgccccgccccaccccccagagagagcaggtgccagatgcagcccctctcccattctccaggagggtccaggtggcacccaccctctgctgcgcttgtccaagggctggcggccactgggcagtggacacaggattcctggggtactgtgtttgtcccag

SEQ ID NO: 63724 - DNA, 1118 bp, Homo sapiens
aggggcccaggctggcccacagctgcgactggcccttcccctgaaggccccacgtggacctgagcaaaaacatctgacagcctcccagcaagtgggcacctacacctggtccttggccccaagcactgttcccatcaaaccacaggctgctccctggcctatgcattctgaaggtcggagctgagcccagcagcttccctggagtcgctcactcctcccctggtctcctcggtcaccctggccctctcttgggcgacagggccctgccccgacagccacactcaccacagcgactccagctggcagccaggttccagcagggtctcacacagcagtcgggcaccctcatcccccagctcgttgccggccaggctgagctccttcaggctctccttggccctgaggacacggcacagatccccgcagcccttggcagtgatgccacactcccagatcctgcaggacatggaccaccacagactttcctcagcaccgtctcatggcctgagatgagcccaggggcgggggagagctctgaggacggcccgccgcccgaccctccgggaaggaggcctcgcggagatgactcaccacagggtcctgagcctggagctggggtggagcagccctgggcacagctccgccatgcccacatcacccagcttgttgctgcccagggccagctcccgcagcgaggccttggaggccacaatgccgcacaggtcccggcagttgtctgatgtcacaccgcagctctccagcctggggacacgggtcacacgtgaggcagcacgggaccccccctagcccacaccccgcacccccccaaggcccagtgcctacttgagcgcctccagctggcagggggagtccttcaggccctggcacagcacacggacgccagcctcattgatgtcgttgttgctaaccgtgagctccttgaagtccggcttggccctgagcacggaggccaggggctcgcagctggcagccgagaggctgcaatactccagcctgggggacagcagagctcagcaccacacaggaatgtgcaccagccaagggtgtgataccagggagcacggggtgtgctggtgtctcatctcccctcagtcttc

SEQ ID NO: 63725 - DNA, 1030 bp, Homo sapiens
cagaagactgaggggagatgagacaccagcacaccccgtgctccctggtatcacacccttggctggtgcacattcctgtgtggtgctgagctctgctgtcccccaggctggagtattgcagcctctcggctgccagctgcgagcccctggcctccgtgctcagggccaagccggacttcaaggagctcacggttagcaacaacgacatcaatgaggctggcgtccgtgtgctgtgccagggcctgaaggactccccctgccagctggaggcgctcaagtaggcactgggccttgggggggtgcggggtgtgggctagggggggtcccgtgctgcctcacgtgtgacccgtgtccccaggctggagagctgcggtgtgacatcagacaactgccgggacctgtgcggcattgtggcctccaaggcctcgctgcgggagctggccctgggcagcaacaagctgggtgatgtgggcatggcggagctgtgcccagggctgctccaccccagctccaggctcaggaccctgtggtgagtcatctccgcgaggcctccttcccggagggtcgggcggcgggccgtcctcagagctctcccccgcccctgggctcatctcaggccatgagacggtgctgaggaaagtctgtggtggtccatgtcctgcaggatctgggagtgtggcatcactgccaagggctgcggggatctgtgccgtgtcctcagggccaaggagagcctgaaggagctcagcctggccggcaacgagctgggggatgagggtgcccgactgctgtgtgagaccctgctggaacctggctgccagctggagtcgctgtggtgagtgtggctgtcggggcagggccctgtcgcccaagagagggccagggtgaccgaggagaccaggggaggagtgagcgactccagggaagctgctgggctcagctccgaccttcagaatgcataggccagggagcagcctgtggtttgatgggaacagtgcttggggccaaggaccaggtgtaggtgcccact

SEQ ID NO: 63726 - DNA, 1040 bp, Homo sapiens
tcacccaggctggagtggctccctcatggcttatgcggcctcaacctcctgggctcaagtgatcctcctgcctcagcctcccgagtagctgggattatgggcatgcgccaccacgcccggctacttttgtatttttagtaaagacggggtttctccatgttggtcaggttggtcttgaactcccgacctcaggtgatctgcctgcctcggcctcccaaagtgctgggattacaggcgtgagccaccgcgcctggccacgtgcgagcatcttaaacaaaactttcatggaacagttcctcctttttgtttcatttctgaaatgtcttgtgtgacttgccttgctgtcttctgggcccactgataggttgtaacctgcacgtggggtggtggtggaggctgaggccagtgctgtctgcgtggtccacatgaccctggggtctgctcacaggctggacgactgtggcctcacggaagcacggtgcaaggacatcagctctgcacttcgagtcaaccctgcactggcagagctcaacctgcgcagcaacgagctgggcgatgtcggcgtgcattgcgtgctccagggcctgcagaccccctcctgcaagatccagaagctgaggtgaggcggggcctggcactgcctctggcctggtgcagtctgctttggtagcccggcagcaggggacagagccgccaggggcgcgtgggcagctgcaggtggacaggcagtggcagcagacatttccaacatcagccagaggcacacaggcctggcggtctcacagcgggggggacagggcccttcctgccttatcccagcccccgcacccaagatctggccctgcccgccatccctagccttccagcatcaccacagacccccactgaaaggtgtgtctgcagacaaggtttccctgggtcgagccacatgcgtgccctccttcactcggcctggagaccccagaccccagagccccgtccagggaaggagcaggtatagacctgccgcctgaagagtgctgctccgggctctgggctct

SEQ ID NO: 63727 - DNA, 1062 bp, Homo sapiens
gtctgcctgtcctgagggtgagacacaggtcaagcccacagacccccttgctcccctgctggggcctccaggctcacagaccaccccaccctaccctgtccttgcccaagcaaatgagaggcaggggcttcccgggctgctgctgtcccgccctctgtggggcaggaggaggtgcccacagaggctgggtggtgatagccaggagatgggctggcatctgcattacccaagctctgctgcccatggtggcctttctgggggtgggtgctggtccctgccccctgccccacccctgatgtctgctccagagacaaaggtggggagggtgctgaagaggaagtgtttgcccagggagaggctgcggctcctcctgaaacatcagccctgtgggtcctgtttgcagaatctccggcctgtgaaactgtgaggggattcggccaagacgtcctcttccctctgcctcccacccaggccactcttcacctccaccatgagcctggacatccagagcctggacatccagtgtgaggagctgagcgacgctagatgggccgagctcctccctctgctccagcagtgccaagtggtcaggtacgcttgctctcggggtggccttggggtgctggtggggcaggctggcgggtggcggctccctctgaagggtgcattgctctggaacgccttgtttgtggacatgaagtatgaattctgtgcagctaccacgtgcatgagatgtgattcttgtgtttctttttgacaatttaggaatgtaaaacccattccaggctcatgcagcatgggctgaggtgggcgggccgaggtgggcggccactggccagtgggtctctggctccggtgtctcagctcctctccctcccttggagacacgagggcaggacacagcttgggtcccctccgtgagcctccatggggcgctgcttgtccctgccaagctgggggctgggagtcctcggccctcgaggtcctcacaaacccagcagcttcacaagcaggacacgagtgcctgggtgggccgcatcttttctctttttacctggtgat

SEQ ID NO: 63728 - DNA, 1048 bp, Homo sapiens
taggaggaccccgggccgcaggcccctgaggagcgatgacggaatataagctggtggtggtgggcgccggcggtgtgggcaagagtgcgctgaccatccagctgatccagaaccattttgtggacgaatacgaccccactatagaggtgagcctggcgccgccgtccaggtgccagcagctgctgcgggcgagcccaggacacagccaggatagggctggctgcagcccctggtcccctgcatggtgctgtggccctgtctcctgcttcctctagaggaggggagtccctcgtctcagcaccccaggagaggagggggcatgaggggcatgagaggtaccagggagaggctggctgtgtgaactccccccacggaaggtcctgagggggtccctgagccctgtcctcctgcaggattcctaccggaagcaggtggtcattgatggggagacgtgcctgttggacatcctggataccgccggccaggaggagtacagcgccatgcgggaccagtacatgcgcaccggggagggcttcctgtgtgtgtttgccatcaacaacaccaagtcttttgaggacatccaccagtacaggtgaaccccgtgaggctggcccgggagcccacgccgcacaggtggggccaggccggctgcgtccaggcaggggcctcctgtcctctctgcgcatgtcctggatgccgctgcgcctgcagcccccgtagccagctctcgctttccacctctcagggagcagatcaaacgggtgaaggactcggatgacgtgcccatggtgctggtggggaacaagtgtgacctggctgcacgcactgtggaatctcggcaggctcaggacctcgcccgaagctacggcatcccctacatcgagacctcggccaagacccggcaggtgaggcagctctccaccccacagctagccagggacccgccccgccccgccccagccagggagcagcactcactgaccctctcccttgacacagggcagccgctctggctctagctccagctccgggaccctctgggaccccc

SEQ ID NO: 63729 - DNA, 1033 bp, Homo sapiens
gttttcaccttagggtggcaggtagaagaaaggttaattactaatttggcaaaactacttctacaatcgctgtttccaggcagtagtaagatttggcagttgacagttggatggagttgacattcttcactgttttataaggcatcatcttagaatctagggttttgcactgtcttgtcagatgggaagtgaggccgtcctggtttctgagccccgttagggtttgttgtccaggggtttccagacagcagtggcgctgacagccactttcccccgttgctgtggtacatgtgcagcccacagtggtggtgggagctgagctccaatgcaaggaggccctgaactcgagggcagctctggccccctacttcctggcctcttgtgcgatgcgctttcctctgatcatggatggaggttggacttggtgggaaacagagtgctgcagggccggcttcactgcctcgctggattcctgactcactctcctaggacaggcctttcctccgagagtcgcctgggaaacaaggtcaatagcactgatgagaaatgaaccacgtgcacgtatctcctttcttatctgggaccaaagtttgaggccctggtgtggaaggaggagcgtgtccaactagatttcccaaggctttgtacgggatcctgtgtggtttcacagtgaccttgcagagtgggaagggcaggggtcccggctgacgggtcagggccttgagcaagtggtcttgggagccgaggggtgggcctggcctctgtgccttctgcctcctcagctctgggtaccactggggactcagcagcaccctggtggatggggttggggtgcggtcagaggagcctccaggcatcccaacagtggccagccttggcagggagagcaccctacgtgtcactgaggcccctcttgtgcccagctgataaagcccggctctgcctcagctcaggatgaggccgttttgttcgtatatggtgttgcgattcctcaggagcattgcagttttttgagatggagttttgctcttat

SEQ ID NO: 63730 - DNA, 1071 bp, Homo sapiens
ggggcgttggaaatgggggctgctgtcagggggctgctgcactgaggggctcgcttggaggctctgaaatgaacctgatggtctctgggacctgtgctaggccccagggctgccctgcctctcgaggtctgcctcagccccaggctcagcttagaggagctggtctggcactcaggacgctcagcttcccgcccctcggtgcagggcacccgaggcttcaggttaggtgcagggcagggctcccagggttgtggatgtgctgagcgtggacgtggaggtaagtggcaggagcctgcggggaggtgggctgtgcattgccgacctggtgtcctgagcgcagcctgggcccgcttgcctccagtgccgcggttcacgctgcccatcctgcttgcaccagctggcatgtttcctctccaggttccgaggattctgaagacgacggggagacattgctggaggtagcgggtactcaggggaaactggaagccgctggctctttcaattctgatgatgatgcagagagctgcccaatctgtctcaacgcattcagagaccaggccgtggggacgccggagaactgtgcccattacttctgcctggactgcattgtcgaatggtccaaggtgagttcacctctggttgggtgcttcctcccttcaggatggcctccctgtttataggtgacccagcctgtgttcagcctcttgtgaggttctagttgtctgctctgcggctgaccctggggccacaggattgagtctggcttggtctttgctttgtgagcaccatggctcttgggggtgtgggtgagctcatgtgaggcgtttgtggtgtattggtcaggggcaggagagaggatggccgtgggtctcccaggaccagctgcagaaaccctggttgacataggggccatcttggcctgcaagccagaggcaggtgtgctgtggtgcgtggtcactttgctgccttgacatgtggttctctcagttgatacagaaaacaccggtacgatttggcattcattcacaataactggcatcaaaagagactgtccttaaaacaggtgaatag

SEQ ID NO: 63731 - DNA, 1670 bp, Homo sapiens
gtttcactgtgttagccaggatggtctcgatctcctgacctcgtgatccacccacctcggcctcccaaagtgctgggattacaggcgtgagccaacgtgcccagccttttttttttttttttttaagaggcagatcttgctcttccgtggcagtccagcacctgctgcctcgccctactgcggcccactttggggccgcagggcttacccgctcctttccgtgcatcatactttgttttctgttgaatactttcctcttagatcaccaccctgagatggtagaaaacataaaaatccctgtgtacacgtggagggagaccctctgggcctgtggagcccaaatatgaatctaaggcaatgggtggattctggattaactgcgtttcacgctgggaagtgactgcggggagtttgggtcctgtgtggtggtgaccgacgattctgtcctagatcccagtggagaacaccaaagcgagcgaggaggaggaggacccgaccttctgtgaggtgtgcggcaggagcgaccgtgaggacaggcttttgctctgcgacggctgcgatgcggggtaagggacggttgggactggcacacgtgccctgctgcgtgcaaggcgggccaggcgcaggagggatgcagagcctcttcgctctgtgaagtctgagtcccagcacctggagctgtgctcaccaccctcagcagcgcggttcagtcctgcgggccttcctgttacactcatttacacttcagtctttccccaaaaaacattctgaggctgcccacagaagtgcaggtaatacatcaagacaaaaaagaaaacagccggacaggaggctgtggggctggtcagccagagggtgggacgtgtcctggtcccggcctttgtgggggaggggtggctatgcctgcgtccatcattctggctgccttggtccctcacctttcaccctgctcctccttcaccctctggtgcatgtccagttatgctgcacctgctgctctccctggcacagctgagagcgcctgctctggccctgcgtggccctggcttcccgggagcctgtgacacttgtctcctcatccctgctttgtgtcgttggctgtaagcagatgcccccttccccgttagcctcctgcgaggggctttccctgttgatttgaataatttttctgctgtgaaattatggagagaggattctggaaatctttcccttgttgaaagaaccagtgaggctgctcgatctggggccttctcttgggtgggaagtagctgggtcagggtttggactacggaacagccggagccaggaggccttgacgtgccgcggctggagccgcaccgaggatgggctcctggtgaaggcctttgctctgtggcgggtggtcccggtcgtcccagctttgactcgtccttgagcacagccgcttgtgcccccacctgtcacctcgttgttagccacatacccaggcctctgctccactcacgctgttgttggtgcaggaatcgctggctgtccttttgcagacactgcaggggcctccttgggggtcctgcaggcggccaccacgtttgtctcatcgtcagttcgccctcctcctcatggcctgtgggagtacaggggccttgcagtgcgctccgccggcccttccaggtccccagcccctgcttggt

SEQ ID NO: 63732 - DNA, 3156 bp, Homo sapiens
cgcctcgggcaggagcagtggccctggtgaataaggctgtcatcagaggtcaccttttggccagttcttttgtttcgccacaagaacaaaaaattaaccaaaaccaacaaaacaggtaaaggtgcttgtctgccccctcccacctgttggtggagttgggggtggcaaaggcaccagaggtgacttctcccaaaaacgcctggtttccctggggccagagctgcgaggtggggctccctccctccctccctctgggaggccccggtgagcacctcttagaacagcagccggagccagggctgtgggggaggcgcaggcccggcccagccccactctccctggctcccgcctgctgcggggctctgcctgggtgcgggccctcaggccgtgggaggcagtgacggcagggccttgggtctgtgcccacaggaggcgcctccctgccgcggtgccagagccagacttggaggaggagccagtgcctgacctgctgggcagcatcctgtcgggccagagcctcctgatgctgggcagcagtgatgtcatcatccaccgcgacggctccctcagcgccaagagggcgggtgagtgccttccctgccacggccccttcctctgtgggctgctggtcctcaggctgttcgcaagcactcagcccatgtctcagtcacggaagatgtagctgaagttggggggaccattcctcagccatttttctgcattgatttcccttcttgagcagtttctcagttagctccgagttcttacccagccccacagcttcatgttcataagaacatgtcctgatggggtactgcccccgcccctggttaatatcgtgtcctgatggcctcaggcactgtactttgtcatccacagagtggctgttgaagcagctctccgggtgtggaaaggcgaggtgtccacctcaacaggcagacaggagtttaaagcgcacgacctcacagaaaaccagttgtgataaaaattaaaccactgacatttaagaagagtgggtgggaaatgattgccattgacttttttgttttttagctccagtttcttttcagcgaaactcaggcagtctgtccagaggggaagaaggattcaagggctgcctgcagccccgagcactgccctccgggagcccggcccaaggcccgtcaggaaacaggccacagagcacagggctcagctgtcaaggcaggtcccgcacccccgcccgcaccgcgggggcgcctgtgaggctggacttgccagcagcccctggggcggttcaggctcggaacttgtcaaatgggagtgtgcctggcttcagacagagccacagcccctggttcaacggcaccaacaagcacaccttgccccttgcctctgccgcgtctaagatctcaagcagagattctaagcccccatgtcgcagtgtggtgccggggcctcccctgaagccagcgcccagaagaacagacatctctgagctacccaggataccaaagatcaggagagatgacggtggtggcagacgggatgcggccccggcccacgggcagagcattgagatccccagtgcctgcatcagccgactgactggcagggagggcaccgggcagccagggcgaggcacacgggcagagagcgaggccagcagcagggtgccccgggagcccggggtgcacacgggcagctcccggcccccagcccccagctcccatggcagtttggccccactgggaccatcaagagggaaaggggtcgggtcgacctttgagagcttccggatcaatattcctggaaacatggcacattccagccagctctccagccctggcttctgtaacacgttccggcctgtggacgataaggagcagaggaaggagaacccctcacccctcttctccatcaagaagacgaagcagctgcggagcgaggtctacgacccatccgaccccaccggctccgactccagcgcccctggcagcagccccgagaggtctggccccggcctcctgccctctgagatcacacgaaccatctccatcaacagcccgaaggcccagacggtgcaggctgtgcgctgcgtcacctcctacacggtggagagcatctttggtacagagcccgaaccccctctcggaccgtcctccgccatgtccaagctccggggtgcagtggctgccgagggggcctctgacacggagcgagaggagcccacagagagccagggcctggctgcccggctgcggaggccatcccccccagagccctgggatgaggaggatggggcgtcttgcagcaccttctttggctctgaggagcggacggtgacctgtgtgactgtcgtggagccggaagccccacccagcccggacgtgctgcaggctgccacccacagagtcgtggagctcaggcccccttcccggtcccgctccacatccagctcccgcagcaggaagaaggccaagaggaagagggtgtccagggagcacggacggacgcgctctgggacgcgctctgaatccagggacaggagctcgaggtcagcgtcaccatcagtgggtgaggagcgccccaggaggcagcggtccaaggccaagagccggcggtcctccagtgaccgctccagcagccgagagcgagctaagaggaagaaagccaaggacaagagcagggagcacaggcggggcccctggggccacagccggaggacgtcccggtcgcggtcggggagccctggcagctcttcctatgagcactatgagagtaggaagaagaagaaaaggagatcagcgtccagacctcggggaagggagtgctcccccaccagcagcctggagaggctctgcaggcacaagcatcagcgggaacgcagccacgagcggccagacaggaaggagagtgtggcgtggccccgagaccggaggaagcggaggtcccggtccccaagctcggagcacagggcacgggagcacaggcggcctcggtcccgtgagaagtggccgcagacccggtcccattccccagagaggaagggggctgtgagggaggcttccccagcgccccttgcacagggggagccagggcgggaagacctccccaccaggttgccagccttgggggaagcacatgtctcgccggaggtggctacggccgacaagg

SEQ ID NO: 63733 - DNA, 1264 bp, Homo sapiens
aggccacagaagccccgagaaggagcctgggacatggaggatgtggcccccacaggggtcaggcaggtgttctccgagctgccctttcccagtcacgtgcttccggaacccgggttcccagacacagacccctctcaggtgggtgtctgggctggagggctgtgggccgtgggcagtggcctggcacccgtgccacacacaccacactaggctggggctgaggcctcacagctcctgggcacagagctgctagctgtagggcccagtgctcagcaggggtgtccctcccaggtttacagccccggcctgccgcctgccccggcccagccctcaagcatcccaccctgcgcactggtcagccagcccacggtccagttcatccttcaggggagcctgccgctagtgggctgtggggcagcacagaccctggccccagtgcccgctgccctgaccccagcctcagagccagccagtcaagccactgcagccagcaactcggaggagaagaccccggcccccaggctagctgcggagaaaaccaagaaggaggaggtgagtcctgcctcctcccactttccccatgttcccatcttactttgaaactaaagttgttggggctgagtttatgggcggaagctggtcgctgtgcctctggaactgcaagggtgtccagaaccacagtgcctctggccagagggactcccggctcccttcctggccgcatcacacacatgtcccctctagtacatgaagaagctgcacatgcaggagcgtgctgtggaggaggtgaagctggccatcaagcccttctaccagaagagggaggtgaccaaggaggagtacaaggacatcctgcgcaaggccgtgcagaaggtgggctgtgtgcgagcctgtgtgtggggctcggggtcacgggcggtacgtcgctgctgtctcgtcagcatggactttggggtggccatgagtgcaggcccgaggtcagccagccaggttaggggtcagggggctgtattgccacatcctgtaggcctggggtcaagcctgttcgcctgtggctgcccctggcagatgcttaggaaggagggtgcctcagtgcaccctgggtaatttaaaactacccagcccacgcccagcttacaggtgggagaacgacccccagaggtgagcagttgcctggtgacgtctcagcccatgctccccccgcccaccgacaccgtgggaccctcagtggccttgtgagcggcatagcgaacaggacgggggt

SEQ ID NO: 63734 - DNA, 1010 bp, Homo sapiens
ccttcaccaggaccaggctcttctccttgggcctcccagctgacaggtcctgcccgaagcccaggtagatggtatagcgtggggagccacggcgctgccgtgcccggaattccaccagctctgaagaaggggactctgctgagtacctggcaggcaggtgctcccaaggacccctggagacagccccccaggcaagggcctcactgaccttggaagaagactctgaagtcgaagatgggggtgtcacagttccgaggcagcaggcaggctggggtggaggggctggcggagcctgggggtccgcccacctcccagtacaccttgcacttgcccatgcgccgggcccacagctgtggcccccgaagctccaggtgcaacccaggggccacgtgccgcagcagttcctccgtgtagcgcagctgcttctggtccgggagctcggcagggctggggaatgctacctgctgggggtctgtggcccggacagctgggtctggggggccgtataggaacgtgcagctcgggtgtcccaccaccttctgcagcaccgtgcggcccttgtacatgatggtcacgtccagcgcccctgggctgggctctgtgtggagaccaagctgtgagtgacgggggtgggcggggacaggctgtgagtgacgggggtgggcggggacaggatgtgagtgacgggggtgggcggggacaggatgtgagtgatgggtgggcggggacaagccgtgagtgacgggggtgggcggggacaggctgccccttcctgggatgcactcaccttgcaccgcggtgcaggcgcttggggagggtgacaggtacggctctgcctggtgcggggactctggggccgcggcctcgcctgcatccggaagggaatcctgtgctggcacctcatccctagcctctccctgtgccccaggcctcccaacccctacccctctcacctgtcgttagtgccgcgggctggggcccggggctgggggtcgtctctactgcccacc

SEQ ID NO: 63735 - DNA, 1061 bp, Homo sapiens
gcaggggcggggacaggttgtaaatctgaatttgtctgatgcttcctcagagatctgtatcatggtcatttcatagaaacggcaaactctgtcccagctcaaaaagatgctattagactaatcctttgatctctttacgtgtgcggctcagctttcagataaacctgcttgatgttttgagggttttctcttatttccgttgcttcctcgagggagagtaatccagtctaatttgcatttctcttacttttaagctgagctgctgcgccctcacgggacacagtcatggggagccctctgccccatggtgggcattggtgaagccacagtggtcccgggggcagacctcaagggtgcacagcagcagccccttgggccctgcctgcccaagccccacctggccccacctgccctgtgttggggactttgtatttcagcctccatgcagggtgacgctgggactccccagcttccggttcacggcttcagggtccagcaggttctcctgaagccccatctaccgctggcttcctgctcactctcccctctcccgctctgtctctccagaggaggccgggcctgtggaattaggcggctgcttcacctgaactcactgcagtgccgggaaaggagcctctggaactagacccaggagcggatctgcaaaggctactcagggttctcccagcggctctgaaccccgaggccaactcgccctccaatcacctggcccctgaagcaggcggaggcccctgtgcacagtgggcctgtggccccatttggttcaggagtgatggtgacacggagttggctccatcgaggctcctggcagcattacatcctctaagaataagtcataaagaaagcactccttgtaagatacacgatccaccaggctgcctccaaccacagcctcatctccatccggggtgtgtctaggttttcttttttattattattttttatcatttgagacatgttctccctctgtcacccaggctggagtgcactggtgtgacctcagctcactgcaacctccacctcccaggctcaagcaatcc

SEQ ID NO: 63736 - DNA, 1093 bp, Homo sapiens
agaactggcaaagctgaaaatactctctgtctgccggctcctgcttttgactgcagttgtgcaacagaaatgcagcctagctggttgtgtgctggagaatattctagaagccacactgaggaaaatagagttagaactgatttttttttttttttgaggtggagtctcgctccatcccccaggctggagggcagtggcatgatctcggctcattgcaagctccgcctcccgggttcacaccgttctcctgcctcagcctcccaagtagctgggactacagcgcctgccaccatgcccggctaatttttttttggtatttttagtagagacagcgtttcaccatgttagccaggatggtctctatctcctgacctcgtgatgcgcccatcttggcctcccaaagtgctgggattacaggcgtgagccaccgcgcccggcctgatttttataatctattttatttcacctgatatagccccaatcctattatgtcaacgattcaggatcaccacatttcaggggctcagtagccacgtgtggccataagctactatgtgtactgaatggcgcagccatacagcgtgatatttagagtctgctgtgcggacaaccatcccgagcctccctgtcctttttctccccaacagtccaagaggccagcgtgcagcccccatgcagggccagccaccctgagcctcactaccccggctatcaggacagctgccagatcgcaccgtttccagaagctgcgttgccaacgtcacatcccaaaataggtaggtttgaaagaattcacacatgtacaggttattgtcctcagaattgcttccaatgaaagaattcctaagtgaaatgggattcattttggtttggtttgttgtttttgttgatgcattagatcagtggctggtaaagtgtggcccactgcctatgtttgtaaataaagttttactgacacacagccacgtccattcatgtgtgtgctgtggaagttgcttttggtacagcagcagggcacgcccctagaaaccagttggcctgtgaagcctgaagttctttctggtgagtttgctgttgtcctcttgagggtaga

SEQ ID NO: 63737 - DNA, 2019 bp, Homo sapiens
aggtagatcatttgcaggggctccaacactgaagtacttagatgtcagtctaggaaatcatgtacagggtttgtacgtggaagatactaaagaaaatgctgaagagagagaccagggaagattgaaatacgtcaaaagacgtcctgcgcccgtggattagaagactcagtaaagatgcgactttttcccaagttgattcgtaggtttaacacaatgactatcaaaatcccagcaggattctttttagatgcagacaagctgattctaaaatttgcatagaaaggtaaaggaaataaaaaagccaaaacagttttgaaacaaaaaagccaaaacagttttgaaataaaagtttaaaatgggtggaatcacattgcggggtcttaagacttacgggctcgtgacagtaatcaagatagtgtggcactggcagagggagagaccccacgatctgggtcagactagagtgtcatagtagactccagcaaatggccttggagtgacaggacgttcatcagcagagacaaaggatgacctaaacttcacacttggtacaaaaatgaattcaaaatgggtcatcgatctaaagtgaaaggtgaaactataacatttttaggagaaaacacattggaaaatcttcctgacctggagttagaactaggatttcttggattggacttcatcaaattttagaacttttggcttccgcttggggagtggtggtgtgatgagctcagtggaccaactctccagagaaataactagtgaaaattgtgaaaaaataaccccttaaggtctccagaaattgtcctaggggagtacagcaaataaacatccaagaaaatgtagtaagtcttggaaagggcagtgaggattgtgacgtttgagctacgaccagctccttccctccctttctgcccccagctccctatggtggaggctccattgtgggtggttgtgaccaagaaaacggttcccactccttgcagttcccggtcaagggatatggtatctcactgggaggggcaggccaccagcatttctcaaccccttcagctctaagttgcagtaaattcctgggaagtgtgactgaaaatctcttcagtcatccccactcagagggcagaggctttacccaggcatgggaggccaagcatacggagccccaatttccatcaacccacattgcccatagggtggggtgtccatgcagtgagaggctgctgccccccacacagaacccggctaatgcaacagaattccctctgatagactcaggcactgttcctgcctctaggtctatagtaggggctcagacattcagcccaaaagagagagaggccgtaagaacagagagctccaaagcccctcccaaaggaactgacttgatttgaaacagtatggggatgttcaagcctaaaagtgccctggaaaagaatggacattttgatggtaagcagttaagaggaggccagcagttccattagagcaagaaactaaactgtaggtcagcaggtttaccagagaggcgaggaaagccacagcgaagaacccatctgggaaaccgaccttcaagatcgaacctctcagtaaagaagccctaatttaattggctcagacagtggagcagtgtgtgccccagggcattgttgaaagtaatggagcaggcagctggcagttagttgattctgacacttgactacaccaacagcttaacagagatcaggaagagcgacagccaaaactcccaccaccaaaggtgattgcaccccacccagggccgagccctcagaggagcagcagccgaggccgccccaggagaacaggctcagtaagatagtccagctccgtacctgagtaataaacaagctgacagcagcaaggatcccagagaaaggagaactgctttccactgttgctacaatgtatcacctgcggtgtctgattcttaacaaaagatgataagacatgcaaggagccttggaccatacacaggaagaaagcaggcaacagaaattgcct

SEQ ID NO: 63738 - DNA, 1076 bp, Homo sapiens
aagcaggagggaggcagggctgggacgtgttcctcaagttgccaggttagcttgggacttgtagatgaaggctctggaagtgggtaccagaggtgctcagtgtgggacctggttgagcttgcactgcctgtggacagcgggtggagagatcacgtagggggtcagaggcacaggctgcaaaggcagacccgtggtggacctgtcagggccaagtatgtgggtgggtgagatcacatgagccgctggggcgctggtgctggtggaggggttgaggaggcgccaggaggtaggcaatggcagaggtgacgttcccacctgccatcatcatgactgctgcccttccttgcaggcggccggggacggtgcatcaagcagggggagaactggtacagtcccaccgagtttgaggccatggcaggaagagccagcagtaaggactggaaaagaagcattcgctacgcgggccgacccttgcagtgcctcatccaggtatcgtccgtgacctcacctgtgctcagcacacagttcagacgtggggccctctgaggcggcccagccagagggagggcacagaccacggggtcagacaaatggggtttgcagcctccacctgctgtctgtgtggccttgggcgagtgatttaccctctcatgtttcagtttccgggtctttcacgtggggatgacgatgatcgtgaccctgtgaggattgttgggagaagtgcatgaggtcacagcgcctggcacagaatagctgcagaaagggggcgtgtcaaatacacaaaaaatgaaaacagtagaagttaagataatcgcttctgtttgaatgcgtgtgaccctttcaaagtcacctaacttctcgtcagtctactaagaaaagaggacttctaattcctattccagtttagctccttgggtgttgttaaggaagcaattcctgtagagacttttgcaaatcttgaaaggaaagaggtaggtcctgccaccaataatggcattgtgaaaaggagaaggctctggaaattactgtttttgtggttttttttttttttttttgagacagagtctcaccctgtt

SEQ ID NO: 63739 - DNA, 1894 bp, Homo sapiens
catgcctttttttttttttgagacggagtttcgctcttgttgcccaggctggagtgcaatggtgtgatctcagctcaccgcaacctcccgcctcccgggttcaagtgattctcctgcctcagcctcccgagtagctgggattacaggcatgtgccaccacgcccggctaattttgtatttttagtagagatggggtttctctatgttggtcaggctggtctcgaactcctgacctcaggtgatccgcccgccttggcatcccacagtgctgggattacaggcgtgagccaccgcgcccggctgcaaacaggcatttttagggcagtttggtgagtgctgggttaatggtatggtcaggactcattcaaccagtatcttttaagcatctgctgtgtgccagagattgccctggacacaggacattctagaactctgggtgacagaagagccacttgcttggcctaggagcatcacaggaagactttgcagaggcagagaggagggtgtgggggtgttggcggcagaaagtgtttctctagaaacactccagcatgtagaggctggagctgcaggacctatctgggatgacaggggcaggaggtggggtgcagctgacctctgtggtaactgccctgtgtgcagatgctgctgaagggcctgtctgcatgccagggggctgagttccatgttgtagggggtgcggtggggtggcaccaagggacataggcaggttagatgtactttttaggaggaaggggtcagagaccaagggcaatggctgtgagcatggggccgaggtcacctgacgatggtggcctgacccctgcggtggaggagaggcaggaatggagctacaagagtgggtccaggaggtgtcctcacctgcggggaggccgagagctcctcgtaggcatagggcacacctgaccagcagaacccacagctgtgccgcagaaggagatagaagccccgtggtggtttgatagagctggggctggctggggtggcgggtttgttgtatgcattttttactgcacgtaaaaggctttactggggaagaatagatttcctctctttttcctggaagagccgaatgacttagacaatggaatagaaatgtaggtcgagcgtgttcatggaagtgttaagatcttcctggttacaagggcacacacctgagggggagtcactttgtttgaagcacctgagcgaggctgttcgctttgtccattctggcttttgttgcttgttaaatgaggctccttctgttgcagaggtgaccacagtgacagtggccaacgtgggggctgctgcagacaatgtcttcaccacgtctgtggcgaacgcggcatccatctcaggacatgttctggtaagctgctccgaggggcacagcccagggcgggtggtgccacgctgggggcctccggcttccccgaggctctcccggggttcagcccgctgtgtgaacgtctgctctgtgagctggggagggacgcactggctcgctctgctctcagaggccttcgggctgtgctggaggtgggagaaattacagctgaggtagaagctgcctcggaaggccaggtgaagagccacacctgtcagatgggcttgtggcctgcgttgggcagggactcccagcaggctgctgtccggccacagttcagcctctgcccgaggcccggccctgcctgtgctccttatcctatagctgcagggccagctgaaagaagcaaggcgtttccctcccccatatcctgttctcgtagcatttatggtgcagtctcccacgcctgactgctgtctacttagaaaactgctgaaagccagttgcatttcaaatagtgtctgtgccaccttcagagcccttttgtgatcatgttttatcagc

SEQ ID NO: 63740 - DNA, 1548 bp, Homo sapiens
cggccccgacgaggccgccgctgccgcagccttcgcaggcaagtgcgcccgccggcctctcgcctcgtccggttcccgcgcgcctaccccgcgcgcctgccccgcacaactgtcccaggtgaccagcccgccacacctgtccctcacacctgctccacgtgaccagcccgctccacccgccctgcacacctgcccctcacacctgctccacgtgacccgcccgccccacccgccctgcacacctgccccacgtgactagctcacccctcacatctgcctctcacacctgccccacccgcccctcacactttccccacgtacctgctccaggtgaccagcctgccccacctgccacaaatacctgcctcgcacacctgctcgacgtttccagccttccccacctgccccacgtgatcggcctgccctacctgccccgcacacctgccccacatacctgccccaggtgaccagcctgccccacctaccccaaacacctgccccgcacacctgcccctggtgacctgcctagcctcacctgacctggccctgccctgcacacacctgccccctgccccccttttctttgtggcagccccgcctcctactggtcccccctgtgcagctctgcccctgccctgccttcgtccatcctggctccccccacctgtcctggagaagccctggggtgggtgggcacctgtggtcaccaggaaccccccacttcctgagggccagttcaggcatgacctgagcgctggggagccaggggtgggcagcctgctggaggccatgatgccagaggtcagcgtggctgtgtggtggcccaggggggctgcggagccacctgtgcaggctcccctcccagtcctccctcttcctcttgcctttttccctaaggacctgctcctcctgccccgcttcctgtcgggcttcctttggggaggctgctgtggctttccagtccacatttttatataagctgcttatagtttcttgccacacaggtcagtctccttctcaggctccaaaacactgggagcccgtggcagagctcacagatgccctacggggctggtgccgtccacccacctcctgtgtcccgcccttgtgtccgtggggcatagacttccccacccactggcttcctaacgcactgtattcttccccattggagttcccgagtgtcccccagggactcacagctcagtgttgagacccttgggaggagcttcttgttgcgttgtgaggcacttttcccctacggagctttgcgggttgaggaactggatcccagtcctggtgtgctgggtatgtcagggcattgcgtgtgctctgggtgcttgttcggcctgggggctgggtgggggccagcagcgtctgggctgcccttggtcagctgagtggccctcgaaggcaaaggggtcactgctgcttgtttggttggttaagaaaaaaaagtgagggaaggctttgtgactctcaggggttggcgtccgtcgctaaactctggtttgacgttgggatttggagccatgaggttgatttcag

SEQ ID NO: 63741 - DNA, 1050 bp, Homo sapiens
cctggaagaggatgggacaagggtgggcagagggccgcatagagctgagagtccagggaagtttggaagccggggtcagccttgcggtacagctgcggggtgtgtcccgggcctagtcctcatctttgggagcccattccccagcggcgccagaggggcctgtgctccaggcttgtccacagctccggccactccctgccagagtgcccagaccccgggtgcgagtcgtgtccgcgcgatgtacccgcaggaggagctggaagacttcccgctgcccacggtgcagcgcagccagacggtcctcaaccagctgcgctacccgtctgtgctgctgctcgtgtgccaggactcggagcagagcaagccggatgtccacttcttccactgcgatgaggtggaggtgaggcggtgccgggcggggcagggtggggccccgccgcgccgcgccccgccctcctggccgcctgacgcccgctttcccaggcagagctggtgcacgaggacatcgagagcgcgttggccgactgccggctgggcaagaagatgcggccgcagaccctgaagtagggcagcgggcggagcggggtcgcagggggcggggaggggaggagcccggcaggggaggggaggagccggcaggggaggggaggagcccggcagggagggagggtcaggtgcgttcccggcggggctgagcaggaccccctcgccctccaggggacaccaggagaagattcggcagcggcagtccatcctgcctcctccccagggcccggcgcccatccccttccagcaccgcggcggggattccccggaggccaagaatcgcgtgggcccgcaggtgccactcagcgagccaggtgggccgaggggctggagggggctccacagggctcgttgtggggggctcggtgagcagccgccgtgtcccccatcaggtttccgccgtcgggagtcgcaggaggagccgcgggccgtgctggctcagaagatagagaaggagacggtgggtgcccgggcccggcaggtggcccctctcttccccgcccc

SEQ ID NO: 63742 - DNA, 1030 bp, Homo sapiens
gggcttccagaaattacctcccgtttcttccaaggggcttcctgccacctcctgagacccccctcaagagcagatgggaccaccgacctcaccggcctggtgatgggcacagggtcacctggcatcgggtgggctggctctctgtgtcctctctggccacccgccccaggggtgaggattgccccccttcctgccctgagggcatcactcttgggggcctgtggtgttttgagtgctgcccgcggcctccggaggccccagtggcagccccgtgaggcaggcgtggataagaatgacccgtagaggggccaggtcacctgctcgaggcccgagtttggggcaggggctggggttaacatgcaatctctcttagttccaacgtgtccttaaccactcactccctccccggcctccctacccacttccccatcaggcaggtccacagaaagaaggagggtctgctggtgctggccctggtggggccagggttgccgagggtctggccgtgagtgtgggagagtccacactgggcgaggagggagggcggggctttgaacatcagacctcagggtgggtggcctgagctgccagtggggccaccagtagccacaagcaaatatctccaccaacaaggcccgtctgtctcgggacaagcatgtctttgtggcgcttgctccccttctgtcctcccccacagctggccctgtccgcccgtgcccagtcaggccccgcagaacccaagaggggcttcccatgccatttaggaagggctgtctctttaaaaaaaaaaaaaattacaaaacggttgatttcccaagaggttgacacagcagcacgtacagtaagatgttcctcacacctgcggggatgccatggtcccagcccggggcacccgttacccaggaaggtggtgagagtggtgctgggaaaatgtgtggagaaacacaacagggacccccactaaccccacaaagctgaaccagccccagcagtactagacgtcatgagaggcaaaacgaccaagttcaca

SEQ ID NO: 63743 - DNA, 1042 bp, Homo sapiens
cctgctctgcctcctgcacccgcagggcgtcccccgccgctccctcccctgcttcctgcagcggcccccgaccccagtcctggccccaccatggatcctgcatcgccgggttcggccctggcgggttcagccccgcagagtcggcacccgggccaggtccatctcctccagccctcccggtgcgtcccgcggggcaggaaggaggcgaggcccagccgccccgtgtcgtgcaggtgttttcccgggcccgtccgcggcggctgctgaggacctggggagacccagcctgtaggatccgcagctgcggtgcgcggccggcagtggcgctcgggcttcgtccccgggggcggggcttcgtccaggcgcgcagggaccagcgggcctcgccctcccgcgccgctttccgattggcagccgcccgcggggcattgtgggccgtccgcgcgcccgtcccgtcgccgccgccgccgccgcagacccctcggtcttgctatgtcgagctcacccgtgaagcgtcagaggatggagtccgcgctggaccagctcaagcagttcaccaccgtggtggccgacacgggcgacttccacggtgaggacggcgcggagcccgggcgcggcgcaagcgccctccagaggccccggcgccccgatttccccgggtctcccgttccgggacgcggaccgggtggcggtgccccgggcggctcgttccgggaggaatgagcgcaggtgccggatgttggggccagggacagccgtgaggggagcggggcccgggtcggccgtgagaggcgcagggccagcggcgaccgtgaggggaacggggcccgggtcggccgtgagggagcagggccgggggcagccgtgaggagctggggtcagccgtgaggggctcggtgctggggtcagcggtgcgggcggtactgacgggtccttgcgagccgtggggcacgaagccggagccccagcctcgccctccgcccagggtggggtcggctgcgccctcagaccccgcacccgggacgggctgtgggcagcccgc

SEQ ID NO: 63744 - DNA, 1099 bp, Homo sapiens
tgccgctgatgcagtgaagctggagcggatgctgacagtgagtgttgtgtgtgggtacctacatatgccaagccctatgagagcccgggcctgggcgtcggggttcaagctgggcagagttaaaactttggtgagaccccaggtctcattcacgtgctgtccagcaagtggggcctgttgaggccatcccagggtggagggtgcatggcacccaggggtgcccccaggatgcttggtgggtcctggctcctctctggcctgtgtggtgactgtggtattggccaccctgtggccgtggcccccacacagagtgcagaccccacaagggcctccctccttccacatggtgccttgtgaggcttcaaggtgcagaaggtagggtggggagacacagctcgtgctctgtttgtttctaggaacgaatgttcaatgcagagaatggaaagtagcgcatccctgaggctggactccagatctgcaccgccggccagctgggatctgactgcacgtggcttctgatgaatcttgcgttttttacaaattggagcagggacagatcatagatttctgattttatgtaaaattttgcctaatacattaaagcagtcacttttcctgtgctgtttcattcactgtctccgtcccctttgtcccctaagcatcacctgccccagctgtgatgggctgtaacctaggttaggactcagagatggggtcggggtcagggtaccccagacacaacccaccgcctgggccaccacctgggaacccaggtcagggttgttgctgggaggccattggtggagttaggcaaagggcaggcttctgatgccaggggctcccaaggtgctgtcccaggtgggtcacagatgaacagtctcaagcctccaagcgtgggcagatgtggatgcctctcagaggagcagtcccagccggaccctccctcctgctcttgagggcctgggcctcctgttccctgtcaaggctgccctgcccatgccccccgcccccctcctgtcctgttgtggctgagaccttacatgggatgccaggttcctgcatggggtcatggtgccaccttgtgggggcagcacgacat

SEQ ID NO: 63745 - DNA, 1505 bp, Homo sapiens
ggcgaggggagtgggtgaggggagaggccccccaggccgcttgggcagaggaccgaactccgaaccccattcgatgccccttcaggtgtccttctaccgtggcgcggtgcctgtgcgggtgcccgaggaggctgaggctgcccggcagaggaagggcgcagacgccctgtggatggccactctgcccatcaagctgccggtgggactgagggacagcagaggggcggggcaggaccgaggcccaggggtgaccagggtgacatggtggagttgggggtggagcccagggcttaatgcactttttccttccaacagagacttcgagggtccgaggggccacggcggggggctggcctctccttggcacccttgaatctgggagatgccgagaccggctttctgacgcagagcaacctgctgagtgtggctgggcgtctgggtctggactggccagccgtggccctgcacctgggggtgtcctaccgggaggtgcagcgcatccggcacgagttccggtgaggctcccactgcccgctggctgccagccccagggctgagccctggctgcctggagggcccacctgattctgacagaagtttcttccaggggaggtgggggaagggcaaacaccaggctggaaaggaaaggtctggccgcacctggccccaggagccgggaactcccccacactccgaggcagagtgtggtggggggtcctgggcaggtggacaggacccctctgtcgcccatcctctgcctgcagggatgatctggatgagcagatccgtcacatgctcttctcctgggctgagcgccaggctgggcagccaggggctgtggggctcctggtgcaggccctggagcagagtgaccggcaggacgtggctgaagaggtgcgcgcagtcttggagctcggccgccgcaagtaccaggacagcatccgacgcatgggcttggcccccaaggaccccgctctgcctggctcctcggctccacagcccccagagcctgcccaggcctaggccccacagacttttaggctggcccagatattccccagtggatgggcagagcccccaccttcaagtctctccagtgtgtggggacgggtccctgtgagcaacaaaactgcactgtttctttcacctcagagcttgatttatttgttggatggagaagccgttggagggcggagggtggtggggtagaggcctggcccctgcggggagggaggcctgtgtgcacaggtgccccacatcctggtcctgtcctctcccactgtgcctggggcctcctgtgggtcctcatcttcctgggagggaggagctgtgctacaaagtaacccacatgggctactttttttttttttttaaatggagtttctgtcacccaggctggagtgcagtggcatgatctcagctcactgcaacctctgcctcccaggttcaagcgattctgcgtcaccctctcaagtagctgggactagggcacttgccaccacgct

SEQ ID NO: 63746 - DNA, 1301 bp, Homo sapiens
tcgacctgagggacaaccagctccgggacctgccccctgagctgctagacgccccctttgtgcgcctgcaggggaaccccctgggtgaggcctcgccagacgccccgagttcaccaggtaggcttggtgctagaaggggcagacctgggataggacatgagtctcctcactgtcctgagcacatgtctgtcccctgcacagtggcagccctcattccagaaatgcccagactgttcctgacctcagatttggacaggtatggggtgggttgagggggctggaggggagtctgtctgcctgtcactctggcccctccgacaccttctccagagttcctgggtccaggctccaacacgtaggcccttctgggtctaacctgttgctcgctccttcctcactcagctttcctgtgacccctcaaggctgctcagtgaccctggcctgtggcgtccgcctgcagttcccagcgggagccaccgccacccccatcaccatccgctatcggctgctgctgccggagccaggcctcgtccccctgggtcctcatgacgccctgctcagccatgtgctggagctgcagccccatggggtggccttccagcaggcatggacagggcgtggcgggggcagtgtgtgggccagggcatggcaggggcagtgtgcgggcccgggcatggctccagtgctcacaccatccttgtctggcaggatgtggggctgtggctgctcttcaccccaccgcaggcccggcgctgccgtgaagtggtggtcaggacccggaatgacaacagctggggtgacctggagacctacctggaggaagaggcaccccaggtgagggccacccaggcctgccggtggcgagtggagagctgctgccctgagccgtgcacctctgcccagagcctcaccctggcaccttccaccctgccccgtccctcctggatcctgcttccctatgtccctggcaccttccaccccaccccgtccctcctggatcctgcttccctgtgtccctggcaacttccaccccaccccgtccctcctggatcctgctccctgtgtccctggcaccttccaccccgccccgtctctcctggatcctgctccctgtgtccctgactggctgtgccctgacccaggctcctgtgacctcctctctcccccatcccagcggctctgggctcactgccaggtgccccacttctcctggttccttgtggtttcccgccctgtgtccaatgcctgcctggtgccaccggaggggacactgctgtgctcctcgggtcatcctggggtca

SEQ ID NO: 63747 - DNA, 1289 bp, Homo sapiens
tgggcggcaaccggctgagcttggacctgtaccccgggggctgccagcagctgctgcacctgtgtgtccagcagcctctgcagctgctgcaggtggaattcttgcgtctgagcactcacgaggaccctcagctgctggaggccaccctggcccagctgcctcagagcctgtcctgcctccgctccctggtcctcaaaggtgagttccacctgttctgggccctgtctccatctctcgctctgccctgcctctgctgcatgttctcaaaggcaaaccccagtcccagccccagctccaggccgcccctcccggctccccaggtgtgaactgttctgctcttggtcctgtccagccccatcgccatcctcggtgatcaccacccccagtgtggggctggctgggccctggctcctggaccctgacgctgcccagtgggggtctctccagaccacagtgcagatgttgttcctggggaaggttgtgggtgatggttgtcagctgagatgagccggtggtctccacccctgcctccttccatttgcgggcacctctccagtgtttctgtctgtctgtccctgtctggctggggtgggggtggggtgggaggtctgtgcctctcgagcagctgtttctctggctggcagggtcgatctgggacctcggaccctggctctgagggccacatccgcctccccccttcccaggagggcaacgccgggacacactgggtgcctgtctccggggtgccctgaccaacctgcccgctggtctgagtggcctggcccatctggcccacctggacctgagcttcaacagcctggagacactgccggcctgtgtcctgcagatgcgaggtctgggtgcgctcttgctgtctcacaactgcctctctgagctgcctgaggctctgggggccctccccgccctcaccttcctcacagtgacacacaaccgcctgcagacgctgcccccagcactgggggccctatccaccctgcagcgcctcgatctctctcagaatctgctggacacgctacctcctgagattggaggcctgggcagcctcctggagctcaacctggcctccaaccggctgcagagcctcccagcctctctgggtgagtagcccctgcgccccgacacactggccccacgggagggtccctgaagcctgcctgtcttctgcaggggcctctgcacccacaggcttggtccacagctgcctcttggttgtccctccacctccctggcctttgagactccctcagtggctttgtcagagttctctg

SEQ ID NO: 63748 - DNA, 1134 bp, Homo sapiens
aaaagtgcctgacgggggctgggaagggggagggggaaggagtcaacgactccctccccgtcgtcattggctgagcgcctcgtgacgtcactctgaggcgcctcatgcggcgccgcgcacgggtcccagagccttctgggtagcggtttaaccccgcctcttgcgtcggcgccttccttttcctccctgtcgccaccgaggtcgcacgcgtgagacttctccgccgcctccgccgcagacgccgccgcgtgagtgtggtgaccgggcccggggtgccggctggggacgcggagtccgtggggatgcggggtgggcggcggggtatttttgggacggaggcctacgggccgagccacgcgcggcctcgcccggcggccccgggatgggccggcaggaggccgccggggtaactccgccgtcgcgtcctctccgcccgcctcaggatgcgctacgtcgcctcctacctgctggctgccctagggggcaactcctcccccagcgccaaggacatcaagaagatcttggacagcgtgggtatcgaggcggacgacgaccggctcaacaaggtagcggccgcccttgccccgcagccgccgtggggccccagtgtcccatacaggcgattcttctgcctgatccggccacatgctggagggttcggggagaggctcgtttcagtctagttggcgatttcttggatagagaagtaagccgggcggaggtcgggcgcggtggctcacgcctgtagtcccagtactttgggaggacgaggcaggcggatcacctgaggtcaggggttcgagaccagcctggtaaacatgtcgaaaccccatccctactaaaaatacaaaaattagccgggcgtggtggtgggtgcctgtagtccccctacttgggaggctgaggcaggaaaatcgctcgaacccgggagatggaggttgcacggatcgtgccactgtactccagtctgggtggcagaaggagaccctgtctcaaaaggaaaaaaaaaaaaaaaagcagggtgggtacgaggcaaaatcgtgattaacaagctttggaagtttaataccagtgagctgcgtaagattgcgttaaaaaaaaaaaaaagcagtcctggcgcatggctcacccggc

SEQ ID NO: 63749 - DNA, 1125 bp, Homo sapiens
caggcttggttgctcatgcctgtagtcccagactgaggtgggatagtcacttgagcccgggaggtcaaggctgcagtgagatcctaccactgcactccagcctgaagtcaaagtcaatttcattgccagtttattttgccagtgttgaagatacctatgagtagtcaacataagtagtgagatgccctgtgtccttttgtcagtcctaagtctaagaaagctagtgtccatttatttttatatcacttcccaagtgaggctggtggctccctttgggcagtgcagttctggaaacttcagggcctattcccatgtggggaacccagtcctgctgtgactctgggagggagagggccggggatacaatcgtacattcctggtaacagccctgtgattgtctgcttcaggttatcagtgagctgaatggaaaaaacattgaagacgtcattgcccagggtgagttgatgtggacgggctttcgtttgttttcatggtccatcctaatccctgccggtccatctgtggcctgccaggtttcgcttgtggaccagagcaccctagaagcctcacccgaggagtgagcagggctccagtgggctcacgtcatgggcacttctagacactctcaggagcagggcagcagggggcaccctgtgttctcagcagacgtttaggtggccctgcctcttaagcctgactgctcctagccctgaggccattccccaggatttgtctgaagcttggtgtctggagaactgagttcacgtcagcagtccttaccacatgctttctgtgagggggttgggggcagggactgagggtgccagggatgtccataggctccttgcctctttgttgggcagatggttttttgttggcttcagctgagctggtggaacttgtttggaagttgagctgttggggcagctgttcttgtcttccatgcatgtgaccacgacagggccagctcagcaaacgggccaagccatgaacacagcgttgtggccagagatgtggatactggggcagcacactcattccctacctagttatgaacatgtctgtccagtggacctctgagggtggaggtggggaaattgggcaggcaggcagtgtgggcctaat

SEQ ID NO: 63750 - DNA, 1031 bp, Homo sapiens
tcttgatctcctgaccttgtgatctgcctgccttggccccccaaagtgctgggattacaggcgtgagccaccgcgcctggccctgtgtcccctcctatccgtctcccagtcaggggcccggtgctgtggccccgctgacccctcccctgcctcctcagccccaggatgggtgagttcaacgagaagaagacaacatgtggcaccgtttgcctcaagtacctgctgtttacctacaattgctgcttctgggtgaggaggggtcgccttgcccccacccccacccccacccctcccgggccaccatcagacctgggcagatgcgatgacctttgtgtactgcttgtagctggctggcctggctgtcatggcagtgggcatctggacgctggccctcaagagtgactacatcagcctgctggcctcaggcacctacctggccacagcctacatcctggtggtggcgggcactgtcgtcatggtgactggggtcttgggctgctgcgccaccttcaaggagcgtcggaacctgctgcgcctggtcaggagggcgcagggccacggggtgggggtggtgcagatgggcccaaggaggttgtcgctgcaggctttgaacctgtgccttgctgtgctcacctggggggggggtcacggtccttccacacctgcctagtcctgtgggtccccacgttcctgctggaccagctgagggaagacaccagctccgcaagaaagcttcagggagggtggccgcccctcagcccccacctggagcctggggagccggggtggggactctgctctgaggtgcactaggtctaggcactaggcctcagaacaagggtgcccttgtgctgccccccccagtacttcatcctgctcctcatcatctttctgctggagatcatcgctggtatcctcgcctacgcctactaccagcaggtgaggggcctgggcaggccattcagagacacagacatgcacaggcggggcggacacacacacatgcacacgcgtggctagccccaaccccc

SEQ ID NO: 63751 - DNA, 1817 bp, Homo sapiens
ccttgttcttgatgcagttccactgctgtggcagcaacaactcacaggactggcgagacagtgagtggatccgctcacaggaggccggtggccgtgtggtcccagacagctgctgcaagacggtggtggctctttgtgggcagcgagaccatgcctccaacatctacaaggtggaggtgggtgtgcagcgggatcatgcctccagtgtctacgaggtggtgggggggcaccccagtgactggctgtgggcagtgggacacgcctccaatatctaccaggaggtggggggtcaccccagtggccggatgtgggcagtgagaccacacctccaatatctacgaggaagtgggtgggcagcccagtggctggctgagctgttggtggcctggctgcctaggtgctaggggtgggtttggccacaccctggaggctggaggcagtaggggccagtgggaggtgccccctgggcccgccttcaacacccatccgcgccccgcagggcggctgcatcaccaagttggagaccttcatccaggagcacctgagggtcattggggctgtggggatcggcattgcctgtgtgcaggtgagggcacatgggggtggcggtcatcttgttggggacacggggcagggcggtggctggtggccccatgacgtctgcttacgcccacccggctctgcacacaggtctttggcatgatcttcacgtgctgcctgtacaggagtctcaagctggagcactactgaccctgccttgggccttgctgctgctgcacccaactactgagctgagaccactgagtaccaggggctgggctccctgatgacacccaccctgtgccatcaccataacctctggggaccccaacctcagaggcagcttcaagtgccttttgctgcgcaccaatgcccagcaggggaggtgaggggggctggcggggcgaagtttggggggtgttttgtggggctccccagacacactctctgcctggtggtcagatgcaggttggaaggggccttgctgagtggcgcaaggccgagcgttcccagcagggggagaaacccttcacaccccaggcccttcaggaactggggccttgccttgcagccacatggccccatcccagttggggaagccaggtgagctctgacccttgggcctgggcctctgcccctcccaacccagccctcgtctccctcgacagcgcccctgctgtcttccccaccgcagtcaccaccacccgaaatgccacgtggtcactgtgcactgccctgttcatgtgcctctgcggggcagggccttcctggttttgttcactgctgtacccagatgcctacaaccatccctgccacatacaggtgctcaataaacacttgtagagcagatggacgagctcgctgtgctggtaacagatggtggtctgttctcagggccctcgcatccagcagggcagacagacccacccccgccccgcccagtgtcaggacaaagaagggcagagccaggaggacacaccccccatggggctccagggaagggaggtctgatgccagggacagctgagcacaggcctcagcagaaagaactgaacatgttcctaaatggtgagatggtgtgttcagagcccctgggggagaggaaaaatggtttccaaaacccttctggccatggtggggagcagacgtgggaagggtgcagactgggggccgtgcccaggtaagaggtgtcaggcaggtggggtgggggcagtagggtgagggggtttacatggaggagcctataggccctgctgggggccagagggtaggaggta

SEQ ID NO: 63752 - DNA, 1151 bp, Homo sapiens
ggaaagaccccacagcggcagagcagggcttgctctggctggggtgggggtgaaccagctaagggcaggcccctggagagctaccctgccgtggccagtgctggatgaggtggctgcacatcagcaccttggtggtcttggttttctaagctccccgcaattacttcgttttcatttcatttacatttcttacatacgttatacacacacacgtacagccagagtaggtgggagaggaggctcctcacgctccacccagggttctgggcatttccaggttactccagccaggatcatactgctagatctcagcttctgagccgggtgaatctgttcgccttgccggtggcggggggggtgaggccagcaggcagtgagaggcaggttggatgtgggctccaggcctttgcagaccgtagagaactcagttggcctctgctcctcccctcgacacagggatgcgctggatgccctgggcctgaagcgctactgctgccgccggatgctgctggcccacgtggacctgatcgagaagctgctcaattatgcacccctggagaagtgaccacgctggaacccacccacccgctgtgctgaccatgggccctgagcgtcctgccccgaattcacgaggctgaggcatccgggagctggcgtaatgcctggccgcagtgtgtgtgtatccgataccccactctggaaggaaccatccagtaaaggtctttcagaaccactaaggtcccagccctcactaggatgtcaggagccaggtctaggcccagctttcacactgtggcagcccagtgaagcagactgggccatgaactctcctagccctggggccagcctgttccacaggcacccctgcaggaggcgctgccaggagagccttccatctcggggctctttgaggttccctccttctgggtgttcttcaggctgagcagagaggctcctgtaccctctctctcggaatctgaagagccagatttaggccgggcaaaggggctcacccctataatcccaggactttgggaggccaaggcaggaggatcacttgagtccagaaattcaagacccgcctgggcatcataatgagaccccatctctacaacaaaatttaataaattagctgggcacagtgttcacac

SEQ ID NO: 63753 - DNA, 1045 bp, Homo sapiens
tccccggcggctccgcccccgcgcggacccctcccctcctcgccgcaccgcccggcaaaccccagcgctccgcctgggcggaccaatcgcagcccccggcaacgcaccagccgcgaccccggccccttcgcccgcgccggcgccccagcccccccaccttcgcgcgcgggaggaagatgctcgcgaagggcgcctgaggggactggaggccggggccggggcctggggatgaaacctgggcagctcttagcccgcgaccgacacccccagcccttccccccacggtacctcgcccggactctggccccgggccgggcttggagacctccaaccacgagaacgatactcaaagcactacgcaaatggagggtgaccccgttgctgtctggtggcaacttgaagcggctccgccccgggcgcccttggggaagccctgagtgccggcggcgggtggggggctgggtcagcctgcactgcatggagcaggtgtcgttgagtctttgactatatgggaggttccagaacacagaaaagcgcaggtgtgattcctgagatacccaccccccctccaccaggcagccccgcaggaggctggcagccccaggacagacccagagcgctccaggtgggcccggctcggcctccgccccgtgctgtccccaatgcgggagcggggccggcttcaagggcagtcgcgcgcacccaccccagctggcttgatgctctgctgttcccgtcttgaaattcttggtaatttttaaacaaggggcccagaatttcattttgctccagcccaggctggaagtcagcctgtaaaagaccccaccccaccccttgacaggtacagacataccggccccgtgcgcagatgtgcctgcactcctgggtgtcatcacgccggatgcgcacacacctcccacagccggagatggggacagaggcccccagctgtgccctgcagcctaccccacgcctctgaagccccagccccaccacagggcacaagggccctgcggtgttgggaagatatcagcacgtggcccag

SEQ ID NO: 63754 - DNA, 1143 bp, Homo sapiens
cttcattccctgccctggcccaggaatcagccccttctccagggtgctctgggtcctcactgaatattggggaccgaggccagggtgctgggtgggctcagcgctcatagcccctggctttcagctcacagagcatggctgcacgtgtcccgatacgtggaggcacctgtgtccctgtcctctgtccccccaggacccatggtcctcccccagcctggggaggaagcccagaggtgggggccctgggcctcagggctgctgggaggacatggggccggtgtgtctgcagcttggtgggctaggaggcgcgggggacacaagaccaggcgcaggaggggcccagcttaggggccggcgagggggtctggatgagggaggcggggtacagtgggaggggccctgctgaccccccccgcacccccagattgacaggtatgcccagcaagacctgaagaaaggcttgcacctgtacggcacgcagggcaacgtgggcctcaccaacgcctggagcatcatccagaccgacgtgaggcgtgggcaggtgggcggggtcggcgggtgccccctcccctcctgcctcagcccgacctgagcttgccccccagttccgctgctgtggcgtctccaactacactgactggttcgaggtgtacaacgccacgcgggtacctgactcctgctgcttggagttcagtgagagctgtgggctgcacgcccccggcacctggtggaaggcggtgagtgagacccccaccctgggggctggtaggggcctagagggcgggaccagcaggccctgccgtgacacgcatgacatccctccctgcagccgtgctacgagacggtgaaggtgtggcttcaggagaacctgctggctgtgggcatctttgggctgtgcacggcgctggtgcaggtatggcctgggggcctgcgggctccctgcccccactttgttaggaccttctgagcccagggaacaaagtagcaaagaccttgcccccaggaacccacgatcgggggaggccggggcaaaagcaggagggcgagttcagggggatgggcagggacggcctgtggggacagtgggctccctcttagtggacagaggcagaggctggtgtggggtggaggccggtggtcgtc

SEQ ID NO: 63755 - DNA, 1048 bp, Homo sapiens
tgatctctgtgggttccccctgaatccagaggtgggctcgcaggtcgtctggggtcaggaagtggatgtgcagagccaaccctgggccagggaggggtgggttctcacacccagcctcctcttctcttgctgttcccagctgccagcctgcagcagtggtgtgcactagctccaggtggggcttaagacaagcaccagtcacttttggtgaaagggatgtcgtggcctgggtcccaggctgtgagtggcagtccagagtaggagaaggataccccaggccaggagctgatgtcagtccgggctggtatctgtctacgctggccagccctgggcacgtccagaggcgccagaatgacagcaccatggtgagacaggtgctcactcacctgtcctccgtctgatgtctccatcttttgccagtggaacagccatggctacgatgtcaccaaggtctttgggagcaagttcacacagatctcacccgtctggctgcagctgaagagacgtggccgtgagatgtttgaggtcacgggcctccacgacgtggaccaaggttctcatccttcctgcttgactgtgcttgccccacaggctgaaaagagtgtgagtgcgagagcaggggtgtgtgtgtgtgagtaggtatgtctctgtgggtgtctctgtatgggagtgtgtgtgtgtctctgcgtgatttaagtgtgaatgtgagtgtgtaagtgtgagactgatgatgtgggagagaagagattgtgagtgtgttgaatgtgactgtcggtgtggacatgtctaagtgtgagacagtgggtgtgagtgttgagtgtggtgactgtgagaaccacgccctcaccccttggggcccagccggcagagcaggcccatggtgtgggctggtgtgctaagtgggaaggtgagtgtggagcagggcaggcctggtagagggggtttctgaggtggtcgccacggtgggaccctctgcaaggccaagttggtgcctcagagtgttccgcccaggtctgcgtgtggtccaggtggctgtgagggtggcctt

SEQ ID NO: 63756 - DNA, 1059 bp, Homo sapiens
gactgcagttgatcgaggaagaaactgtggaggtgaatttataaaagaaaattgaaagcctatagtagtaaaactgtgtgcttttggcagtggaagttgattttaggagtaaacctccgtgttattagcggatgacgatttatcatggcaaacatccagcaagatatttgagttctgagcttggtaaagaggtagagttagaaatggtgctgtggagcaccccctgggtgcgcagcggctggcccgggcggttcaggactcgctcctttgctgtcctgacccaggcactccctttcccctaggctcagtcccggccccggccctgctgcagccccttcctgccggctctgggttggaggcaggtgtctgcttcggcttttctcctgccttgaaacggggcctcatcccattcgtgagttctgagtgtcagtcttatcagggaaatggtgtttctttagaaatcaattaaaataaaaatggctttttgttcttttttttaggtaaaagtaaagaagcagaaataaaaaggataaacaaggaactggcaaatatcagatcaaaatttaaaggtaagtatgtttaaccttttccatgaaatgtcctgttgtaaattttctgtagtaagaacccagtcttttaatactgtcttcttttctcccacactaaagtgaagttctcagtttgtacagtttctatcagggccctgtcagaattaggaaatggcatgtgtggagctggttaggtggggcagcccctcctggtgtctggtcttttcctggagctggaacagcactggtctagtgcccagctgcatgtcgcagtattagccaccaggccagcgtgctgggggttcagaggacagacaccaagtacgggaagtgctctgtgtaaggcgccaccgaacgcctcctgctgacggtcaacagggacctgacctgcgctcggtggactgcctctctgtgagccagtgtgtgggctgagtgccttccctgaacatccttactttgaagaattgtgaagtacggatttagttttcagcccttgggacatttttgaaac

SEQ ID NO: 63757 - DNA, 1084 bp, Homo sapiens
ccaggtgagaggccctttgcgagtcggggctgtgtgcgctccggcgggcctctcggtggtcggtggcaagaggcgaggcaccagctggccctgccgtgaggcctcgcagagccgcttctgctccccatcggcgtctttttgttttccttcagttgatagaaaaagcagggattctagtagaaaatggagacgtggggttgatggctgacttagtgaaaggggcgtctttgcggtgggatctggagctggaagagggtcccgaccagcggcctctggtgcaggccagggggtctcgccgccgtcccccccccgcgggggcgtgctgcagcctgcgaggggacgacggtgtccctgtgttgtgcctccccgtccccagcccgctgatccagttccacctgctgcactccaagttccacctgtgcagcgtccccacccgcgcgctgctcctgtccacctacatcaagttcgtgaacctcttcccggaggtgaagcccaccatccaggacgtgctgcgcagcgacagccagctcaggaacgcagacgtggagctgcagcagcgtgctgtggagtacctgcggctcagcaccgtggccagcaccgacattctggtaggaggcccccgcccttcgggctggcttggctgagggttggaggccaggagctctgaccagtcccaccctgtgttctttccaaggcgaccgtgctggaggagatgcccccattcccggagcgggagtcctccatcttggcaaagctcaagaagaagaagggccccagcacggtgacagacctggaggacaccaagcgggacaggagtgtggacgtgaacgggggtcctgagcctgccccagccagtaccagcgccgtggtgggtccctcacctactgtgcacccagacctgtcagggcctcacccccaagacttgggaccagcagagcatttgcctgtcagggaggagcatgtactgagaacccaggctctggctgtggctctggacaccccgctgtcctgtcctgggggccactgtccctgctggacacgctgctgtcctgtcctgggggccactgtccctgctggacgccac

SEQ ID NO: 63758 - DNA, 1050 bp, Homo sapiens
ggaagcagttgagcaagtgagaaacctgtttcctgtaggggtcaggggtggggacggggctcatttgaaaaggtgggttttggtctctggcctggctgagaacactcgcctttgctgtttctcacagtccacagcaggaagtgcagaacatcttcaaagcaaagcacccaatggacacagaagtcaccaaagccaaggtaacacgtctggagggacggccccgggggacacgcagcccgtgaccccgcgccagggtctggagggacggccccggggaacacgcagcccatgaccccgcgccagggtctggagggacggccccgggggacacgcagcccgcgacccagcgccagggtctggaggggcggccccgggggacacgcagcccacgacccagcgccagggtctggaggggcggccccgggggacacgctgcccgcgaccccgcgccagggtcctcattctcctgtttctttggacagatcattggatttggttctgcacttcttgaagaagttgatcctaatcctgcgaatttcgtgggagctggaatcatccacacgaaaaccacccagattggatgcctgctgcgcttggagccgaacctgcaagcccaggtcaggccctcaggaaatggtggaacacacttgagttgctttttattctggcacaatgtacgtggtgagatgtgtagctctttagtgcagttcagtcagttttgacagatgttgtttaaccaccaccctgtcaatacatggttgcctcccagcctccccgcagctggccaccgtggagcatcatccctagtgcagttcagtcagttgtgacagatgttgtgtgcctgtttaaccaccaccctgtcaatacatggttgcatcccagcctccccacagctggccaccgtggagcatcgtcccaccatggagcagcctggccctgggcggtggctctcccagctgttcctctctgtcaccgcgttgttccttctcaccacgtcccgttctggcgacggacacctgtctccgtttcacttgggtggcacccaggagt

SEQ ID NO: 63759 - DNA, 2158 bp, Homo sapiens
gcccttgggaggagcacagctgaccctggttttgctgcagtcccagctggactgttttcccaggcaggattttaatctagaatttagaaacatttgtatttgtaatgacttctggcaaaagcacgtgtcctggccggatgtaactgttctcctttcccagctcctgtttgtgaagggcgtctgttatgctcctgcagtcgccgaggccttggatgtgcagccaggggaggagcgtcctgccggccccgcagggcccccaggactccagggtaaagtgtgggccggtggcgcaagactcagaggtgtgctcgtctctttcctgtcagagtgggcgtccccaggccacggtgcaggcctgagtccttccaccggccccgtccagtcgtccctggaggggctgtggaggagggacgcctctgtgtggtcaggaagtgaaggggccattggccgcatgccatgtgccacctgcggcttgtgtctcacctgtcatctggactcagcacccaggctgcacgtctgacacctgagaggcgagagagtggggccggcctaggagccaaggctggggccttgcgctctgtccccaggatggtggccttgtttgtcctaaacacacccagcacaggttctggcttcctgacatgctgtggaggcagggagggtgggtggccacatgtgcttgagggttttcaccctggccctcagttgcctgctgtgcgggtccctggggcagctgcaggggctcatggacccatcagggtctccacagctcccctgcagtgtgtgcaccccacaatgtctgcggctcttcttccggcgtgtcgggctttgatcacagcatagccacgtcagtggcgtgcgcctctcgcacaggccattctgggtctggtggtgccaggtgccgtgacacgccgtgctgggcttgtgctgcagctgggtggtgtggccctcattctcatgttccagctgctgggcagtgctctgcctgtgtgctgcgcctgcaggctgcgtgtgctgccgtggatctcctgcatcccttgacccctcccgccatcagaggaaaggctgctccccgaggcaccgcttccctgtgcggcgctgcagaggggccctcagtgtggcactcctcgtcaaagaaaaataaaggctagaactgcaccccggatcacgcgctttctttggggggaaagcatcccatgtaaccctcatagctccccgggggtcgcgtgaggcacagaccccaaggtccccgacctgtccttcagcagtgggctcacgggcagcgggcatcagaaagtgacctgccctttgctccgccggtttgattctgggtgtgtggtggagctttttgggactcaggtcatgcgggaacccctccagcctggccgcagggctccccactgtacagtgtgttgaggtgcagcccagggctccttcctggggaacgggaggccccgtggggatcctccagttgatcctaccacagatggtgcagaaggggctctcgggcagatgggggtggcccccggaggacggtgggcttcgccagagacggaacagtcctaatggagggagggcaggggcccaaagccagaggcagcttctcttaccagcccagaccctgctgggggcagccctgcccaactgcagatcccaggggcccacagggtgcagatgtgggtcgggtgcctactaagggactggggagaggcaaaagcagtgctcagggaccagcctctgtgccttgacaagaaccggtttatttggagtctctgaccgggtgacgccctctcccaaggacaggctgctggggatgggtgtggtgctggtgggggccttctgcctggctgggagcgggggcggctgccctgccctcgctgccaccctctgccctccctgactctggggatctcctcttctctgtgctggtggctgcctgggcctcttgcccccatctcggcacaggtttccgtgccctcctcgcccctgatgggtctggtcgagcgcctgctctgtggcttcatctgcagggttctgggcccagcagggctggggccaagttcaggggctgggaggtgttggacggtgggcaggggtggtcgggagtgccctgtgtgcctgggaggtccgtgaccactgtccgcctcagtccctctct

SEQ ID NO: 63760 - DNA, 2145 bp, Homo sapiens
tgagtacttggagtcaccaaggaggtggagaaaggtggaacgtgagtgggaagtgtggtctgagggtgtgatggggttggataggtagtggtggtctggaaggatgttgcagtcataggacctgtggaagagaagggactgctccctgtaggtggggagtgtgtggtgaagggtgtgggtagcctgctgctgctggccgaggtggtgtgggccacaggggttctggtgcctgtactggtgtgtttgggggtgatgttggtggtagaagttggggtgacttcaggatggtgtgttgaggaagtgtggtaaggtagggatgtagaagttttggccgtgctaaatgagcttggggattggctggtcccactggtggtcggtgtcattggtggggctgtgtgggtggaccctgtggccttgatcgtggtcggtggaggaatggtgcctgttggcattgagtggatggaggcagaagtggccatctgtgtgtgggtagggatgatgaccgtgtgagtacttggagtcaccaaggaggtggagaaagatggaacgtgagtgggaagtgtggtgtgagggtgtgatggggttggataggtagtggtggtctggaaggatgttgcagtgacaggacctgtggaagagatgggagtggtccctgtaggtggggagtgtgtggtgaagggtgtgggtagcctgctgctggtggccgacgtggtgtgggccacaggggttctggtgcctgtactggtgtggttgggggtgatgctggtggtagaagttgaggtgacttcaggatggtgtgtggaggaagtgtgtgaatgtagggatgtagaggttttggccgtgctaaatgagcttcgggattggctggtcccactggtggtcactgtcattggtggggttcctgtactggtggggttgggggtgatgttggtggtagaagttgaggtggcttcagcatggtgtgtggaggaagtgtgtgaatgtagggatgtagaggttttggctgtgtttaatgagctcagggcttggctggtcccgctggtggtcagcgtcattgttggcgctgtgtgggtggaccctgtggccttgagcgttgtcggtggaggaatcgtgcctgttggcattgagtggatggaggcagaagtggccatctgtgcatgggtaggggtgatgactgtgtgagtacttggagtcaccaaagaggtggagaaaggtggaacgtgagtgggaagtgtggtctgagggtgtgatggggttggataggtagtggtggtcttgaaggatgttgccgtcatgggacctgtggaagagaagggactgctccctgtaggtggggagtgtgtggtgaagggtggtggtggcctgctgctggtggctgagttggtgtgggccacaggggttctggtgcgtgtactagtggggttgggagtaatcgtggtagtagaagttggggtgacttcaggatggtgtgtggaggaagtgtgtgaatgtagcgaggtaggtgttttgtttgtgctgaatgagctgtgggcttggctggtcccactggtggtcggcgttattggtggggctgtgtgggtggaccctgtggccttgagcgttgttggtggaggaatggtacctgttggcgctgagtggttggaggcagatgtggccatctgtgcgtgggtaggggtgatgactgtgtgagtacttggagtcaccaaggaggtggagaaaggtggaacgtgagtgggaagtgtggtctcagggtgtgatggggttggataggtagtggtggcatggaaagatgttgcagtgacaggacctgtggaagggacgggactccccgccgtaggcggggagtgtgtggtgtgtggggtttggggcgttgtgtattcagtagtcgttcttgtttgagtggtctctgtggctgtgggcctcgtgggttgtcctggctgtggggtggttgggcctgtggtgcttgctggggttggacgtgggcctgtcgtctgggtggccgttgttcctggcagttcctgattggtcgattttgctgtgggaattggtgaagttgtcatcgttattgtttttgtttctctaccctgacctccgctggcccgtccttttgtctatgtgacctttttcttgcctgtctgtgcctct

SEQ ID NO: 63761 - DNA, 1034 bp, Homo sapiens
gtgcatgaatgaataagcaaacatgaatgaatgaatgaatatgtgtgaatgaatgtgcatgggtgaatgtgcgtgagtgaatgttgaatgaatgtgcgtgaatgtgcatgagtgaatgtgcgtgagtgaacaaatgtgcgtaaatgaatgcatgagtgcgtgaatgtgcatgaatgtgggtgagtaaatgtgtgaatgagcatgaatgaatgtgaatgtgttgagtgaatgtgcgtgaatgaatgtgaatgagcgtgaatatgttgaatgagtgtgtgtgggtgaatgaatggatgaatggagtgaatgtgcatgagtgtgcgtgaatgtgcgtgagtgaatgtgcgtgaatgaatgtgcatgaatctgcgggaatgtgactgcgtgaatgagcatgaatgaatgtgtgtgtagtgactgcgtgaatgaatgtgtgaatgaatgtgcatgagtgtgtgtgagtggatgaacaaatgtgcgtgaatgaatgaatatgcgtgaatgaatgcatgaatctgcatgaatgaatgtgaatgtgcgtgagtgtgtgtgaatgaatgtgtgcaaattaatgaatgtgtgaattaatgagcatgaatgaatgtgtgaatgaatgaatgcgtgtgaatgaatgaatgtgcatgaatgagtgaatgggtccccctgtgtatctgcgttgcctcccggtcacctggcaccttcgatgttgctgcctgggacgctctgtggctggctggggcagaggcagggctggtagtgccacgtgcagttggcctcctgtgtgtactggtactcgccatggccgtcctgcgtgtgcgtgttgtagaagccgcagtagatggctgggaggaagggagctgtcagctggtggggttcctggccctggccctggccctgacccggtggttcccctgggcatgcatggaacctgagtgtgggcggggaaggtctgggccctcttggtgaagcctcccctgggcagctgggggctgcgggagggccagggtggccccgcagggcacagcccggcgcct

SEQ ID NO: 63762 - DNA, 1045 bp, Homo sapiens
ctgtctggtcttcgttcttgcaggtcagccccgtctccaggctgcaggtcagcacctgcccgacctggtcgatgcttacctcggggtagttctccgcccggcactctatgctctttggtgcccagcacatcttgcccccagcagccctgatgttttcaaaagtttccatgtccccgcctgcaacccctgaggttgggaagtccacgtcaaaccactctgtccactcacacttcggttgacagcgggtcgtgccctggctggtggtggtgttagtcaaggggctcattgtcgtctctgtcctgggcgtgctggtctcggcctgagaggtggacagctcgctcgtgagtgttggcgccaggctcgtggtcagcggctctttggaagcggtgctggctgtgcctgtcgggcgagctctggaggttgccattgttgttggggccagcgtgggtggctgtgaggggcgccatgtgcccaagctccccgtcgtccctggaagggctgagcgtgttggaagggtggatgtggccacccctgggacagtgggttctgtggagcctgcaggcgtcgtggggcctcccgtggtggctgtaccaagggtgcttgtgtatctgggggatgtcagtccttctgagagggtggggactgctgtggtgctggccgggggagccctggtcagccccgggctactcgtaggctgcggcgttgagaacagggcctgggtggtggtggtggtggccgtctccagctctgtggtcggtggcggggttgtggcacgtcccctgcagtggtcgtcactgcagcagaggacccggatcctgtagttgtagcacatcttgaagacgccctcctgctcccagttcctgcacaccaggccgaagtggacgtcacagtgcaccttctgccccacctgtgccagggtccagttggggaagctctcggcctggcactctatgtccttaggctgctggcataagtgccctccagcggccctgatcttatcgtaggactcaacgtcccctccaagttgttcagacttggggtagtc

SEQ ID NO: 63763 - DNA, 1140 bp, Homo sapiens
acgctggtagctgtggatttggtggctgtgcttgtcagcactggaagggtggttgcagtccttggactggaggaggaagtggctttggaactggtggctgtgggtgtggtggccgggctggtcagcactttgggagggggagctgttcccggggtggaggacggggtggccgtggatccagtggatgcagtcgtagtggctgttgtggtcagctctgtgaggatccaggtcgtccccggagtggaggagggcatggccgtagagctggtggccggggtgctggggcagtggccgtagttgcagcagaacacacggatttcatagttgaagcacatcttgaacttccccacctgctcacggttcctgcagaccaggccaaagtccaggctgcattccacgacctggcccaactcccccagggggacaccaggctgggcctgggcacggcactcgaggcccaggggctgctcacagacggcccctccggccgcacggatgttggagtaggtgtcaaagtccccgccagagggccccggcatggggtagctgtagtccagccactctgaccaggcacactggggctcacagcccgtggtcaccaccgtggttatgggggccgatgtggggctgctgggcagcagggtcgaggtgcgggtcttgctgggtgtggccgtggccgtggtcctggaggtggccgtggtgtggcccggggtggtcgtccctggggaagggggtgactcggtggtcctgctgctagggtgagggctggacagggctggagtcgagtgctgggtggtaccggtggttgctgctggggtgtgggaagtccccgtggaaggctctgtgatgtgggtggtgcccaaggtgcctgaggtggccgaagtccaggctgtgcgcaccgtgtggggactgctgggggacagggatcgcccgtgtgtggtggccgtggtgttcggcactgggggtgtgtgggtggtccctagggcagaggagggagtcactgtgctgctggtggctgcaggtgtggtggcggtggtggtcagcactggggggataggtgttgtccctggagttgaggaggggttggtggtggagccggtggccgtgatcgtagtggccgtggtgatcagtgatggggga

SEQ ID NO: 63764 - DNA, 1032 bp, Homo sapiens
cccactggcttccccagctcccacttctctactccctgcttctgcagggcatttggacagtttttctcgcccggtgagtgcatgtggataacactgctgtaccctttccccacatgctatgccaacctgggtctgcctgtcctgggagccagtggctttctccctgctggtcatgtttgttccccactggcctcacttggcccctcccggccacactgggtccccactggccacactgggtctcctctggccacaatccgtccgcactggccacaatcagtccccactggccacacttggtccccactggccacaatgcgtcccccttggccacattcggtctcccctggacacaatccatccccactggccacactgggtctcctctggccacaatccgtccgcactggccacaatcagtccccactggccacactcggtccccactggccacaatccatccccactggccacactcggtccccactggtcacaatccgtccccagtggccacacttggtccccactggccacactcagcctctgccctctccactcccttccctggaaccgctgctccctcctgcgctgacctctgcctttgctctcccagaactctggcttacccatctctgggagtggcttatctttctatggtgttgttcttcacaggggaagtcatctacaataagaccgaccgagccggctgccatttctacgcagtgtgcaatcagcactgtgacattgaccgcttccagggcgcctgtcccacctccccaccgccagtgtcctccgccccgctgtcctcgccctcccctgcccctggctgtgacaatgccatccctctccggcaggtgggccccgcctgccctccacctcccgtgctgcgtgcacacggtctgggttggctggaggcacagccacagtccagctcccgaggcccgtctcagtgaccccgccgccagtatctccagttggaggaggcacacagggcctaggggccaggctagcatgggggccgccctcctcagg

SEQ ID NO: 63765 - DNA, 1013 bp, Homo sapiens
gacaggaggcgggacaggaggcgggacaggaagccagcaagctcacgtgtcgcttgcgtagcaagtgccccaaggaaagcattcccggagaggtgcgcgtggaacagggtgaaaggcggccccgcagggcccagcaccagcctgggagcattgcacctggctccgtgcacctgccctggggggcagctgcctccccgctgaccgggcctggtcgcctgcttgccccactgactgcctccatcttcctacatgagctggtttcctcacacaatcccctacactggaaataacagccggggtgacctctgagtcctggcggccccctgccccctgtcccctgggcagtgctcccacagcccaagactgactctcggggtgcccacaggggcatgtggatgaccaagcggctccttgtcccccaccctgcctggccttcccagaggcttcctggtccttcagtggctgctgggggtcctggactgccccccggatgtgtcctccagcctgcaggccccaggcaagcagcccacagaggacctggacagcctgggaaagacggtaggcaagaaaagacgtcaggacaggaaacgtactcaatgctcagggtttatttgcaaaactgggctgggttgagcagagggggctttgggatgctgacccctctctgacctggccgttgcgacctcagccctgagttaccctgcagcaggcatggacaggcggccgccttgcctgtcgcagcttcctggcagcagctggccttgcctggaccagcctgtctgccccagcggccggacgtggccagctggaatccgtgctgcgcgggcgctccggccgtggcagggacacataggcccgcacatgcttagtttgttccagggcgtcccagtgacatcagggaggggcaaggccaaggtgggccacaggctctcccagggtaggactcctgagtggcgccctcccgaaaggggtcctgctggcccctcacccttctggggccggtttcacccacg

SEQ ID NO: 63766 - DNA, 2883 bp, Homo sapiens
ctcgctggtcgccgagccccgcgcacgctgcctgtgctctgtgcctcactggtcgctgagccccgcgcacgctgcctgtgctcagggctgctcgtggttttagggagcggccaccaggctgggaggcgagtcttaagtccggccacacggtgccttcaggggtgtgtgtgctgcagtggctgaaccgccgtgcgtctcctgctcgatagattgcatctcagtgtgtcctcccgcatcagacatggggcgaggggcctgcgtagctgtggggtggagatgccaggaaccctggacggtggccccagtgcactgagggtccactgtacaccgcacctgctgccccacttgtttgagttttgtgagcattttcttggtgtagtttgtatgtgtgtgtggggttgtcattctgggcatcggctgcagctttgctgaggtcttcagtgcctgtggtgattgttccccaccggcacacagtttagtgacacacttgccaagctgcaaaagcatcttctagaatgcctgataaaggaagaggctcagaccgtgcagtgtttggatcagcgggcgtgacattccgtgtagtccgtccccagatgcagaggactctgtgagcccactggtcagtgaagacgagcgtgtgcagtgcaaattcacgagttctgaagggatcaaaacaccacccccagcctgctagttataaaacagactcgggtgagatttgaaagatcaaactttgatttttatatggaaggaagatgagttagtgaaggaggcgtcacagagggccctgcccaccttccccgtggctgtgcctggggttgctgtttgggggtttgcctttccagggtgtcttgcgggactggtgtttgctgagacccgaggtggccccttcctcagggaggccggtgggatgcgttgttttcttccttcagcaggagctagtgtggcacttctggaactttccgacgtttttaccaaacttgatctttgcttccagggatgcccgctgtctgtagccccggcatggtgcccgtggccctgcccccggccgccgtgaacgcccagccccgctgtagcgaggaggacctgaaagccatccaggacatgttccccaacatggaccaggaggtgatccgctccgtgctggaagcccagcgagggaacaaggatgccgccatcaactccctgctgcagatgggggaggagccatagagcctctgcctcgatgccgttttgcccccgctctttggacacgccgacccggcgctccccaaggaatgctgtcccaacaagattcccgtgaaagagcacccgtgtcgccccctcccgtggacttctgtgccgccccgtccacacctgttcttgggtgcatgtgggttttcggttcctggcggtccaggacggggcgggggctcccctcccatctcgtgctgggaggtctcagcgcgctctcctgtccctgggacgtgcgtctctccttctcatgccgttctggaaaatgctcttgctgtagagagcagctgcttctgccagggtgttggaggtggtggagcgccttccgattccattcatggcattttgtgatgtgatgtaattggaatagagctgttgatttaaggcacacacaatccctcacactgtgggttttttttagaacttcccagacgaaaactcacgcccttgccctaacgcgctttgctgtgagcctggcccctgcccagggcttgggtctggtgagctgagcagcttcctgtggatggtgtggggccggcctctggcctggctcacctggccactgtccagccagccttgtgacagactccggcctgaaggcagaatgaacccacacctggagtgaggaagggggcctggcacggttggccaggctctgcctgattgccagccagcgggcatctgaagccgggtccttcgcccgccggaggctgccgtccgtctctcctgctgcgctcgtgccagctccgtgggtgtcctcccagggagcttctcttctcaacaggccttgcgaggctggggtgagaggtgatagaggcagcactgtgcatgattccgagagggtgtggtggcactgccagccgactgctgacagcttgggagctgctgtgcccaggacgtgggttcagcgtgggcgaggaaagcctggcgagcgtggccctgtaaaagctttctgaggcgggaggcgctcacttacctctgactgcctgggcgctgcgtgtagcatcttggcctacaggacagattttaggtgacacctggttatgacagtcagaaatttgagaagcttctcacaagtgatgcactttaaataatctgcatgccattgagacacctgcatgtctggtgtttgtggttcaagtgtcttgccgccggccttcggatgtaaacccactgataacggacagaaagagaatgcccacaagtgggtcttctgtggaagatgcagaaggaggaagttagtgcttacattttagtctttttctccctcaaaaaaataggttaagtttcagtgccagctagaaaatactgctttctgccatcgattgggggtggtttttgtcaaatatactgttgataaatatttatttttgtaaacttgaagtgtgtggtggccgtgggggagggacatgctggcagcaggcgccttcttcagctgtgggtcctaaaggcctttgatcctttgaagaagaaagacatggtatttgttcagcagacgccgaccactcagacggaggggcccctgggattccctgtctcagatggcctggtcttacgcctgtgtagatttcttctccattgggaatgaaggtgtcaggcgggactggaacgttctagatggtatgttccgtgatattaacaactctaacc

SEQ ID NO: 63767 - DNA, 1003 bp, Homo sapiens
gtggacagttttgaactaaactcagagacgacagcggtgcagtgacttatccgcagttgacagttttgaactcagaggtgacagtggtgcagtgacttatccacagtggacagttttgaactcagagttgacagcagtgcagtgacttatgtgaagttgacactttcaaactcagacaccacagcagtgcagtgtggttccccccaggccgactcgacacctacactgggatgtccctcctgtcaccatcctctctcagtcacatcccagttagaagggggtctgtaagcccgagccatgtcacctcctggatttgaggaggtggtgcaggggtgggagcagggcccagcgtcccctgtgcactcagggctcgtgtagcgagggtgattctgggctggcatggggagggcgattctgggctggcgtggggagggcaattgtggggagggcgattcccgaggttctgatgggtggatgttcctccttgaccccgggaccatctccgctgtgtttcagctgcttccagctgccatggtgatgccaccccagcccgtggtcctgatgccaacagtgtaccagcagggcgttggctatgtgcccatcacaggtgcgtgtgctccctccctgggtgcctctcccctggtagaaaccccagggcctagggcaggtgcgggaggagggaacggggcttagagcgccggggtggggacgtcatccattctagaatcctgtagacgtgctgaccgcacacagatcctttcaggccaggaagccaaggcttacgtttgaattttgtttgcatatctagaaaatagaattgttttttttttttttttctaattgttggcagaaatgaggtgagttgaaattttcagagatgtggaaatgtggctttgaaaccccgttgtgcccagctctgtgcaggagaacctcacgcccctgtcaggtgacacgtgctctgcactgtgccgtcgtgtccgaacctcacgcccattgggtgacg

SEQ ID NO: 63768 - DNA, 1003 bp, Homo sapiens
gtgctttgtctcagaactgcacgatccatctgtggctcactcttcttgctcctggcctcctgggaagcaggtcacagccgtgttcaggcgactctgagtggctgtagtctatgtgttaggaaaaggcctcgtggaagggttcagggaggcagacggcctagagaacccaccctctcctgatggttggcacctccttttcctgacattggcttcattccaggcaaagttggccaagaattacggcatgacccgcatggacccctactgccgactgcgcctgggctacgcggtgtacgagacgcccacggcacacaatggcgccaagaatccccgctggaataaggtcatccactgcacggtgcccccaggcgtggactctttctatctcgagatcttcgatgaggtgagagggacgtgccagctattatggaggctgcacgtggctgagcgtggctgccgtggggacacacctgccaacacagccacgttcctggctggcttcgaggcgtggctccccacctggtgtttcattgggtgcatgacagggtcctgctctccccaaggaatgtgaaaaagggattgtttccagctccttgaacatacttacatttggaaacatccccagtgacaagcatgacccagggatacagcgtgcacgtgtcccctccgctgggcgcacagggtctggccgctcaccagcaggtgggatttccagggacagagcgtgcacgtgtcccctccgctgggcactgatctggccgctcaccagcaggtgggatttccagggacagagcatgcatgtgtcccccgccactgggcactcgtctggccgctcaccagcaggtgggatttccagggacagagcatgcatgtgtccgccccgctgggcgcacagggtcttgccgcacaccagcaggtgggatttccagggacagagtgtgcacgtgtccactgggcactcgtctggccgctcaccagcaggtgggatttccagggacagagc

SEQ ID NO: 63769 - DNA, 1034 bp, Homo sapiens
ggatacttttgaatttcagctgtttcatgtggaaacatttgaagtatatcagcagagggttttccaaatcactttagacctgaggctcagcttttgtctcattcgtttgaccaagtgacctgcagttcagtggccctgcctttagctgtggacaaggagaaagaagccgtgggcacacatggtgcaagggagaccctttaaaatgacctgaaaacccacctgagcaggctttgaggacaggaacccatttttagcggcagaaacctgcatttggggatctcctgagtgagggctgcacctgtaccgctgggggccaggccccaggctggacacccttgacccctccgtttagagatgaggaaactgaggctgagcacagtccaggacttgataaggacatgggtgggggcggggccgcgggaatgccgggggcagctgctgtcgggctgctttgtgcccccaccctgactcactggcctctctggtccccggccccgcaggtgtacatcggtgagctcccgcaggacttcctccgcatcacgcccacacagcagcagcggcaggtccagctggacgcccaggcggcccagcagctgcagtacggaggcgcagtgggcaccgtgggccgactgaacatcacggtggtacaggtgggccttggggcaccctcctgcctgcctggggctggtgcgctcggtgggggtgggatttcggatttcggcgtttatactgcatttcctaagcgggcaaacagaacttctgattcccgcttttcctgaaacctgtgtgatgttgaaaacgatctgtgtgaaagatattggcattgaccccgggttctaccaaacataactcaagtgatgagtagtgggtgtaggtgggcgtctgctctgtgtagggcctggctcttccaccaggcttgagtacgcccaaggacacctcccggacccccgccggcagctggaggaggcgcggccggcacccccgccacctggtgtgtgctgcgtgagtggcttcctgttggcctcagtgccggt

SEQ ID NO: 63770 - DNA, 2635 bp, Homo sapiens
cgagcaggtatttcaggggcacccccgttgaccggtaaacgcatagtaacatgaggtctggctcggagctgccagggtctcttaagaaggtgttgtcagcgacgggggtctcaggtgttgcttggagtacatgtgacttaatcaaccagcgctaccaactgtggcgttcaggatggccatgatgcaggggacaaccaggtggttcctgccactggggtcttccagggcagcacggtagacatggcagcacataaggacagctgagctgtgtggtgacggcccggtgggtctgtgatcttaagcgtcaggtgctgggagagtttgtaaatgggcctcaccagggctgggtgttggggtgaggacgtgacatctctcggaggaggaatgggagtaggggttgggctgggagggcagggcacggaaagagaggtgtggggtctggaggtggagaggagggagccccaggggccgaggatggagggaggcaggagctggaggccgccggagggtcctgggcacaggaggactggacttgccctggagtttaccggctcagcgcagcactctgtaaagtgttgcctggcacacgcaaggcagggcccgccttggcaccagcctgcttcgctgagcatgacccaccccagcccctctgaattaacccatagtgggcctttacccagttactagcacctagaggagccctgcttttgcaggatgtcttgacacagtatttatcatgtcctctttctgttacacctgtggtgccagagaggcaggaggttaagcagggcgctcgctcagctttccagcagaaagagatgctccccagggtccgggggcaggactctggctcgggagaccctgactgtggtctagccgttgcctccccctagtgataaggggagacggcaagatcccatgggccgtgaaggagcagaggggccgctaatggggtcctgggagggttcttttgtccttgggtagagggagcttcaggggcccgggtgggtaggtgtggagaggacgtgtgaagctagccagcccgacatcgttctgagagaatcataccgtgtttagatcttcaggataatggttccctgaatagccactaagggatgcttcagccctgtgcagtgcttccctcacgtttcaaaaaggccagtattttggaaagataaccttttttcaatatagtctgcatattatcagaaagcatgggtgagtacctgcaaggagtaccatgtggacccctgcgaggggtaccgtgggggcccctgcgaggggtactgtgtggacccctgtgaggagtatcatgggggcccctgcgaggggtaccgtgcgggcccccgcgaggagtatcgaggagtaccgtgtggacccctgccttctgcagtgagatctcgggacgtttgcgggagactccgctgcagccaccgcggtgccgtcagagaggcctccttggtagaggtgggtgcgctgtgccgtgtccaggctgctctgactccttgtcctgcttctggaggtgctggttggccatggagtccagctggaggcggcctggcccctcccttcctccctgagaggcctgttcctgtccaggtcccctcactcttcacatcgttgataattcctgccgaatcggtgacttcattagggatggcagagggtagtttctgaactttatcacttcttcggtgtttattaactgggattgtttgtaaagattagctttccccatcaaccggtgtcggctggctgtcctgaaacacaattcgtgaaagaaaggcaagtgagatgcttttccctcatcttcccgtacctcaaggagagagttgcttttctttgtagatgtgtgtgggctttctctcccctgagtgttgtgaagagcccgtggattttcctgcatcctgtgtgtctgagccagtggcacttacccgtctccgctggctctggtgggctgctcctgggagggcgtccgttcctgctgactgcacctgagccagcggggaacgcactcaccgcctcctcacgagtcctttctctctgggttcctgtgaacctttgcgctggattttttaggccgggttgtgagtctgtacaggtgtggaattgctgtgcttgcctggaaatcacatcttttcactgtgtggggacccacgggcctcttggaagataaaggcctcttgcctttgattattttgtctgatactggcatggccaccccagctgtcttttagagagtattcacctagtactttttccttctatgattttacatttttctgaaaacttttgtttaagacacgtgcaccatcgatagcacgtagctggatttttaaaaagtcaaatctaagaagactaagtcttttgatgggaatgcgctagtttcatctttctagttaagagatgcctagatggatacacagatttacagattttttacatgttttctttggtgcttttatttgtcctacattttcttattttttttctctcattgccttttgaatttattaaatggagttttaaaaaattcagttgttttatctcaagtacatacacactgtgctgggaaagtacaggggctcccctggaaatggtaacatgcacttatcagcttctgccatgagggagt

SEQ ID NO: 63771 - DNA, 2447 bp, Homo sapiens
cacagttccctcccttctccgagcgggtcgcacgtccgaaggtcacccccgccaggtggctaggccctgtcgccactcgacagaggaccgaggaggaaccaacccactgcccagactgcagcgccgccacgctagggcccgcgccgacaaccgtcatgactgggcatgcgcaaacggccccgccgggagccatttcgccgggctgcagggctcgaggagagagcaggtgcgcaggcgccgggcgagaggctgcgcctgccctaccctggagcgcgcgtgcgcgcgagagccggaaggggcggtgcctggcgcggcgcctgcgcagtggggcggtgccgggggcggggcgcggcggctgtcagctgactgtggcggcggcggcctcgaggtgacaactgtctccgtcgcaggctccggcgggggcgcaggaggtcgcccggcgcgtcactgtcgggtcggcgagccacgggggccgccgcagcaccatggcgaccaccgtcagcactcagcgcgggccggtgaggcagccgggcgagggtcgggcgggggcggtgacctgcggttgcgggcggggccttgggtcagggctactgctcagctgcggctggcgggccgactccgcggctctcccggggcacgcggggcgcctggccggccggaggggagcggcggcgtccacacctcggggcggggcgggccggacggacgcgcccacgctgcaggaggcttgagctcaccgccgtgccggggcagagctttggggaggcagccccgggggagggggcctgcgcccgttgtgagccccagatggaggcgggccccgtgccccatggtgccccagagggaggcaggccccgctccccaatggtctccagatggaggagggcccggtgcccagatggaggcggccccgagctctgactcccgaatggaggagggccccgcaccctaatggtcccccaggtggaggcgggccctgaaccctaatggtcccctagatggatgcgggccctgctccctgatggccccccaggtggaggcgggtcccgcaccctgatggcaccctagatggaggcgggccccgcaccctgatggcccccccaggtggaggcgggtcccgcaccctgatggccccccaggtggaggcgggcctgcactctagttggtcccatagatgatggctgtttcctctttctcatttacacagagtgagggcagtggtgaccacttcttgggcccaattgtgtccccggttagtggccaccgtgcaaaacctcagtttcttcatttgcaaatgagaggataggcgccaggaacttcagagaacctttcctgctctgaattctctcctgagagttgcctggcagtttcttctatagcattaatattgcaggagagctggtgtagactgactcagagatgatgggctcctggcgtgagtggcctcctggctcactgttagggccttcttgcattgctgtaaaggaataccgagactgggtaatttgtaagaaaagagatttaattggctcccggttctgcaggctgtacaggtagcatggtgccggcatctgctcctggggaggcctctggaagctcccagtcatggcggaaggccaagtgggagcttacacgtcacatggcgaaagcagcaagagagttgggggtggggaggtgccacacactgtaatgaccagatcttgtgagaactcactatcaccgggacagcaccaagccacgagggatctgtccctgtgacccacacacccaccctgccaggccccacctccaacattggggatcataattcagcgtgagatttggcggggacacagattcaaaccgtgtcactcactgaggctgggctggggcaggctgtcgtgagcggtacagtttttatcaacagtggctctgaacatgccgtgggtggaaaaagtcctttttcacgatgctccaaggtccctgccctcgcgcagcccagtactggacgtggtggaggggtcaccagggctccccacccttaacactgtatccacaagtcctggtgtttctcccgaggagataattcttcaggtagaacattttttctgagtttagaatgaagccccaggttttgggcatagctgctttttctgaggactttgaaggaaacctcctgacacttatgagactcaggtgtggagcctacgggtcggcagaggtcctggacggcctctgatggcagcgtctctacctcttcatctttactccaccacagtgagtccccgcaagttgccgtggcagccaagtgctcctttctgcctaacaggagactcagagcaacaagggaaccagcaccctgctgttgtgtcctcctggagagcaggggggcatggtggccaggcaggatggccccttccttgctgtgtggtctgggagacatcctctgcctcctgggaacttgttcc

SEQ ID NO: 63772 - DNA, 2073 bp, Homo sapiens
gtggcaaaggtgcagggcactcggttgtgctgtcctcgtccctcagggcggatgaggagtgggcggctcccagcccactccccagctccccctgcctgtgaagcagtgtgcacctgctgtgggcagggtgagaccccctgtgtgttgactgtgtggttgtctaagttttccacgggagcccagcagctctgatgcctccctgtgccccttcccttgcccaccaaatttgtgtctagcagggattgcctcacttcccagtagggatcagttacgtgctgggtgccaaggaggccgactggcacgtcatgggtaccactggcgagaatggggagggtggcatttgacaggctcttaaaggaccaggagaagtttgctaggcctggtgtaagatgggcaagttggcagagcagcagctggtgcccacaaacagggtgcagacccctgtggcaggcaggacaggtcatctagagcagggaggagggaggtgaggctggtgagtgtgtgggaggcaggaaggaggtggttccatctggcccggccctcctaagtgcatggtgcctgccaggcaggacccaggctcagagcccacctgttggaatagtgtgagggactttgttttgggggctgtgcacacagcatctgcccttctgcttcttccaagtggtcacggaagccctgtgggtgggctgaggtccagggtccactccccagtcccttcagcgccatctctgtcctgcctgcggccggggcctgctcccacagtcctccctccacatcgaaggacttggtctttctgtgccccggggctcctagccagcagcacagggggagctgggagcagggcgcagggcctcggcacttccctgggtgaggggcagctgggccactgaggcagtgactgggcagacctctgggcctggacggcacagagcctgtttcagagcctgtgagcctgcggggggcgccgcagaggtgttttctccactgggcaaagccaagaatgactaaggacgagaagagtgccatggaggtgtcgtgtgctctgaggcctcctcggtagctgccgctggcttggaccgagcaatgggctgcctcagagtgactgcttcctgcccaggcctgggccttcgctgagagcctgcccttctgggaaggagggcacttgaggtcagggagacgtgggtgctgccaggcgttcggggctttcccatggaagtccctctgttggtgcccgcacagccgttcctggagcagaggccatgtcctgcgcgtccccttggtcctactacctttgggccagtgcccgtccacctgccccatgggaatgagtgacccggtccaaagaaggtaggcttgcaggaggcttgtctcacagtgcactaagctccggggcccggccagccctgggtgctggggacagggtgagactgggggagcagctcggggaggcccagcctggagggcctcgtgcgtacttttcttctgtgttctaggagagcaggtgtggacgggaagaggcagggaggctgaggtgccagtgccggagtggcggctgctcactacctcctgaccacagccagagcctgggagagggaagccaggtctccaggttctgcccctgcccagccctctctgaggaccggaggtggaaggtagccccagcctggaaggctggcaagggggcaggaactgccagtagggcagcctccctgagtgggccctggggcacaccctgagagtgagcgcgctgacagctgctcctgctggcagccctgcgtgaccgaccaccaggtaactgccacctggagcttgccagttgacacagctcctaagacacagagcagggagacggcttgtagcccgcttggcagcctgggccactgcaacccacccctccaaatgggaaggccgagcccaggctgtagctgcccgggtggggtgtggtgtgctgtgctgtgagagcacagggcagggaggtgcaggcccacctgccggtggtcagggccaggcccagcgtcatggggagagccttccctgtggtggacacgctgggcatggcctggcacaggctgg

SEQ ID NO: 63773 - DNA, 1059 bp, Homo sapiens
ctgtccgtccctggcccgagcactgactgggctaggctgggccggacaagggagaggggagtgccatcgacctggagctcgtcagcagagttgctgcctgtgttcagaaggcctttcctgggggcttggcagcagaggaccttgaggtggagcccaggacctttctgatggatccttcttgcaggccaaggacggccctgtcccctcccttctggtcccacccccaccgcctcttctggcagcctgaggtggagcccaggacctttctgatggatccttcttgcaggccaaggacggccctgtcccctcccttctggtcccacccccaccgcctcttctggcagcctgaggtggagcccaggacctttctgatggacccttcttgcaggccaaggacggccctgtcccctcccttctggtcccacccccaccgcctcttctggcagccatgccacttggaaaaggccaattcagacgctccctcgtttcaccagccttggccagcccttgcctctggaaagggggcagctgtttgtctctgccaggcgtcccattggccagggagtgaggctggagggcccggcagcaggcatttgcgagtgctggccagccggcaccccgccccgcttctcctccccaccttcccgtcgcccactcatgctgggagaccactgcagtctccctgaagaccaagcccggcccggccagtccctgcaaagtggactctgctgcaaaatggtgcttcaggctgtcagcaaagtgctcaggtaacacctgccagcctggctgggggaggggtgtgtagcacatctgtctgccctgttcttgcccccaggaaggaggtcagggtggggaggcggcggactgtgtccgtggctgccctcccagtgtggccggcggctgtgcagcgagctgtgctgggccacacgcaagctgtccagggcagaggcggctgtgcagtcccgggccagcctggcgggtttgctctggagccctgcccagtggggctttccttagccgcctgcacttcctgttgctctgtgggagaggagcgggtct

SEQ ID NO: 63774 - DNA, 1481 bp, Homo sapiens
ggcagtggtcttaccagccctgggtgggttccttggctactcagcaagacagaccccacagggcttcccaagtgccattctctgactcagcaaacgggacctcagcatgggcccagtggtctccaacagggaaggaaaggtgcatgggaggtgaggtttactgagccgggtttctggccccacagggtgggtagagggaaccgcgggcagggacagcgggacccttccctgtcaccgcagctccctctgggttgatgcttttgtaacagtgggtagcgctggctggtggagtccaggagtggtgctgagggtggggctgacccgcacctgcctctggctccgcagggcctggcctcaggttgttgtgctcagcagccattcatcttcccagcacccattggaccctgctggtgtcctatgtgccttgtcctgcgggggtggggggaccttaggaggaaggacacatccctgctcacctgggacttggtgttacatgtccattgtagagacacaaaatacaggaaaaaaaacccagaaaatcaaaagcaaatcctcctaccacccagcgatagtctgtacttaacattaaaaccagcctcactctgtagtgggactcttgctacccaggggagttgtccactgctcccctgccggtgggaatggggacgttcccaggttgtgtgatgcttcccaagtccctgggaagggagcgtggtgccagtgctggtgtttccacaggtcggtgcccgccacttgtgttggtcttttctgaagaagatctttgccacgttgacaggcagagagcggtgccaaggtttagtccgtgtttactgcaggagggctgatatggccgatgcttctatgcacggtgggccatgccattatctgcttggtctttgcctactttgtcttgaactggtccagttttcttatgactggcatgggttctctttaagggtattaatcttgagtgttaagattttagagcttgttcttaaagagaaaagtaaaagcccaggcggaaacgatgggaagtgctggagcccgaggcagtgtctccacgactcccctggcctgcagaggggcagaggacaggtacactgcgagccagcccagagggccagggagagccgggggccgggggagctgggggccagggggcagcctgggagggcgagtgccaggaagccttgggcacctgctggccctgggcccgctcctgcccttggctggcgcctgagggatgctcttcttttcaccatcccttactttttattttttattttattttatttttttttttgagacggagtctcactctgttgcccaggctggagtgcagtggtgcgatctcagctcactgcaacctctgcctcctggctcctgcctcagcctccccagtagctgggattacaggcgcccgccaccacaactggctttttttttttttttctttttgtatttttagtagagacgggatt

SEQ ID NO: 63775 - DNA, 1145 bp, Homo sapiens
cccttttgcccgtgacctttgcgggttgggagacttttcttccaagcaccctttcagcagcgccttttcccctccagacatggtggctgtgcaggctgtgggctggcagaccctatccccacagcaatgcaatctcaggagcccaggtggggctgttgtctcggggtttggcctgcaccgtctacggaagctcctaactcctgctttgctgggacttgtcctcagcccatggaaaggcctgatggtgccaggtggccctgaggagccagatgcctgagcctggggccaggcctgggcgtgagcccaggagcataaaattagctccggcgtgggttgaaagctgctggcgtgagcatggcttgtctgtgttgagtttgtcttgcacagccctggcctctccccacagcctgcggccagccctctacatgggcggccgctctgggttcctcctcccggcacatctgcccttctgctgcgtgccctgttctttgtgccacatgtgacaggaccatttgtcatagcagtggtgtcatgaaatacaagagtgtgggcctgagaatctgggttgagtcaggttcctgttggaggcctgcatgcgcgcagcctgctctgagtgctccggacacgcgtgaacagaggcaacaggagccacccctgggcagcttccccactgccgagggggacgggagtaaggaggtgtgggatggggtgcctggagggggtgcgtgggagagctgtttgaataggagctctagaaggcctctttgagaaggtgctgttgagctgagacctgcggaggtgagggaggggactcgccatgcaggcctatggagggagccctggctccctggtgctttgtctcagaagggctgcctttgcctcctccccctcatggttccagggacacgtgggtttttatttaatatttttcagtcgattgtcgtctttaataatattttgatgaatgggctgtgtcaaatttagccagcaggagcgcatgtgactcagctcccgtatcagttgaatagacgaaggggcagggagggaagcctctgtgagcaggaactggtgagcctggctgtgtatcacctggataacctctgagctgaagagctgtgccagcaaagcccttgagctcatgtggg

SEQ ID NO: 63776 - DNA, 1086 bp, Homo sapiens
gagtggggagggcctctttggggctgctagcttgtgcttactaacttggctctcccagctgccttcaggggtcctcctctctgaccgagataaaatctcgtgagtgtgtgtctctgcaggaatgtgaatggagtgatgatgaccttgtttttcttctttcttttctttgccgcatgggaggatgttactggtggttgacaattgattctgattatgaggacacccaggctgaacttgcttgaatctctagagttcttttaacagcctcattgaggtataatttacataccataaagttaacttaagtttgcaattaaataatttttggtaaaattacagggctgagtaaccatcaccacagtttaatttgagaactttgctatcatgccccagagaagcctcatgtccactggcactgctccccatccccacctccagcctcgaggcggccaccagtctcccgccatctgtgtgggtgagctgaatcatgcaaatggaatcccagtacacgggctgtgtgcctgtcctatgcggcgcagtgttgcgaacgtccatccatggcgttgcgtgtgtctgcagctccgtcctcttcatcaccaagtgcaattccgtcctggggagatgtgcatctgccactctccttccaccactgatccgcggtttgtgactgtgacttttaggacagtgagctgggcctgttcctcagccgggggccccagattcctgagttcatgggctgccgtgtaccaggctctgtgctggggcggaggtccagagatggagacacagccattcccgctttcctagagctgtcaggctggtagagaagggccccaggcagcaggagaattgaggagtgggtgagtgcggccaaaagcagggggctcggttagagcaggtatgaagggcttttccaagagggaaggaggaaggaggtggcccaggaagaagcagcagcacatgcggaggtgtgagcagagaagccggctggcccaggtctgctgtatctccagcgggcagccctggaaggtctggtttcaggaatagcctctttccatcagggctccaccagggcactcttaggcc

SEQ ID NO: 63777 - DNA, 1032 bp, Homo sapiens
ctctcaacccacttgacggccctcctcctacagggggcttcgccaccttctcctcctgcttccccggcctctgcgagggcaagcctgctgccctgctacccatgagcctctcccagccctgcctgcctgtgcccagcgtgggcctgacccgcatcctgcctcacctctacctgggctcgcagaaggacgtcctaaacaaggtgtgtgtgcagtggagttcggggggtggtcaatgggaaaggggcaggagctccagaagcagcttggcagcggagcgggggatgagggaggaaaggagctgaaggcagtggatgagctgggtgtgggagaagcatgggtgggggcccaggaggaccccaggctccccacccatgcccctggaaggaccacagcagggcttgcgggagggcccggcagggctcgggggaggagcggggagctggcatgccaagctgcggatgtcactgggcctctggccagctctgaaagaatcccatgttttaaaaatggtgacgagggaaaagggtaaaagccaccacccaggcaatcataaaattcctaggagcccaccaccagccgtgggtggggcctgcagtcggaggccagccgtgccccaccccccgcacgggcccagggtgccagggtggaccagagaggcctcctgggccctcccctggatacactgggatctgggacaaattccaaggctcccaggattctaaaggccctcctgacggcagggcaggaaaagcctccaccttcactcccgccccgagcttctcccacccctttccaacccgccctcccgcccctccaggatctgatgacgcaaaatggaataagctacgtcctcaacgccagcaactcctgccccaagcctgacttcatctgcgagagccgcttcatgcgggtccccatcaacgacaactactgtgaaaaactgctgccctggctggacaagtccatcgagttcatcggtgagtctgcggtgggcggagggcagggacctggctagaggaaggctagagctgt

SEQ ID NO: 63778 - DNA, 1050 bp, Homo sapiens
aggtccagggagaccctgtgggtgaggatgctctcccagaggccagcatggcacagaggcttcctgcaggagggggcactcggccagcccttcgcagtacagagaaggcctctgagggggcggggagccggcgagctgcagggagcatgctgggcacagcaggtacctggagtgggaaggaaggttaggaccaggtagggcagaggagcggaggggctgaggactgggctctgcactgccgggcacctgctggggtgggtaggagagagcagggaggggcgcgtgcccactctgcagaggagcctgctccatggtggtggctgccgcaggagcagcggttgcctggcacctctgctgttgccatggtgacgatggaggtgctaacttgctaatgaatccccttcggctgcaaataacaatactattgtgggtgataggcccagctccagctcagcgttgcttaggaggcagagcagggccaggtaaaggccaggacccgtcctcccgcccctccagcccctgcccaccaccctgcagctggacttgccctcctccctcccctccctctgggtctcagatctggctggctgcaccgaggtctctcatggcagtgtcaggactcagggctgcatgaaggctaggccctggctgcagagagggcgagggcctctcctcacacctgccctcctccctgcactggggggtatttgcttctgttgttttcagtgagagagaatccacccccacttaacggatgaggacattgaggccggggcagctcctcaaaagacccccagcccaagtgtccctgccactgcagccttctcggggttctgggtctctgagctggacccttgggtatcctacggggcacctggagccgctgtctcaccagaaccacacatctgggccctcgcctctcaccacctgtgcaaggctcaggtagaactcgggaaggacaaacagctcatcaaggaccccctgtgggtagtcagggacccccttggcaggcagagaccctccacagcaggcaggcagcaggcccttttg

SEQ ID NO: 63779 - DNA, 1058 bp, Homo sapiens
ctcctctccaggcccagggccccggccagtgcccagccccgctgggagacccggccagcaccacggacggcgcccaggaagcccgagtccccctggacggggccttctggattccgaggcccccggcaggttcgcccaagggctgcttcgcttgcgtgtccaagccccctgccctgcaggctccggcggcccctgcccctgagccctcggcctctcccccgatggcgcccacactgttccccatggagtccaagagcagcaagaccgacagcgtgcgggctgccggcgcgccccctgcctgcaagcacctagccgagaagaagacgatgaccaaccccacgaccgtcatcgaggtctacccggacaccaccgaggtgaacgactattacctgtggtccatcttcaacttcgtctacctcaacttctgctgcctgggcttcatcgccttggcctactccctcaaagtgagcccgggcggtggcagggggcaagggcgggctagagaggtggtgccggcaggacagtccctggctgtgggcgctcggcccctctccctctcaggggagcacacgggtagaacaggtgcagttgaggggccaagggatcaaaggacagtgaggggtcctgatggtgggtcccagagaggtcggggtactggctaggtctgggcgggcaggggtctgcccttccctctcctgagccatcagggcctggctttctgctcagccagctcagcggaacctgcaggaggggctgggagcgggggttgaggggggcggggttgctcaggctcaggggacatgggacgtagacctgggcagcagccacttctccgtgtgcagggatggggccagcgtggggctgaagagggcttggaatcctacccctatggaaaggaagaggggccaccttcttatccagctcctcacccggagcccaagggcaggtgcttacacagctctgccaagccctgcgtggagaccagacctgggtggccagggcagcccagggaagaggggtgtaaacaggtcctgcacctccccagctcagggctgcga

SEQ ID NO: 63780 - DNA, 3015 bp, Homo sapiens
tgcagaggccctgcggccagaaccagccatcccaacttcccagattgtgccatcactccctcctggaagccttctttggttttttcttccagacagacagacagggtcctccccagtggagctcctggcactcacttccttgtctgccgctagccttgaccctgatgtctggctgaaccttggctcctgagcagaccaggagaacctgagggttgaggaaaacctcttctgggccaggctgggcccacgcagagcagccctaccccgggaagaagggagtctgtccctcctcctgccttctgggcctttccatccctgcagtttcagaaaggcccctccttcaggaagctctccctgattgccacattcaccctcttactcctgacctggcactcttgtgcttggggggtggcgtggcagctgactcctcccttttcctcctagggacccagatgcgcagcctgggggtgagctgatgctgggtggcacagactccaagtattacaagggttctctgtcctacctgaatgtcacccgcaaggcctactggcaggtccacctggaccagtgagtagtggctgcagtcggctcccctgggttctgtgggcgggggcggtgtgcggagaccctggaggaccccggttctgcaggtgggggttgcatgtggggagtagtgggagctgggcaagaaagagatggggtcagaccagccctccatgcccctccttgcccctccatgctccccatcacctccatcccctctattccctctatccctccatccctccatttcctccatgcctctgtgactctccatgacccaccatcccttctgtccatccctccatgccctccatcccctccatcccctcatccctctgtgactcttcatgaccctccatctcctccatccctccatcccctccatccctccatccctccatcccctccatccctccatccctccatccccacatccctctgtgactctccatgaccctccatcccctccatctgtctatccctccatccctccatccctccatgcccctccatcccttcatcccctccatcccctccatccctctatgcccctccatcccctccatccctccatgcccctcaccaccacctgagggtctcccaccccctctaccactctgtgtctcctctcccaccctcttccctggagggcttacagccggctgtgcttccaggagccctgaggggaggagagtgcagcccagccaggggaggggctcccagggaggggcactgggcccccagggcacactccagtcccggcaggggcttcacgccctgactccccgcagggtggaggtggccagcgggctgaccctgtgcaaggagggctgtgaggccattgtggacacaggcacttccctcatggtgggcccggtggatgaggtgcgcgagctgcagaaggccatcggggccgtgccgctgattcagggcgaggtgagcgccgggggctggggctggggctggggctggcagggggagccccaaggccaccactaccaccctgacactgctgtgacccctcttagtacatgatcccctgtgagaaggtgtccaccctgcccgcgatcacactgaagctgggaggcaaaggctacaagctgtccccagaggactacacgctcaaggtgagcgggcaatggggtgccgcacgccccaggtgagcgggcggtgagggggcgcacgctccaggtgagcgggcaacaggtgggggggcgggtggtgctaggcctgggtactgaccaccagggccgtcccaggtgtcgcaggccgggaagaccctctgcctgagcggcttcatgggcatggacatcccgccacccagcgggccactctggatcctgggcgacgtcttcatcggccgctactacactgtgtttgaccgtgacaacaacagggtgggcttcgccgaggctgcccgcctctagttcccaaggcgtccgcgcgccagcacagaaacagaggagagtcccagagcaggaggcccctggcccagcggcccctcccacacacacccacacactcgcccgcccactgtcctgggcgccctggaagccggcggcccaagcccgacttgctgttttgttctgtggttttcccctccctgggttcagaaatgctgcctgcctgtctgtctctccatctgtttggtgggggtagagctgatccagagcacagatctgtttcgtgcattggaagaccccacccaagcttggcagccgagctcgtgtatcctggggctcccttcatctccagggagtcccctccccggccctaccagcgcccgctgggctgagcccctaccccacaccaggccgtcctcccgggccctcccttggaaacctgccctgcctgagggcccctctgcccagcttgggcccagctgggctctgccaccctacctgttcagtgtcccgggcccgttgaggatgaggccgctagaggcctgaggatgagctggaaggagtgagaggggacaaaacccaccttgttggagcctgcagggtggtgctgggactgagccagtcccaggggcatgtattggcctggaggtggggttgggattgggggctggtgccagccttcctctgcagctgacctctgttgtcctccccttgggcggctgagagccccagctgacatggaaatacagttgttggcctccggcctcccctctgtgctggtgtgctcttgtgcctggtcaggggtggctccaacttgggatggggaaggagggtgggtagtgcgaagccagcacggcagctgactcggcagcaccgggacaagcatttggggtgccccgggcctatggccccctgccctgccctgcccagcccatgggctccagcctggtcggccagcggggactgacttgttcccaggtctggagcagtagccggcaggatgtggccttggctggggtttcagggtgtctagtgtgagtgccagccttgaggagtgatttcagggagg

SEQ ID NO: 63781 - DNA, 1170 bp, Homo sapiens
gcagagaaggggaagggggcagtatggctgtgagcttgggatggggtcggcaggttccccatctctcgggctcctggcccaggctgtgtcttgttcccagcgctgagggcaggagcaggacctgcctgtcattggtggtgggagtaagaggtcggagcagggagcggagcaaggggcctgcccgtctgtgctcctgcctggttcccatctcgtgtaaaccgagccctgatgacttccacgaagagggccccgccataccccgtgtccccatccccagcggtgttcagctcagggtttccagccctttcttctgggccctctgggccccatcgtgtgtgggatgggcatccattgaactgggttttgtagcctcatgctcagggagtggtgtagggctcagcctgtctgctgcccactgactctgccctggcctgcaggtgccctgccagtcagcgtcgtcagcctctgccctgggcggtgtcaaagtggagaggcaggtctttggggaggccaccaagcagccaggcatcaccttcatcgcagccaagttcgatggcatcctgggcatggcctacccccgcatctccgtcaacaacgtgctgcccgtcttcgacaacctgatgcagcagaagctggtggaccagaacatcttctccttctacctgagcaggtgggcgtgtgggttccctctcgctccgcgttgctgggaggcagggcggggctggacggggagccttctaggcaccccctctcagtgctgccccctccctgctgctgtgccagagctcctgacctctgacctcagggcatccgggaggcgggggttggccgcccttctgcagaggagtaagcggcagcacagagaaagctgtttggccggggtctcccagtgggaggggctcgggccaggctgtgggtcctgggaccttggcagctgggcctccctcctatgagaatggacccaggtcaggggtcgtggcagttcctcttggttcagtcggcccgtcggtccccagacctggtgatgggcacatgtggtcctggtcccggggttgctgatggtggagagggtcatggtgcccaggggaccggggatccccggggaggtgaccttgggtgcgtatgggtccccggcaccacgctgcgagcagctctgtgggcgtccccagc

SEQ ID NO: 63782 - DNA, 1038 bp, Homo sapiens
ttgacatggccccaacctggggaggaagtcacttcctttctcagaccttggactgcgggccaccaggggagtcttccaggccgggctttcctgcacccggggctcaggctgagggccacgtctgtccccaccctggcttgacctctggccttgtcttttccgtggggaagtcctcagcctcaccatgtattgagcaggggtaggtgacagaagccaggggtctagagaccccaagtacccgtgggcattaggaccgagggctggggacctggcccatcttccctgcaggctgagcaggtgggagtgggtggctgttggcagctgtgggccccgtgatgcccctccctccagtatgggccttggctctggggacagccgggccttctgaggcccagtggggagatggggccccctctcccatccctgacggaccctgtcccctgccaggcccagtactacggggagattggcatcgggacgcccccccagtgcttcacagtcgtcttcgacacgggctcctccaacctgtgggtcccctccatccactgcaaactgctggacatcgcttgctgtgagtcacgaaccctggccccgtcgcccaggtcctgcccttccgggatgtcgctgcagggctgcctcaggaatcacttgggcaacgcaattctcctgcctcttggccccgtgagccaggccagccctccaccctgctccagccactgactttctgggtgaaccaccagctgtggtcttgctctcagcagggctggggctggggtggccacagagggagccggctgtggctgggagggaggcccggggtcacagcccacagtcccggggctctggcatgatggtgggcctcagatcccctccaaatcccaccctggggaggcagcttggggggtgcgggctccatggtagattgtagggggatgggagggctaaggccgtggcgtgggctgcgggatgaccggcgggcccccttgtcgcccggggcagggatccaccacaagtacaacagcgacaagtccagcacct

SEQ ID NO: 63783 - DNA, 1069 bp, Homo sapiens
ggggctgggtacagtgggctgcctcagagcactttgggcaggagtgacaggtacccgccagcaccctgagcagccatgctggccaccatcctggaagagaccagcgcaggtgcagagggaggacgggagacccttgggggctttggagcctccagaatggctgaggagaggagggttgggcacactggcccccaggttgggtgtgtggggctgaggtgggtggcgggtgaccacttcttaggactgtggcctgtgcaacctggcggggggcaatgggttgccattcactgacttgggggagctgggccagcagtttccaggtgacaggcaggagtttggttttggctgtggcgactctgagattccccaggggcctccaggtggatgtgcagcattggcagcgtcggccggcaggcgggagggcctccctgatatgccccgacccgtggttgacaggatcccgctgcacaagttcacgtccatccgccggaccatgtcggaggttgggggctctgtggaggacctgattgccaaaggccccgtctcaaagtactcccaggcggtgccagccgtgaccgaggggcccattcccgaggtgctcaagaactacatggacgtgagtatgaggtcttagccctgctgcaagcggagccactgtcaggagagctccgtggcagtatggggaacattcccacctcctgttctcagcagcgcagtttgagtggctcacctggccacggtggcgtcccggctcagccacactcctttcttccccattctggaacctcctgccactggcccctgtcattgcagggtcttggtcctgctagggcctgggagggtgattgggagtggcctcgggccttggtgccagctcgcctgagggggcggtccttgggcctgcctgagtgtggccggctgacctggagcctttcactgctgtcctgctgggaggcctgtggtgactcgtggcctccccagcccctccccatcttcttcctctcgcaacagcccctcctgtgcccactactccttcagggggaagcaggatccaaggtggagcactctg

SEQ ID NO: 63784 - DNA, 1035 bp, Homo sapiens
aaccttggtttgcaagaggcttccagagaggatgtctgggagcgtctcggagggggacgagggggcgccgggaggagcaggtgcaggagcccacggcgcagcgccccgcgcaggcctggacgcggggacggccgcggcggccgggacaggggtcaccccgcggggccctccagggtgggccgccccacgaccccaggccaggccgaaacgggaatcctccagaccccagaagctgggccgggctgaccccgcgggcgcgagcggcgggaactgtaggcgcggcaggcgcaccaccaccccgccccccgcccgggcgctgtgcgcgtgcgccgaggttgccccgcccaggccaggccccgctccgccccgccccgcgcacgccggccgcgcccacgtgaccggtccgggtgcaaacacgcgggtcagctgatccggcccaactgcggcgtcatcccggctataagcgcacggcctcggcgaccctctccgacccggccgccgccgccatgcagccctccagccttctgccgctcgccctctgcctgctggctgcacccgcctccgcgctcgtcaggtgaagcctcaggggccggggctcagggacgggcaggggtcgcggcgccgaggtcccggggcctgtggtgactttcgcgctcccctgtggcccccacgagccccttgcgccccccgcgctggaatgcacctgtgccgccctgcgcggcctcctgcacggaccacccgcctacggggcgccgggctccggaggtgcaggggacccggggcagaggcgccagatgcctctcccccatatgccaccctgggttgtaccttgaggactgcagactgaccgcagcctccctggagacggggcggggcggggggaggtagtgctcattcggggcaggtggaattggggtctgtactgagcgcccttgttgctggagacctaggtcaggcctcagagcccccgagtctgggcgagtccatttccttagggacccctttaccacctgtgaactgggggctttaaaagtt

SEQ ID NO: 63785 - DNA, 1646 bp, Homo sapiens
gccgtctttggagaattccaggatgggtgctgggtgagagagacgtgtgctggaactgtccagggcggaggtgggccctgcgggggccctcgggagggccctgctctgattggccggcagggcaggggcgggaattctgggcggggccaccccagttagaaaaagcccgggctaggaccgaggagcagggtgagggagggggtgggatgggtggggggtaacgggggaaactggggaagtggggaaccgaggggcaaccaggggaagatggggtgctggaggagagcttgtgggagccaaggagcaccttggacatctggagtctggcaggagtgatgacgggtggaggggctagctcgaggcagggctggtggggcctgaggccagtgaggagtgtggagtaggcgcccaggcatcgtgcagacagggcgacatcagctggggacgatgggcctgagctagggctggaaagaagggggagccaggcattcatcccggtcacttttggttacaggacgtggcagctggttggacgaggggagctggtgggcagggtttgatcccagggcctgggcaacggaggtgtagctggcagcagcgggcaggtgaggaccccatctgccgggcaggtgagtcccttccctccccaggcctcgcttccccagccttctgaaagaaggaggtttaggggatcgagggctggcggggagaagcagacaccctcccagcagaggggcaggatgggggcaggagagttagcaaaggtgacatcttctcggggggagccgagactgcgcaaggctggggggttatgggcccgttccaggcagaaagagcaagagggcagggagggagcacaggggtggccagcgtagggtccagcacgtggggtggtaccccaggcctgggtcagacagggacatggcaggggacacaggacagaggggtccccagctgccacctcacccaccgcaattcatttagtagcaggcacaggggcagctccggcacggctttctcaggcctatgccggagcctcgagggctggagagcgggaagacaggcagtgctcggggagttgcagcaggacgtcaccaggagggcgaagcggccacgggaggggggccccgggacattgcgcagcaaggaggctgcaggggctcggcctgcgggcgccggtcccacgaggcactgcggcccagggtctggtgcggagagggcccacagtggacttggtgacgctgtatgccctcaccgctcagcccctggggctggcttggcagacagtacagcatccaggggagtcaagggcatggggcgagaccagactaggcgaggcgggcggggcggagtgaatgagctctcaggagggaggatggtgcaggcaggggtgaggagcgcagcgggcggcgagcgggaggcactggcctccagagcccgtggccaaggcgggcctcgcgggcggcgacggagccgggatcggtgcctcagcgttcgggctggagacgagggtgagtttttccccctctgccaccctcagcccccacccgcccctccccacacaaccaacacgttctccccacacgactctctcgttctccccacagccaggtctccagctggggtggacgtgcccaccagctgcc

SEQ ID NO: 63786 - DNA, 1088 bp, Homo sapiens
ggctccactctcaggaagtgggaggagggggcagatccatgcacactgtgtccttgaccaccagcctcagaagcaggccatgcccagccagcagccagcctgcctgtcctcttcagccatgcatcaaatatttagtgggtgcctgctgtgtgtcaggcactgttccaggccctggctgtgggagccaggcagcagacccctcccctggaggatctgcaactctggcggagatgacacgtgtcacagcacgatggtcatatcagtgctggggagggacggaattcctaggatgcttgctagagggtcacagggttggggcactcctcaaccacggggctgaggcactccaagtgcagaggcttggaagagccacagtggatccaggccctgatgcctgagaaggagccagctaggcagagccggggaggagcactccagacagacaggtgaggttggaggaacacaagggaagcaggagacagagccaggggaaaggggctggacacaggttaggggcaggtgtgagcctgggaggcaggggggctggccttgggacctggaggccagagggaggctgcattttattctgactgcagtgggatgatggagggcttcatgggcctgacatctgattgcgggggcagcagcccgtcttagctccagagtggaactcacattcacagtcacttgcaggctcacagggaagactggctatgagggggtaggaggaccacttcgcagggcctggcccatgggagctccacatctgaagtgcccttcccagtggcccactggtgtgacctcatggggaccttggggatcccatggctgacaaggacatggcttgtgtctgtgtgatactggcacagtacgcacccagaagtgcgtctgaaagggttcctgttgttagctgggcctggtggagcttccatcctggctccaggacaaatattcaggtggactctgtcagaggatgaggggagaaaggggaggggcttgctcagcagcccggcctgggatgggagcgccgctccctgggcctcccctgccctgagaaggcttatgcctgaggaaggcagagctgctgg

SEQ ID NO: 63787 - DNA, 1244 bp, Homo sapiens
aaccactgtggcatcaactccttcaggaagccctcccggattgtccaaggtgctcacctcctttggggagccctcccagattgtccaaggtgcttgagggagggaggaatgggttgttctcccggcaccggggctgcactcctgggcagacgctgcatgcctgtcctcaggcgcggccctgctgccacccccttgggggctcggagcgcgacagcagcttggggacgcctcccgcgcccagcacggtgcacctgggccctgaggtcctggccgaaacgcgccaagttgggggtaggtgcagcgaccccatacccctcggctgcgcgccctggcggcaggaggcggggccgggggcggggcgtgagctggccggggcggggcctatggaggggcgggaccgcggcgccctataagtactgcggagcgaggcgcgcgcccggccagagagcgagcgcgcaacggcggcgacggcggcgaccccaccgcgcatcctgccaggcctccggcgcccagcgccccacgcgcccccgcgcccccgcgcccccgcgcccctttcttcgcgcccccgcccctcggcccgccaggcccccttgccggccacccgccaggccccgcgccggcccgcccgccgcccaggaccggcccgcgccccgcaggccgcccgccgcccgcgccgccatgggagtggagggctgcaccaagtgcatcaagtacctgctcttcgtcttcaatttcgtcttctgggtaagggctgcgccgggggccggggcgggagggggcaggcacacactccacgttgggcaggtcccgcggcagcgtgctaggccccgcgggcgcagcgcgggccgcgaagttgtggggccacctgtgggctccaggagcggggtggggggtcgcccggggccaccgcgccccccgacattggggctgagggctgcgagccgagtttcggggcctctgtgctcgggggcccacctctgcggccgggccggggcttctgggggccgccgggcagttcccgctgtggtggtgatgggtgcggtggtcgcgggtcgggacccgagtacccggccgcccctcagctaaggaggggcctgcgcgggtccctggccgcggattccggactgctgcttcgcggggacgaggggggggctcgcgggcgggactcctggcgccccgcccccatgagctcatcaagagccgccgcccctggatggtggggcgggggcgcacactttgccgga

SEQ ID NO: 63788 - DNA, 1183 bp, Homo sapiens
gcagccccctgggagtgtcgccagggcgggcctggaagtttcccaggcagctggggtggagacctgacacatcccaagggtgcttgttattaaggctcaaggaaatgtctctgaggcctcaccgctcctctccccagggcctgctccctgcaaagcattgagaactgagtccgtccacagtcactgtggacccacccatccactggggctcagtggtagccagcaatgccaggctgggtgaggtggggttggtgggcaccaccctggtggacccccctccaccctggtgtcgcagggtgtgtggctgagagcacagtgccatgggcttgggcctccttggtggagtccccaacacactgctctggtcctgggcctcggccttccccgtctgcagtgggggcccacagtgagcctacctcctggtggtgttggtggatttgctgacatgcctgagtgttgacagggggcttggtgcaggaagggctcagggcgtgggtgttggccaggggtccaaagggacctctgcctcagagagcccagcccagacaggcaggatgtgcagtggggaaggggctgcgggaaccctgcagggtccagaaggacacagtgcagtcctgtgggctctggggaggctggtggggaggaggttgacaatggatatctgggtggggcacttgttagaagttccattttagagaggaaagaggccttgcctgtgggagaaggcagctggggtagcctgacctctttcccaggaaggagcccacacacacacgcacaggcactcacacacacgaatgtgcacacacacacactcccaccttcacacacactcacactcttgctgtctcccttcccaagccaaggtgcgagggggaaggtctgggcagcatgcacctgcgccctgaccgctttgggggccagtgagaactgggctccctgggtgcgcggcgggcccaagcagggaggacattgcagatgccctggccaagcagcgtggaaatcctgtcccttgggtgggtctcggagcctccatcagaggcggctggcacctgagacccacctgctgccaggagcagggcaggagagtttgtgtcccgggacagggaactggcctgtgggagccttgccttcctcatctgtgtaatggatataagagtcttctcctcgggggctggccagg

SEQ ID NO: 63789 - DNA, 2171 bp, Homo sapiens
ctcttggggcgctgccacacccttgcaggagggggcagtgttcctgggatgctcaggtcctggtatcacctctggccagatacggaaggtgaaactacagggcatccaattcaccttgaacttcagataaacaccagattatttttttgtatgtcccgtgcaatatttgggacacacttaccctaaagaagtattctgttttcatctgagaggcagatttaaccggcgtcccgtgtcttcctggcagtcctgccctggagtcacactccacaggtgcagggcagggccaggctccaagtagatggcggccaaagcacccgccccatgctcctgactcccggggctcttcagggcattgcgaaaaccagcagcagagctgacacctggtccctgctcgggagccagcaaggcaggaggctgcttaggccttgcgtgtggggtgggcgcactccctgctgcagtgctcttcgtacatgtgacactgttcccgctctttcccagctggctggaggcgtgatcctgggtgtggccctgtggctccgccatgacccgcagaccaccaacctcctgtatctggagctgggagacaagcccgcgcccaacaccttctatgtaggtgagtgcacatgtggccgcagacgcattcagggagggcttctaggaggaggcaggtcctagccttttggatggggacatggagggtgaaagacagtcgggcatggcgtgtccgggcagggaggcggccctggaaagggctctgggcacaagggttgagatggaggtgggcctgtggcctgctggcccttctggtctgagccagggcagggggtggcagctaggcctgggcagggactgtgtggagaccttgcttattttaagtgtggggttatttcgggggaggctccctgagaagggtggggctggatgcctgggccacacagagcagccgaggcagctggcgctgtggagcccgggagggagggagggatggagctcaagggatggaacccagtgaggggtggagacggggcaggggaggggtggagaggggtggagacgccccagaggcggtgtgactcagctgcccctgcaggcagctgcaccttgctgccttattaggctgcgtgtgggggactgggctgccctccctgcccccaggagcaggagcaggagtgatggaggaggaggaggggaggggcaaggccaggaggaggaggagggccatctcactgtgcagagagcagcacccttcctcctggtgcccctggcagggctggtgctggtggggctctgggagcatttgttgagatgcttctggccttgaaaggaggcccctgggatggctctgttgccctcacaggctgaggggtgggtgaggtgggcagcctgtgtgtccccagtcctcagggcttccctcagccggcaggtgcccccaggcctggagctgcagggccaggccccctgccagttacggaggctgcttggcttggttgctgaaccagggccccaggaggccgaaatagccccacacctgcgccgtcccacctctttgtccagtcaccccagggccaggtgagggccctggccacacagcgtgcccgttccttcttccccatgccccgctcatgggtcagagggccggtgctggggtccagatggtgtcaacagggatggtccctgtcctccccagagacagaagcctgtggcccacggagggtttctgggcccagccgatcctagggagggtcccatggccctgcccataggttcctggcctctctcggggccgtggtgccctcacaggtggtgtcaggaaggacgggaaaggctgcttgtcccaggggctcatgtggagaccaccccctgcacgcagctggggcgctcctgcctgtgtcctcagaagcactcggcttagctttgcccatgtgcctgggctgtgggtggcagagcccggccagcatcctccgatctccaagggtgcatctctactggaggcccctcctgggcctcttgctccccgcttcccagatcattaggatatttggggtccagaagggcctcccagccatcctgggccttgtcctccggggccaccagtccagccagtgacaaccacagcatccccggcctggaacgaggctgcccccagcacgttcctcgtactcctgtcc

SEQ ID NO: 63790 - DNA, 1026 bp, Homo sapiens
agcctgccgttgtgttggccacacgaccacaggacctgccacccccgacgtgggctctgcctgggcccccactggacagggaccccttggagctcctctggccaccaagtcctcgcccattccagaatcggccttctggagcctcttgctgtccctgatgcgggctgggccttgccaagggctttttttcctgcgccgggaacagggtggatttgctgggctcactcccctcagagacgctgcgggtgcggtgggttaggcccaagggcgttaagagaggaggctggggtggggctggggcctggcagggggtctggcagccctgggcctcccacctcctgtcaggaccaaaaaaggcaacgcgcctctcctgacctgtaccccggagtgaacccaaccttgcaacccaggagtgtcagggcctgaggggagggagacctggctcctgggtgccgtgcccgtaaggaggtggccacctgcagggcattcctggcagaggcttcatctggccaggtaggaggctgggtggccgagccccaaatctgggtgtgttctctgcctggcggtgggtcctgccccaggcaccttctcctctgggctggctgggcagggacaatgggcctggctgcgaggagggggcctgggctgccttctgcattgcctcggtgacgggagatggcccctgcctgctgagggataggggagtgggcaggcagtgagagacactgacagctgtcccgcgggtacagggccctgtctgggtggccaggcccatgtctcgggcccacagtgcgccccccacccttggacggcgccttctccctccccaggtgcatgctgcccagccagggagcgtgggggagttcgggagggctggcctacacgccctggtccagctgtcccaggtggggtgctgggcttcagccctcagcccagggcctaggaatccaacttgatcctccccacacagcagccaggttcaaatgcaggtcccgtaacggaagtgctgctgtgcagcccagattg

SEQ ID NO: 63791 - DNA, 2947 bp, Homo sapiens
gcctacagcctgccctctttcctccctctggccactgcccggctccagttcttcacctgcctggtcatcctgtttgcctgtgaggtggccgccggcatctggggctttgtcaacaaggaccaggtgagcctgggtgtgcagggacagggtggggtgggtgacgggggcaccctcctctcctgtcgcgggtgggggttgggctgactcatggcttgtgggagctctttgggctcttcctgggtcccacttgccaggaggatctccaggggctttatggaggaggcagcattggggctgagcaccaggccagcctcccgtgtcccagcactcccggggcagctgagagtgcagagtccttgtcctctggggtctagcctcgaagccaccctgcccagggagagcctgggaaaagtgcgtccgcctggggcggggcggggtgggggcaaggagggggaggttccccctgtgcatgtgaccgcacccctcccccagatcgccaaggatgtgaagcagttctatgaccaggccctacagcaggccgtggtggatgatgacgccaacaacgccaaggctgtggtgaagaccttccacgagacggtgcggccccggggggcgagggcggggagcagggccccgggaacccggcggggtgtgtctcgtcctggatgaatcctgcctacgcccagacctcaggagcaggaggtgcccttgggacctccaggacccctggtctcaactggtcctcgggtgggaacctagtgggccagggtggcccagggtgcggaaagctctgagcagcgcagctgaggaggaagaaggctggcccctggatgcattctgcagtggggagcgctgcgtacccctggccacctccccatgggttccctagagccaccgtccccctgggcacatccagggctgaccttgcacccctgctctctgcagcttgactgctgtggctccagcacactgactgctttgaccacctcagtgctcaagaacaatttgtgtccctcgggcagcaacatcatcagcaacctcttcaaggtgcgcgaggccggtggggccgcgcctgaccccccgcatgtcccgcccctgggtggggtcctaggggtgggcaggtcacacggcagccccacagggagcgaccacactgggtggcatggcccctgtcagggctgctctgctgggagggttggggtgggaccgcatctggcccacgaggaaggcaggcgccctgtgctgcgcattccgggtgaagaaggtggaggctctggggggtgggaactcacctgcacccccagctccacgtgtgcactcgtgggtgtggacgcccctgacagcctgtagctggcagggcctgcaggccatatagtgccctgtggaagtttcctgctgaggcctcagtggaagtcgtcatcagtgatgctttaggggtctagtgacaccaatgaccgtgatctcagtggaaaagggcacagtgtgtcccaggcatttcgcgtttatgttaaaacgggtggaagatagcaagccggcagaggccgggccgctgcacccgcctgttccgaggtgggtagggggtggggggctgttcccaggattcccctctacgctttctgtggtgaccacggattactgcgtgacaacgggaagccgggagccgaggcccggtccctgaccacgcgtgcctggccacccctgcaggaggactgccaccagaagatcgatgacctcttctccgggaagctgtacctcatcggcattgctgccatcgtggtcgctgtgatcatggtgagcgggcgggggcggagggcctgctctctgggctgccccttccgcggggccttgtgctgactgcgccccccaccaccctcctgcagatcttcgagatgatcctgagcatggtgctgtgctgtggcatccggaacagctccgtgtactgaggccccgcagctctggccacagggacctctgcagtgccccctaagtgacccggacacttccgagggggccatcaccgcctgtgtatataacgtttccggtattactctgctacacgtagcctttttacttttggggttttgtttttgttctgaactttcctgttaccttttcagggctgacgtcacatgtaggtggcgtgtatgagtggagacgggcctgggtcttggggactggagggcaggggtccttctgccctggggtcccagggtgctctgcctgctcagccaggcctctcctgggagccactcgcccagagactcagcttggccaacttggggggctgtgtccacccagcccgcccgtcctgtgggctgcacagctcaccttgttccctcctgccccggttcgagagccgagtctgtgggcactctctgccttcatgcacctgtcctttctaacacgtcgccttcaactgtaatcacaacatcctgactccgtcatttaataaagaaggaacatcaggcatgctaccaggcctgtgcagtccctcagtgccagtggtgtctgagacctaggggttggccggagggcaggggaatctgacatcggtggggcttggctctgtggactctgtggggtccagggtgagggtgggtgggtcgggatccctggtgttcaccaaaggagtcactctgtaaaatttggggagttatttattctgagccaaatatgagcaccggtggcctgtgacacagccccaggtcctgagaacttgtgcccaaggcggtctggctacttaattgtatacattttagggacataggacattgatcattacatctaagatgtacgttggtttagtcggaaaggtgggacgatttgaaggggagggactttcaggtcataggcggattaaaagatgttctgattaataattggttgattttatctaaagacctgaaatcaatagaatggactatctgggttaagaggagttgtggag

SEQ ID NO: 63792 - DNA, 1035 bp, Homo sapiens
aaacccaggctcaggtcggtcctgcccggcacctgtttcacacatgtacactccggtctgaggttggtcctctcccccaccccacccacctgcagttgagcagctgaacagaggccatgccggggcactccgaggcctgagacgaccacgcctgtgccgctgaggaccttcatcagggctccgtccacttggcccgcttggctgtccaatcacactccagtgtcaaccactggcacccagcagccaagagaggtgagaggagggcttggagggggaggcgggactccaccctgtgtgggacagttctgtcagttgaccctccacttgtccaggggcagtggatctgcagggggaactcattctcaatactgttcctcctgagaaacaaattttctgggctgttttggtttaggtgtggcgtggccctggggacgcatggctgaggcaggaacaggtgagccgtcccccagcgtggagggcgaacacgggacggagtatgacacgctgccttccgacacagtctccctcagtgactcggactctgacctcagcttgcccggtggtgctgaagtggaagcactgtccccgatggggctgcctggggaggaggattcaggtcctgatgagccgccctcacccccgtcaggcctcctcccagccacggtgcagccattccatctgagaggcatgagctccaccttctcccagcgcagccgtgacatctttgactgcctggagggggcggccagacgggctccatcctctgtggcccacaccagcatgagtgacaacggaggcttcaagcggcccctagcgccctcaggccggtctccagtggaaggcctgggcagggcccatcggagccctgcctcaccaagggtgcctccggtccccgactacgtggcacaccccgagcgctggaccaagtacagcctggaagatgtgaccgaggtcagcgagcagagcaatcaggccaccgccctggccttcctgggctcccagagcctggctgcccccactgactgcgtgtcctcc

SEQ ID NO: 63793 - DNA, 1051 bp, Homo sapiens
tgacccagcttggtatgtgctcccggcttcagctgcccctgcgtgatggagacaccctcccactcgccttgccacacttcccagcagtctctcgaagcactggccgcgtggaaacaaatccttcaaggggatttgagggtccagctgtcactcagtcatggccatggtgggggcacgttggggacacagcagagagtgaggcagccgtgggcctggccttgacaggcggatgtacagacacatcagggccgagactgaggcgtgggctctgggtggggagacagtgaccacttgcttggaggagggggcgctcaggtgggaggggcacagtgagaaggaggtaagctggtgctggcggggcaggcagggacccctcccagggctcacagcttccagcggacagcaggcacagggctgtggggatcagagcacaggcagaagtcacctgacagcaggttcccgaggcttcaggcctggaggagtgaggacggctgttgggttcttgattccagcagagggaggctgtgcagggttgcaggaaggacggttgggggcgcttcggggaggtacgagaagcaaaggtgtttgcagcccttggggccaggcggcgggaaggcctgtagacgccagagggcgctcgtgctacatgcaactcaggagctgctggcacccgccaaggagtgctgagcgcggggagcccaaaccacagccttggggaacccaggaggggccgggcgggtgcaggacccgcatgagggattccgagagcacgatgtttaaatgttgggggaaaaaatggatcaaagcgatgtgttcccagggagcccctgttttctcgtttcttttcgtacgcccagctttgcagtgccagaaagctgttatctcagcactgctaaggaaaccccagcgcggcctcggagggattaggcattctgctgaaccagggatatgcggtgggcctgaaaaagccatttcgggaggaatctggtctcggctggggtccggccggcaccgtgaacaccacgtgaacaccacgtcggaaatctgctgg

SEQ ID NO: 63794 - DNA, 4724 bp, Homo sapiens
gccacctgacccctgaggaaggttctgtcctggtgttttaggaaattaaaatgtgcacatcagttggctgcccagagtgggtgggacctgcacctgccagagaggaatgtgtgctttttggtttaatcctgggaacggcatatggggcccctataacaaggggcagagaaggcctccacagatttgtttttccaattcaagaggagaggttattgtctgctggcttgtgtgttggagactgtggggcgtgctttctccaccacagggaggcagtgaccagagctgccacctcttccctgttttcacctgtggtcgtagccaggtcaggcatctaggagagcatggaggggagctgggggtgggtgggtggggattcagctctttccagacacactggtgctgcctctttcaggccagggcttgagggcaagtgctgtgccctaacaggtcttgcttgtcacccccacctctgaagtgggtatttcacagcctgaactcacagctgcagagaaggttgagcccatggtgtacttgaaagggcagttcatctggatatccaggctctgcaggaggtaccggagcaatgccaggtgccctttgctgaactgcctagagtggctggccctggggacaaagagcacagcatcctggtgacaatgaagtcacactttcctaagacagtcctggtttttgatgctttaattctttggctgcctttgctttgtcaaggccaggatctgggcctaaattttcagggcagaacaaaacaattttgttttctaggaaagtgggaggtctgggatggcaaaggcagcctcgggcgtggcgactaccccagctggggacgctggctgccaagtctcaccctctcaagagaacaggaatcaaactcagcacagcatcctcctttctagtcagtggtcctgctcgatagggggatttgaattttatttttttaaaaatacaggcacagaaaaaagactagaaggaaacagatccaaatgttaactttgtctttgggtgattttcatttccttccttattgtgtctgtgttttctattttgcatgatacttttccaagtcaagaaacaataatttgtggaagtctcctgtatctgtgccttgctctctggcccacgaccttgcacatcttatcctagagttgccagaatatgtccctccacctggcctggagctgcccatgaggctacatagagctctcctatcatgaaagtctttgaggctttctgttcccaagaaattctggtctcacttcctctgccttctcatcgagccccagacccctccctgcccagattaggtcagcattcaagccccaagtccagcctatgacaaagctcaaagctccagcccatctctgctgccctctgccctcaagagactctcgccagtgtctgggcccttcctagtaacttcacccaaccactcaccccctgcccttcccctcctgattgattaaaatccggcctaatctcccaggtgtaacccaagccctcttccacaagctttccagggctccggagattgccccctcccctgtacggctgcagggcttatgtgtgcctggcgctcagcacgggaaccttgccttctgcctcacccatgtctccccagggtttggcacaggcgagttccctgagccagcctacttcacaaggatgaacagaagctctccctatcctttgcaagtagaagccccctccctggccccctcaagaaatctccccctctcagtggattcaccaaagccctgcggatcctgcactgtgaaggagaagccctccccaggggcatccggacagctgcagccaggccctgcgtgacattgctgagccgcagccccacagcctgtgccagctgcccatgcccggctcatagaccctgagccagagtggccccgccaccacctgtgtctccactcagaggcgagaagtaagggacatggatggaaagtgtaaaagccattcccacaacagctgccaggaacaaggcgaggaatggagtgaaaatgtatattcacagctggcacccagttccgcttaggaaaataccttgcttgagtggacacctgttgtttttgcctgccagcagccaggcctggcttctgggaacagcttctcaaatcttccttagggggctcttcctttcccactcctagtgtgcagtgtttaggtaccctctggccatccccaaaggggtccctgtggaccttgcctcagccatcggaggtacagctgcaggtccaaggatggcttgtaccccagctgaggccaataagaacctggccttagattctggcaggaatcctggaagagatgacctcgttctgctgggcttcctgagctgttgaatgcaagctggtggccattttgccccttttagaaagtagctgcctaaggatacagccatcccatggggccaatggatagagagcaagggaaagggagaacaaaagagggaacgggaagggagaaggggagtgcaagaggggagagtgagagcaagtgagcaagatcatctcagctctggggtccagctgtgtctgaaacagctgggtccagctgtgtgagccaaaaaatgtcccttttgtgcttaagcttgtttgagttggggttccatcatttgttaccaagagagtcttcaggaatgtgcatgacaaagttgggggtgaggtgtgagcctacggacatgggcctgggggcagtcaaggttacaaaatagctaaactggtctgcactgcccccactagttttcagggcagagggcagggagaaggcttgtgggaaagaagctggcctgaggccaaggccctggccctagccctgcaacagcacagggaactcttggaaagggatttcctaaggtgggacattggctttctactgctgtgatgcaagtcctcatctccccaaaccttcagtgagcctctctccacaccctgctgtatgaggatgtttgatgcaaattatggaacatgttggatctcacattggatcaaaggtgtgcagaatagatttgcctcaagcatgacagtgatgtgacacagtcaaagatgacttccggaatcctgagaagtcccagggaggatgctgggctttccaaaacctaagtttaggatactgaggaccacaccccacaccccaaacacttctccttagaataagtatagcaagcctcagcatacacaaatctcagagtgaacggaaatgtctctgcaggcccaagggtggggtctgagtagcgggggcgctgaggaagacaggcagtgacagagccaggacagggtcaaccctgagcgtgagtgagcccaggaaacggaaagagagcaacacagccacccacacaactaaaatcgacccacccgggtctccatgctgcaggaagtcactgtctaggtctcccaagacacattttcaggggaaggttccaggcagcaagagcagccctaggaaactttaatatacaatggaatctgggttaagcactatcttctccaagagttgagctcacaggacattccccagaaacctctggagaggtggggaggaaagtttctggaggtctttggatggagaaaacaaaaaagtggccttgattttcaagacaaaattacacaggaagaaaaaaatgtttttaatctaattaagagcgatcttttcaccttcatcacaacatcgcggaaatgtgccagttcttaacttcacacaataatcaaagcaattagtgagggagaagccttggaaaccggtgcagatgttctcagaatgtttaatggggaaatgagttgcaggcctcattctcagcatccggctccaggccctggctaccaaatccagacatctgctggggccccacccccaggccccgagggcgcgggcttgagaaacacaggtcccttcccaggccacctcccagccaggccagaactggggccgagaggctccccatagcttctcaaattggagcctggacacagtcagagccaccccagaactggggggaggctcaacatcaaaattatgttaacaactgatgtcaaaagtaatcaactcagcttggctcccccactgctgctggctgcaggagggctgtgagtaggaggagagcaagcggccccagagggaccctcggctatgaccccctcagcctgaacactacttcaagaaaagatgtggtggcatctgtctggtatggtcctgtgggctccattccaatgctaatggactcttaaggggcccaggaatcaaaatggtcaacacttgaggaatttccagtaatcagagaaaacgtatagaaatgaggatgatgcttacttaggaaatggcctattacaggaaacagagggccacgtggctaatgtcagtgagctgtgggagagacagagaccccaggtggggcaggcagatcagcaaatcttggaggacctgctatgtggcaggcactggagacatggaggtaaagaacacaatatccatgttctcagggacacactcatatgcccttagcattcacgttcttcacactgacagcttcttaatgcaagcccaccagatactttcataagcactacctctgacttcaggcacttgctgagctgcacacagggcaggccaaaaggaatggaaagtgagccaccaccggggcagcactcactagtgaaagataaataccccagctctctcagccgcttgtagaactctga

SEQ ID NO: 63795 - DNA, 3186 bp, Homo sapiens
aataccacccagcaataaaaagaaattaactaatgatttatgcaacaacatggatgaatctcaaatgcattttgctaagcagtgaaagaagccagatgcaaaagaatacatattataggatcccatttataggacattctagaaaaacaaaactacagggacataaaacagatcaatagctgccagtggttaggggagaagtacttgacttcaaaagactcaccccagggtatttttaggggtatggaacttctgtgaatgatactggattgtggacacatgactccagacatctgtcaaaacccacagaactgaatctcaaagagtggattttactgtatgcaaatttaaaaaattaacccggatgttggaggaccctacgatgaaaagcagactatgatgagcgtgttacaaacaaatgacatagcagtgaaaggaaaggaggaggaggagctggcatatgttgctttcaaaaacactgttttgactggacactctatggttaaagcaaaagtctgtcctaaacactctaatctagtaggtaaatttgcttcacatagggtactacgtgtacaatagggttacacaaataagtaaatgaactgtaggtaatgggagccaggtttctagctgtcagagaaaaagctataaataagttgtgggggagggggcaaggatgaactctggtcagaaatgtcagtatgaactcatggttagctttatatagatacagatatgtaaagatgtatgtgtactcaggttacatacatacatatatttcctagctctgtccactgagaggagactgaagcaatgataccctagtagccacgagcataccccgtgcctagatccaggttttctattcattctccagggagccagggctctctggatgaatggatgattctagggctagggtagggaaaataaaagatgagcctgaagtattgtcaagtgctagaaaagaaatgcttaaaaataaatgaaaaggatggcggggggcacatcaaaaggacacatgaacccaccagtggccacagcttgaacaatttgagcaacaaaataaataatattggactataactcaaaaaataaatactcccaaatccacactgataaaattaaataaacaattggaggagagggacaaatcttccttataaaggaattccaaataaaaaatgtagaaggaatgaggaaaatagaagtacatcacggtaatatttgctgcaggaaaacgatccatgaatgaatgctgaaattagttagtgaaactcagaaacttcacagtttcttccttgaaatgtattttaattgctgtggtagttttaacatatttgcagattttttttgatactctcctgcaggaggtagagttgaacccctcccttccccaccttgagtgtgggctatacttagtgactcgcttctaaagactaagctatggaaagggaaaaacagctattcacttacagtggaggagcctggccgacaccactttaaacgagtggctcaaggttaatattaccagtgataaaccatgttgatgtcatgttccacaatgaggaaagcatctcacctcactggcctccttcccctaaacctataaccctggtctagtcctgagaaaacaccagacaaatccaaactgagggacaatgacacctgactggtattcttcaaaagtgtcaagttaatgaagaacaagactgagaagcccgtcaccgatcagagatgacaataaatgtaatgatcgatcctagatgggatcttggaacagaaaaaggacattagtagttaaactggggaaatccaaataaatttataactctagcttaatagtgtaccaatgttaattttttagttttggtcaatgtaccatggttatataagatgctaacattaggggaagctggtgaaagggatgtgggtactcggtactatttttgtttctcttctgtaaataaaaaatgtgaggtaacaagagaaaacagaacctgtatacaatagcacaaaagaatattaattatctaactaagtatatgcaagaactctggagaaaattgtaaaactttagtaagagacaatgaagaagatataaatggagaaatatgccttcattccaatgactagaagactcaatactgaaaagattatctcaaaatctgaataaatctctccaaatcttaataaaaatctcaaggcttctgtgtgagaactttggcaagctgattctaactgcgacttggaagtgcaaaaagccaagaattggcaatattcttgaagaagaacaaggtgggagaacttgctgtaccaaacatcagtacttcttccaaggcagtggtcattagggcaatgtggtattgacacagggagagacaaataggccaatgggacaggattgagcattgggaaacagcccacacaaatatggaagcttgctgtgtatcagaggtggcctgcacatcctgggaagagcatggacttttcaatcaaatgttcaggagcagttggatacccacactggaaaaacattaagttggacccttaattacctcacatcatataccaaaaattcattcttgtcattctaggggattgaagacctaactatgaaaagcataactataaaggtcacatgactgaatatagaagaatatcttaatgacatcagcattaggatggttttttttaaaagaagcaataaccatgagagagaagactgagtaatttgacattagagttaagacccaatcatcaaaatacaccttaaagagtgaaaagacagtgcccacaaaatgcaaaggactcctacaaatcaataggaaaaatataaatgacttaatagaaaatgggcaatagacaaagtagcacatcacaaaagaggaatccaaaaggctgatgagcatgtggaaaggtgttgcgcctgactagcaatcagggaaatgtaaataaactcaggagctcatggcccgtgggggcgagtggcagacttccagcaggaaaccacacagacattacttagtcacagccaggagaagggctcagagtgaaagggctctgtgcccatgacatccttagagagaccagggaaggacctgtaaggcttgaagaatgtgcagatttggagacccacaggtctgggacctggcagaagcatgttactgcccccattttagagat

SEQ ID NO: 63796 - DNA, 1048 bp, Homo sapiens
ccccactctctgttgacactatcagtatttgctcttggcttatatttgtcttcatttaaatattttattgcaaaaggattaagtactcatctgtgagaagtggaataattcaaagattcacaatggctttcctcccccaaggtcatcagtgttaactgccaactagatccctagcccaccctctctgctcatccgagcagcagatgccaggtgggagttgcttttatgcacatgggatgtcactgtgactctgttcctgtcactctgtaacataagctcatttcatttttctctaggtatataggcatggatttaattattttagtcattacataatagtccacagtttagattggccacagctaaccattctgtatatcatggacattcaggctcttatagttttaagctgcttaattattcagactatgatgccatattcatctttattcttaaaagctgacatactggagcagggtgagagggtgtgtccttagtaattttaataaatgttgctagattgctttcccaagaagttgtagcaattcaggctcccccagctttcccacatccatgcctgaatgaagtgttgaatgaagcccgaatgaaggttgtcagcaccttttgcagggactatcaagcatggatgaaaactgaggcattgctgttatttccatctgtgttgaataccttttatgggcttggcatctgtttgggtttcctcttgcagaattgcctgttcatgtcctttgctcacttttgcttatcactttgtaggaattttctatacattacagacattaactccttgttatatgaggcatagatagcttccccagtctgttttttcacctgaattatgttgcttttatcctagaaaatgttttatgtttttaaagtgatacatcttttgctttataaaaaaggaaggttttcccacatcagcgtaatacaattctctcttaaatttattcctaatttcactatttgaatgtgttgtatgtatacatatgtatgtgtgtaaaagttttaatgcatttagtatcta

SEQ ID NO: 63797 - DNA, 5023 bp, Homo sapiens
gggtccaggagaaagttgaagacatggaaattctaattaacgcacacggggctgtttttgctcaaggatttgcgaagctgtcatgtcacaagaggccaggcaagcacatgcttgccagggaggtgctcacagtcacctggtgggggtctctgcagctttccctctgccttctttccaccccctctgcccagcctcgggggtcctggtcctcccccatgcccatctcaatgggccgggtgctccctgagtgtccctctggagagtgggactgagggcggtatctgttaacctcgagctggggcttgcccatctaagatgccaaaacagaagagacaggggcccttcagagaaaccacatgactgggctgggcagagccataggctgcagggcttatgggcctgtcctcttgggccgtctatctcaggtatccatgtgcaaccaatggggcagacgtgtgaattccaggccagtcctggctggcttggcagttggggatgcagtgtgagggaggatttcacaaaaatgatttcagcctcccagggttgcttggagaagctcacccaggccacacctgcacacagcccccaagttcagagccgcagatcctcaggcccctagccctgtgcctcagcactggcacaatgtgtctgcagtccttgcttcatcttaggcagggttgagtgagcagcaatcctagggcttctccatgcctggggctttgggggttctggggaggaagagaccaagagggctatacatgcccttctccctcctggcaccattcgaaaggcttagggaactggtactgagggctttgagagccaaaggaggacacagccgtacagcctaagtgtgtcctggggggtttactgagcagacgttggaaagatgaatggaaatctggtggctgcagatgggtgacaagggcattctagatggcaggttaccacacgcaaggcacagggatgcacacaggcatggcaccgtccccacccactgtcgtgccagtgacccttggtgagcagaggatagtgagtgggtcagaatcccaggaactcatcctggctcttggggtacagggctcctcttgtcatgggggtgctccccaactgcccatgcaggcctacagtctctacttcccacctttctctcagaagccctgtcatatggttctgggtgggagacacaggctcagggagtttgaggctggcagggactctcttgtgccccattcaacctaggaagacagcttctgcctgaaaggtgtgttcgaggctgagtcctggccgcccagagctggttgagggtcctgaggctgagcagtagggcccacctataggctggggtgcagcgacgccactctttatctcctgggtaccccgtgcctcagcttgtcatgactccctagcttgcatcaggcctgctcaccccccaccccacctctggctaacaggccccggaaagaggagcttcgcccagccccagggaccttcccgtaatcaaggctatagtgacctcacctctctggggccctgcgggcggggagagctcgagatggaaacaaaatgtgtctttatttatgtttttaatttgaattctggaactggcccagcatggtaatacatttaacatcagtagaatgctgaagaaaaatggaaatgttttttggtaactgcctcccacccactctgccccctgtgagaccccagcacacatccctgtccctcacacacaccagggcgtgtgcctctcttcccagttcagggtccatggggccaggctgcccacaggagcttcgctgcatccctgagcagctggagccgaatttaattatgggcatcactgggcgggctgtgcaggaggtggaggaatgcagccccaatgcgggcagaagacctgcacggcccccacacccctgccgccaggcggtttgggccctgaggaaacagggtgcccactgctgccagccttctcccccagatggagtggggcctctacccagcctgtatcccagaggagcctgggttcctaggccctgacactgtacgtgcccactctccccttcaggcctctctggagggaccgtaccctgacttctgaggatgcaggaacccagctcccctgaagcctcagccctgagtcttccctgaccagaacacaatgcctcaaggtggcccctttgcagcaacctccttgtttttccctctcccagtcccctcttcagatccctcaccccaagccccatgcctgggctccttcctgccttcccaggctggctcatatctagcagccacttttggaacagcctgctctgagagaggccttggtaagttacagggcagggacctggttgggtaatgactggagtctctgacctgcctgggcccacttatcactggaggccatgggagtgccaacctgaaaaggctgcaggatcttgcagaatggtaatgtgccagacccaaagtgggcagagagcttggggatggatgttcaggtctctcaggccctgtcatcctggagtggaacaagaaacagcccagtgtcctagatgacacagccacactggcttggggtcacccttgggcaggtgggtaacctctggctccagggagcttggcatgtgctgataccagcactggcagccctcacccccatagtggtgatttactgggcagctgcaagtttggctgtgatccacataagtgcctggtctctcaccaccttcacctgcaggggccttgcaagacccaagagttggtaaggcctggctgcccagctagatggactgtgggtgatggccctctcctcccagtaggactttttgcatgtctggatgctggtccgtgaccaagagaaccaaggtgagcgagagctccaacaggagaagcaagcagccagaaggatgagaagggacagtcccctctctgaggggacagccaagaggcaatacaggcactgccacctgtattgcacacaacatgagccactaaactaacactgatcactttggaggtccatcatatccaggacttggtacaggccttggccacagtgtaagccatcattctgccttctggtgctgacctgtacctgggcagcccatctggctaccagcctgctcacacctctgctcctgcctttttacccagccaggaggggcccagaagctcagagccctattctcagggtgtccatgactagtcacccctgctttccagtgatctgctggctcccttggagcctcttcacaccctacccaccatgaggtactgccaacctctctgtgaactgggggggcctggaaagacagtgggcaggtcctgtctgatcataattaccccttaagatagccactccttccctggaggtggcctcattctggctacccaaccctgccagttctctggttacacctgcagcccccagcaccatgggtcccgatttcctcagtgatttgcaaggccaggccttgcacctggctggctgcaaaggcaggaggcccagggcctcactacgacaaagacacacatggctcaggacaacctcctgacccccagagagtccaaagaacaaaacaccctttagaaaaatgttggtagagagaaggagagtttccacaagtgaccctcagaagggccgcgagtgtcactcacagatcttgacacaaagacatttatcaaggggaatccccaacgggttagcagccagaatgggactgtggccagaatggacttgggtgccccactgaccccgctgcacggctgtcaccgctgggcaccccagcggggagtcacatgtcgcaggggaatcacaccgtggccgggcaccggggattggcctggccatgccgtgacggcgggggaggacgggcatgcatcccaggccagctgtgcctcaggggaaggccaactggaaggcgtggaaaatcagccatttcctccacctgaaggagcccctgaggacagcagcagcaactggcagactgcacccggcatctgccccatggctttggccagggttccatggggaaatgctaaaaaacaaagtcgtctcttttttggggggcaggggagggggctgggggagagaaaaacaatctcagactctcaaagcatgaaaacaagtggaaaatgatcagtctggttttccataagtcaaaacaagaggatcatgttcccaggctcagtgggaagtgcccttgctctcctctcttgcctggtgcctccgtgttggggccaggcagacggcaagtggtgggcactaggcgagtagatagcactctggccagagagcaaggcttccccagcaccaagtctgactccttgagctccagtcccctccagcccagcccttcacgcacatgtaggcactcactgtgagatgtgggtgatgggtgtcagcagagtctccccttccaggtccaggtcctcggcgaagctgttggttctcatgaaatggggcatgctcacttccagcagtgttgggctcttccttactgaggagaaagtgtggggacagcacgttaggcctcccacccaacctgccagtgctgtggagccaggcctgtgagctcccagggccaggtgaggagtggagcttgtgcctggaagctccagccctgacaatcagttttatagttgggtgttggggtgggtgggtgtttaagatggccccaaagtgcctgacacctcagtgtctgaggagaataaaggccagtgaatcatcttcggagtggtaactgtgcctggggctgtgctcaggtgtccaagactctccccacctcaggttctgggcctcttcccatgttcacaactgacacttgggtcaagaataaaacagaggtgacaggcacaggcctggtaagggacaacagctcccaccaccatacattgtcacactcatacattgacagagtagtgggtcaggaaagatggggtgataggacctctgacccatgaggaatggcaagcctgggaggtgggggcagccacagaactccttcctcaaaacacgatgcta

SEQ ID NO: 63798 - DNA, 4822 bp, Homo sapiens
cccagcagggcaccacaggacactgctgtggcaaggtttatacttagggtgcagtgcagtctgatcttgtataaatgctcagtgccaaagacttaggagataagtcaggcagagtcaaaattaacctttgaaaaatcccttgaattggccctaaaaataatccctttctcagatctttgtgtatatcccctgctgggttgctcttctgcctgctaaagtgggagaatctctgggtgcacatccagagtaccctgggagaggcatgccaggtgttcctgtacctttttcaggatattcccagtgtcatcttcagagggagcctctgaggctgcagccacacatgggaaaagattacttatggagaagatcagaggctaaggggctggggatggtggggacatcggattttgaggtcagacctggactcctgtctacctctgtctctctaccttttatttttctttccttttctcctaacaaggccctatttctaagatggcacctcaggcctcccatgggaccaaccaggcctgacagactaactgctcagactaactgccagacttcctcctgctagccagtcactaccaaggatgtgtgcctcagatacagcccctgcccaggacacctacgttgtccctaacagggcccacatatctaaagcatgaatgcctagccaggggctctggggcaccataagaaggcatgaagctgggcctgccaatttgcatcctgggagggcaggtcagccttgtccaggcaatccaggaggcttcccagtggcccactggccagtgaggacctttgacctccttggctggtggcaccaggtttatgatgcacatagaggctgaacttgaagaattcttattgcagagggcagccacaagagccactggccagtgcccagataatatctgcagactgttccctcctgctccatgggccacagaatccctttgtcttgttactgctacactgccttcctaccaatcttcagggttcatcctggcctctgccatgcatatccaggctcccccagagattgtgtgtctgggaatgagccctggcttctgctcctatctcccagtgatactggcaagtccctatccttcttgaggcttcaatttccccttctgtgagctgggaggacaggcccactagatgctctctgagggacctaccaaggatgtgggctgtgtgtctcagccaacagcagtatctcctaaccccaacacaagaaatacacatagtaggtgtctggttaatgctcttggaatttcagcctatactaaccatctgaaagccactgagtctgaactctgctaccatatttgagattatctctccattgggcacctatgggttgcctagagacaagctaccatggtcctcttccctcgcccgtcatgtgcagggtcaaaggcaggtgagctacacagctcgccctgctcttcactctgctttaatgtgggtgcttgccttggcagatgggcccgacagtgataagaacaaatgacagatgcatactggggcacctgtgactgccatgagacacagtccactgattctgcctccaaccccctccccagagcagaatagtgagtgctaggtttccgcctgtacctccacgggaccccaacagctcctgaaccccattccgagatttgaggttgtgacttggggacctctagacttcccttccctccacctgactccagactgtcctggagcttgggactctcaggcctctaggcacatcttattaaggacagcagctgacagccatatgttgtgaccccatttgtatcccatggtaactcatgacctggcagtctcaaaagctctcaggccaaataaggaatgtccccacaggatctcccatcacaaagagacattctatgctggctaatattttcaggcatttccccgagtcaggtatgtggctggatgcctaacaccatctcctcaaggccttacactaatactgtgagatatactcccaatgtatacaagaggaaactgaggctgatagagattaggtgactgccccagtgtcctgtgggcaggatgaaatgacccaagctggccagggctccctgacagaccttgtccctggattcagcgaacatacatcaaaccattagctgacaaggaatgaatctgacaagctgttcatgaccaccacactgaaaactacagggcaaggtaaaagatatgaaagtcaacctaaataaacaagggacacatgatgccatgtttcaggagccccaaaactataaggatacccattctcccatgcccatctagaggctgctgcgcctagaggaggctttccatggcaactggcatatgtatggtgaggagaaaccctgcaaagacagcaaagccagtgatggggaaggagaagcagccagagccagcaggaccagctgtcaaaacctgttagcaaactacagtgagaaggaagcaaggtcctggccacaaagaacaacttgaatctgaccagtggcacccaatagggtccagaaacagagccacacgtagccagtgagctgattgtaaagacactgatacggcagggtagttgggagaggacgggccttcccatgccgggtgctgagctagactggatatccaagtaggggaagagtggaccttgacctcggcctcacattggacacaaaaatcaatcccagatggagtgcagatctacatgggaaaggtgagctaataaagctttagaataaaccagaatatctttatgaccttggagtagtcaaagtttcttaaataggacacaaacagccctatccagagaggaaatgtttgattaactggaccacatgaaaattaagaccttctgttcatcaaaagacaccatcaagagaggaagaaggcagcctgcagagggggaggcgatatttgcaatgtgtgtgtctgtgagagagtgtgagtgtgtgtatctctctctctgacaaatgactccagaatatctaaagatatataggaccataaataaacataaaacaggcagaagatgtaggcaatttatacagaatgatgtatctgactaaatgataacatggaaagggactcaacttcattagtcaacaggttactgcaaattaaaatcaccatttgatgctgctagacattcaccatcatggctgaaaaggaaacgacggaaaatgccaagtgttaggatgtggagcagccagaatgctgcctgtgggaatgaaaattggaatgactcctttggtagactgctgggtagtattcactaagagtaaacatatgcccacccaggaccctgcagctccacacataggcatatattccccagaaacgcaacctgatgctcaccaaaagcatgtacagaatattcttaaacagcaacctacaccagaaactgcctgctggccacaggtggtagaatggatgaatgatgtaggccatgcacacaatggagcaccagtcagcaaggagcatgagggagcactctcccttcagccccatagagaggctgccagacatcaaattgagtgagggacattggacacaaaggtgtatgagttgcatcattcccaccgcataaagttcaaatgtgggcaaagctggtccttgctgctagcagttaggcctgtggttaatctcaaggtcagtgacaggaaatgggagcctgagaggctttctgggggttctgttgcttcctccgggtgctgcacacatgggtcccagggactgaagatgcctcaagctgcgcacttgagacctgtgtactaatctgtgtgcatgcacattaccctttaactaaaagtttaacaccaccaccctataccagggtagcccaggtgagcctaattaggtggatagccctggccttcagggccgctaggcccagccccatcccactccctcacttaaggggacacggcttccagacttcctgactaggtcacctccgtgcttcagcctccagaggctctgcagttcaatctcccctttcaggtatcagcagagcacacaagagatctatatgggatgtgccccccgcccaaccccgccccgaccccctgccccaactgccagaagtgtctccatgacaatatcagtgcagttgtgaagtcctttgccctccagccacctctgtggcgtgaatgttctctctgtcacatcctccaacaccatctgcttggctgaggacctgagcagcatcatggctgggagttcacaagtggagagggctgagcctggccagagtgcactggggcagggtgatttggatggcctttcccttgcagaggaaatgagaagcctcactgctttcttctgggccatccacctagacagtgcggccctctccccatagcagcagccctaggccagccgcttcttcctcacgtgctcagacggaggaagtgaagtttggaaaggttagggggccacggggggccgccacagctgggctgatggcaggctggaagccagattgagggcatctgattcccaatcccatctctttcccactgagccattacgcctcggttttaatttaattagaagaacatttaatccccccgtgcatttcagagacgggtttgagcctggctggggctatgtggggctctgacggggatcctatgactcatgcagccctgtacagccctcccgggcgggcccccagagggcttccttggcatctcgtgcagacagaggtggtctggagctttgcagaagacaggacactggtctagaaagacaaaatggtctcatctgttcttgacaagcccctcactcatccttctggacactggttccc

SEQ ID NO: 63799 - DNA, 3476 bp, Homo sapiens
tctctggttcatgtcactctgtggagcaggggctgctccagcacaaagaggtttttgacagggaaaggcagagccagagtcagggcaggccctgggcgggctcctagagagcccaaccaccctctaataaggggtgctctccaccctatctgaggagcaattgggatctcctaggaagtgaaactgttacgtatgtcttattacagaatttccagtggagtgattctggaagaaatgtgtatggcatgttgtgactgctatgtctcatgaaatatttacgtttttatgtaacttttttccattttcagatcatcttttattttaacgcaaaatgacaatatatttttcaattaatttgcccaatatctgtgtttaaatgttttctaatgcacacacgtgttttaaactcattaaaaaaatatgacttagatcccatcccactttcatgttttatattgccaaaactctgcttttgggagaggtgagttatcttcacttctgaaacagtactgcttgggagctggtttggccctggctattctggggaaatgacacaatattgacctagaggggccctaatctttccccgctagagcactacctctaatagggtgaaggatgggagaaagaggctagtgaacccaccttcaggtctgtccactcaggacatgcccacactagcctctccaggggctctgcccttggcatccccgtcccccacctgggctctggcagagaagtcaggcgggaagaagccggctgagtgcccgccactgtaagaggaaacgaagagaaacagctccagtcagccccagaagcgaggcctggaaaaactctgcagctggagctaacacaaaggacttttcagaccctgcagccaaggtgcccagtgagcttttttttttttttttttttttttttttaaaaaacagctattagggtgacaagcctttccaaaggccagcagttggcgagagtttccaggaagctggtctggcactgggctgggattggagcaactttaacgagttaagttcagaaggaaggagtcatcaggaaaggtttaaggttcaacaaacttttcaaattattttgcaaaaagttctggctttccaattcaaaggcatgtttcgctgtgactgttttaagccagagcctatttaaaaggcaacacaactagcatgcttcagattcactcactcgaggtatttgtctaaatcctccgaatgggctttgcaagtgccatctagtgcctagtaacactggggccatcttacacatctcgacaggcagccctcctccccacgtgcctccccccagcctctgtggtcgtgtgcgcgcgggcgcgcacacacacacgcacgcatgcaccttccctaagcaggaagctgctctttgccaagagcgaatggaattcagatttccagagggtgtccttggcctccagctctacggctgcatgatgaagaaaggtcctagtgtgtgtgccgggggctgggagagaggggcctccagctctgctcacatctatctgggccccaagaaaaacccacaactggctgtgctctccccagccacacccagccttggtcacattccttcccttcctgagcccacactgggtggccccggcaaaccagcttccacacctccctccccaccggcagggagacctagcccaagcccccatggggcagccagcaagtacaaatgaggggctgcaccccaggcccaaagagccagaaagcacggagggccctccccccaccccacccccaatgctgggcatccccttgtggctgctgtcactcatggggaaagagacacactcccttgtctagcacccggtgagctgagctcccatcccttcctgtgcctgctttcaggaagtccctcttcatatccaaccttgactctcctggctgtggtgcttgtgggcctgggattgaagggccatcactgccctttgcaccagagcttcccaacataccagcaagaagggactgtaccccttcccctgtccagtctgggccttccaagccctgagattcagcaacctcaggaattaaacatttataggaaaacacctatgcagacaagggacatgagtcagggtggtcatcagcagtagcaaggtgggtaggctggtcacgtttagcttctctttagcccaagtaatagggtcttccacctgcatggccagggaggggataggctgagagcaatctttctacaggctgtcagcatcaacaagtggttgtgatgagcaggagtctgtatggcttttcaggtgttccggctcaaggaggcccaacaccaagttggaacctccaggcctggtgcctaggcagaaggtgggctaaacaaaggccaaggggagctctgctctgtcacttccctttgtttgctaatgagactgtttccaaaagctggcctggtagcctgtgggattgtttctctcaagatttcttctaggggagaaggtggctgaggctttgcagtctgcatcacccagtccccagaatctacaggggactcagcttgcctagtcacagttcggcttttggccttggctccagggcccattctgatcctcgtgcttgggtcagggatggtcagcacccctgccctgatgctgcctgctggggtctcctgctgagtaccgtgaaggcctactgtggcctgagaagccaacttcactgtcccttttggccagccctagaccctatatttgttcaagtaacacattgattcactggcttctcctttaggcaaggcctgcaggggactcagctggggttcatgattccttgccacctgtggtgggcctgcatggccagcccaaggcctcaagtgccacatactgctcccctgacagtcaggtggctagggtatgacactcaagaaaatgcccaggcagaacccagagttggggtcacttggtccagcccttctgaaggggactggttggatctgttgcggggaggagacaggccatgctggaccagcaaaaaagcatagaacttggagtctggaacctgacatctggccttggctctgccatcagctggctgtgtccactgggcaaggtcctatcatatctggtctcagtgcttccatttacccagagtccttccatcacctgacacctacagggatgctttcccaatcaaaattcaggccatgtggtttgataaggccaccttccaatgtggaagacaggctggtaatggagaggcctgggagcacagagctcctaggcactgccatggaatgtggggaccttagggaaggatatctcaattgaagctcttcagagcccctggggtggactgttctgtactctcatcccctaacccataccagcctgagctcaatcatatcagcctgtgaaggctgccccaccacactgcttctgcacccaccacaccaggcccccttgagctcccacctggagcccacacacccagctggtg

SEQ ID NO: 63800 - DNA, 4855 bp, Homo sapiens
gagcccacatttcactaatgtccacatctgaggaggctttcataataaaagaacacatacctatttcacctatgatggtcagtgcaatcttgaaaacactagtaaatagtgtccatcagctttaaaaatacaaacccaaattgggtcataccaaaatgcaaggatacacacaataacctgggtgaatcttcagggaattgtgctgagtgaaaagagccgatcccaaaaaggtgatttgctatgtggttccatttatataattttcttggaatgataaagaaatgaagaataggttagtagttgtcaggggctaaggacagggtagggtgggagggaattgggggtagctataaaagggggacatgagggattcttgaagagttagaaatgtcctgtagtgagactatcaatgcaatatcctggtcagaatattgtactacagttttgcaagatgttactatcgggggagactaggtaaaggagtatgtaagatttctctgtgttgtttcttagaactgcatgagaaatgtacaattatctcaaaataaaaatttattttaaaaaatgcccaaattaaaaaaaaatcagtagtcctcctaaaaatacccagaaatgaattttagaatgtccaaaatccatacaaagatctaaaaaaatatggaaggatgttgcaatggatttgaacatgtgggtaaactgcttctatttgtggctggaaagactttttttttgaggtggggaaggcaattcttcatcagttaatctaaattgaatgaagtttcaataacaaatgccaatgggatatgaatatacacacagatagacaactttttttttttttttttttttaattaggcaagctgaggccaggtgcattggctcacgcccgtaatcccagcactttaggaggctgaggcgggcagatcacttgaggtcaggagtttgagaccagcctggccaacatggtgaaaccctgtctctaataaaaaaaaaaattagccagtcatggtggcagatgtctgtagtcccagctactagggaggctaaggcaggagaattgcttgaacccaggaggtagaggttgcagtaagccgagactgtgccactgcattcccgcctaggtgacaaagtgagactctgcctcaaaaaaaataaaaataaaaaaaaaattaggcgtgctagttctaagtttatatgaaaaaaatgcatgtcctataaaattcagaagtagcagcagtctggccccttgtgctcctctagccctcaactggcctaacaggccctagtgtgcagcagggactattttcccatcatcactgtccacagcatctggacaagaatacagagaacggctgatttaaaaaaaatctaatctgggatcctatgcatcctaaataatcttatgaggatgcacttgtattttttctgatgctgatactattcattccaactcgcctccccatcagctttgtcaggcactgtgaattgcatggtacacatgattacaatggatggaatggccatcatgaggtatagcaatacatttaagtaacactgtgtcactactataggacaggcacttttctgcatactttatattattaatttgtgtaatcctcctaacaaccctctgaggaaggtactcttatgattcccattttacaaataaagaaactgagactaagtgactcactcaaggtgtagcaggtagaaagtagtggaattaggatatgagttcagactccagaccctgttattagcccctgtctttggctatggattagtaaaggagagcacagccaagggtgggacaggcagctgtagtcctctggaccagcttcacatggatggggctgcattgttacaggtggcctaactcagacatggaaactgagtcgctgctgcccaactcatgccatgaaaccattttggcctgcacagcttataacagcactctagctctagctatgacactttatggtgttagtgggtttttttggtggttggtatggaggaggggctgggctacaagttttagattatgtttcttattgcgggtttttaaaaattcttgaattaggcctatttgctcttttgttctctattgagttagcaaattcagtttttccaagatgccctgaaagtatgatcatacatgtatacgaaatggtccttgggtccagctggcaactcctgtgcacccccgacctggattctgccttccttgaagtgagccttggaagaaacaagtgctcatgctccctgacattattagctgccacgatgaagcctcagtcccaaacaccccagcttcctgtctaactcaagagctaatcctgtgtttaaatcttaagagtgtttagatcttaggccatgccatgaattcccctggttgactgcatttgtgaaaatgagcttcccattattggctcttaagtaatggagatgagggggagtcctgctacacagataagtgcatcataaagttacataattaaaataactgagctctggcctatcaacaggcccatcagcagtccagaatagagtctagaaatggacacaaattaaatgagagtttgaaatatgataaaggtagcagttgaaattagtagagagatgatgatgtactcaaataaatagtgttggacaactggacaaatatatgggaaaccaaattggatttaattactctgtcaaaatcccgataaagcaaggatttaaatgtaaaaaatgaaataaaaaatgatagaagaaaacatggaagaatttattaaaacaatttcaggatgagaggttatttcagaatttaagataaggacctcaaaccataaaagactgacacagctgactatgtgaaattaaaaaaattctgccaccagaaaaatattatagaaaaagccaaaacacctaaggaaaatgaggataaaatattttcaatgaatatgacaaagcaagtttctacaaatcagtaagacaaggtattttacaaagtccaaagggtatgaagaaatagttcacaagaaagaaaaacaaatgattttaagcatttggaaagataaaaacctcatttccaacaaaagaaatgtaaattaaagctccagtgtaccatttctcatctatgaaatgaatgaagataaaaacctgagtatacacttggtaagggtgggggaagaaagtgcatttgtgcagtcaaagtgatgtaaatggtacagcccttatttggcagtatctatcacaacataaatgaacattttaatcctgctggaaatggggggaaagggaggatctcttaaagtaaatccactgaaaacggagaccaaaattttacaatagagatatttgattgggaagttaatttgaaaaataacagtagttaaaatattattttatctcatatgcaataacagttgttagagttacaattatgtacacgttttagaaaaaaacaaatccagaggggattttggtttgtcttttgtaaagcattatatggtaacatctgagggcatcttttatacttggcagaggatgttggcagcacttccacagagaggatcattttttgtagaagtatggcatggtttcactgcttgaccaagaggccacctgcatcaattatcatctcccctgctgtcctctgaaatgcttatctaggcatcgatcttggtttcctcttcaactgattaactaactggtctactctgcccagtctctatttgagaaatcatttgacatcattttctttaacttgatgaaatctcctattttgacaagatttacagttcctctttataagttcctctttactttgtgtgtgctttatattgtctttggttgacaagagacagccaaagaggtcagtcagcagagatacaagtagggataagatggatagggagaaacaacagtgttcaatagggagggatgtttcagggaaactaatttcataagtggtcatttcagtagtgaatatatttgaatggttaatggctgctgttttttagctgccctacatatccatcaacagaggatctgttccataaatcatggcacaatgaaactctgcagctgttaatgaaaaggagatttgctagatgtcttaatacagatccatctccagaacataccagtgtcttccttttaagtggtgcacactggggctgaacacttactaagaaatgaaagggctccccagtcaaagctgacaggtgtcattacaacatgacccctgtggtagatcccagcacaatacactggccatcactccattctcttcaaatgtcctagggttgcttcatacagcagaccatcgtacccaaagccactatgcatatgacttggttatctcctgccaggctgtagtccagttagtgctcccttggaaatactcaagaccttaatgaactatctatctgtgaatctgtgaagctacccatttcttagaggcctctttggagagctggctgttgaatacccagtatgatggtccttagccttcttagacctttcctgtaccactacctctatgccttttgccaagtccaagtgttcaccagaaatggaactgatgccagaaagactacagctaacaatctgagcagaacagtgagcatgtcctatctgggaaaagcccagcccattgggctaaatctctagctgaacacagagactatgctccttccaattatactggaagcccaaccatgagaaaacagcacttcaactacactgttcagagccatcacctgttcacacgtgtgtctgtatacatgtaaacacacattttgcaataaaaatgcttctcagatgtactgcaccataataaatcagcattgtatgtacagctcaaaaa

SEQ ID NO: 63801 - DNA, 3856 bp, Homo sapiens
ggaatctgtaattctcacaggctgtcccatacattttaaatccaggaaatgtgctcacccatgagacagggatggcaagaagatatgaatgaaaagcaaccagtccgtaaaattggaagccatttcactccttaccaggtacaaagataacatgctgcatggatcagggacacaaacttacctaccttatgatgtagtgaaagaatctaaaacttttgtctcagcagactccctggaggaagccaataacaggaggccttgactaggagacctcaagccttggaatgtgcccagaccagtggggagggaaggctgggaggcagtcctcccttaccccttttctcccaggcagacctaccctgggttctctccaggcccctccgcctgagcaagtgctcagttggccactagctccctgcacatccaacaagcctttctttcctgttccttcttcaaggaaggcttagcctcaaatccagggccacagacaaaggacagtcactctcctctgccagaaagtcatttatgggacatggagaaagcatcaaatatattgcttttccaacacctaacagtggaataggaggaatagaaggagaactcagccagaaagttctggagcatagtctttttgccaaaagaacacgttttcaaatgaaagaggtggtgctggggcactgaggaatcagggggatggaccccactggagcttgtctcatgctggcagcaagtcccaggcctcaaacacatacctgggccacctcaggagagagactgcagggaagaaatgagttgcaatgctccagcctaaccaactccccttttgttaatccaatcccagaaggtactgggtagggtcagttaacagacagctgcctgtctcctggcagagtctgaccaagccccagtgggcgcttctcttcctaagtcctctggtgtaccccattcttcaagggaaacggtccccttaagaatctatgtgaaagggttctgaaattgctgtaccagttaatgaattatttactctaaacaatgtcttgataaagggggaggatgaagttagctgatgttgactaaggagagacggagttgccaaggaaattcttctaaatgaaaaaaaaaaaaaagtaaaagcagtcagctggttttgtctgactatgaaacgtgtcacagagcatgcacctttggccatcttttgcatttatgatttggaagagagatgtagcagtgagtgtggggccagggaggggaatccaacaaagccattctgcaagctagtggctgggattttggggtatagagtaagagcagccagccttagaggcccatgtcatctgggctgcctcagagctaaagctaggtaaccagagggagtaaggaaaggcctgagtcccaggctaggcttttcacagttgtattgagatgggaaagtaagggatgttccttgcagcagatgcagggcccagttgtctagagcagtatttgaaatgagttggcatttcagggcagtgtttgtgatgccagtcagtaggtaggggcttctacctcttttttagaaatgtttactctgaactaagctctatgctttaacaagttatgttttaataggaaaactgtcattgatggaatcatatgtaattcctacatttttccagttacccattcctggggaaagcttagccattggacaaaccacccagagccccaggaacctgcatttgcagacagcagtggcaggcacagtggcctagtgttgagcgggggaaacctggcctctatgtgtctggttttgcaaactaaaacgccattgcccatactcaggctgacaggttctggaggtgccatggactcctgctctgtatctcacctctagttccatcacaatgcatgagctgtcagtgggagccttttaatgcagatgctaatacccattcctaatgctagcccatccccacaccctcctgagttggtgcgatatatcctgggaacaagaaaatctgaaggctcctggtcctcaggctagcaagagccttgcctgtaagaagtgggagaaggtcacctctctcaggaggcagaactaaggctgcacagcacaagggagatgtctgaatgcacagtctgggtggcagaaggactcctgtcctttcttccacacagacctgagcacctctccaggtgccaccattttctgtctgggaacatctgctatccccaagcctcagtttcctggtctacaaaactgagatggtctcttctatacaaggccccaggaggatcactgcaagtcactgcatttcatggtgcccagatttccctgcatttctagaatgtcaacagagatgagtgggctcaaggggaagagattctttatgactagagatattctggtcaactttggaccccagcttctatggacaatagcatgtggacatgagccctggggaagcagggatgactgagcctgaagaagagctctcaagccttacactctccagaccagccttgggttgcctgaaccccagcatagccttatggaacccctgccagggtcctagcacctggtttgacctgggcacaagtactcactcactcactcactcactcactcactcgtcaaacattcactgagggtccgtgacaggctccatatggattaagcactgaagataaaacactgaatagaaacagccagcctataccctcatgctccttgaatgtgatagaaggagccagccagtaaaccctttaccacaaataaacacacagttacacattaagaatgggaggggaggtatgtgattttttacagcccagtcttaagctttagaaattggctcctctgaggaagggacatttcagctaagaaccacaggataagacagtcctggcctggggaaggggagagaaggtcaggagagagcttgatatgtttaatactgaaagaatatttgatgagctgggacatctcctgcagatccacggctccctagctttgtgaccctgggccctagactcaatccctcaacccttaggagattatctataaaacaggagtgataatattcttgtgttaaaagctgctgtgaggattagtgaaatgatgtctatatttgcctggcaaacaggaagtgtaagtagtagtatcatttgaagattattcttcagcctaaacgtgtgttcattatggccggtgtgttttctccccacctagatggtagtgctgggcctcctttggagtaccttgatgtttggggagcatggatgatatgaccataacctgagaaggcagggactgtacccattctggtcctcccaggtcccagggcccccacagtgccctggtgtgtgatcagtgcccacaatactgaatagaggaacagacacatgggaagcaacggcagcctggtctttaagggtgagggagcaccttctcctgagagagggagagataggttgggggaggttgggtgggggtggggagagcgagtgagcaagcaagctagaaacttcctgaaaagggaagttactctagaaaagggtaagttccttccaggcatcatgggctggcttaacctggaccagtttgactttactaagtcccatttctcatctagggagcctgaggccattaaggttatctggtcccaaaatcccctagagctgtcacagggatccccattctttgcctttagtcaccccagccccaagagccatcctccacatggagtgagcagggagctacaaggaaaagacggtcacagttggagagagacagagaaccaggtgggctggtaggacaggaaggtatagggagaaagtgaagctctctcctggggaggcaggaatactctcctgc

SEQ ID NO: 63802 - DNA, 1022 bp, Homo sapiens
gccgagtaggacttcccagccttgaacatgggtttgtcatccaactgggacccacacttgatccagcggccatgctctgtgcagcctgggcctgagggcagccacgctcatgtgaaaagtgctagtagccaagctgccattctagtcaccacagctgtccttgcaggagcacattgcccagggctgggagctgtcatttccgtgacgggagtgagactcaacactgggtgagggtgggggtatctgttgggaattatttcaaaacaattgtggaaacttggcagtggaggggctctgggcataggtatccacaatatcctagtcaggggttggggtaccctggctctgctgataagcccaagtgagcatactcctcccccagcttggaacaggtgggacgggccaggtgacactagtgtggtctgtggtctggcctcccaagccagtggcagtactggggtggcagacatttgctgtgtgctatcccaaggcctaaaggtcacacagctaggttggagcagggttttgggcaggatgagtaggcattgctgtgctctcagaaaggcgaagcaaaccccagaagcaagggggcgagacagggcaaaggcctacactttgccatcaactcaggcctactcaatgctggccctgtccttcccctgcccctgccccatcagatggtgcgagctggcggggcttagagtgagcccccctgactcttcttggtgtggagtctgaggcccagagtgtacaggcctcatccgtgtgacccagcaggaggatgggagagtgggcccagaacttggtcaggctcatccgtggagaacaagttcttccctagtctagttgtggtctgagtcctgggtgaagcaggaggcagcctgggaaacagcctcgttctagtaggaatcgcattctcaggaacgctgactgtgcagggccctttctcactgccacctgggaggatgcctgcctgctggccatttcggcggactgtcagagcaccctccctggggtcccag

SEQ ID NO: 63803 - DNA, 1056 bp, Homo sapiens
ggggtctctccacctcagcctgtatccccacccccaccaggtcccctgcctgactccagcatacccaggccctagaagcaccaactccatggctgcagctgagtggagtgtgtgcctgcccaagcctagaggggtgctgacccctccctcgcacgaggagacatcaaagggaagcaggaagcagcggcctggctgacccacagcgggtgggagaagtgcagcctcacaactgctggggattttccatcccaccaggatttccgcgggacaccccaagtccagcctttgaggctcctcaggaaccagagtttggcctggagccagttggggcagaggaggggggccaggctgggtggcttaggggtgtggttaggcctgctaaggggctcctcttctcagtctccccatgatttgctggttactggcttgaaatctgggcccagacccattccaacactgaaccctgagctccctgagacctggctggcaaggacaggtcccaatttttacaggggcctgagaggaatggagaagggatctctgccccttcctttctcagtcacacctccttgacagggggtcatcagagtgggctgtggtaggtgcaccagggaagggaccatacagaggaggctggtctcaagtcctagggtgcctgggatggccctattgaaatgctgcagcagctcttgtgcaggcagggatctgtatggacagctgggtggacacaggtgcctactgacctcccagatccttcagcagagctcagccctgagtgacagcccaaggcagacctggctacctcagcctctggctcacagccctcagccagagccctgagaggcctgggatctcaaagctgcaaggtgggaggccagaggagagaagcccggagctggtagtgatgctggctgagtgaaaattgcacatttcccaacagtgtgatgctccctatccagcctgggcttttggcagacttctgtgctttgtggaggaagctggctcagattcctcccctccctgtgcagtttgtgtgtcaaggtgtacttgtcacac

SEQ ID NO: 63804 - DNA, 2801 bp, Homo sapiens
agttcacccagagcttttgcccacttcattgatggtctggtgggcttttgttgacacatacccgtgactcccaaatgaacctttcaggttggcttaaagccgctgggacctacacatgacaaaacccagacggaaacagtggcttacactcctgtgtccctaaaggtacctgttcctaacagtgggagtgccagagcctggaagctggaagccaaggagacagggacctccctcctgctgaccccctgccaggccacatccacctaagggatttgggatcatactccatcttcaaccactgggatcaaatggaaagccctcaggaattctgagagacagcccctatacctatgtgcactgacacacatacactgacaaatacgcattctgacacatatatgaacatgcacatatgtgtgccccactccctgccaggaggtgggttctgtcccatctttgacatgttacttcttgtccttccctaggcccagtggcactttctttgtgataggtgctgagacccccccgactgggcccagtggctgttcccaggacccagtctctgctcttatcttaacccagctctagctcccaggaccccagcctttcgcagggagagagatagctcttttggtctggcacatgttccatgccaagtagtggaaacagcagctgcagggcagcctcagacttgacatcatttaatccttgtgacaatcctacagggaggaagacactacacatatgtgcagatgcagcaaggagcagctcagccacatggaatgacttgcttgaggtcaccaggcacttgacacagcagagtttagcccagtctctggagagaccagccttccacatcctgtcatgctggggagggctgcccgctttttgtccctgctcccccagttctaaccccggaagagcgattgtccctgctgtgccttcagcccagacagaagcaggctaggagaggggaggagaggcagggctggccctcggaaggctcaccttcctcaacagttctctgcttgggcaaaggtcttccaagcagccaggctctgaggctagtcactgtcatcgttgggtgaggcagcctgggagtaccagaagttggagcaggtgggaaccttccccagggatggggctggataggcaggggtgggtgctaagtggcaggccacaaccaggcacctgggagggccaagcaccacactgagaacgcagtgcttcccctcccctcctaggctgctcaggaacccatcagtctcctgtaaacaaatgagactaagtctctggcactctaggcccaggtgcaaaggacagctgcccctgcagctactcactctgccctggccctctcaggaggcttgtgacctctgcacctgctggcttgttttgttcctaaaatacccggatccttgagaatctagaagacaccactgctaacagatttccacatcattcattctgttcttcctgtgcaagcttcatgctgggacagggaccataaaacaaggtgacccaaaaccttcagcagaatgcaggtaggcagagcagaggtctctgggagtgtcattccaaggcagtgtcttcctcctcccctatgctccccatttcccaagagtgggcttcttccaccccactcaagcacctcttcccaaggctgacctaaaggcctcaagctctgcggataggggcagtcctgaggtggcattgagtcttagggttggagtgggagatatctgtgcaaaggctgataggaacgtcctccaagggctgacttcaaagcttggcctaaaccactgcatcaaagtcagcaagctgagctgtttgcacagaaaaggaggaggagcaggcccttgagccacctgtagctctccttagggtctcaggctttcacaccagggcaggccttgggccagactacccaacttccaggccggatgtgccaccggggaggaggaggtaactgcccctcaaaaccctgcagcccagggctccaggattccaacccagggacctgcaggctcccctgctctccagatcagacccctactctcagagccctaggcccagtgggtgacagcctgtgagacaggcctgtgtggggtggccctagccccacctcagcttccaacctgaccttgctgcatgacctctggcccagccctctccacctggagtgccatctctctttgtgggatgggccaggtgggctgtgtgtgggggagggcaagtatataggtgtggtataggtggaaactgccacagtaaccagcagcagctcagagccgggccacccaatttgtatgccagccccagctgggcctaggcacgtggtgtgtggaaatgaacgaagcaggcagccctatgtttaggaggcaggtccagagctcacccaggcacagcacaagatgagtgcctggcctcagtgagcgagcactggctgctatgaggctgtggtgtggaaccttgacactagggccactggcctggctgtgtgacctctacctcatcacccagagcagggcaaccagaggcagagcctcagtgtggtgttctcctgtgaaatagtgatggcacaggcaggggctggggcccagtgcctacacagaggatcagcaaaggatggcagttattgaaacctctacggggaagttccccagacacgagaggaagacccccatggaagctgtgtgtgtgacgtgcttagattttccagagtcttcattttccttgtctaaacagaggtcatggcgcctccctctcagatcaaacagccctgtatgagtggctacaac

SEQ ID NO: 63805 - DNA, 3145 bp, Homo sapiens
tttatattgtaagatgtttagcaccctgcctggtctctacctagttgatattagtaattctcccatagtcatgatagccaaaaatatctccagacattgccatatgtcccctggggggcaccgcagatgacaaccacttccttagaacagctcttgggactgggatggtgtctctgctgtggctctttaaaggcagcaggccctggcttgcatcctgccacatctaacacctatagcctcaccacctcggtgagaaagaccctggcccaggcctggccaatcagagtaccctcttccctggtcagcagtataatttgtttggcaagcacttccagtcccacaacctatgggctgccacccagaggtttagttggaactacgtgtcagctgccgtccctcagccatctatggcatgggcacctgtggcttgaccaagttggaggtggcctagagaggccgggctgggcctgctcaccttctccagttagtgcagactgatgaatgagtggttctcagcggataccggatccaggtttgcagtacactccaggaggaggacgagtagggtttccctcagagcaggcctggatgggagggcaaggggtggcctctaatactgcctttccttccggtgcctttatcagcctgtgccatgctcctctgaactggccggccccagcatgtccaggttactggcaggagcctgtataacccagggttccagtcacaccagccaggaaggcccatgaggctggagcgcacccagtctctggctgctctgtctgcggaactaaaagcctttctcccagagcctttcctacggctgggcgaagctcttgtttgcaatttaaatgtggcctcatttatggaagaatccctgctcctccgaaaagccttgggctcaacctccctagcagcccgggcctcagccaggagaagaaatggatctaaaaggcctttctcctgctaattgtagcaattagcattagagaatggggactcgatggggggccagcgcctggcaaaacaagcttattcccagcttaggcccaggcccagctccacacactgctgcttggccagactcggcccccacccagggtctggttggcttcagggcagggagagagggcccaggcctgtgggtgctaagagcagttgtggagggtgtgcatctgagttgttaagcctggtagctgtacaggtagccctgggctatgacttgtggtcctctcagaaaagggtctgactggaacgcagagccagaccagatattcatgagtggatcacagagtgtagactgagggctatctggtgattgacagaaagtagtcttggggcaaatgactcttaaagagtaaggagccattcccctctatggctaactggatgcctttctctccccctgctccagaaaggacttcctgttccttcactgagcgtgcttgcttatgaggcttctggaaaccaggagagttcagtgggcctcattattgagcgtatgggcaggacaacctgcttgggacataggccatgctacagttgattttagccagcttgctgcatctacacagcacagtgccttcccaggcagtgaattatgtctaacaggcaggggaatgatcattgcctcatgttagggatgcagtcattcaagaaatatttgtcaaacactcagcaggtactagaccctggcccagagggagggatttgataggagcagggacctgcctaccctcccagggttagtggacaaaggggagaaagactaactaatgttgaaggaccgtttgcaccctgaggggagtgctgaggcctgggagcacagcaggtgtatagcaggaacccactggaactagcctggggtctgaaaaactcccttggggaaagtggcaggggcaggccaagggccctctggtggtagggagcctgtgagcacctgggatggaaagaagccaagcatctgaactaccagaaaggcagctgcaggattaagcaagacccacaggtctctaaactttgaaaggatgtctgtccactgagtagataattgattggaatggggcaggggatgtgagaatgccagttaggagatgcctgcagtacagagaaatggtggcctatcaggacagtggcaatagggatggagggaagcagggaacctctagaactatggatgggtgaagtaagcctggcttggtgatgggcttgaggtgatgggcaggtggtgaggaagcgggtgtatcggaaatgaccccagaacttctgacttgtgccactgaaaggatgggtgacactgaaaggacaggggccttcagtagagtgggctataaaatgatggaggctgtggagaggaggtgggggcaggtgactggaatgtgggtctggctgggttggagagacatttggggggtcagggcctcacaggtggtctggaagcccttggtgctgagggaacagcttagggaaatggtttgcatagagaaaggcactggcatttagtggccatgccagaagggaaaacctgccaaggagactgaggatagagccagaaagatggcaagaaagccaggagaactggagggatggaaaagaggacctaggggtcatggtcctggcagaggtcacattggatccagtgcttgtgattctctgattgctggcagtggatggccactggcctgcaaatggccctagtggaatgtcccctgcctgtgtggctccctgtgggctgcctctcccctggacagatggggagagaccccttccccacctggttctctgtttcacccttggaactgtggcggtaaagaggacctccccacagtacgtgcagggaacaagctaggttgactccctcagggaggcctcgtccttgctgaggtatttcataacctcaggatagagaaatccccccaactttaatgcaaagccaagcaagctgaaaaatggccttgaataggctgagatgaaaaaacaaagaggctgtcaacatcagagactcagtgggggcagggagcttcagtggactccccacagacagcagttcctgggcttctatgcccagacccagaggcctgagcccaagatgtcaggatgggtggtcactgtaagtgcagtggattgtagctcaggggtgagacat

SEQ ID NO: 63806 - DNA, 4678 bp, Homo sapiens
tggccagggtcgaggtccgagttcctggccgcgtcccaaggatcggattccgggtctatagttctcatggtggttcagagtgggctgaattgggattggagtctggaatccgcatcgtggttctgagtccgcgctattgggatggaagttgggaatccatgttgtggttttgagtcaaagcccgaattgggaccggagtcggaaatccacttagtggttctgagtcagggcccgaattaggatcggaggtgggaatccccgttgtggttctgagttaggtatcctagttgggatcagaattcgggtctagggtccacatcctggctgggagtttgcctgagttgggatctgagtagttggggtcccagtcagtccgggtctggagtccgcatggtggttttaggtagggcctcattagggacagaggatcgggagtctgagttggggacctgaatcccggtctggagtctgcatcatggctctgagttgagatccaagggaggtccgagttggcgactggagtcagggtctggagtctgtctttgggtagaggttctgaatggggggctctgagttaagagattgggattggggttagaggtctcagtggggtatgggagtcaggaattgaagtcgaagttctgcctctaggtggggattctgagtcaggaattagggggcgaagtaaaggttgcagtctgagttgggggtggtgatcacctgccaggtgagaggtagtggtagaagtctcttggtcatattggagatgagagttgatcagatgcaggtctcagtctgggtagtaggcttgaagggccaccactatgttcagatcccagtaccccactgtggtccctgagcaggtcaaatagccttttatataaaattgagagtaagagtgccttcccacagcactgttctggttatgaaagagaataattcatccaggtagaatagttctgtcttagattatcacaaagtataaaaactttcctgataatatccacatttgatgtgcatttaccagttctttctttactgtggtgccccttttgctagaccaaaagctcccaacgaggaactctgttttgttttctgctgcctgctctgtacccagccaagagcctgatacacagccttactcagtcagtacttgaaggaaagcaggcaggcaggattaaccagatttctatggtgtctcaaatgatccatttctgcacctgttttccagatactcagtaggagaaaaatttaaggattgagttgcttgattatgggtgtattttaatgtgtttcctaacatgctgaggagaaaagtgggtctgtttcaggatttatgctccagctagagggattttttaaaattgcgaatcagagcatgtccaaattcagatagaaagcacaagaaaactataaagaatttcccttatgaatgtagatgcagaagttccttgtacaatgctagctaactgaatccaataatatgtattaaacaacaattcttaaacaagtgggattgctcttaggaatgcaaagatgatccaatatcagaaactttatccatgtaattcacattaagaggctacaggagaaaaaccatatggttccctcaatagaggcagaaaaaaatgatgtgataaagtttaacgcctatgtgtgattttggggtagtggagtacaccacttagcaagccaggactagagaggaacttcttcaacttgatacaagttataaaccaaaacttaacttttcagtaaacttgatagagaaattaaaagtgtatcattctctttaagataaggagtaggccaaggatgtcatcctggccataccctaatacaagaaaaagaaatggggatgtgaggatcaggtaggaagtgataaaacttagtgtagctcatagggttgatggtctccataaagattctcaaacattttggtgttacgacttgttgtattcttaaaagttattgaaacccccaaagggcttttcttgatagagattctatctgttgatagttaccatcttagaagttaaaactaagaaatgtttaaagcagaactatacaagcacatattccactggggtcatggtgtgctgcctctggaaaactctttatctttgtgagaatgaaagaaaaggcaaataatgtcgagtattattatgaaaatgtttttgacctttcctgaaagggtctggggggctctctggaatccccagactacactttgaaaattactgggctacatggaaaaaaaaaattaaggaacttaacaactaaagagagatttcagatttcagagaggttttggatataagatcagtgtactcaaaacaaaaaacaaaaacaaaccacatttctttatgccaatagcaactgactaaaaaaaagcataatagagattaggacagcaatcagaatagcagcaaaatttataccagtctaggaattaacaaagacgacgacttttatggaaaaaattttaaaactctattggaggatatagagggagatctttccatatgcagagacattttattttcttgaacagggcaacttggcattagaatgacgtcaggattttccaaatctgttaagttcaacaggactccactcaaacttccagttggagggcttgagtaatttaacaaacatattctaaaatgtatgtggaagaaaaatatttgtaaatgccaactgaacttttgaaaaggagagcagaggacttctgctggcagataccagggcacacgccaacttcagcaatcagagcggtgtggtgacagaggcccagaagagagctcagaggtaactccaagtctagaggaaggggacatgtgataaaggtggcaccacatatcagtggggactgttcagaagatgatgttggaaagccagccctaaaatggaggaataggaatatggattcctaactgagcccctaggaaaagtagactccaaatggactaaatatttgaaagcaaaaggtagttgccatttgtttaataggagaaaaaatgaataatctccagggccagggtggccgtggggttcttaaacaggatccagaaagcacaaacctcaagactaaaatgtatgaacttgaatgcattaatgattatggattaaggatttctgttaaataaatccatcatggcaagggtcaagactgttttcataataatactaaggaaacaatttgcgtttttcacttttacactcatgaatgtaactttgccatgactcattacaagatatttgaaacaattaaagctgaggagggaacaacagctaaaatataccagaaagcaccacaaatcattaagaaaaaggtaggaagattgccagtttgcaggagggttaacaaacagatgaaaatttgcccaagctaatcagttatcagagaaatgtaaatgaaagcaacagctattcttcataggagaagcattagaaagtaggataaggccaagtgttggcagaaggcaaggaacaagcctccctgtgtgctgcaggtggggacggagacaggcacagacgttctgaagagctggccaacacttcttcctcaaataaaatattttatacctgtggcccagcagtttccctcctaagtaaacatgctggagcagttctcacccagaacaacgagaggctgtgtgtgtgcatgctcagggcagcatggcccataggggtgggcagttggagctggtcactgtggttaggagcaggggactagatgtacacttcacaagatagagacgcgtggaaacacagtgctgagtgacacaaatgccaaacagaaagagggcctcagtacatgactgtgtatttaaattaaaattacacaccacccagacacgcagtactagggagtgctcgtgagtgcacacacacacacacaatgatataaataaattaccctggagaagctgtttgtgtagggaggagagcaaggatagaggctagagatgaagtggaaaagcatggagaggaagagagcggtgactttatgcagacccttacagggtgacagtgtttcataggctgagggctgtgatcaactctgtgcagagtcccaaaagccaagaaccaacgaatgaatgtgcctccatgactctcctgccagataccctctagtggcttctatttctaggaaataaaattcaaattccatcaggtttttacaagatctgccctgcttacctctctgaccactgtcctccctcactgagctttggctctgccagccttcttcttctttgttaaatctgccaagtatccctcctgccccaaggccttcaccacctctgcctggcttgtcttttctggtgatcttcccttgacaattccttcttcttatttaaatctcacaggaaattttgctctgacctgccatatctgtcatccccttcagtcactcactagctgacgactacctttcgagtctctgcaaagcacaggctacgcttttctagttccttagacatctacttatttgttggctgcctatctcttccaccggaagagaggccccaagagagcatatctgtcttccgtatagggtccgcacatggtgggtgtgtcacagatttctgttgaatggtttcattcatttattgaacgaaggaagaggccaggccaggaaagtgtgcctccattttcacaactcagtgag

SEQ ID NO: 63807 - DNA, 2555 bp, Homo sapiens
gctcagtgttcttggccactacactgggccaccttcagtctacccttgaatgtcagattgacatggcgagggtttttggtcagcctcgttttgtcttggccaggctctttgggcagcctctggggtggctgagattgggagcttagacaccagggttcaaggttattgattttgttttttgcatattttacacatattttttcggccatcccttaaatgtgatttccaaaagaatgaactgtagcctcagcttatactgtggaagatatcatttatggtaacccagggatctttttgccccatacagtacaagttcttaggttccataggcacgctggattaagggcaatttgtaatcttagccagaaatcataggttacaggttcgtaaagttactagcgcagaagcattagcaagatcgtgatgtatttcttaggctattgttggcctccacacaaattcatggagttgctggatgtggtttaaagggtacaagatctctgtgttagataatattggagttaatccattcctctgggaggggaattttgtgtcccggatgccgttactggaaggatagcattgccccttggtgagactgttaggagagtgaaggagagtgagtgacagatggagctcttgggagtggcagctcatcatttgttggtgcagtacaggccaccagaagaggatggatctgccggggcgctccctggtagtacaaagagcaggaacccgctagaggagagatgtgctttccatgagcgccaagggcccagcctacccccagacagatgtgcccttgagaagtggggactgttggcaccaagaggggttgcctccgcggtggccttcctggatggagctgcccgtgttgagcgcactgtgctctgtgtgggcaggggttccagctgcttcccagccctttcatgggcaggcccctggagctccaccaccccaaggagccccaaaaccctcctgctgaacatgccatgaatttgaatgcttgaaggcatagctttaaaaacaaaaaaaaaccctgctttgactgcagggtggtagggggagttagctttgtttttgtcactatttttaaaagtatatttgcagtaaccatttttttcaatgagaatgaactcattcagtcttggctttcattgttgattggagctaattggtgaatggagctggctttgctctctacaagccttgtctttttcattgacagaaggaacccagccagccggcggaatgcaagcagcagtaggaagcggaggcgggtgcctggcagaccggctgtcgggactccaggcctgtgggcggggcctcggtccttgccgcagcacaatcccgtggacagagcttactccatctaactcgttttcaagtgcatgattttcactttcacttttcctttttccttattattttgcttaacttgtacagtggcaactgaaatgcatttcagaaataggaggtttcgtccagcaccctctgcagccttggtgcctgtagctctggacttccctgggcctttccctgtgggagggccctgtagaccacatcagggtggggtgggggtcacttggcaaaaagggccgaggtctggtgatgtggttcccaggatctggaacctctcccacccctcctgcagttggactgaattcttccctttcatccgaagaaacccacttgctgtttccagccgctgaatctgctgagtgtgcagcctgcatcacctgctgtatgccgatcatctcagaaagggctgtgtagagtagggccctgttctccttaggatgttgcttcttgatttttttttttttttaggggtgggtcagggttgtgacacaccagcccaggtgagagctgctgcgggtcacctcatatttatttatcccttcttgcctgtgaggactgcggcttttcgctgtggctcgtccttaacgtttctgaaccaccttggtgccctgagcaggaagatgtgccacttcctagcaggcgcaaggcctgtgcggaagaaacgccgctccctgccaccagggctgaagatgcgagcccgtcctcatgacgcaggcgccaccctgctgccggagccgggcttcggcagtcttctccactgagggactgggctgggaagtcctgcgtttcagtggagcgtatgagcgtcaagtcctgctttctcagtagccccattgcggggccccaccattcatcctgtctgaaggtcctgggtttggtgtgaccgcttggcggctggtgggtggggttttcaagtgggtgacggcgctctccggcagccggggatggccgtgtccgcactgaccaggcctgtggagagtgctcggcctaaccttagaacacatttgtaactgaatacagtgttttcaatttgtacagaatagttagaatattctattaaagtggtgaaacattgagtcagcactgtgccatgtgggtctttgcaggggaatgtggtggggaaggctcagatgtgctgcacacctgttgggctctgttgagccctgggtattggtggctccaagaccggttgt

SEQ ID NO: 63808 - DNA, 2830 bp, Homo sapiens
acatactcagtagaagcttttccagctgtctcaagctgtgtcttatttacatagactcctcagtagagcaacttgactttccaagtgtttcattcttttaaggtaaggtaatgatttaactgacaacataaataaacttttctttgtgcgtgtttggaaaaggtgcaaagaagggactttggggctctttttgttaaggaacagaataatgggattgtgggcatcatttgacccagttgcacttgagctgagcatgcccagatgatgtgtctagatatctcatatgtctcagataatttaaaataaattggaaaggtttactaaagaaaactgagttgaaaatgagtgggcaaccccattaattttacctgcaaatttagatttttatttgtggtctcagagtaacttaaatcaaggtactttgaccatttggcacattttaaaatcagaagtgcttaaatgtcatcctacagcatcataagagtttcttcttgtaaaacatgaaatgtgtagttcacttgcctcttaaaattaagtatattatgggctgtcagaatactaacgttacctggtgtttttgtaatgtgtctctgtccgactagacgttttttgcttgtttttacccttgttttttggagtgtgcactaaaagctgtcagtgtgatattctggctctgtcatcagttggtttaaactggctgtttccatgaatgcatgttcacagttgtggttccttcaaggaagggatgggagaagagcttttaaaacttttttgagaatgtgtcttataaagactactctgggaataatctgctcatggaaatgttcatcttctaaagtttggcctgttgatgtgggaggactctgctgaaagcgtacctgtgcgcagcaccgtggtggtgggcggtgagggctgtaggagaccaaggcctgggtctgccttgcgtgcatcacagtgtgcggacagggaaggtgagggctgtcagtcagccagtgaacaacgttgggtgaataaatgctgcccatcactgctgtgcggggtgtctgatggacccaagggccacgtgtgtttattgggctgtgtttccgccttgtgggcgctgaatggacacttttaaggttgcagttgtaaagcaaggactggggtcaattggcagggccacctcctcagactccgcgcacagctgcctctgtccttgttgcacttgtatctccccctccctgtattctgtgcctcagcttctcttttcctcccctctgttgtttgttctgctttctctgtcaccttggagaaccttgagtctcctttcacgtcccaggtttctaaaagagcattctcaccagccattacagagaacatgatgtggtggattacacatgctaacaccccatgaaacctttgataaacggttatgttggttgggggagaagggactaaaaacatgttccggctaatggtgtgaatgaagttcagagacggcccggcatgtgtggccaggataaggccaagcctgctgtccctgtcacatgcaccttccagagagatgggcagtgttagagtctgtgcaagcaaaagaaaacaaggaaggaagggaggttttagtattgggagcagtctgatagaagtgaaaatcatgcttctgcccattttgaaagtatgatctagtgttgaagttgttcaccccgagttcagtatcttgcagcccttttgtatcatgagaaattgtggccgtttcctcctgtataattttgtgcatttcattttctttcatgctgacagttcctttcaatttttttccccatttaggtgtaatttttgtctgttaatcattcatacgtttctaggtaaggtggaattccattcatacctaacttccaaacttctgatctatactttatacaatgcattgttttgactttgaataaagagggagttgctgtccaggtacactcactgtgtcacaggtttgacataggtgtctgttacatgtacttttaaaatcaacgaaccaaacctagatttggtccctgctttctgagcccagtgtttcttgctaaccaagtagcaaagatgtaacttgggtgtaattttcattgctgatggtactgctttccagtaagagggccctggatggtcagcagtctgcacggtggcacacacgggccaccataagcaagcagtccttgcagagagcataacacactgggctgtcccagctgtgctcagaacacacactggcagttgaaattggcccactgtcattaccaacacgtgtctgttgaatatctatactttttgaattcatgttttgtgcagaccaataggtacacagaggggtaacagcttttactgtgccagcattttttatctgaaacatgaactggcatctgttttggtgtcagcagtaaaaagtactgttgtgaggttggtgctagttgaatgaagcaagaaccagttgtagatgaaagtgagtgtcagtaagcctggaagctgtttcccactccactttcttcagtccctgtagctctgccctgtcctggaatgctgacaggaggccgtaagtagacagaggctcttgcccgtgacgagacctgttcactcgtggcactcgggatgtagtgggagaaagcagagaggtggggacaagaggtgccatgaggaaccccacaaccatagcagggcctctgcatgccaggataagtaggcactccgtttttaagggtctcgtcacagaacatcagcatgatcctggcagcccatagaccagacgtccttgaggtcttagcgccaccgcctccctgtcttcctcatgtaggctgctttcatggga

SEQ ID NO: 63809 - DNA, 1008 bp, Homo sapiens
ctctaagcaaatacatggtgtgagctcaacaaaatgggaaatgttgataaatgaagctgcattttcatgcactacccttgttatgcaaccagtagtgataaggtggttttgcttttggtgtaagtctcatgtttgaaacttgatttttagtctgaccaatgatgtatttggatgtaggagaaactgattcaagacaattgactaatggtggaggttcacctttgagcaccttattgatcactttaaagattaaacaccaaagttttaatatatttctactaaggtttcttttccctttgtatgagatgtaaaatgatacccagattcctgtatccaataacattatgctgctggttcgatcagccttgtagaaaatttaaggaaaacaaattcatcggtttacaaaaatcttttcctgtgtgcctgctcctcggtgtgagaacagccagggcagagctgtggtgccaggttcccagctgtgtccagggtacaccctggctgaccagcttcctatcctattccttgttttgcgtgactttcaatttcctggcatgcttttaaaatgcgctgcacacaagcaaatggctcctcaggcaagcgaggcccagcaggcagcgtggctggactttctgctcctcttaggcttggtcagtgagtcacttgatgggactggtgtcttgggcaggctgctgtcatgttttgtaaacctaaaaatgtttttctgtgtttctccagtttgaagaaggtgaagaaggagaagaggaggtaagagacaggtttatgcagtgccacttacctccctgaagttgtttctttggctttctctgcttgaaggttatggactcacagggctgtgttaaacccattttttgtgacgctgtctttgattctaagaatgttcttaaaacactaagcagaaatgcatagcaaatgctgtgacagtttccatcgtttttgaccctgcagttggttcatgaaaatgtatcttagaaaataatcatttaacaa

SEQ ID NO: 63810 - DNA, 2043 bp, Homo sapiens
acagcttataaggcttaaggactttctctttcctgcaccatcatgtatagttctgcgggacatgagttaagtttccccataaagcacaaatgcactgaatggccacagcctgggggctgtttgccattcctcctgttaatatattaactctctcaaaatgatcttctcaagcttgagtgccagcccatggcacatgatggaggaggagaagggaggggggcatagaggcactcaggccagcttcagaagtggtggatggagcttgcaaagatgtctgtgaggagatgcaaggctttggggatttctgttaaacctcgaggtgagaaatgttacattttatctaccagcacagcttcctcctgtgtgggctttaaaattctgggagttgtcactgtaatttaaatatgttttgtcttttctttttctagcatccggggatggagaatcactggtaagatttgttgttaatagtcttattttcctgttgaagtctctcctgagtgaatgtctacttgtctacttgttaaaaaaagtccagtcctggctgtgtgtggactgggtatgccagtgatcttaatgctttgggaggctgaggtgggaggactgcacgagtccaggagtttgagaccagcctgggcaacatagcacaaccccatctccacaaaaaattaaaaccaaataaattagccagccgaacatggtggttcacgcccgtaataccagcactgtgggaggccaaggtgggtggatcaccagaggtcaggagttcaagaccagtctggtcaacatggtgaaaccccgtttctgcttaaaataccaaaaaaaaaaaaaattagttggacacggtggcagcgcctgtaatctcagctactcaggaggctcaagcaggagaatcacttgaacccgagaggaggaggttgcagtgagctgagattgcaccaccgtattccattgggcgacagagcaagactccgtctcaaaagataaaataataaattagctggacatggtggtgcactgtgtagttccagggtcgctggggcccaggagcttgaggctggagtgagctgtgattgcaccactgccctccaacctgggtgatagaataagaccctgtctcttaaaaaaaaaaaatccatttctgtttcctaaaactctgggattaatttgaaatcattacacatctaagtaaaagtatgtgtttcatatgttgatttcagtagcaaatgtgcagtgctttaatactgcctgtttcccatatgtgagactgataccgcctactctgggtgagacctttggacaagttgtggagctgtagggccctcacttcccactttctctgccattttgcttcagtagctctttaaagctacttaaagttgttttaaaggggctttgagtgtctagtggctgtcccccagcagtgcaggagtttggtgttttaagttaagtaaatcaaaagtgaggggctgaggtttggctgagggtggtgaagtgaatgtttttatcccattaaaatgagttaacacgtaggtttttcctcctcaggatgaagattctgaattcacattagcctctgattttgaaattggacactttttccgtgagcggatagtcccgcgggctgtgctgtacttcactggggaggccatagaagatgatgacaatgtatgaggctcggggaaggggggcttccacctgggtgcttatctctgttggtgcagagtggccctgaattgtggcttaggaaacccccatgcctaatctttttattacatcatcagccagatatgtagtccaagctgctgtccttgttgtggggggaatacgcttgaagaggagaagtctgaggaacagagcaggaaaagcaggtgtctgtgaagcagtttcagaggtgattgccagtttcctatgtgagccctgcctagtgactcaacaatattctctcaaaacctaagcttcagggaacttgtgaacacagggaatatctcttttatggaggtctggccacaacaaacatttattgacagtggacttatgcta

SEQ ID NO: 63811 - DNA, 1030 bp, Homo sapiens
ctttgaacagcagcaactcctccttccttgggaaaccgcggacaagttcttgtgcatcatgcagacttgacggggctttgccacagaatatacatttcagagtcctgatgaaatgtcttgggaaaataataccattgttccagaagtctgaagttccagtggtcacacccaagttgaaagaggaccaggctgtttctctttttgccaacctccagatgaacttcatgggccattgtatttggtttgcagattggttttatttcgttttccaggtttggcatagagctgtggtttgcttcctgcatgcatttgtaatggatttttctcatggattgtgtgttcctgacagctgtcttgtcctggtaggtgtactattgactggaagaaaggaaagaatgttactgtcaaaaccatcaagaaaaagcagaagcataagggtcgaggcactgttagaacaattacgaaacaagtacccaatgagtcctttttcaacttcttcaatccattgaaaggcaagtctgttggttgttaatattcattatgttcttatataaaataattttggtcacctgatagattcctaacacccagagactttagtcctcttttttcaggcaagtgtggtcagtaggggcacattgctgtgtcccaggctgttctgttggtgcgctggcaagtttatcgcggggggcagaggtagctaggacagtaagagtaggattgtcatcttctgcaggaaagggaagagctttactctgcttggctgtagcccaggcaaaaacttgcagttctgttttaagaaaactgaatcgagtatttgcacctgggctgcttcctcacttggacacctggagcacccttctccaccagctggcatttctgccccgctgttgtgtctggttcgcaccccccggggaccactcccagcctcggagagctgctgggtttgctctgcaggtacccgttactgctgtacgctggttctagttgtgctgcttttggatcatctgcttagtcccccttttcttgt

SEQ ID NO: 63812 - DNA, 1033 bp, Homo sapiens
tggtgctgtccactgtgccaggccttggtcttgtagtttgtttgtttactctgttgggtggagatgataccattcttttcccaagtgtctctgaagtttgcatgcatctaatgtatatgtttaacgtttaaaaagatgggagctatgtacacataatgatcagcacttattcagaaatctgaacctactaggttttaccctaaaaaaaaaagcgcaaataagactgaaaaatgttttcctgctctttgatttgtcctgaaacacgtctttacaatatgcttgccatggcatatcattgcattagtaatgttagtggcatggatcagcctaccagttggtaagataagcttgactaggtcagcccttacttttatctgaggaaccatatgctcatcttcaaatggccttgccagactgtctcatcccagcctggttctcccagggagcactgttcgtaacccgttagcctggctgtagctaatgggttccattccggtgcaatagcatttccagcgacacatgactgactgactggtggctttcagtttcaggtcttggagacaaatgctgcatgacgggctgtgggttagggatcttgggtgtgggtgatggtggtaggggcctggggccagtcaccagtatcttccttcctccccatctcagcactggggcctgggctaatggatgagggccactaggagtgggatttcttcactgcaagtgctgcaagtaatgcctggggcagcagcaggggtgggcagtggatgtacctgtatctgtctcttctactttttcctgtctgttttccactatggaaggtgacattcaggtgtccctctctaggtggggccctgggagctgggagtgatgcctgctcaccagctgggggctgccctccagaggggataccccatcttccttgccccatgtgggttatagcaggtccttcttcctgggcttgcatcacttctgtttagactttatcacagggcccccaggagccgcctgggcacgtctgcctagtttgccctcg

SEQ ID NO: 63813 - DNA, 1074 bp, Homo sapiens
tattagtccaagtgaacttctttatccttgcactggactttttttgcccagtgctagatgttctgcatatttgcattgcatctccttaaggttgatgtacagtctttgcatctgcatttgtgatgatgattgtctcaggatggcacctcacagagctagcactggatggcctttcccagcgtcggtggcactttgtcatctctttagtttcttcgcctttgatgtgaaatggtacggaattccgtgtggatgtaatgacttgaatgctttttcctcagaagcatctgaaaagtgtcgcgtggcccagtgagtggtttggaggtgcagacttagaaagcaaggtgtttgatgggagatagtagaggattcggcaacgatattctacgtgaagccgctgcattgtttgtaaacttttattttcgttacctatgttgcatcttttttttagggagacatgaaaagtaaagtagtcgtcacagaaaaagcagcggcaacggctgaagagccagatcccaaaggaattccagagttctggtttaccatcttcagaaatgtggacatgctgagtgaattagtccaggtaagcacacttctgtcttgtagagagattatgtgctagtcttctaacattacttatctatggcattttttaagcactacactgggcattgaaagattgttcatagtgggcggaagggcactttctctgaccaggacctcagatgagcagtcctgatctcacagtgaatggtttattcacagtggggcttccatgctgtcttttgcagttcttggtggaaagctgggcgcttcagcctgatccaaaactttcaaatcagttccttttacctcttgtaaagctctgttgtcttgcctgtgggaaagcctatgaatagattccagagcccatctctgtcttcctgtggtgtgagtgtgcaggaaagggtgagggcaggagaccagagcagaatgaattttgaagggatgagctgtgtgtttgtttgtgtgtgtgtgtgtacacacacatctcagtgaatttttgaacaagttgctaatattttctgatcatttctc

SEQ ID NO: 63814 - DNA, 1078 bp, Homo sapiens
ttgacaacatctagggtaagaacgcatctaacctgccaaacatagcttagtctagactaccttaaacaagctcagaacgctaacattagcctgcagtcaggcaaaatcatcttccacaaagcctattttataataaagtgctgagtatctcgcgtaatgtattgaaccctacacagagagaggaacacagtgtggctgtattggtgcccaaagtgtgatggcttctgcaccatcaggaagttgaaaatctttagctgaaccattggaaatcggggactgtctttattttacatctttaggtgaaacatccaggtttacccagggaatcatttaatatttttctttgaaccctaaaatttagaatcttaaaataagttataaaaatatccagttttcaaagtcttttagtagacattatttataaatttaactcttgagttcctaagtaagctaataacataattctaataaggtctcatttttatgtagagaagagaatttatcaccggcgatgttgaaccaacagatgcggaatcggaatggcacagtgaaaatgaagaggaagagaaattggctgtaagtctttagaaacatgtgactcatgttctgttttaatactgttaaaaataagcattttttaatgatttttaatgactagtaaacttatgtgcttctaacagtaggtgctgctgcatcattaggttgggtttagattcctttctgatatggatctagcatctgacacagtactgtcagttaataggagtaagatgtagtgccacctcagttatctgtggacaggagcatattgaaataagggatcagaccaacaaagattaaaacatcagagaaagcaaagatgaagaagagatgcccctgtgttctcagtcactggaagattgggggagttgtgaggggagtgccttcctgctcagtggcatggactagcttgccccctgagaggtgctccgccagtggattggttgcagatggtggttgtggtgtggccatcagtcacctgctcacagcctttttctagtgactggtcccattccagtgctgtgaaaactcccagtgt

SEQ ID NO: 63815 - DNA, 1051 bp, Homo sapiens
tgcaaagaaaacttagggaacagtgctggcagagagctagtgagccttgggctctcctggactgtgaagtctatggcaccacagtgagcaagggagctagtggatgctcttttactttgaggaactgatctcatctctgttcgtggcttctggacaccaccatgggacttgggggtagaccatgtgaacttacattaatgatgtcctcagttgtttaagtctggtgcttaaacagccacagtcctggtgagagccaggactctctaggtgtttattcagtaaatttgtaactacccatcaggtgattaacccagagtgttaaatgctcttaaaataaattttaattattttcaaaacatgtttaagaagtcactggtgtatgtatttagaaattagtagatgtaaatctaggcaaagctaagtagatatgttactaatttttgactcttggctattgtgtgtggtgggcatattttaaatatgtttggtcttaactcttcatagaaaagctcacagatcaggtgatgcagaatcctcgagttctggcagctttacaggagcgacttgacaatgtccctcacaccccttccagctacatcgaaacgtaagtgtgctgtgaatagggtctcatgcaatttggagaaacaaaaggaaaataaaggaaaaaccacttttcagttccccagaacaggattaaatgtttttttcgttccaagacattgtctatgagagacaggcactgggatatgagaggagtgaccctacccggtgcctaggctgagagtttgcctggtggatggagtagcgtgacctgtcagttctgataggaagtgcacagtgccatcctgtggagggctagaggacttcacagatcatctgagttggagaggacagctggtggctcctaagttaaactaagagaaccactccttcctgacttacccacatgagcctgtgacaccaacaccttaaaaaaaaaaaactgggcatagtgccgcatgcctatgagttttcactaccctccagcctgggtgacagtgagactgtcttt

SEQ ID NO: 63816 - DNA, 1079 bp, Homo sapiens
atagggattgataaacaaaaataatttgtggtgctgaaacttgactgaactctagcttgtttataataccacctctctacattgtctttccttattcaggttgagcactcctgatcccaaaatcaaaaatccaaatgctccaaattctgaaactccgttagtgttgacattaatgttacaagtggaaaatttcacacctgacttcacgtgatggatcacagttaaaactttgtttcatgcacaaaattatttaaaatattgtataaaattaccttcagtctatgtgaataagatgtgtgggaaacgtgaatgaatttcatgtttagatttgggtcccatccccaagatacctgatcatgtttatacaaatattctaaaatctgaaacacttctggtcccaagcatttcagataagagatactcaacctgtataaagggtgcagtgtttaaagtaacttgatttgttggtttcatatcaaggaatagatgtagtctatatgcatggcagttacaaaagtgaaaagagacctggcctgctgttatgtactaggaaatttgtctccattaacagtttctcaggtagccactgtcttctagtttgtggatgatgaaactgaggtccagaggaaggttatgcagaagagcatgagtgggaatgagtatggggaagtagacagggcctgaattggtaggaatgtgtattctgcagaaggtgacgggggaccattgaagtgtgtttgttagttttttgtttgtttgttttttgagacagagtttcgctcttgttgcccaggctggagtgcaatggcgagatctcggctcactgcaacttccgcctcctgggttcaagagattctcctgcctcagcctcctgagtagctgagattacaggcatgcgccaccatgcccggctaattttgtattcttagtagagacgggtttctccgtgttggtcaggctggtctcgaactcctgacctcagatgatccgctcgcctcggcctcccaaagtactgggattacaggtgggagccaccacacctggcctttgttaaagggtttttaaatcttcactgacta

SEQ ID NO: 63817 - DNA, 1013 bp, Homo sapiens
ccatattggtcaggctggtctcgaactcctgacctcaggtggtctgcccacctgggcctctcaaagtgctgggattacaggcgtgagccaccgtgcccagcctattcattgcttttaaacattatcatgggcctggcatggtggctcacgcctgtaatcacagcactttgggggaagctgaggtgggcagatcacctgagggtcaggagtttgagaccctctcccgccttgggtgacagagcgagactccacctcaaaaaacaacaacaacaacaaaaaacccagaacattatcatggaaagtttaacaacatgattaacttctgatcctggagagtggtaatgatagactggatcaggagtctactggcctgggcaatagaaatgaaatctggactgtctcagggcttcgtataatcaccagcttttgtgggtggggatgttggggtgtcctacaggggtatcttgattccttctgagaacagatcatttctttgtcctttctgatgtcctaatctaaaacatccagtactcctggaggatttgaacttgtgcccaatggctggtcagactctcttggattgagaatgttggattgccattcctcagactgaatgtgggccaagcaattgtgctttagaaatttatcttagagtgcggtggctcatacctgtaatcccagcactttgggaggttgaggcaggtggatcacctgaggttgggagttcgagaccaagtctggccaacatggtgaaaccctgtctctactaaaaatacaaaaaaaaaaaaaaattagctgggcatggtggtgggcacctgtaactccagctacttgggaggctgaggcaggagaaactgggaggtggaggttgcagtgagccgagatcgcgccactgcacgccagcctgggcaacaagtgcgaaactctatctcaaaaaaaaaaaaaaaaatttactaccatccctaattttgtaggatatataggatttgtaaggaaattataaggagtcttgt

SEQ ID NO: 63818 - DNA, 1205 bp, Homo sapiens
atacaaatatgtagattaggttgttggaccttaaaggtaagtctttctaagttactaccttcctgtaatagtaactatacctctaaatgactaatacctgcactgcgcaccagggactctttcagcctgtttgcgtgtgttaactcatttcataatctaataacctgagatagatgctattgtttttccatttaactactctggaagctgaggccctgggaggttaggtataatgacttgtccgaggtgacaaagcttaaagacccaggcagttttaactgtacccagggttactgcttctgtagagggaatgaaagaagttttaatgagaaattgttttcatcattgtgctaagcttaactgaactctagcttacgaggttttgagctggttgatcatttccatctcaaaattctcttattccacagaatgccaaatgcctcctatagtagaattttgagattcagactgggatgagcaattgctaatggaataaataatatgcaaatgtaaaatgaagttcagagaaagcaacgtggtgatagaatgggaaagtaatccaaagataaaatgagtgactacagagagagagaaaattagttatttagtagtagttcacaagtttacttagagatatttttactagaatttcagggccttatgatgtgatttttatgaaccattttaacacgttactgccgtcttaaatagctgttattacatatccaattgcagtcttttttttttcctggttgagcagtgttagcttcagaatgtctgcagttatttgtgcctatatgtcatataggcacatataacacttttgtgaattttgttgtgtaagctttaaatccggtactgtttttcaaaatgaatatggagtagtcattggagaaattggttgaattctttgcagtagcaaataaattttaatcatttttaagtttgataactttggtaaactgaattctgaaaagtttacacatgttttaggatgtcctcaaaatgtacagggcattgtgttttgcaaattagccatttagccatcagattcttctgtagaattttgatctttttgcccatatgagaggtagttcttatttgtatggaggttaagtacctgcggatgggatgtgttcatcaccactttacagtatgaatttgaatttgaaactgaaatgaaaacttcctaacctgtcagagtt

SEQ ID NO: 63819 - DNA, 1040 bp, Homo sapiens
ctcccattcttagctgctggagccagcactgccagatgagtgtgctggctccagagcagtgtggtgactgaatgtccaagcaagaggacatggctgcatcagggagatagacactttgagacgggagggcaaagaaaggggagttggggttacccaggtgcagaggagaccaatagccgctgtgctctgggttttcagggtctgcccacacatgacatggagggcaaagagctcagcaaagggcaagccaagaagctgaagaagctcttcgaggctcaggagaagctctacaaggaatatctgcagatggcccagaatggaagcttccagtgagggggcacaggactgactttttaaaccattgtggactagtggctgctgtctgcctcagtgacaatgtcccagcgctcctatcatgtttacagtcacccttgggtcctaaattaagagttgtgttcatgtaggttcgtgtcgtcgttggctctgagacattgataataaatttttctcaacagtgagaccctctctgtcttgttctgcatgttcagcacttggcaggaggcctggtggccagccagggccgcttggtcagcaggtcacaacttaggtgcttgggtcagttgagctgcttcagctggccgaggaatttctcccccatgctgatggctatcggctaatctctggtgtgtgggcacattgggaggtatttgagtaggaaaaagacaggctcagactggcagagcctgctgagccctagacaaaggccgctcagtctgccctcgggttctgatgaataaacacactgcaggttttcctagagccgttccatactgggcagcagcacagcgagtggctcagcaggcaggcccctggcgagctgcccagaactgccgctggagacagcaagtccaggatctgcatggctaatgagtgagttgtgggggtggtctcaacacagcaggggccttcttgtccccagtgcccagtgttgtccttgccaccctgcctccacacctggttcacctggactaagaatcacc

SEQ ID NO: 63820 - DNA, 1050 bp, Homo sapiens
agggctctactgggcaggagtgcaccctgaccccatgccctgtggctctctgtgcctccgtggaccttagccaggcccctgcagaccctcacagaaggagctccgctttctgcctccaccacccaaggcctgccaggcccttctcacatggggtgcagggaaggcctggccaaggggaaggctgtgccatgtggtcacaagctccaagacagcgtttatagacttactactattaggttttctagtaagctttccactattcctgtagaaataacatctggtttaattttaaattccttgtatgttccctccaccttggctttccccttcccatctttcatagcactctgaatctgagggcttggaagcaagttgagggctggaggtatgagcagatgtcgttcacagtgcggagccccaggtgctgctcgggggcagtgactgtgccgtgttgcgtgttctaggcagcaaagctggccaagatgaagattccccccagtgagatgttcttgtcagaaaccgacaaatactccaagtttgatgaaaatgtaagcatgtaagcatccttctcttctattcagaacttgatcagaccacattaaagtgggaggacaggaattttcaaccttggacaagcagattttctgtctgtagaaaatttggaatcaaatctgacacccgctttaggtccagggcctcctggcccaactactgagctccttccacagcccaggcagctaggcaagcccgtgccagggccccctccactggtgtggtgagctctggtccctagccctgggagttgtggccccgggccaagatccacccaggccctcacaagctggctgaagtgccgtggcgcagataggcctcctacccccagtttcttcctttgtcatagcgattcacagccactgcctccaaacctctaggcccctccctgctggcatttggatgtgtttgctatgtacctttgggccagctgtgtcagaactcagccatgggtaggctctgaggggcacagtgcccctcaccttaggcaggaagcac

SEQ ID NO: 63821 - DNA, 1620 bp, Homo sapiens
ctgaaccctgatcatttagtgtggtttccgcattgacagcctggcctttggcaacagactagcctggatttgaaccagttgtgttacctgctggcttattaacctgggctgtccttccaagccctgcctgcaccacctggaaaacgcagctcctgcctgtggacagcaccaacaaggcagcagacagtgcaggtggcaggaggcggccccagtaacacatgactgttgacatcctttgtctctttccacgcaggcctactttgaaaacgactgctgggtcaggtacttcctgcacacaggccacctgaccattgcaggctgcaaaatgtcaaagtcactaaaaaacttcatcaccattaaagatgccttgaaaaagcactcaggtatacactggcttctcccacagaccccccaaccaccttctcatacatgtgtaatggctgtagcactcgggagaataagggcgttggctgtcttgtgtccccccacagcacggcagttgcggctggccttcctcatgcactcgtggaaggacaccctggactactccagcaacaccatggagtcagcgcttcaatatgagaagttcttgaatgtgagtccccagccccttcctggaggttggtggagcagcctcccctgcacagtgggcaccttgtgcagtggtgataggtgcaccagcctcccgatgtctctaatggagaccagcacatgggtggaagcacctccatgctagtgggtataacaggctcggggccactcctgaaatggctgacggctcagcagagtggacagaggcctcgtcctcctagtcactgcagtgcacgtccttctgacttgtactttccaccaaatgagcatctgtaaacctaaagcaagagcatgtttctgtcaaagaaatatcttttcctttctttctgaccacttgtgtaattctggtctttcagatttttaccaaaaataaaatcacagcagtagaaagttgtaacagatatttcaggatggaaaagttgcctaaatgctgttaaactgatttttctaacttcaggagtttttcttaaatgtgaaagatatccttcgcgctcctgttgacatcactggtcagtttgagaagtggggagaagaagaagcagaactgaataagaagtaaggtggtgccatttctttggggtttttgagcatgcccatgttctatgcctagcctcgcatcttggccaccatgtgtcctggactgtcgaggaagggctggggacactgtcgtacgttgtgcagaattaattcaggataggcggctctgctaatgggagctgctctgggtgttgaagtgcatggagaatttcttttttgttttttctttttgagacggagtttcgcccttgttgcccaggctggagtgcagtggcgtgatctcggctcaccacaacctccacctcccgggttcgagcgattctcctgcctcagcctcccgagtagctggggttacaggcatgcgccaccatacctggctaatttcagatttttagtagaggtgggggtctctccatgtttgtcaggctggtctcgaactcccgacctcaggtgatccgcccacctcagcctcccaaagtgctgggattatag

SEQ ID NO: 63822 - DNA, 1022 bp, Homo sapiens
agcaggtggtcagcgtgctatgtgactctcagttagagctgcagggaagcggatggacgtgcactgcacctggccagtgaccggcctcatcattctgcctatagcctgccttggaattctcattaaccctatgagggcagttgcagtgtgatgtttgctgaaggatagggtgtttgtggggagggtcctgtgttctctgttatcaattttttcaaagcgtatttttaaaaaatcagatataaactttcatgagtaagttcataataatgaaaagttgaaaacgtgaatgtatattttctatcaaagagcatctaaaagcgaatgtcatgggccatatcacattgtgcttttgcggaattgtcagtggcagaacagtgcggaggtagaaggaagccaggacagcggccttccgtgttggtggatagatctggattttgcttgcagaggttttttgtgtttttgtgtgtttgttttttaatctgggaatcagtataccaaaatggtaacagtagtaattcctaggttaaaagataatggcaatttttttcctagttttctttttttatctttcaaatattctacatttagtacatattttataatcatgaacttggtgtttagaaaaatatatttagcggtgcttttcctctggactctgtttctcagggcagcttaggtctgttgcctgattaggctcctgaaaagtggatttgtcacctggaaagatctcactgcagcttcttcagggtcacctgagttagaaccctagatggagtctgttcttcctccacaagggggtgacagcacctaaggcagcccttagaccagggaccaggaaaggctgcagcagccgggcaagacctggcgtgggtcctggtaaccttatgcctagagtgaagacctctgctctgcccattcatcgaacaaagggtgattctctgcgtgacctttggactggctcacaggtttctttattcacagcagctaatcttttccattggtcctgcatgtattgttgagag

SEQ ID NO: 63823 - DNA, 1003 bp, Homo sapiens
taggctctattctaaagaaatatcagaacctaaaataaaggtgcggtggctcacgcctataatcccagcacttttggaggccgaggtgggtggatcacctgaggttgggagttcgagaccagcctggccaacatggcgaaaccccatctctactaaaaatacacaaattagccaggtgtggtggtgcttgcctgtaatcccagctactcaggaggctgaggcatgagaatcacttgaacccaggaggcagaggttatagtgagccaagattgtgccactgcactccagcctgggtgacagaatgagactctgtctcaaaaaaatatataataaaataaaaccagacaacacagactgaagaaagatagagatagccaggttgacacataaatatcagacccatggcatttcaggctccgggtttgtgggagtagaggggcgggtttgtgatgatgaagcgcctcagctctgagaggatgcagcctgggcctctggaccagaaggcttcactaccctagaaccagagtggacatgcccacgtttcatgcacttcccaggagttgacagatcaagtaggccaagaattaatacggatatgaaaggtttgaaatacagttaacaggcttggtttgagagctgggaactttgcactcaggaattaaagaacatcctttccttccaagaacacagaaacatatgccaggccacagaaagatttccacaaatctcaaagaaccgttttcaaggaaccctcattctgtcaaggagccctcattctgtcaccatggagcgattgtattagataacaacacttggccagacatggcgacccacacctgtaatcccagcactttgggaggccgaggcaggaggatcgcttgagcccaggagttccagaccaacctgggcaacatagggagaccccctttctacaaaaaatttaaaaatgagctgggtgtggtggcacgtgcctatagtcccagctacttaagaggctgatgca

SEQ ID NO: 63824 - DNA, 3632 bp, Homo sapiens
ctgcctatctctcctaacctctggctgtgtccgtcatgaatcttttcctgaatgcaccaaggggttgtgctgtaggtgacacactgtgtgctcctgcccagcctctgcccataaccctgccctgcacggcccaggtaggctgcacatgctcaccaggcccacctcggccctcccacctctttttgcctctgcacccacagtccccttggctttgctcctctgagttcatgtgagacctgcccatttgtagagtcttgtatttgtccctgccgagccagttgtgtaagcatcacagtctccctaggagacggtggctcttcacaggtcaaggtcagcacctttgaattcagggcactgatgggctcacaccagctgcacgagatgttctcatgtgaagtgtgtggcccgctgctggatttttgtttctttctcttcaggtgttgctggaagaagccaaggatttgctctctgactggctggattctacacttggctgtgatgtcactgacaattccatcttctccaagctgcccaagttctgggagggggacttccacagagacatggaagctctgaatgtaagtgtcacgattgtcttgtgctggctctcttgcgctaagggccctgatttctaaattcctgttttggcaaggccagctcaattaagcggccaagtcaacattgaacttgagttgaggggcataatgggcttttcgttttatgaattgggaacgtttttatggagcgcgtggttttcagaagggaaaatcccaggacattctcatgtcttgcacaggttctccctccagatgtcttaacccgggttagtgagtatgtgccagaaattgtgaactttgtccagaagattgtggacaacggttacgggtaagcacaagggccttccctagggagggaagggctgcagaacatcgcacagggaggagctccccagctctgagcctgagtttgggaagcagaggagcaggtgttctggggctgcgtagctagaagtcccagcagacttcctcctacaactctgggcccacccaggggctgaggagcatgggtctgcactgtcctgggggccatggtgagaacctaacccagaatctgctgggaagctcggcagccaagaccatcagtcatggggccccagagctgcataatggtgagtgcgaatactgctgggccttcacagacatcagtgccattgcgtagacattttgagagtgctagtcctggtgtcatatcccgaaggaggatgcatttcatcagcatctatcgcttggctatgattttagtgactttttgttggcaaatccatcatacacttccctggcccgtattgtctcaatctccaaagtaagcattttcagaaatggccaacaaatggaaatgcagacaggaacccggttatctgtctgtagtgtgtagggaccagccccacagggtcggtgggtttttctccccatgtgtggagatgagagattgtagaaataaagacacaagacaaagagataaaagagaagacagctgggcccgggggaccactaccaccaagacgcggagaccggtagtggccccgaatgccaggctgcactgatatttattggatacaagacaaaggggtaggttaaggagagtgagccatcttcaatgataggtaaggccacgtgggtcacgtgtccactggacagggggcccttccctgcctggcagccaaggcagagagagagaggagacagagagaggcagcttacgccattatttctgcatatcagagacttttagtactttcactaatttgctactgctatctagaaggtagagccaggtgtacaggatggaacatgaaggaggactaggagcgtgaccgctgaagcacagcatcacagggagacggttaggcctccggataactgcgggcgagcctgactcatgtcaggccctccacaagaggtggaggagcagagtcttctccagactcccgcggggcaagggagactccctttcccggtctgctaagtagcgggtgtttttccttgacacttacgctaccgctagaccacagtccgcttggcaacgggcatcctcccagacgctggcgttaccactagaccaaggaacccttctggtggccgtgtccgggcataacaggaggttcacactcttgtcttctggtcactcctcactatgtcccctcagctgctatctctgtatggcctggtttttcctagattatgattatagagcgaggattattataatattggaataaagagtaattgctacaaactaatgattaatgatattcatatataatcatatctaagatctatatctggtataactattcttattttatattttattatactggaacagctcgtgccctcggtctcttgcctcggcacctgggtggcttgccgcccacagtagtgctcagcactgtaccgtgcgcctgctcccagagacccactgtgtccagcctcagattgcttccctcccacaggaaccacacaggctggatgaaagagaaacaagaggttgtgacagtgccaggaacggggcagactcttaagcagtagcgctgcttctctccccacttcacacaaactactgtggggcagcataagagcctgtgccaagccgagaggcatgggcaagccgaagctcagagaggacaggtcattccagactggagtaatctagagtgcttcttggaggccaagagcctcagctaagctaatgggtagagtgtggacattcagggaaaggtgaggccacacaagaatgaggacggcagcagccctgagcaaggcagggtgggagctgcatgggtcacaggacgccaggcagagggacgagctgcccagggcaggcaggctgcctccgcagcgggatgggccctggtgtcccactcagtccaaacagctgatacggttttcagtggccaccacagagagtagataggccacagatttcgcacttttatagccctgctttattttgttactgtcatcctgctgacacactttcgggtctgttagatgcacccacccaattccttttctgttttccagctatgtctccaatgggtctgtctactttgatacagcgaagtttgcttctagcgagaagcactcctatgggaagctggtgcctgaggccgttggagatcagaaagcccttcaagaaggggaaggtgaggagggcatgcctgagagcatgtgggctctccctcctggcccagcctgggttgtgttgactttgcaggccacgggggctgcgctgagcccacccctcagactcttgggaacagtgctttttcacctgaaggaattttaggagttttctgcactcaacattgtgcagctctaagaccatgacatgtgtttttttaatggatatataataattatgcaatttatggggaacatgtgatgtcttaatacatgcacaccgtgtgtgatgatcggggtagttaggatgctcgtcaccttagacgtttaccttttctttgcattgggaatgttccagatcttctggctatgttgaaatatacaacaaatgttttggtaactatagtcaccctactgtgctagtgaccacaagaacctattctttctgtc

SEQ ID NO: 63825 - DNA, 1049 bp, Homo sapiens
cacattttgctcatcctttcacctgcccgtggacacgtgggttgtttccaccttttggagatgcaagtaatgctgctataaacctgggtgtacaaatatctgtttgggttcctgctttcacttcttttggggatatacacggaagtggaattgctgggtcatgtgatgattctatttttgatattctgcgtaaccaccgtattgtttctgcagtggctgcactattacacattcccacccatagtgcatggggttctgttttctccacatccttgccaaagcttgttattcttcatttttttcatcccagtaggtgtgaggtggtatactgtggttttggtttgcatttccttaatggctagtgatgtggagtgtcttttgctgaactgtgagttgttttgtgttgtctctaggtggacatttgcaagtttctttaggccatatacctgcaagtggaatcgctgggttgtgtaggatatatgtgagtgactgtcgggggttcccaacactgcccacacattctggggccctagaaggactcatgagactcggcatcgagttatcatcttgtctaaggtttgtagcagtgacacagcgaggagcagaagctcaggcggagtcttcaatcatccatgggcaggctgctgaagcttcctccctgcctcccatgaggggacacagcacactctcccccaccaggaaaaaaatgcagccacatgtgtgaaatgtccctccctagggaagcccatcacataggcaccctctgcctggcacgtgccgcaattcctgactccccaggaggaaagctggtgttccacctgcataagccacagtgtttgttcaacagcccactgggggctgctgccacagagctgggtttcccggcctcttagcacaggggacatttcagctcctggatgccagctaatggccagctctgtaggcaggcctttctcaggtggcagacacagaccttctaggctcacttttatcttcatagtagccatatcagaaatgtctatatggccaggcacagtggctcacacttg

SEQ ID NO: 63826 - DNA, 1048 bp, Homo sapiens
gatgtgtctgcagcacacctcagaacacactgggtggcctacttttcctcatccccagaacagccctagaaatactgctctcacacccaatttgcattggagaaactgaggcacagagaggttaggtgccctgtccagggtcacacgtgagagggcagaaccaggagctcctgagccgggagcttcagtctctcttagttccttactgcctggccacttgggttgcacacttctctatctctatggggccatgggaaaaaccgttctgttttctacctggaatcacctttatgaatttaggttttgctgagcagtatctaatagatttgacgtctctttatggttgcagccattttcagtaaaattaaatgagaccacggatcccgataaaaagcagatgctcgaacggattcagcacgcagtgcagcttgccacagagccacttgagaaagctgtgcagtccagactcacgggagaggaagtcaacagctgtgtggaggtgaggcttcacacatctcccagacagcccgttcgggtcaaatgtcgggccgtgcatagactgatctgtgtgcacggattgattccacagattgtcttagtggaagacactctgtgtctccagtagctccactgtggcaggcggccctgttctgcggtggctgagtcagtgcccctcccctcccacacccctttgccccatttcctgggtgcagagcctgtgccactggaaggagactcgggatccacaccctcccaccacttccatcagataggcaggaggtgcacttggaacgtggggaggcagccttctgtcgaagtgttccaagattctccagcggactctccccacaccagctggagaaggaggagcagggattaacattgaattgagcattgaggcctgtgggtacctactgagcttggggccttcacgttgaccagctctcctgcccctgccaatatctccttcagacacagggcagagacctgggtgcagaggggaccctgccctcttcctcaggcctttccctgtggctggcgccctgga

SEQ ID NO: 63827 - DNA, 1024 bp, Homo sapiens
gtgtaaaagaagatagaactttcgcataagtaaataatgtaggcttgagctagcttgtgttttcacctgataaacatcattttaatcccctcagtgagttaatattaccacttctgctactgatatgatcatttctatgatgttcagacacggttagaaacctgcatgttgctcaggggtcggtagccctgggtgttttgcagaaggaaggcctcccacagcacgcacttcgacatgtggcttgcaggggaagctggggcccccagggctcatttcattaagcgtcagaaagatcatgttaggccttgggcactacttggcaggtgggagatggagggtggtgtttctatttgatgatggtgtgcacgtccggggcccacagttgtctcccaccaccctcaccctcacttagagttggccaagggagagagtggcctgctgcagagggatgcatgtgggatccaagcatcactccccaatgtctgccttccctccccagatcatcaagagggcccggcagaaccacctgttcgagcagtatcgggagaagaggcctgaagcggcacagctcttggaggatgttcaggccgccctgaaggtgggcctcttgctgtctgctctagaaaccgagccctttgctttctgttctcggtcctttgtaggctactgtccctagggtagtgtcagtctcacaggctttcacaaagtgtatgttactcaagccagttccgtcaggggcgctgaagtctccataggtaaggtcccctggcctgtgacaaagtcaccagcaaagatgtactggagtggagtggagagtaggtgacattcctgccacttacaggaaaacaactgaattcatcacagtgccactaattacacttataaaaatgcttaccaatattgctgtctaattttcaatgccaaggttacaactaaatcagaaacttctgcccaagatacaaaagctatactaagctttttaatttggtaatactgtaaattttcagaatcttttgaagaaatt

SEQ ID NO: 63828 - DNA, 1065 bp, Homo sapiens
ccagagcagcaccacgattcaggggtcctggcctccaagccgcgctcccccaacagggactgaccctggccaagtgttgtctgcctcagtttcttcatccgtaaaaagaaaatgacataacctacgtcctagagtgtactgcatattgaatatttagctcagggcctggcacatggtaggtactcagtaaatattagctgtgttattgttaaataagcagcatttcaacaatcaataaaatcattgattccctttatcgcctccctccatagatgagtagaaccccagggaggaagaggccccacccacccagggctcagttggtgggaggtgccgtacatctcactgggctcccactgagactgtgacttttcacagtaaaacaaaatggtctctgttgaattgtttacactaaacacaaaccacactgtgatgtttgttgctgtttttggtaatcctgtgcagtgtttcttgcatttcttgtgatcgtcattccttcattcctaacaaaggaagtgttcatacctcaagatgggaaaaaggtgacgtggtattgctgtgggccaaccgtctatgacgcatctcacatggggcacgccaggtaggtccaccgcggggtgtccctgcagcttctgcagttgcacgcagaagtcagagccattgggatccacagcagcgatcttaggtccacaaagatcttagatctgctacagagacctgagatttgaggaatcaagactgaatttcttctcttatttttaagatgaaaattttaatgccataagtaatctatattcactgcagaaagactacagatcaccaaaaagaaaatgtccatagccccactgctaacatgctggactcgacctgggcactttttctcacataccttaaagttttctctcatccctcaagctctcgtggggtccccagatgctgagttcccgtgacactcagacctgacaggcctgacgctgggttggctgtgaccgccccccgaccactggatggtcatggctgtagctcctgacgagtagctggctgttggggtaaatgccacagagt

SEQ ID NO: 63829 - DNA, 3286 bp, Homo sapiens
gtggggttctcctacccctcatcccccagcacccagagggagagggtgccgctgcggcaaagaggcttgaagttggtttggtttgggggatttctgttgtgagtttttaaaaattgaggttaaattctcgtaacatacttagctgacaggagggataccatgatcatgtaggtagctttcccaaggcgaggcttatccgttatactccagatgtgctgacccctatgatttccccaaatgtcagaaactgaactgtgtaatttgtgatggtgtggaactgtgttcctgctttccctgatagaaaacataaattaaaaatgtaaaaactaagtaatttatatgacataaagtgaaaagtacacaattctgtggtatttggcgcatgatgttgtcatgcagccttcatttctgtctagttccaaagcattttcatcacccaagagggaacccatccatacctgtcaggcagtcactccctcgcccccagtcgaagcgctgcccctgtgcctttgcctgttctggatgtttggcgtccagggaagggcttgaacacctttttccttggttctgtgccatcccctagtccctgtctttctggcggcctctgggctgcccgcctgcctgcctgacaccatgtgccctctgtctttgcagctcctgactacaggtccattctgagcattagtgacgaggcagccagggcacaagccctgaacgagcacctcagcacgcgtagctatgtccaggggtactcactgtcccaggcagacgtggacgcgttcaggcagctctcggccccgcccgctgacccccagctcttccacgtggctcggtggttcaggcacatagaagcgctcctgggtagcccctgtggcaaaggccagccctgcaggctccaagcaagtgagtaacagagtgggttccctggccattagaacctctctcccaaggtcaagggctttctccatcaccctggtgcttacctggcgtctgcggataccccagagggagcctcgcccaagtgtgtctcgagcaagtggcctggatgggcagatgcagcgcttgctggatggaggttgggataaaatcacgccctatggagttggttattcaggagcagtatgttcacatcactggtgtggcaggattgcctgaggtggtggggtgcagagccgctgcggctctggggttccacgtagcatgcccaggccacgggccctagccttgtgatttttagctaaggctgtgcctggctctggttgactcagttctttctctttatttcttccataagattgtagcgtgtctatcctccagctttagaattgttgaatcctaaagtattaattggcattgaacttttttttttttttttttttgagatggagtctcgctctatcgcccaggctggagtgcagtggtgcgatctccactcactgcaagctccacctcccgggttcatgccattctcctgcctcagcctcccgagtagctgggactgtaggcgcccaccaccatgcctggctaattttttgtatttttagtagagacggggtttcaccgtgttagccaggatggtctcgatctcccgacctcgtgatccacccgcctcggcctcccaaagtgctgggattacaagtgtgaaccaccgcgcccggccggcattgaactttttaaaaatcagaaataagtcattttttctctttgagatgatgtctgtcccgtagctccagcctgttggtgctggttgtgtctgtggaacgtgcctgtggttatttgcgggagatactcctgggatgcctgcatggctttgtcactctgtggcaaatctgagggggctccatgccatcatcactgaagtatgcctttgggtggcccagctcctcctgtggctgtgggcactcctccaccttcatgtgggggcaggtttagtgctgttttctggtggtcctggctgtagctggcagccttctgggggcttctccagactccgttggggcctgggattgggaacatgcccccccgcctctgccgtgggtcaggcctctgctagatcactgttttaaccaggctggaggtggggatgtcacatctcctgtgggtcgtgttttctggataactctgcagcagacactccttccccagcgtagggcagaggccgttgctgtgcaggtcacgtccttccccatgtagccgttcctgcctgagcctccagcgcggtcacccaagtgacacctgtgctgtgaggtgccttctctccaagggctcgggtgtcaggttgttccccctgccatgtgccattccaagacacagccagaggggggcaggattagggagggtgaagcgggcctggtacgtccagctcagcagtggcctgtccaggcttccctcatagggacttgttgaaagagcggcacagacgcaagcctccatccacactgtgagaggaaggaagggttttgctcttgcaaacactttttaacctacagagaggaagcagagccacgttgctgtgtaacagaatggaccatggatagcactaatggagttgctgtgccctccccaggttccaaatcccctcatcacccaggctgcgcaagaggctgccagggtctgcttgtgccaggaatgatgggcattatgtcaggcgaccctcactcaagcttgctgtacactgagcaggggctgaagggggaggtgggagctggagtctgggactgctagagcatccagtgacctcgagtgggtccaaggcgccatggagtccagtgtagtgtcctcgcccatgtccctgggatgacagtagctgtggatctccctccatgtagctgtgacaatcagagctgcttcccccactgagtgggaacgccctctctttccatggctcatactccccaagcatgcaccttccttgctggcacagtgggccatgtgcccctcctcctgctcgcccttccacctctgttggacatcccagcagcatcagatgtgcctgtgtctggccctcagtgtgcccgcctgttaccagctcctcccatgtgccttctgtgtcctgtctccaagatcctctcagacatggaaagactctgcttggcccggcgcggtggctcactcctgtaatcccagcactttgggaggccaaggcgggcggatcacgaggtcaggagattgagaccatgctcgctaagtcggtgacaacctgtctctactaaaaatacaaaaaattagccgggcgtgatggcgggtgcctatagtcccagctactcgggaggctgaggcaggagaa

SEQ ID NO: 63830 - DNA, 1778 bp, Homo sapiens
gggtggcaatattgctgtctgatcaccccacaggctcattgtgagggatgttggatgcccctaataatgaataacctccctcccagtaaggaggaagatggagatgctgttcttgggggtgagagaggatgcctgggggccacctttgtgaacgagttgcagctggacctccggggctggtgatcaggacggggagtgggaggggaagccctcacctgtgggaggaggcgctggtctctgggagtgggcagtgttggctcctagttggtgagagcaggggtgcatgcccctctctcctccccacgattcatgtctgggggctttttccggtcccctttctgaacacttcttgggcagggagtggatcactgggaaggacccaagaggagcagctgtagagggtgggaccaggggaacatttgcagaaagggagtaacctgcagggtgagatgttgcctggacacccacaagatgaggaccctggtgggacctttgaagtagcagggtcagagggcaaagggtcagggtgagtgaggggtgcagacccccaccaaaccggggcacttattaggagctcagacctgctgtaaaggggtctgcattttagcaagctttccacccatggggaagctggtttaaacctcacttgctgggcccaccccagagattctgatttggcaggtctctggtgagcccaagaatgtgacttctctggatcccccaggttctgctgctgaaggcacaccagggccatgcctggagtggacctgggagagcctcaagggaacgcaggaagagaaacagggcagccgggagaggtttaaatgcttacaggaggccaggcatggtggctcacgtctgtaatcccagcactttgggaggccgaggtgggtggatcacctgaggtcaggagttctagaccagcctggccaatatgtagaaaccccgtctctactaaaaatacaaaaattagctgggcatggtggcgggcacctgtaatcccagctactcgggaggctgaggcaggagaatcgcttgaacccgggaggcagagtttgcagtgagccgagatcatgccactgcactccagcctgggtgacgagcgagactccgtctcaaaaaataaaataaaataaaataaaataaaaataaataaaaaataaatgctgataggaaagagccagagagagggagaggtcgcactgccacagttgtttgacgtgtcagggttgttgttcatttggtgtggctttgttttggtatctgtgctgagcaattgcttggtacttgcatgtgatttcaataaatgttctgtagagactccacctttgtagccggtgacaaccaccatccacctttgggacattcccatgtccctcaatgtgttgatgaactgaactgcaaggtcatccggtggtggacattccttctcatgggggcagagcaggagtttcggcacggagcgtgcaggctctacgatgagggccagtgtcgaggaacaggtccctgggaggttttcagtctgctcagaagtgttctcatctgatctcagcatcagactgatccacagcctggctcaaacccatgaccacttgaaagctgacctatttttatttgtttcctcgagacacacttaaatgcagctaccacgattacccaaatgactgtctgcgtccatctcatggaagcctgtcattctcctgtgcttccctgggcaccagcacctttctgctctgagaagatccttcccaagcatggtcttggttcccttttgatga

SEQ ID NO: 63831 - DNA, 1147 bp, Homo sapiens
gcaggggcaggtgggagcctggacggaagctcagcctccagtttggaggccagcccacatggtcctaatgtcctgagggctcaaggaccacagaactggaggccaagctggcacatctggggccaaggggataccccaccagcatcctgggccatcaggccatatacctgctgccacagcagctactagagtggggacgagctgggcccagtttccatggagacctcagatgaggccacatttcccggactcctcgagaaggggctaataaggaggaatctagagccactccaatcccctggatgctgagagcaggctctctgggaagaagtgagcattctaagggtccgcaatctctctgaacccttatgcagcaaaggggtctgcgtggggatggggccagggttgggggagccagtgtggggctgaggacacctgagccagccctggtccagtgaggcggagcgtgtggcgtgggagggtggtgctgggagtcaccttctggctttgcagctttcctgtggtcctgaacggccacatagcccctcggagccttggtggctcatctgcagagtgggagcaccttcctacattattacgaggattccccgggaacacgtccacggtgaggtcatgtccgtgagatgaatctgtgcttttcctcctggttcttccttgttctgggggaagtttatgtcctggggctgaaagtggaatttgtggacaggccacttccctttctgttcttgtttctccagctgaggaactgaagttgctaatcacgtcctggaggtggggagagagggccctgtgcagatcctgggctggagataatttgggaggaggtaagtccccaagtgggggctggaggtgctctaggagaggtgggtccagcccctggggctcccagtctcaagggatacctggacccaggcctgctgggcacgtgcgggagcctgaggtgaacgcactgtgtgggctgggaggggcccggtgcagccggattccagggtgctgaccagggatctgcgactcacacccagactcaagaggggctggttcagtcatggtccagagggaatgtccttccatcaccagccatggaggccggagtcagaaatcaaagaaaacactctcagatgccttg

SEQ ID NO: 63832 - DNA, 1057 bp, Homo sapiens
tggacaactcaaaaaaaggccctcacctttgccctcacagattctgcctattggtttgggtggaagcaccagtgctgtttaagtcacatgcatcatgggattctaaggtgtggccagaatcagtgatggggggtttcagatgcatttgtacgagttgagctcagccttggttccaaagggaggtcacagggccttctttgcctaggtttcagaggccagctcagtgcagcttatactccaattgctgaagcagaattgctgttgtttagcaggagagggaacctgagagcaggaagagagaaagtcacattttgatctccatgtagaagtttactgttcctgaatctcttttataaagaacagaaaagcgtggactttttctgtatttcttggtctttctgttgatggttgtggtggtagcaggtgaaggggttgtgctaacacctttaaaggcatattctcacgatgcaggtgtgatttgtccagagaatctttcctaagaggaaatcccagagaagcaggagaaagagaaagaaatggctggtgctcaggtaaatgcatctcaggtcaggggttgtgtccacttttgctcctgaaatgtcatgtgtttagaatttggaaacctttacttctctacttgtggtgtttctccatagtaagtttgtttcaactacttttttttcttataataatgaagggtctctgaaaatatttgttttctatataccaaagccgtctctctgttatcttcaccttgacttcttatatgccatgaagaattcttaccatgactttatgacctgcagtattaaaaagttcacttcgtggcactgaacttgtggatacccaggattcctcttgaggatggggtgggtttttggatatcagcaaagaagggaaatgtgcactctttaggtttcatctggatgctccataagctgcatgcagaacaggactaagaaaataaacatttaaaccagatgacatttatctctcagaataactcaaagcattctggaaaagagaaaaatgaaaagacacttgctttttagaatgc

SEQ ID NO: 63833 - DNA, 1052 bp, Homo sapiens
taggttccttcaggattgagattcttccccagcatgctgccacttgtggagagacctccccacctcacccagcttctccctcctcatcatcatcttcgtcccagtctgtactgtgggtgtcctccccagaaagttcaccccctgtctcctgggttccgtgccctatctgccagttgcggttctcagcaagagaagtagaagagcatgccagcatatgtggggacttccctcaggcgtgagccatgaggtcctgtggttttgccccaccctctgtgacagactgggactgaatcgcttgacagctgagaagagccgctgaggccaaagctccctctctcctcctctccactcattccctcaggactctgcctgagggcacctctgtgcctagcctgatccccattcccagttgtcaaggcttctgtgaccatggcacctgattctcctaaggccagctctgttcttttcccccttggaagtctccttggaacttttgggccttgggacaccatccagaatgtctttccctctgtgagtggtgcacattctcatgcccattttcctgaaaggaaaaccgaggcccagtgaagagcaaacgctgcctgacagataaaatcctgtggtgtgctgggaatgtgcgtgtggattttgagcacgaggctgacatccagcaacccatgaaccgagctctcagtctcctttgtgggctcctgtcctgggcataatcaggtaatggtgatgtgtgtgacactaagcaagttatttattttagcatccagaattaactgagagaaaaaaatctcccatcctcccgctcacagagctatgatagggaccagatgggttaatgactaaggagtagttactaggcttgactgtggaaccttgggcatatcccattccttatctacacaaggaggtgattggaccagaaggtgtcaaagattccctcaagctgtgatattccaaattctgttcccaccttctttgagcaaatatgtcttctcttccctttcccagaagatttcactgtgtggcactaacaccggttc

SEQ ID NO: 63834 - DNA, 1026 bp, Homo sapiens
tatgttgcccaggttgcctaaaattttttaagccagtcaaatttagcagtggggggactgtacatcaactttagtgacactggtgttaataagttctgataacccattaccattggaccagctcctccctaaacttgatcttcatctctgttgcccgtggcagttttgtgtatcagtctgtccagctcactctgccaatctctccaccttgtatctgcatgtccccacttttgctcctgtgctcctaaatacctctttttttctctctctctcccccaacctctctgcctgttttccctgcagccatgggtcagagccccctctctgcagtctggtctttgctgctgctgctctggttcctcgtggtgagggcctttccagatggtccaggcctcctttgatgcatgagacacgggacagcctcgcctgctgcctctgcccatcctgaggatgttggccatgtgtgctttcagtgtaaccaagattcctgtcaatcccatctgcagggaactctgggaccttctctggtagctgccagaccggctggtggagaaacaggagacaatctggggactgaaccttacccagggctgtaggagtgagactctgaataaagggttgggccggcggtgtggcaggtacttcaagacaggcagcaactaacctggcgatagaagggcttcagctgatttgggggatgactggagaggaaagcgcttggccgtcatacctgctagtgttactcagatgcctcacgtgtccatctggaaagcttctgttcactcctccaggaagccttctgtgacctctcccacctggctggggtagtgaccctgtctctacgctcccacagagacctggatgcttccctataccaccacatgtccatgtctgtctgccacatcagaccatgagcttcctgagggaagggactgggtcggaggcacagagatggtgccaggaaacgtgtgaaactcagaaaggaacaaatacctgtgaatggctggtccctgcactgcccctgcc

SEQ ID NO: 63835 - DNA, 1174 bp, Homo sapiens
cggcttcccatgcctgaggactatgccatggacgaactgcgcagccttacccagtcctatctgcgagaactggctgttgggagcctgtgagccccaggcactttgcatcacagtcacatgcccattcacaccacacagaggttccctgccttgtttggattggcactgtttgccattctctgggttggctgtggcatctaccctccctccctgctgccagaagcagcatcctccacttgttcagggcttttcttaatactgaacgtagcataagggcttctggaacccagaagaggagacagtttaccatcctcaagatcattcagtgtttttcctttaaaaaaatggtcaataaagctcctttggcagaatcccccaaagaaccagggtattctttttccatccctagccattctggatcttgtgaccctccatgccaaccagcttccctactcctaccctggcccttttatactaggactccttaggaggagtgagacaggtgataatggatccttaacagatgaactatccacagaaggaagagggatccgtctcttaagtaattggttagttaacactgaattttggaggcaaaggagggttggcctgagttaggaaacaaaatgggatctttctgacacacttagggcagaagtgaatgcctgtcacggagggattgatcttcagggctgtttttgttcctgcctttagagttccatgaacaccatacctttgctactactatgtgcaggaacccttggtcacatgtgacatgtctgtgggaagctcccagagtttggtttggtccctggttttcagtcttgctgagactctgtctggatttgcctgcagagtttggataaaaaatggcaggttgggtaaccctccctgttcatcccatgttagctccaaagcatttcccaccctccatctaccccttccagaagcaaaaacaaaccatgactgaggcaggcatggagttgggcgttaggggcaggcagagggcctttgctacactgctgacagctatagggagccccaggtaatggcatgagatagctggtgttagggctatctcaggcaatatggccacacctgggtctttatgcatgaagataatgtaaaggtttttattaaaaaatatatatatgtataaataaatgatctagat

SEQ ID NO: 63836 - DNA, 1024 bp, Homo sapiens
accagtgcatacttgtaagtggcttaaatgataaacagtacttttgtagattgatttttatagacagaatttgatcaaagtagatatcatctgagatgacactagccataattaggcttggggaacctgtttaacggttacatttgttatgtaagtaccacagaaacatgatatgagcaagcatttatttatactatgtacttctggaaattgtaagacgaagttgagtgaggtagagacagattcagggtaatcagcttgagtggttgtttgagatgtctattaatttatgtatttttaacatcacagttagaaggatgccctctgtgaagttgttgtaagactttgtctcgtaacattgtttttctcttcctgccttagttgtgaagcactggagcctgacatggacactatgtgaagccctatggggccacctgaaggagcttgacagccagctaaatgaaccccgtgaatacattcaaattctggagcgaagaagagctttctcccgctggctatcctgtactgccacacctcagattgaagaggaagtctccttaacccaaaaaaacagccctgtggaggctgtattcagctacctcacaggcaaaaggatcagtgaggcctgctctctggcccagcagtcaggtggggaaggcatatggtccttctctgcgcctctgtcgccttcctactcactgcctcctaccgctccccgctaattgtgcatttccctttggcttctagcctatgagtattaattgcggacttcccagaaagattgctggttcccgtggaatatgtaatataacataaaatttaacttttaatcaagtaaacaatgtttaaggtcctaaacagagaattagaagacatagtgcggctgggctcagtggctcatgcctgtaattccagcactgtgggaggccaaggtgggtagatcacacccacctattcctatagaataggaaccatgacttttttttttttttttttttttttttgagacagtttcactcttgtt

SEQ ID NO: 63837 - DNA, 1050 bp, Homo sapiens
tactcgggaggctgaggcagagaattgcttgaacccaggaggcagaggttgcagtgagccaagatcatgccactgcactctagcctgggctacagggcgagactctgtctccaaaaaaaaaaaaaaaaagtttttgaagagtgaaatgaaataacatatacaaatgacttatacagagcctgctgcatatttttaaataatattaatagtgttgttgcttttattattgttgtagatatcatcatcatcattagaatcttgtcctgatttcctagttcaaagagtaatttctgcaaaatctgacttagcctgcttctggtcatccacatctgatataagtagtttgattaaacattgaatgatttcagccttactgatttttgttattgttcaagaaacaatagcttgtgttttgtaatagtctttctccccttcattcccgcttcatttcagttggtgggttactacaatcaaaatttacaagtggagcttttctttcaccaagtgtctctgtgcaagaatgtcgtactcccagagcagcatctttaatgaatatcccatccacatcctcttggtctgtccctccacccctgacttctgtgttcacaatgcccagcccagcccctgaggttccgttgaaaacagtgggtacacgtaggcaactaggcctagtccctcgtgaaaagtctgtcacctatggcaagggaaaactcttgatggacatggccctattcatgggacgctcatttcgtgttggttggggccccaactggactcttgctaatagtggagaacagctgaatggctctcatgaactagaaaatcatcagattgccgattccatggagtttggattcctgcccaatccagtagctgttaaaccgtgagtcacatttcttgatgctttttgagaaaggcaacatgataggtgaaaaaaactaatcaggaggatagggccctgctttgtcatctttctagagagagagagagagagagagagagagagagagagagagagagagagagagagagtgtgtgtgtgtgtgtgtg

SEQ ID NO: 63838 - DNA, 1724 bp, Homo sapiens
cctgggtgtcattaccagggctttttcctccttcaggattttttttttttttttgagacagagtctcattctgttgcccatgctggaatgcagtggcccagtcttggctcactacaacctccattgcctcccgagtagctgggattataggcatgtgcctgtaatcccaggcacatgccactacatcggctaatttttatatttttagtagagacagtttcaccaccatgttggccagactagtcttgaactcctgacctcaagtgatctgcccacctcggcctcccaaagtgctgagattacaagcttgagccatcaaacccagtctagaattttttttggtttgaaaatatttcaaatattggcttagtcatttgctaacattttaggatataggtaattgaatttgtactgtaccaattaatttacagtgtgtttcagctttgagtgtttacccttttaaatcatagactgttagtcatagttgtctttaaaactgcttaataaatgtaaatataactcttgacatttttaaacataaagggattcttcccagattaaaattgttcctaatattattactttgttttttggaagagtagatagtgctcgtatcttacgtggtactgcacaagtagagaccagctaaccttaggattcagtaacccaaaagttaaattccagacccaagattgtgttgactagaaatttatttctaaatgtttttaagaaaaagcaaagttactggagactttgatatttgtaccttttgttctttttttccaatgtcttctggcagtgttaggaaaaggtgaccctgtgtaaatcagaaaattgtagttgctagctagatcaagtaaagcataatctttgtctctgaagaccaccatttgtttcaccatgggtgctggtttaggtcccagacaccaggtcgtaatattagaatgggatgactacatgaatccttatttggatcaaagtactggtttatcttggggtaattgattttaaatcactctagcaaatctgctaccttacctcaccatagaatgggctgaatctaataattgttgtatcatattctgaataaagtaaatctgatttagaatctatttctgtttggtataatttaatgctgctttcctgatctttctgctgtctacagagccagagcccagaggtggagcagttagggagggttgtggaactggacagtgacatggtagatatcacccaggagccagttttggataccatgttagaagagagcatgcctgaggatcaggaacctgtgtctgcctcaacacatattgcatcttcactgggaattaatccacatgtcttacaggtgaagttctaacccaccttttttgtaacagaaagccaaactaatattttatctccattgcataggatcaggtctcttccttggttattaagatcattgagtgctcactgtaatggggaaaaaaaatacaagaatatggccaatgtctgggcctcattctcttattcaaggagataaggctatattgagaactagtagatagggtttctggttttaactgcattagaatccagagtcctagttccaatcccaattttgttgtgttttgtttttgaggcagagtttctttgctctgtcgcccaggctggagtggagtggtgtgatcttggttcactgcaacctccacctcctgggttcaagtgattcccctgcccca

SEQ ID NO: 63839 - DNA, 1051 bp, Homo sapiens
taacttaagatttgctcatgtgggttcatgcacagtaaattctgcctttattgactacctgatgtgcagtttaatctttttctttacctccatggttttttaaaagttaaattagctttctgaaagggtttttaatctccatttttttaaagttgtttgcttatacttcgggtaaccttgatatttgtattttaatagtacataatctttatgaaaaatagtttgggaatgtaaatgaattattatttggcttggggagattagggcctacattgtttatcgcaattacttgtatcattgatacgggatttctttgtaaagcatcctctacctctcagctgctgaaagctagacctttggtattttccatgctataattcttatggctgctgaaatgtgtggtttttatgatttattaaataatctcttaggaggcatttctggagaatgtgtgtatatacatgtttgcgcgtacaggggaggggagggtatgataaatgtgggaaactggaaatatattgacttttatgtttataatcttggtagcatttagaatgcccctaagaaatctccattgacaaatgaaatgctatagacttggttttccagttatccatattcattttgtctgtcatatgctttgtatcatctccttctttcctaattttttataaccttatatatatatttattataaatatatgtatttctgagggaaagagtcagatggccttattttctgtaacaaaagtaatatgtaggatcttaaagataacctctttccagttggcccagctgaaaaagaaaagcttcatttatggacagacaggaaaatgtttgtaatgttgacagtagtttctaggttctttaattgccagaatagaaatagtagaaaaataactataaactcctatattgacacttgtgtttgtgagagctctttgaaaaattgagcacccaaaaatttcagatcaaggttctagcaaaaagaggtagtaaggatttaaaatgggcaagtagctttttttttccttgagaaagagttgtcgcc

SEQ ID NO: 63840 - DNA, 1055 bp, Homo sapiens
gtatatatacaaaattgaaagcaggatctcaagcatttgtatacccatgttcatagcaacactattcacaacagccagtaggtaaaagtcacccaaatgttcattgataagtgaatgggtacacaaaatgtggtatatacatgcaataaaacactattcagcctacagagaagattagcatggtccctcacaaggataacacacaaatacatgaagcattccatattttttattttaaaaattaaaaaatatatgttattcagcctcaggaagaaaattctgatatatgctataacatggatgaaccttgaggacatgctaagtgaagtaagccagtcacaaaaagacaagtactatattgtgatgtatctgggataagtcaactttatagaaacaaagtagagtagtatttgccaggggctccgggaagcaggaaatggagagcagcatctacctattacatcctagtagtcactgtgtttagatgtaaggcatacaaaatgaataggatacaacacttgaactctggtattaatattagaagtggtacaccaccactcttgtagtcatcttcataccgatattcctgatacttcattttctaagcatttgtttttagtaaatgggtagtagctgttttttattattatttagtacggtagccctttaagacctgcataagacttggttcgtaccactggactgtaacttaaataagttagtgattcctagcttaagtgtgaaaatgagattggaaataattgatgtaccatggtaatttaaataaatgcagtctgactctagaaccagatattgagttgtcaatgtaggagtgactccttgctcttaagcttatggggcaaaactcaagtttatgacacatgcagaataattccaaggcagcatagttaccattattcactatttatgtgttaggtggctttctggtcttatatatgaagcgcttttactttaattggttactttaattggttatgttttacaggaaggctgaagttacattggatggagtttggccaacagataaaacatct

SEQ ID NO: 63841 - DNA, 1045 bp, Homo sapiens
ctagcgctttgggaggctgaggtgagaggatcacttgagctcaggagttctagaccagcctgggcaacatagtgagacctcacctttaccaaaagtaaagaaaatgagccaggcctgatgatatgtgcttgtagtctcagctacttgggagggtgaggtgggaggattgtttcagtttaggaggttcaggctgcagtgagacaggaccactgcacttcagtctggtcaacagaacaagaccttgccaaaaaaaaaaagaaaagaaaagaaaagaaaaatgcagattttaaatcagataacagtgtaattgaagttactctccctaagtccccattcttaccagtctaggaattgctgaattatttaaaatactaatacttaaaactgctttctccttgtgattgtttaatcactatagttgtaaagtaggtatttgccttcatacagaatgaatttttaactatttgctctgatttataggttatggttcaatctattttgaaggagatgtgaatttgacaaatctaaatttggatgatattgtgcatatccggaggaaagaagtagttgtctacttagatgataaccaaaaaccacctgtgggtgaagggctaaataggtaagagtttatgtacatacagaaaattatcagctaaatcacaatttttttttctgtaaacataaatgtgtttagatgtatgcttctgtagcttgctttccttactatagagtacatttattgtctctactttgatttaaaagtataaatggcaaagaaatgctatactgtgattttgaactccttttccctgattttattttttaattcatttttttacattccttggattcgattctattctattttatttcatttcatttcattttactattattattttttttttttgagatggagttttgctcttgttgcccaggctggagcgcagtggaatgatgtcagttcactgcaacctccgactcccgggttcaagcgattctcctgcctcagcctcccaagtagctgggattgtaggcgcccgcc

SEQ ID NO: 63842 - DNA, 1051 bp, Homo sapiens
tatttgataacaggattttttacttcaatactttcttgtcatgtttttaaaaaattctctctctttgggcaaaccaaagaaagtaaaaagaaaaaactttttagtcagcaaatgtctgtttacctttttcattcaagacagcactatgagttctatggtgagacagccatacgtttgtactgccaaaagagagagaaagcatttggagagtatacagatgattgaaatacaaacatagtgtgatgagtgaacgaagtgtctggataaagtgctcagagctgggaggaggacagttttcaaggggattttccactttgacttgaaggtgttcagctttattcttccaaacaccatagtacaatgtatttgacaccttgtgttttggctatacaatcctaggaagcgtttataaatgaaacttgttaggttattcttaggtgtacaagagttgagcagaagtgcaccattggactccagtttttaagataatgtctgggacatatctgtatgcctgagtaatttttttcttcttcttttggtttcttgtttataggaagagcattaagaagttggttttgaagaaccttaataatagcaatctcttttctcctgttaatcgtgattcagaaaatctagcttcaccatctgaatatccagaaaatggagagaggtacactgaattctgttttgagttcttcttagtagagagttatagtctcatttttaagacattcttaggaatttatgaaaatttatgaagtttgatgaatattacatagaagtattacaagcttatgagcgcctagaaatcaaatcatatttttgtcttttgaattcattaaaccttaaaattattggagttctgatttagtgcttcagaactattttggtatttgtgtatcttgttttggacagggttagcatgtatttgacaccctttagccctttaagggatattttgtctgtgatgattttctttcttttttttttttgagacagagtctcactctgtcgcccaggctggagtgcagtggcatgagccaagatcgcc

SEQ ID NO: 63843 - DNA, 1031 bp, Homo sapiens
aaatgctccaaaatccaaaactttgcactgacatgacattcaaaagaaatgctcattgggacattttggattttggattttcacatttgggatactcaactggtaagtataatgcaaatatttcaaaatacaaaaaaatccaaaatacttctggacccaagcattttggatgagggatactcaacatgtacaaagttgggtgttaacatccttgttttatgggaacagagacttcaacaggtatctagcaggtgaatgacaaagatgaggattgaaatctggtcttgtgatttttaaggccagtgcagtacatttaaagtaaaccaaaaatttccttgatgcttttgtttttcagagattgaaaccaacaaatccagcagcccagaaggctcttactacacctactcattataaactgacaccccgccctgccactagagtccggccaaaggctttacaaacaacaggcacagccaagtcacatctctttgatgggctggatgacgatgaaccatccctagccaatggagcattcatgcccaagtgagtttatttttgttaacagaaattaagtgtaaaatactgatataaactaaatatgaaataatatacaattatttaaatatattatagatgtgatacagtccactttgtttttgtttttgtttttgagacagagtcttactctgtcacccaggctggagtgcaatggcatgatctttgctcactgcaacctttgcctcccaggttcaaacgattctcttgcttcagcctcctgagtagctgggattacaggcgtgtgccatcacgcccagctaattttgtatttttagtagaaatggggtttcacaatgttggccaggctggtcttgaacccctgactgcatatgatctgccgcctggcctcccaaagtgctgggattacaggtgtgagccgctgtgcccagccagtccacttttttataatttgaaaaatacagaacatcacaaagaagaataaaagtcacccgatcactcccagggataactca

SEQ ID NO: 63844 - DNA, 1058 bp, Homo sapiens
atattatttcctttggacaattacatacacgcacgcacacacacacacacagtatttgccctgtatactgtcatattatttcctttagacaattacacacacacacacacacacacacacacacacacacacacactacttgccctgtatactgtcgtattatttcctttagacaaaccagtctataatgtttctagaagtcaaagactatggctttttatgcagctatttcagtgataggtatgcataaaatatttcatcagggttgtttaaattttcctttctttgattagtagtgacagtgaacactgtgtaagtgaatttatatgagtattgtatcttatgaaatgtctcttcctaaatttgacctattagcttatttgattcttgattttctttacagtttgctctacacacattctgccccaatgataccattgatctgagcattttgaagaccacttcttcaaaaagaataccgagctctgtgttacaaatgcattgtatccttgcatttatatatatatatatattttgttttctttttttttttttaaaagctttgacagatccaaatgcttctgctgcccagcaggctgttctccagcagcacatcaatagtctaacatactcaccttttggagactctcctctcttccggaatccgatgtcagaccctaagaagaaggaagaggtaaatttaaggatacttctgtaaaatatcatatcaaagaaagagaaactgaatgtgcagaatgtaattttttgcctgtatatattaagggattaagcaaagctaggtgtaattaattttttaagatattatttcactcagccgggagtaaattatttttgctgtatctggaaggtgttgggacagtgaaatgaccactacactgaagatcaatgctgagggttttcaacagtcctgaaataaggcagatattaatgttctcatttttaattaaaacaactttttttaagtttttttcttttctttttgagatgatgtcttgctagtatcgaactcctggaaggaatcctcccgcctcggtctc

SEQ ID NO: 63845 - DNA, 1029 bp, Homo sapiens
attgaggaaactgaagcacagagagatttaagtattttacctatgatgtgtataatgtactgagcgcagtacttgacctgcagtaacacttaccgtattcacccctttgttgaaatgagtggtcactatgaagtttccaaatgtattatatttttaagtaactgacctctggcacaacattgaaaggatcttctgtggtgcttttttctttcctcttgtctccgtagctcttggtgctggacaggcatctttgtttgggaacaaccaacctaagattggagggcctcttggtacaggagcctttggggcccctggatttaatactacgacagccactttgggctttggagccccccaggccccagtaggtaagtgtcagtcactttagaaggcttttcttaattttttgctaatacttgctgacctgattttccatcctacacctgtcccattcctaccaaggcattgcatacatgcatgtcattaaacaattgggtagtaaagaagggcttattaatagatcctggcctactctgctttcccagctcctaggcctcctctgtcaaagaaaccacttttgttactatttttaattcatctgatatataatttagttcatatcgctaaatgtgcttatattactgtgttttggtttattaaatctaagtaaatgtaacctgttatggtagatgagaatttagctcatgtatcacctctactttatttacttcttccaatataattatgtttactaaatttactgtatttcctaaatttagttttatctattgaagtgtttttctttattttatttttttgaaaaggagtctcgcgctgttgcccaagctggagtgcagtgatgtgatctcagctcactgcaacctccacctcctgggttcaagtgattcttctgcctcagcttcctgagtagctgggattacaggtgcatgccaccacacccagctaatttttttttttggtatcttgagcagagacagggtttcaccatgttcgccaggctgatctcga

SEQ ID NO: 63846 - DNA, 1303 bp, Homo sapiens
gtaggaaaaaatagctttggtacgggcaaattaaggaaggcttttcttttcttttttttcttttgctcaaattcaaattaaggaaggcttttctttttttgttgttaataatttttgtaattttaatagagatggggtttcaccatgttggccaggctggtcttggacgactgacctcaggtgatctgcctgcctcagcctcccggcataagccactgtgctgggccacaagttttatttttttccaagatggactcttgctctgttgcccaggctggagtgtagtggtgtgatctcggctcactgcaacctctgcctcccaggctcaagcaattcttgtgcctcaacctaatttttgtatttttagtagaaatggggtttcaccattttggccaggctagtctggaactcctgacctcgtgatcctcctgcctcggccttccaaagtactgggattacaggcatgagccactgcgcccagccacaagttttatttttatgtgatcagaattactttggctcctggatcttgtaggttatgattagcaatgtcttcccccatattccaagactctataattctttttctgatgcttttgtctctcattccacaataatgtaatatcctaacattttattttaatatattctgtttttcttcaacagttctctctcacaataaacaaactgcattgtgttgctgttgtatattccttatacatgcctctcctataaactaaaagatgaatacaatcaattaagaattttacacccccaaccttagcagcagcatatcatgtagggaaatgagaattgtgagtcagcaagcacacacactgttgcaattccctgatgatcacatctgctgaagcaggcccttgggtttgggaggaacatttcctgagacttgcatataaacacccacgttcctgaactctgcatttcatggtttaacaggtagactagcactatagcttcaggctgtatttttgggaggcaatagctaagtgggtgtttctctgcagcttcttattttcagtgatggtgattcaaactcaagcctcctgtaatgtgggcgtttgggtacttaatgagtagttgttacacaaatattaaatgtacagatacataagatatttttgtatgcttcgatgtaagaaaccaatcttagtataaaaggttttatactgacccttggcatgtgattttctcccgccccatgtgttgagactaagaaacattcattaactcatggacataacaatttcttgttttatagtgatattaacatcattagcactat

SEQ ID NO: 63847 - DNA, 1096 bp, Homo sapiens
tggagtgcagtggcgcaatctaggctcactgcaacctttgcctcctgggttgaaacgattttcccaccttagcctcccgagtagctgggattacaggcacgcaccgtcatacctggccttttttttttttttttttttttttttttttttttttgtatttttatagagacggggtttcaccatcttggccaggcttgttttgaactcctgacttcaggtgatctgtcagcctcggcctcccaaagtgctgggattacaggcgtgagccaccgcgcatggcctttgaattgatatttcaaggctgaaatgtaattaagtaaatatgaagacttgtttgcatatgtgaaattttttttttaagttatcctacaagttaggagtcctaaatattaactgaaaggttcacaacttaaagtcagactgctttgtgttaaactcccttatagaggaaattgagagttatattaaaagtacaatccactcattcttttgtcttcctaggttttggcacaaataccagtgggaatagtatttttggaagtaaaccagcacctgggactcttggaactgggcttggtgcaggatttggaacaggtaagaaactgctaccatgagatctaggaagtgacacagcttgactttctagtttctggaacttgagagatctgtttgattatgttactggaattaagaagtctaccttttcgtttttccagttgcgtttataagacattcccagcagttatgctttaccaggctttaaaatattggcatgtttgtgttagaagctgtatgctcccttttctacaaaatgtcctctgatagtcctggtctttttgggatttttagtatttaatgtgagaattgtcatgaggacattaactttcagtttccccatgttacttttgtaacagggatttgagaccttaaactgttcatcaaagtaagccctaatagaaaggcagagcaataagagcacatgctgatgtaattctcctttgcaaggagaatttcatttagttccattgtcatatagaccagtgtcaccccttttccctgattcctactgttaacaactatttttcagtgcctttga

SEQ ID NO: 63848 - DNA, 1342 bp, Homo sapiens
tataggcatgagccaccacacccagtcaatattttcaatatatcttataactacctaattatgttttcaaaattcagcatctgtcagatcagatatgggaagtttattctgtttgtcgagggaaatagtggttcaagtatttcttgaggattttgtgtgccagatacatcactaggcactgatagattctttttaggagttgagtacaaagacatggttatttggtgtaggtcagcagttaacagttttttaatgagcttttgaacgatcctgtactggagaaagagatcatattaaacatctattggaagattaatatgtttatcaactacaggaagaaggtagatagttcattgataggtaccaattcctaaattgatgtgtttggtttgatttttataatcccttttagtcattttgctcattcactgccagaaatgattatagttcctataaactctgtttgaaacaaccgttttgaggcagtggacttggttaccatgggtaagatacttggtgtctgtctctctctgtctctgtctctgtctctctgtctctctctgtctctctcccctccctcccaggctggagtgcaatggcacaatcttggctcactgcaacctccacctccctggttggagtgattttcctgtctcggcctcctgagtaggtgggattacaggcgcctgccaccatgcccagctaatttttgtatttaaagtagagatggggtttcaccgtgttggcgaggctggttttgaactcctgacctcaggcgatctgccctcctcggcctcccaaagtgctgggattacaggcgtgagccactgcacccatccctacttatttctttcctataaaattaaaatggaaagatagttaagggtcagttagcgtttctcaaccttttctattatcacttacccttccccatggaccgtttgtagactattttttcatttttaagttgtacctgctgtaatgggactgttttttcttttttctttctttttttttttttgagacggagtctcgctctgtctcccaggcgggagtgcagtggccagatatgggctcactgcaagccctgcctcctgggttcacgccattctcctgcctcagcctcccgagtagctgggactacgggcacccaccaccacccccggctaattttttctttgtatttttagtagagacggggtttctccatgttagccaggatggtctcgatgttgtgacctcatggtctgccggcattggcctcccaaagtgctgggattacaggcgtgagccaccacgcctggcctgttttttcttaatcatcatctcccttcccctgaga

SEQ ID NO: 63849 - DNA, 1045 bp, Homo sapiens
ctatggatttgaccattttgaacacttcatgtaaatggaatcataatatgtggtcttttgtgattgatgtctttcacttagcatagcattttcaaggaacatccatgtagcatgttcaaagtttttcttgtagtgatttcttctggcaaagcaagtatttgctacatttctcttaacaggtaaaaagatatttgatggccttgttatttttttctttgcctcactgaaatctggtttcattggattcattgtgtttcagtcgtaatccttaggggttaccattaacttttcaggccagaagcattccgtgtttataaagttaatcttgcccagattattttttgatagcctttattcatcttttttctaccttttttatgaatgttaggacatctttctcccaccccatacccaacccagtatacctgaggtaacctgtatttagtttggtgtgtgtcttaatattattttaaattttcctgtattctattctttttagaccctgtttggcaataacaagcttactacatttggaagcagcacaaccagtgcaccttcatttggtacaaccagtggcgggctctttggtaacaaaccaaccctgactttaggaaccaatacaaacacttctaattttggtacatataaaaagcaggtttggctctcttaaagttacactgactataccacacgttattctcctgattcgtatgattggaaatatttaaaagttctcaggtaagcggtagcttgatgtgaagtaccagagggaaaggtttaaagtcctggatatggcttgagataattagtaggcatgtaaattgcctttcatttactttggattacttcagcaatagctgagaaaccataaaggaaacacatttggttaagtaacacattgtatgaggccaggtttcaaacctgtggtagcatacagaagataattggttattcttatttttgtcgttgttggtttgttgtgttgttttgtttttgtttttttttttttttttggtggagaacagggtctttatatcgccttagc

SEQ ID NO: 63850 - DNA, 1856 bp, Homo sapiens
agaagtagtgtctctcatactttcagcaatatattccttagcaacaattaaattcatttatgtgtaatttttttttaaactcagctttttggaaaagtaaagtaatccaaggatttgctatttctttattagtttctgtaaagtaattgacagtggctgctaatttttctgaaattttggggggtgaaattttacattaacctatatttgatttctctaataggaccacttgtatattctaaagtttttggttatgtgtaggtatatgttataatgtatgtaaataaaatgtactgtgaccactcttgaagtctgtgacaagatgttttcagaaagacaagttcattcagcatgtagttaaatgagaaagggagaaatgagataaaatttatgatgaaacaaagtatttcttttaagttgtcttccaagtgtgaccttagggctttatggacacttagctgaccaaaggattcagactttgtttcacttgaaagttgtgagcctggaagtacgtatctttctgtatgaatttctatttgggccgggcactgtggctcacacctgtaatcccagcactttgggaggcataggtggatggatcatgaggtcaagagatcgagaccatcctggctaacacagtgaaaccccatctctacttaaaaaaaaaaaatacaaaaaattagccgggtttggtggcgggcacctgtagtcccagctactcaggaggctgaggcaggagaaatggcgtcaacctgggaggtggaggttgcagtgagctgagatcacgccactgcactccagcctgggctacacagcgagactccgtctcaaaaaaaaaaaaaaagaaatttctatttgaatatatttgcttgggagacttgaaaggtgaaaaatttcaggatatgagatcaggtgcagtggctcacacctgtaatcccaacactttaggatttcgaggtaggaggattgcttgagcccaggagtttgagactagcccgagcaacatggcaaaaggcagtctctacaaaaattaaaaaaaaaattagctgggtgtggtggcgcatgcctgtggtcccagctacttgggaggctgaggcaggagtattgcttgagcctgtgaggtcaaggctgcagtgagctgtgattgcaccactgcactccatcctaggagacagagcaagaccctgtctcaaaaaaaaaaaaaaaaaatgaagtactgtgatgctagtgccatagcccaattccaatgcatcttatacattcttaaatttcttactgttatcgtctcatttttctttcttatttttagattttggaaccagtactagcagtggaggactctttggaaccacaaataccacctctaatccttttggcagcacatctggctccctctttgggccaagtagttttacagctgctcctactgggactactattaaatttaacgtatgtattttcttccaatctttgtggaatgttttttcccgcatgtatatttctttgcaggatgaattgtaaaattgcttctctttccagcttagcttgacactgcctgaacgatgtgttaaaaacaaaatctataaatagttgtatagtagacaggaacacttgtgaaatgtaaatctagattacgatgtatatttgaattaggctcatcccaataaaatttgtattcataaaactttattataatctggtgtaaggtagaatttgaatttactgtgttaagaatttgcttctgaatggtcaactgttcaattttcttttttttttttgttattttgtttttttaagatggagtttcgctcttgttgcccaggctggagtgtggtggtgcaatctcagctcactgc

SEQ ID NO: 63851 - DNA, 1050 bp, Homo sapiens
agtagaaacggggtttctccatgttggtcaggctggtcttgaactcccgacctcaggtgatccgcccgcctcggcctcccaaagtgctgggattacaggcgtgagccaccatgcacagcctcaaatgcagaattttaagaaatattaaaatgccttttcatttggtcatcttacgtagattttattctaaattctaatttactctggattttgctttttcagatactggctttggcactactagtggaggggcatttggaacatctgcatttggttctagcaacaatactggaggcctctttggaaattcacagactaaaccaggtaggggctttatttgtgatataactggtttgtttgtagctagtataggaattgacttagtggctctgatgtacttaactttttccctccttctccatctcctcaggaggattgtttggaaccagttcatttagccagccagctacctccacaagcactggctttgggtttggtacgtcaacaggaacagcaaataccttgtttggaactgcaagcacagggaccagtctcttctcatcccaaaacaatgcctttgcacaaaataaaccaactggctttggcagtaagtgggacatcactggagttctgcatctaataatttggtttgcttattgaatgtgttgtcttttctccgtttttctgtgttcatctaccttcttttcctactaaatggcaaaaacaagggaagaggaaaacttcaatatgtactgaaaaggttaataggctggaaaggaagagagtatgtacatttctataaggatagaaatttgaagcactgttatttaagggatatgcagaggaagagcttcctgatgcaaaatggctagagaaaggatgaaaagccaggtcagagtagtgtagttcatgttaagatgggagaatttcaaggaggagtgtgttacagtcagccatattgtgctgcagaggcaccttcttcttgtctctgttttatatttggtatgaagagactagagcaggaatgacataatggacgtgacatggtta

SEQ ID NO: 63852 - DNA, 1051 bp, Homo sapiens
ccttctgtctcaaaaaaaaaaaaaaaaaaaaaatgttagctttttaggtggttgggttagcagactgtgttttaatttttgatggatatgattcataacctcctatgaggatcatataaacatcttgccttgtagacctgaaatatttattgattaaaaaggggacttaggttaaaaaaaaaaaaagattgaaaacattgttttaaatggatggttaatgttgggatctgaagtttaacctcacattatgaagtttaaccttactgttcagctcaggaacattgtagattataaagatcattttacaaggtttattttatcatacagtttgaggattttgaatgagagtatatactatagttcgaataggcctaagtttgtggaatgatagattttctaaaacaattatattccattttgtggtctttaagagagtgataatgttttctttttcccagctttctgaaacaaagactcattttgaagatgtttaacaaatcatttggaacaccctttgggggtggcacaggtggctttggcacaacttcaacatttggacagagtaagtttttaaaaaggacaaaagagggagaaaccttaatctcccttactaagaacaaatccactctgataagctttaggtgggaattttatttttactttcatatttataacaaagtcgtcttgaaaaaataattaggataagatctctttaacagtttttaagaaagtagaaataaattctaagttttcatggccttcttctgattgtcagtagaagatacttaaaatatttatattattttggttgacagaaagttataatttgttactaattttcagaccagaaaataattctcttaatgttgaagtctaaaatgcagttatgaaataactgccctggaatttaccctgtgaacatgatgtgacattcatgtcacagaaatgttaaaatgtggaagtgtctaattcccatcaaccctccggagatctacctcccttcctacccagtatcgtgtatgactaattgcctgaagcaatccttatttac

SEQ ID NO: 63853 - DNA, 1076 bp, Homo sapiens
aggctgacgcaggagaatgtcgtgaacctgggaggcagagcttgcagtcagccgagattgcgtcacttcactccagcctgggcaacagagccagactctgtctcaaaaaaaaaaaaaaattaaaatggtgttccatgagaaaaacaactacatttagctttcaaaagtaattacaggtggtttgccccttgatatcctttgtatttcagtaagcagaagtttttgagtatttcccaatactgaattaaaaagaattgtgctgtagtgttgagaaataatacaactaataatttttgctgcttcattaaggacccttttaagtgaaagtggaattttttatattgtaaatgggtgacagtgaagaattcagtgagtgttagttcagcaccatttggggttgttgctttgattcatgctgagttcccagcatttttgcacaccattgattttgcacatcagcacagaggtcagaacagtaaagaaaaagggcaaagtgtcttagttttattgtgaaaatggttttgatttcattgaacccctggaagaagtgttggggacttttaggggtctttgggtcacactttgagaaccactaatctagaacaatatttcacattggttcatagagccctaagctgcttcatagggcagagctggtggggttctactgtacctactccctcttcacttcagccagagcagcttctgcttatgtctgttttatatgtcgggtttcatggctaaaaaatatttgaaaatcattagtcaaggggaaaagaattgagcacctgaattagggctggtctgttcgtgaagggaacagttcatcctcagtaaatgttacagtcactcatcacttcacatctttaattttacttcgtttgacacagagcttactagtatttgcacactcaaccttcttgataggtaaatggggctgtgtgccgtggctcacgcctgtaatgctagcactttgggaggctgaggtgggcggatcacgaggtcggaagatcgagaccatcctggccaacttggtgaaaccccatgtctactaaaatacaaaaaattaacccggt

SEQ ID NO: 63854 - DNA, 1756 bp, Homo sapiens
gtacagaattcaaagtgaagtattatagtagaataaggtgaggaaataaaactccgttttggaggaagaagctaactggaataaagagcaaaaagagagcagtgatcattccctgtgacggtcttacaaattcgaaaagaaactcgagttaactgggttacagtatgtttacctggtggaggaagttagggtatttaaaaaccaaaactagaggttggacaggataaaggtactgggaaatacttgggtaaaattattctttttgactcttcagatttgatgaaattgaattagttgacacttggttctgtacacatcagtaagattgttactttgttcttgtatagatgacaaagcataaactcagaactagtagtgcagaagagaaccgtagtctaaatagtaaagcgtgaacagggtatgttttccgtgacattttctcagttcaggcatcaccctcttctgggaagcttttcttggcattctcttctctgcaagcttccataacacttatttgatatttctatttatagcacatatcatttttattttagctgtttttttaattaggctggtaaaatattttcatcttatctttgttgtccagttgcttgccacatagtaggccctcagtaagtgtgtttacttgaatgaatagacaaatatggaggagttatacctaacagtagtcaatagagaggctcctgaaatatggggcccagataagatagttcctgctgtttatatgttatgtgatactttggtccctgacatttatttgtttatttatttatgagatagggtctcactccatcacccaggctagagtgcagtggcgcaatctcggttcacagtagcctctacctcctgggctcaagcaatcttcccacctcagcctcccaagtagctgagaccacaggtgtgcaccaccatacccagctaatatttttttgtatattttgggtagagacagggtttcgctatgttgcccaggctggtatcgaattcctgggctcaagccatcccccacctcggcctcccaaagtgctgggattacaggtatgagccactgtgcccagccagtacctgactttatgtctactaggtcctagataactaagagcaagtagaatttttaaggaactaaatttacggctttgaaaaaattatattattttcttgtaatatgatttatgtggtggtagttaacctggaaagtaaagaatgatggtactaatgtttaatttccaataatgagactatgcagttatgtaatttgttgaaaggttagggaactaagaaactcagagatttaaggataagtattggctgagcatggtgactgactactgtaatcccagcacttcaaaggtcaaggcaggtggatttcctgagcccagaagttcaagactagcctgggcaacatggggaaaccctgtctctacgaaaaatacaaaaattaggcaggtatggtggcatgcacctgtactccagctacttaggaggctgaaatcaaagaaacatcagagcctggaagattgagactgcagtgctgtgattgcaccactgctttccagcctgggaaactgcgtgaggccctgtcttaaaacaaaggcgtggtgtggtggttcacgcctgtaatcctagcactttgggaggccgaggcgggtggattgcctgagctcaggagtttgagaccagcctgggcaacatggtgaaaccccatctgtacttaaaaaaaaatatgaaaaattag

SEQ ID NO: 63855 - DNA, 1015 bp, Homo sapiens
ttctccccccttccgggcgggcggacgcgcggggcgtctcagggcctctccgcttcgaagtctagcgccgctgcgcgcaccttctggcctgagagaggggcggtgctgaggacccgggggcccggagcccgggaggcccggctttggaggccctgggagagaatggacatcagtggggtctaggcctggaggtctccagttgctgcccacgcgagtgggtgtctgtctggttgtactcattcattcagtggtgtaaggaccccacggtgggctggcctttccggggtcagcgccttgaaaccctgaatacggtctgccccgcacttccttgaccgtcatgtgggactgggctttatttgccttggcttctccataagggaagtgggcaccccgaggattagggtgagtccgaagtttgggagatttttaagataatatctgagaataggagtcggttcggtggagcaaaaggttcttttctattttcccacgtgttcagtgtaaagccagatgaggagacagattgagtttctggattactatagccataaggactttagaaattgtttaagtcaatccccctaccttacatcagttttgtagatggggaaaccgaggcccggagtaacaggcaggattagccaatgccagatttttgacagtctaaacagttttctactacctcaccctccctggatatttcagtctcccattattaagaattccctttaggaggtcggtgcggcatggacattaggtagctaaacgtagatgtagtcttcacagcgttttccgtttagttgctaccagctctgttcacgggtaaggtggaagcttcgttagtggtaccctaacctagagcttgagaactaaacttagaagatggttaaagaacgtcagcgttgttatgtatcggaaacaaatcggtaaaactacaagccattgtttccctttctaaatctgaattttttgacttgtgtcagctgatgaggactcggagtcagttagggattta

SEQ ID NO: 63856 - DNA, 1060 bp, Homo sapiens
ggaatgttgtcttgggattctgagtcagtcttcctcatccagggcaagagctatccaagtttaggtgccttcctcctcagactccccaccccacagcacacagctaattttaggactgagcacaagggctgactttatcactgagtgccagcctggctgcctggggccctgacagcatgccactccatccccaggtctgacaagatgtaccaggtcccactaccactggatcgggatgggaccctggtacggctccgcttcaccatggtggccctggtcacggtctgctgtccacttgtcgccttcctcttctgcatcctctggtccctgctcttccacttcaaggagacaacggccacacactgtggggtagggcatggggacactgatacctcatattcaggccgatctggatcttctttagatcttgaatatcttttaacaagattagccagctctccactggggcccatcaaacatacggggctgctggggggatgcctgcaaattgaaatctcaagggttagtctccctctgccttctgtgaggttctggaggctggagtcactgaagtgtaatatagagtcagtaaatgaattacaagtataacagagtttgacacatgtcccaccccatttactttgatatcctagagaaagtggtcttacatctttcttcctggccccgcgccccatatccctgtccagagggcagacctagagccaaatccttacttcatagaagagcagattctggaaccccagggtttctgggaagtggagagagaacaggattgggctagagggtattttgggcctcttaatgtagcactatgggcttgtgcctgtctctgtaggaatgtgactcagtatatgtgtgtgtgattgtgagggtcatgactgtatataatgggtttgagtgggtcgtgtgtgagagagactatatctgtgcctgtctgtatggagatctgattatgtacgtgtgtatgtgtcctggggtgagtcccgtggcctctaagattccatagatgtctgtgtaccctctggacagggatatgggg

SEQ ID NO: 63857 - DNA, 1036 bp, Homo sapiens
cctgatcttggctcattgcagccttgacctcctgggctcaggtgattcctcgcctcagcctcagccttgggtagctgggactacaggtgcatgccaccatgcctggctaattcttatattttttttgtagagatggggttttgccatgttgtgtaggctggagatttgtgcttcagaagaccactctagcttctgagtggagaacagctttaaggtcaggggcaagagtagggtataaggaggctggtgcagtagctcatgctcctgggggaaccagagccaagatgcggactgtgagcgtagagaggagggatggagtctagagaggtgtagaaagtgggattgacagcaaatggagtttttgtgcagttggcatggggcgggggacagtacggtagctagagaaggcatctataatgtggggggacttttacctgaggccaaaggaatgaatcttatggtgaaatctgaggtgccgtgcaaggggattttggggaaccctgctttataccatatgagtttctgatctactgtcctatcagaaagggcttatcctcccgtctctcagtactcttagctctgggcacatggggaagtttggggtgagctgtgtacccagtttctcatagctcctgatgttgcttgttgctggtgcagtcgatgagtggggaacttgtgtgctggaatggggctggcggtaggagtacatgtacctgattgtgtgtatgtgtctgtgtgtatatgtgcgtgtgtgtgtacatgatggaagagacagtccctgctcttagaatcccacccccatccctaatctgagagaagctcatgaagacaggaccagcagccacaatgccctaactctctcttcctcctgaggccttccccaaactctgtatcatttctccccagtacctgttcccaacagtggtcagggttcagggcccttgaatcctttaggctctcccagtcaagctttagatggtggtcctgttttccttaaagtagctgagactggggagtagttttcagattgaatatt

SEQ ID NO: 63858 - DNA, 1109 bp, Homo sapiens
cacctccagcctcacaatacatgttgtgccgaaagtagacagccagcgccgagaagaaggagatgaagttgatgatgaagagccgctgtttccagctgtaggacttgcgatcctagggaatgggctgtctgatcactctgcagcttgctgggtatgagagcgtgggctcccctctcagccctaactcctaagggctgggccttatctcccttggctcccactagcggtcatggaagggagcacaggcaggggcagcaagaatgacgactatgtgttcacgtccctgcctctgggggagtgatgggccgaggagcagtggtattcctgccgcttccacttcagggggatggagtatgaaagttacatggagtcacccaccaaccccacctccaaatactgtgggggaaaagaaacccatgtacatgggtggggcgctggaattatgacagaccagtcctctgacactgttcctaactcactgccgcctagatgcgactcctcattctatccccatttgcagcctccatctcttctattctccagtctcccacactacccaaacacagtgctatagtcctagattctgaccaaccaccctcagtttgttcccaagccccagccccaaccccagcacccctctgccagggttcccattagaactcagttcccacctcaccattacccgaatcctgaggacagatgtccttgattttcttctgggctgccttggagcccccgctagggatagaccgtacctcctgacttactgtgtgcttcttggtcaaccgccagagaatgcaggtgaggagcatgtgcccgagggatgaggcaatgaacacaatgaaagcattttcgtggatggctggagggaaagaggattgggagccacattgcagggagtgcccacaccacgaagtaggaaggtccgaatgtggtaggggcaggcccgtcccctcagggaacacttccccactcctccctcatccaggcacccactgaagtcctcggaggaggagacataagtgagcactagcaacgcgaggttctccacgacattgaggccgaagttgaggcggcagagcgggcgatagcaggaacacggggaggtg

SEQ ID NO: 63859 - DNA, 1029 bp, Homo sapiens
aagggtgtaggccaaggctcaccccagtgctgctggcttctcctctccacccctcatatgggcgtggggtcctcaaacatcacctttacctgagaggccccaagaagctgagctggcagagagctccaccatttggtgctaaaaaaaaaaacgtcctgaggttcatgaccaccatccagtttctggcctttacacagtcacctttcactgaggtcaggagcccctgagcagtggctgctccctgacaaccacagccatttctctgcacgggggtcattcataggactaatgtatttcatgatctactgtgcacatccaggcctgtggccacagtcccctgctaaagttgctcaggtgttctagtcctgacttcacctttttgatttggtgtgtgccctagggtatgtacccttccccatctgagcctcggtgtgtccatgtgtctggcgggggatgggtggactgtatgatttccaaggactctaccagtcagtggttctgatgtcatcgggtggaggtggtgttctatacctaaaggatgacctgctccagaaacagcaccagcacagcatgtattttcttctcttctgaaagttctggcttgtagacccctcccctcctttgcaaaggtatgggatagaggggtcagatgcagatctctactgtaaaatgggctccctggtatctcctgtcttccctactgctccaaaccctaaattttggttgtacattttatttgaaaggaaaataaattttttttttgggccaacagttgcctaggcttgctagtcttggggctcatcttgtttgataggaactgggagagaaacaggctcaagaatggggagggagtaagtccacggcagggtatgattcctagcagaaccccccagtcccccttaggtctggagtctcctaaagctggtctaagcctttattttggtgagcaggagtgagtgagctatctgtaatgattctaggactgcaagctagggtacctggaagtcttcagttgagacagagacctgg

SEQ ID NO: 63860 - DNA, 1019 bp, Homo sapiens
tgaattcttctttggatatccattgcatggctacctgtcgcccaggttagagtgcagtgtcgcgatctcagctcactgcaatctccacctcccgggttcaagtgattctcctgcctcagcctcctgagttattgggattacatgcatgtgccatcatgcccagctaatttttgtatttttagtagagacaggatttcatcatgttggccaggctggtcttgaacacctggcctcaagtgatccacctgccttggcctctgaaagtgctgggattacaggagtaagccactgcacccatggccaccccttttaaccctgctttggctctgtgtgattctccttttccaacagtcatacgtaagtttcccagctgtacatgcccttcagtactgaagccttggcttctctggactaaatgacaaaaaaaaacctctaagtatagggctaggcacacaggactgtacaaccattgccttttgatctgcttgtaccagccctcatcactgagatatggagagacttctctgaagcccagtatcggacactccctgcccaccccccaacagacaagactgcaatgctgaatctcatcggacagcaatgacaggcaaaagctatgcctgaaataggcaaaaatctctcttcccagtaccaggctgacctggctccggcaggaagtatagcccatgggggtctaaccctatctgaatgtggtccctggagcccggcttgtacccagtggggcctggccttggggtgtggcccaggcaggcccagaatgggggagggaaaggaagcagcctgattgccagatctctgtggctgttacagcaggggaagtgtcccaactgggagtgggggaggggaggaacggactcttaaaagataggcgagtatggaggtgatgggaacttacctcagccttctataacctgcctccctaacatggggctccctttctgcagccctccctgaacctcattataactacaatccatctctggccattccaatcctga

SEQ ID NO: 63861 - DNA, 1240 bp, Homo sapiens
attatccaagtcagaagtgacttatcctatccaaagtctggtccctgtctctctcacaggcttggagaggctgatgtgaatcttatctcttgttattagaatgggagtgtctagagggcaaggtcctggttgactggaccttgctgagcaccctaagctgagcacaccatgtagtagctgtcagtaaatgactgaatgaagtcgatgcaatcatgtctttgcatatgggagttcctcttcctggaatgcgactcaccccccttcagatccttcctgtccttcaggcccagtactgttccccagcttctccaggacatcacagcaaccccctcttctgccttacctttcccagcattgaccgtacttttcattgtgctgaactaactggatgcttcagggggagggtagtctgaccttctgtttatttccagaagcccagggaagggctgagcaaaagctgtagaatgacatacccctcctcccccatcaatccacagactctgatgctgggaacaaggaagaacctctaggaccagaagacacaagacataagtaaccaacttctttctcattcaccctgaagagcccaaagttggggtaataaacacataagctatactgtcttgtcttcaactggaagggtgagaggtgaagctggcagatctagctcagagatgatgaggaagatgggaaggaaaagtggtcccgacaggctacagactgggaatatccgaggacccttggtcaaagacatggcaagggacaggggcactgttggaaacacttccaaagctctacaagtttgtttgtttgtttgttttgaagggaggaatagaggagaggtgatataaagaggctcaaaggggctgcagctggctgcagctgggctgggaggaggaagctgggggagacatgaggtcagtgtgggactgggaccaggccaagggctgagtctctttcttccctttctccccatcagcagggaagaacccaagagagcccagttcctagccttaaaaaaaaaaaaaaaatcccccgggtgccgtggctcacgtctgtaatcccagcactttgggaggccaaggcaggcagaccacttgagatcaggagttcgaaaccagcctggccaacatggtgaaaccccgtctctactaaaaatacaaaaattagctgggcgtagtggtgggattacgcctgtaatcccagctactcaggaggctgagggaggacaatcacttga

SEQ ID NO: 63862 - DNA, 1007 bp, Homo sapiens
aggagtgctaggcagggctggagaatgttgctttccttctgacaattaggcaggccttggtgactctgtagctgagagccaagaaaagggctgtactttttttctgctctggagagtcttttgcaggggcccagagaatttgattttttctcttttggatgtatatacccatctgtctctttttagttagttaaaatatttgatcctaagattgatttagttaaaatgcttatggctttagcatgcatacaataaacactatgaaagcctgatcctgcagtgaaggcaggtgctctacaaggaggatctctcactgggccgtggagaggccattcctgtcaccctttggctctttaatacctgtacacccagccatgctaggtcactttctcagtaaagatctgtgcctgcctgtgctactctggggcttgcgtttctgaagctggcctgatacggatgcttggaaccgtccttagactctagaaaacaacaatggtttctgtagaatgtgcatgagggacctcaggtggagtctggagttatggctgccagtgttggaggtattgagggcctctaatcaggaactgtggtttagttcagtgtagctaggacagggccttggaggataggcatctaggcagtgtgcagagtgcaggctggcttctcaatcaacctctgatggagtggcaggccagaaccctgcctccctcccccagctagttgctgctgcctccaaggctataaatggcctggccatcttggtagctatgctaattttagctgagggtggctcccggaactgggctggggccaagagcaggtaggtggggcttggctgaagctaatactggggcctggggagagggacacactaagcctggggtagccaggatataatctgctcccaggcctcagctttgacaatcacccttagctaggttaattgattcagcaaacattgaacaatgccagctcatgtggtatttattaaacaagtattaatattt

SEQ ID NO: 63863 - DNA, 1030 bp, Homo sapiens
gtaaatatctggtttcactgtttggtagctggatgatcattaggcagagttgcttcattgttggctagctacctcacatgagcacccataggtaggaagattgcagtcatgtgtgatctagtagtggttctattttttttttttttttgagatggagtcttgctctgttgcccaggctggagtgcagtggcccgatctcagctcactgcaagctccacctcccaggttcatgccattctcctgcctcagcctcccaagtggctgggactacaggcatccgccaccacgcctggctaattgttttgtatttttagtagagacagggtttcaccttgttagccaggatggtcttgatctcctgacttcgtgatctgcctgcctcggcctcccaaagtgtgggattacaggcgtgagccaccgcgcctggcctctattttttaccgtaatttagaagtaatgatgagtgtaaataatactttgagatatctgtagcaatgtaatgtgatatgaaaacatctgttgatttctattgatgacaaaatcacagttattgctaatattattgtggttggttgctccatatgtaattgaaggaaatgctaactttcagtaagagaatattgaaaacaaagatgtaatttcattcccatccaaattcacaggcctcctgaattctatctatgggccccttagggatatggggccttcgtgttaagaacagctctttggcaaggaagtgatgagatcttgtggaggggagtagtttcctaggtctctacaggacttgagtttcagacccaaggggcccctctggtttcctgctgggtaacctttgatatacattgctgagtggctttgtgggcatgctgtggtacatttccctttgtggaaaatgattctttgggaaactcagcaggtttggttgttgtcaggcttttagggagaaaaaaagagaccaaactgggcctccagagctttgttgttgctgttgttgttactgttgattaaaaaaatcatgaaatattaagat

SEQ ID NO: 63864 - DNA, 1053 bp, Homo sapiens
tgggactcacaatgacagatgaaaaacttcattctgactttttaggccattggtgttaggtgctaggactgaaatcctagtatgtgaaagctggaaggggttttagagaccatctctcccaaacttcttatttacatatcagaagaacaaacttacccaaggttttggtaagccagggctagaatataattttctctgattctcattcatatgttgttctcactctgttgtggagcctgtctaccctaatggagcctgtttgggttgttaggaggtctgggacctacacagaggagaaccaggaagcagttcacaatattatattatgttcaccgaaattggtctgggtacaattagggatatacaaagtcaaatgtcaagtgctgcttctttggacctatccagctagaaagcttttttattaggcacagaaaaagaagcccagcaatatctgtttcctatggtgcctaatatatgcaccctataccactctcttgacaatatctgttcagagcaatgaggaatctgtttgctgggatgtacagtataggcatctgaaggagacaggtcagagccttatgttgtatgtctcaccactgagctgttcagctggctccattatggatttggggcctccacaggcagggtaaatgtattaaaaactttgtggggttactcgtggccacctggaaagtgccaaggggaggttctctgggcattgagaatttgacaactttgcctgtgttgatacaacttgctagagcaggcaagacttgaagagggatggctgtggtcctgtcatgtttatcagagtggagcagatttcttttgtgtgagaagtcatgcaagaaaaatccggaaatgagccaacagcacttaaacttttgttttctgctggggagcatggaatagagaaggtgcaggttctaaaatttctgtatgggtggtggttgctttcctgacacagagttccagccccagaccactttactcacttcatctccctctgttccccttgctgcattcttggcaagccaagcatttttctttgtt

SEQ ID NO: 63865 - DNA, 1403 bp, Homo sapiens
tgtcgcccaggctggagtgcagtggcgccatcttggctcattgcaagccctgcctcccgggttcatgccattctcctgcctcagcctcccgagtagcggggactacaggcgccagccaccatgctcggttaatttttttgtatttttagtagagatgggttttcaccgtgttagccagaatggtcttgatctcctgacctcgtgatccgcccgcctccacttcccaaagtgctaggtttataggcgtgagccaccgcacctggcctgagtactattctttatcaggactgggctaggtactttcacatgcattattttagttaatcctcacatcgggtctctcactttatagctttttgtacaaggcaatcttggttcagtgccctgtgattgatactgatagtcttgttggcagttgtgatcttctctgctgagggagatcagagaagctttgtagaggaggtagcagcttagtgggtcttcagatacttcaggtagaaatataagggaatttgtgggaagtattccagtcataggaaatgttatgagtaaaggtctggagtgggaaaaagtaaagagtctttggggggcagtagtttagattggctggagagtggtagctgtgccagagagtaccataaaaagatcaaggagggcctaaattgtcaggctacttgattccatagggaataaatagtccttgcacgttttgacaaggggagagacctgacctgagttttgctttagcaaggttaatctcacagaatatgcacagtacattggtaaaggtgagattggaggcaatgagcctagataggagactttgcaactgttcatgagcagaagacatcagggtctgcattgtggaggtaaaatcagtaggactcagagtttaaatgtaggaagggaaggaaagaaagaaaagagtcaaagatacaccagtgttttgagtgtgggtcatgaagagactggtggtgccattagcagaaaatatatggcagtcagaaggagggtcagtgctaggggatgattagtggtggggtagctgaacttatttgaagtgctgggcaaggggctacactccacaggacttcaggaaccaaataattctttctatgcttatttcacattgctacattttacaaatgagttttctggggtccaaagaaatgaaatgatttgcctaaagtcatacagtaactccatggtggaatctaagtctgagaacccaagtctctttgctttttagctattaaacttcctaacaaagctgagccttgactctaggaaaatcagagacagtcttggagacagacaaacctgacttcaattccagatcttgccagttttctgtttgtaagatcgtaacaagattgcttttcctctctgagcctcatattccc

SEQ ID NO: 63866 - DNA, 1052 bp, Homo sapiens
gtctgatatttaagtcactgaggcatgaatctacctccctcatctgactattcccgctcctgcaagatttggtactcagggtgtatttgttaaagaacagaatgaagttatagtgctggaatttcaggtgttatgatagactggcaagggtaagggttttgggcaaagccttggctagtttttcaaataaggccccctgtgtctttctgatttgcccagaatgtgctgttattttcctggacatctggctttagagtttgtatctttttttttttttaatttttattttctcctcctcttcctcttcttttattgtttgtttgtttgtttgtgtttttcttgtagttggtttgcaacctacagagctaggcttaatgctccctggactggagtgatatgacaaaccctcagcttcgtcttggttgctggaatatgcctgttgaccatggtgcttggattttgtttgtttggttggttttttgcaaagagcatgccaagatactaaccttgcatttggggcttatactttctgcaacctctgcctaccagtgtatgtcacttcacaggataaaggctttcctggcaaaggcaaacacatgtaaaggcatccctataagttgaattatttttctcactgacttgaaaacaattgaaaaactatctcagacctttttctgtgcatatagtgtatacttcgtgtttaacataaaaagttaaacttcaatggcaaattggaacataacaaaatataggccaggcacagtggctcatgcttgtaatcccagcactttgggaggccgaggcaggcagatcgcttgagctcaggagcttgagaccagcctgggcaacatggtgaaaccctgtctctacaaaaaatacaaaaaattagccaggagtggtagtgtgtgcttgtaatcccagctacttgggggtagaggcaggaggattgcttgagcctgggaggccgaggctaaattgagccaagatcatgccactgcactccagcctgggtgacaaagtgagaccctgtctcaaaaaaaaaaaaaccccta

SEQ ID NO: 63867 - DNA, 1075 bp, Homo sapiens
ggaggtacagaatgctacttttggggtatggctgctttagggcctttcatttcgttttcagatttgatgaaagaatagggcatctgtggccaggcgcaatggctcacaccagtaatcctagcactttgggaggccgagacgggcggatcacgaggtcaggagattgagaccatcctggctaacatggtgaaaccctgcctctactaaaaatacaaaaaattagccggacgtggtggcatgcacctgtagtcccagctacttgagaggctgaggcaggagaatcgcttcaacccgggaggcacggaggttgcaatgagtggagatcgcaccactgcactccagcctgggtgacagagtgagactctgtctcaaaaaaaaaaaaaaaaaataggacatctgtgtccaggaatctttttatctccccaccacccctcaagcagtgctgggctgactgcagaaggctcttccctgttctgcacttgttccatttctgtttttgaaagatgaagcctgggaggtgccagagctatgccagctgctatggggccagaaacaggtgaggcttttaggtctgcttgagttaaggagtgaggggtttgtcctcttcagctagcttaaggtctctgctatgaaactagataagtattcacatagcttgtttttcatttggggctattttcagccttggaggccagcaaggtgaatgattgagatgcttttatggggttcaagcttttgctagatcctatttgccaggataggtgctcagccattttccaggacatcagcttttctgaacaagcagcactgaaaggaagaagcacttcccttttctttcagggggcagtataggaaatgtgagggtgggtggtcagtttaatattataacccaggttttaagtagagaggctgtatagtttggaacattgccatatagtctttttttttgaatttttgagacagagtctccctctgttgcccaggctagtgtgcagtggtgtgctttctgctcactgcagcctccacctcccagattcaagggattttcctgcctaagcctggagattacaggtgc

SEQ ID NO: 63868 - DNA, 1079 bp, Homo sapiens
atatgtaaggcactgtactaggcactttgcatgtgtttaccacaatcttccctgaaccttgtgagatagatattctcattttacagaggagatgactaaaactcaggaagattgacttagtaacctaatgttacacagctggcaagactaaaatccaggccttctgactttgtctttcgaaaatgacagcttccctgtttataactttctatagtaaaattgggctaggataatttaaccatgctatctttggggacacttgtattattgaattatctcatatagctcaggaaaatgggggcaaacatgaagggaggggaataaggcctatcaggctgtgggcaacaaagggagctcagtgtagcaggatggtgcctactgtacaggtccatgtgaccttagtgaacccaagtcagatagtggctgtcctgcaggttaatcaaccatatttcttagcttggcgtacaaggcattcagaattagggttcctgcttcatcccattttatctcttcctacttcctatcatacaaattgtttttcattctattgtttgccagatctgctgtcatcttccatgcatgggcatttggaggctctattaaggttctagtaaaaaagtaactgtggctaccttagggccgagcagacagttttgaatctccatttactccagaatcattttgggctggagctctgtcattcattcatgtattcaatcattcttttaacatacaggacactgcctctctgccaggtactgtactaggccctgctaatcagaataatgaacaagatagatatggttcctgctctcctagagcttgcagtgtagtagggaaggcaaaaatgaacaaaataatcataatgaagtctgatgaatgtcatgaagtgcaaataagggatgtgatgggagggtgcatatatcagaggaacttaatattgtttagggtgttaggaaagacctgacattagctgaggaggtgacatttaagttggatctgaaaattgagagaaaataagtaagggttaagaaaggtaatgctaggcagctggaagagtatgcaaaggcttacaggcc

SEQ ID NO: 63869 - DNA, 1291 bp, Homo sapiens
ttgtaccttctgttccctcatccttgaaggcccagtttgatctcttctctctggaggttgtcatgcccactttgtgcctccatagcactttgtacagccttttatatagtcttattcacttagctgtctgcttcactctccacatcttgaacctcttaagagcaagaggctgagttagtttcacctctctttagcaagcacagggtatgagggagactagagtctcaaaaattgtagaattgaacaattcaattcattacatcagtaccttggtacactgatgcccaaatcaaaagtagatgattgtgtacaactatcttgtgtacttccataaactaaataagtttctcttccataattcactgttttgtgtatctcccaggcccatagcccttcaaacatgcagtgcagtagctgactttgagagagaacagagcacagatgttatctttgcctgctttgcccttcacctcacagtgctcttctaagtccctgggcttgacccaaggaatgagtagggaggaaatgccagaaatgagccacccttggcatcctaactccttggtttgcaggtttggccctgtggggcagtgcaaggtgagcaaatggaaaagaacctgttccctgtaatagcagctgaaagggatctctacagattattactgtcatcttttcgcagctgcagttgcagcaatgagacactcccctcattgcattctgcatctaagacaaaatcaattcatcttttaaattggctctcttggcttgtcctgagatttctcatagggctgagagcctgaaacaagtcatcttacccgtgtttttctaccattgtaaggccaaagactgtgagattgtgtacccttagcccttcattttatacatggggaaactgaggcccaccatgggcataggactagttcaaggttgggtgactagtgtcaggtgaggctagacactggtcttccaactccctgcaaggtgctctcttcattataccctgctgtctctgatatcagtttatgtttgtaatgcctgtagattgtgaagttggtgaggctgaagtaaccaggaaacctggtttcttttctttctgtcaccttcctagtttctggacatcagggcacagtagacattctgggaagacttagtgaaggagtaaataaaaaacaaagttggcccaggaaaactgcatggtctaagccagaagaagactaacgaaagcagattcctcccagtttcactggacatctttggctttgatgatgattcctgtggttcgattttccca

SEQ ID NO: 63870 - DNA, 1019 bp, Homo sapiens
cctcacctcatccccattctaggccccatgctattttatctcttgaacttcatggtccttgaccaaatttgaaaatcttcccagggctagtactctcaagtcttagtcttttgatccctttccaagaatgagggtggattctaatcccatcaagagtagctgcagaatttgctagtcctggctgagaaataagaggtgaagtgggagaaattcttcttactgatggggcccctgctggtaaaacttggcaatttccaattcgtcctatagggatgaattactgtttagtgacgagaaacagaaagtggttgggaaagtcgaagcattagatggacagtggatattggtggtgggaattggtgggttgtattcaagaattcccttgactttttgggagatatggttttttaattaattaattcacacattcttcattcattcattcatttagccagcacatactgatttcatacttgacagggtagatggtagtggtaatattataatgggccctgggggatagagtgagtcaagcttggttcttaccacttggatgtggtatgtgaacaactcataacatgagaattaatataacagagctatgcacaaagtgctttggagcatagaacagtgaacagtgaatgattagctctgcctggagaaaggtgaggagatttgggcaggagggaaaggactttgtgtttttttctgccaatagctatcaaagtgtagtctttagaccatggcgggtggcagcaaggccttttcaggacatccagaagatcaaagccgtttcataataatatattatttgccttaaaaaaaactatgtatacctttgtactgatgttgcaaaaacagtggtaggtaaaactgctggcaccttaacacaaatcaaaccagtggcactgaactactagtaatgactgtattcctcacctccacacactgtcagttaaaaaaaataaaagttttcaacaaagaagtagaaatcattaattttattgaattgcatccca

SEQ ID NO: 63871 - DNA, 1020 bp, Homo sapiens
cagagtaatgctaggtcctgggaggctgtgagagttcgggaagctggcatcaggttcccgatgccaccatttggcttcagcgctcccaccatttggctttagctcatgctactagttcatgttatgctgtatttccttaatctatgctatagccaccccaaacagaatcagagctaagggagctaaactctgaggggagcagtcagcaggttcacttgcaatatctaaagtgccaggaggaacttggactttataggtagtagtatatagggagagagtaggaagcccagtgctgtggttaatatgggccaaattagatgaagattaagtagctgggttatttgcagatgttattaccataattaataataattatattcccttttgtgctctgggcctcactttcttatattcagatagctgtagacaacccttaagtgttctgcctctagtttctcccggaaagcccatgttgtacatgctgccagtgatcttcctaacctacatttgggttctgtgtctcctgcatgatttccttttcctgtttcctttaacttcctgtacctaccactccatctctttaaatccgattttagcctttcttttctttgtttttcattgaaatatatttttaaaagagtcagggtcttgctctgtcctctaggctggagtgcagtggcacaattatggctcactgtagccttgagctcctggactcaaatgatccttctacctcagcctcccaagtaggtaggactacaggtgtgcaccaccacactaggctaactatttttgtagagacagggtcttgctatgttgccaagtctggtattgaactcctggtctcaagcaacccctcacctcagcctcccaagttgccggggattacaggtgagagccactgcaccttggctacctttgttaattctctggacatacctcctaccgcttcggtctggctccaatcttctttgtcttataaacattttatgtttatttccagtcccctttctttgctca

SEQ ID NO: 63872 - DNA, 1122 bp, Homo sapiens
ttgtacttcatagcattaagaagaattgtctgattcacttaagttcagtgagtttcctttcatttcctttcattcattcttgtgttcttctcctcacttataaatacctcctttgaaatctttcttactttttgatgtgctccttgccttctttctctcttttttcttcaaacatatttagtgtgtgctatgtgctggatgctggatatgctttgcatattcatttaaagactaataagatgaatttactacctagaaaggtctcacatattactgaggcaaaaaaaaatacatattcaatccccatagatattgtaacaagagatgagccctgcatgctctggaagtacagaaaagagttaatccatctgaggatgataggaaacactatccagaaaaggtattgcctgagatgaatttttggagatgaataggggtttacatggggagggggctgagcatgatacatcatgtggagtaacaagtatgatgtccttgggaatctgtggtcagtggttcttttaacttgagcaaatgtaatagtggggcagggagggagaggttgggaataagattagaaaggcaggctgtagccagatttgtgtgccatactgaggaacttggatttcatcctaaagttgaaaagctagaagtaaacagagctggccctaattctgactgaaggtatgtcaggagcaggttttgcagaggaggtgaagttggaacttggtttttaaagatgagcaggagtttactagatgaagaaaggaagaagagcattccaggaaaggggaacttaacgagtaaaggcaggaggcaaaaaatatggcaactctgggagacatcaagtagggaagtatctagagaatagttatttcatctatgagatagggacaccagtaacatataccttcaatggctgatgtgaggcttgaaaaatatcctttgtaaaccatagagctgtgtgcaaatttctatagttgttgtgttatccagtttcttctaattttttgtcagtacccaacatgcatcaggccttctcaggtatagatccacataggcatacacctcagcagtttggcactggcttgatgagaggcatgccctcttttatctagccac

SEQ ID NO: 63873 - DNA, 1529 bp, Homo sapiens
caactctgctgttcttgtgtaaaagcagcaatagacaatatgtaaatgaacgagagtggctgtatgccaataaaactttacagacactgaaatttcaatttcatataaatttcacatcttgaaattcttctttagctttccccctaaactattttaaaatgtaaaaatcagggttctcccaccgccccttctggggatctcagcagctcgggcggcgggaggagcggcagcgaccaggcagcccagcttcgcgaaggctctcggtgcgccgcggctcacagacatcccgcacgcaccctccacgccgccaggatgcctaagagcaaggtcagctccgcggaaggggccgccaaggaagagcccaagaggagatcggcgcggttgtctgctaaacctgctcctgcaaaagtggaagcgaagccgaaaaaggcagcagcaaaggataaatcttcagacaaacaagtgcaaacaaaagggaaaaggggagcaaagggaaaacaggccgaagtggctaaccaagaaactaaagaacatttacctgcagtaaacagggaaaagaaaactgaggagagtccagcctctgatgaggcaggagagaaggaagccaagtctgaataataccacacatcatacattatcagtggtccctgtctcccttcttgtacaatccagaggaatatttttatcaactattttgtaaatgcaagttttttagtagctctagaaacatttttaagaaggagggaatcccacctcatcccatcttttaagtgtaaatgctttatttaagaggtgaaatcattcgctggttgtttattttttggtacaaccagaaaacagtgtgggttattgaattatgggaggttttgactgtctttgctgtcagcttaacactccatagatgggggttagtttttatatcctataatacaatgcatattaaatgacaatatggagtcagcagccctgcatttaatgtcttgaacattttaaattacttctattcccatgttattttttagtagaattgtttcctaaagaaaaccagtccttgatcatggctctccctgtcagaattgtgtgtactctgtaacatctttggttgtggtagtcctgttttcctaatcacttggttactgtgctgtgaaagattaaaaatttgaatatgtagtatacatgctattcagttgtgaattggtgggacatatgtaacagcttatcaacatgtgaacataccggtacttgatagcctcttaaggacaatttgcttccaaattttaagctggaaagtcactggaataactttaaaaaaaaagaattacaatacatggctttttagattttcggtacgtatgttaagaattgtgtacaaattgaaatgtttgtactgatcctcaaccaataaaatctcaattatgaaagaaaaaaatgtaaaaatcatttttagtttgcaggctacacgaaaaaaacagtttgctgatccctggactagatataataaatccaccctctgctctggcttcaggtgc

SEQ ID NO: 63874 - DNA, 1049 bp, Homo sapiens
gaatcaaactctaaagtatcatgttacattgaatccaagctagtgtaactctctggctcctggctaaatatctttcttttagataggctgacaatttggggacctttttctttcttctattcaatagacaattatgtcttgactagctattgtaagctaagctctctgctacatgttataggacaaactcgagagacactccttcagttatttaataaccacacactctgctctgtgccgggccctcggcttggagatggatttatggagctaaattaattattcatttatgtattccagaaaatttacaagatgctggtgaagaataaatgataaataaaatatagtctctatttttgagttgcttagggagagtaagagggggataatgtataccctgagaactaagggaacaaataggatagggcaatgaactcacctgggagagatctagaaaacttcacagaaggcagtgactttttatttaatagacaaagagtgggagaaagcattttaaatggagcaccttgtgcaaaatcttgggggtataaaagatcatggtttggtcaaggagcatgaaatggcttgatgtgtctagagcaggcaactttttctgtaaaggattagatagtaattattttagactttgatagccatagagtctctgttacaaatactcaactctgtctttgtagcatgaaagcagccacagaaaatatacatcaatgcatgagcctggctatgtttcagtaaaactttatgaaaactggctgggcatggtggcttatgcctgcaatcccatcactttgggaagccaaggcaggaggattgcttgagtctatgagtttgagactagcctggacaatatggtaagaccctgtctctacaaaaaatgaagaaaaaattagcccctgtgcctgtagtccaagctactcgggaggctgaggcaggaggactgcttaagcccaggaggctgcagtgagccatcttcacgccactgcatttcagcatgggcaatagagggagactcagtctcaaaaccaacaaac

SEQ ID NO: 63875 - DNA, 2146 bp, Homo sapiens
ctcatttataaaataagtgtgataattcattggttgtgaagatttgatgagaaaatattgtggaaattcttagaatattgcctaatttataagcaagtactcaaacattttaaattcttccttttttctttcctcttttagcttattgattttcagttaactgtcatgtattgtcttttcatagttaaaaaatatgaggaaaggatttctaatttatatatatttttcaagtgagacatgtaacaaagaggaagtgatagtttagttggcaactaagacatgtgcataaggaaggatacatgagtgatgtgatacacttgtatgttgggtagatggaatgtgttatggctagctagaggcaggtgacctgtgtggagatcttgacgggctgactcctaggtatctcttgtgacttgtgtacttttcccttgcagttcctgagggaagacctcaattaccatgacccaacagtgaaacacagcaccttccatggtgaggataagctcatcagcgtggaggacctgtggaaggcatggaagtcatcagaaggtaataggcagcctggtcatcaatcctagttgtgggaaggtttagagaagagagaagcagcaacttggccttagaagaacatgtatataaaatgcttagtaaagggcaaattattgaagttattctacatatagtcactaaaaaagactgaatatagtcactctgctgggcatgggggaaggttctccagagttggcgtttttcttcattaggatactttttgaattctatcctattcctacccctttcgtcacccacctaaccctggcataggaatcttccaggttctgctgctttatctccagagatagggagcttgctggtctcttgaggcagcccctttcttctctagcttcccacttagtcccagctctgctgagtcctagacaattcaaagattgggtgagggtacagacagactctctcctcttctataccatcttgattgaaagcttttctataccattttggttgaaagctcctgagtcttcttttttccaggttaagtagccctacttcttgaagaaaacattttctcagcctccttcttgtcttgatttcctgcctataagcacttttgttaatgtgtttcttagatcctatagttggctgcagacctccaagtgtgattttatcatcacggagttgagcaggactgtcaccttcttgtttctgaatcctgtgcatctgttagtgcagtctgattagattctggtgcctcactagtcataccactctactgacccatgttgagcttaatgaaaacttcagatttctgtaaaactgctaaaccatgattaccattttttttttctggagcatttccttcagagttcttagtgaaagagcatgtctaattgtgcgagacttgacagggaaggggaaaacagggctttagcttcctctccatttatatctgtggctagggcacagataacaataagactagaagaaatctctcttcccagggtctcttagggcaggttctgatgtaacaggggttaaatgtaagtaaccatcaggatccctggtttttatttgaggaaccttaggcctagatgtataaagttacttgtcattatcatgcatttagtagagccagaacttcagctgtaggccaatgcttttcaataccctcttggttgaaagcattagtctaaggtagagaagactagttttggtaggaatgaggcagtttctatttttatttacattttaatttaggcttatagaatttgagatctgaaagggataatctatattgtagatggggagcattaaatgtgaagcaggaagacctggattctaatcctgattatgggatggacaggctgatgcttcctgttaactctatgttttatcaatgtagaagaaaaattaggcagctgtaggagagagcttcctggatatctttggaagctgagttccttctgggggcttttctttaatagctctcgagcaactcaggctatgtactgatgaagattaagcagtgacatgagctttggaactataccagcggtgccaggaaaaaatcttccattagcatcatttagttttggctttcttatttttctctaataacatgaggacaggg

SEQ ID NO: 63876 - DNA, 1008 bp, Homo sapiens
tccccttatgaatgctcagttgaatagctggacgaatggatggatggataattgattctcaaccctggtcacaacagtttaaaaatattccaaaatcaaatttattgagttataatttacataaaagaagatacacctattttaaatgtacagtttgatgcattttgacagatgttatcatttgtgtaaccaccaccacattcaagatatagaatatatccatcaccttataatgttgcatttgtgattttttcccagtcagtccccagctcccttcctggctccagctaaccattgatctgctttctatcactatagatttgtcttttctaggatttcatataaatagactcacagtgtatactcctttcatacttagtattttatgggacagatagatattaaacacacaaatgtggtaaatattaaggtcagcatgacaacaaatgaaagcagtgcttggcattctagagtcatggctttgcttgtctcttttcacagtatacaattggaccgtggatgaggtggtacagtggctgatcacatatgtggagctgcctcagtatgaggagaccttccggaagctgcagctcagtggccatgccatgccaaggtcaggaggggactgggtttttctctgttgagggtacggggaatgggctggagtgggcctgccttcagattgctctggccagttaagtgaggttctgcctttttcagggcagcgtctatagatcttgcctcttctcacatctgttgtgcacttgctataaagtatgatgggcgctttgtatccactctcttctttaatattcctgtcagtcctgggaatagtactgatagctgccatttactgagtgcttagtacatgccaggcattctactcaacactgtatacagtatctcatttaattcttacatcagtcctgtaaggtgggtattattgtatatagatgatgaaactggttaagtaacttatccaaggtcacaaacatgactagttagggg

SEQ ID NO: 63877 - DNA, 1021 bp, Homo sapiens
ccatagattgagacttctggacctttccctgatctgtgccaagaatggcctggtagtccaggatacctagttcctacagtgacttcagtcctacagccagaactgaggcttctggtgacattgctttatatcctttataccagtcatctccatttacctactgtggaactttagaattgcttaccctgtatgacagaagccactacatcttggcatatgggctcatccagcccagagatggctggggcatattgagaaggcactagttctctcctcttcactgcatcttaagaaagtgtgatttaataagcatcctgtattgctgtaaggcctctcatttcaaaacaaagccttggctagcagagagatagacatagagcttactgtaatagtgtatggcaagtgtgtatctaagaagagaaactaattccttctcagtgggagagtgtgtctgttatggaaggcttcatagaggagggatgcagtggagtctgcaaggctaagtgtgcagtgggcaccctaactcatcatgccctcccctctctggcagtgactcgccataatcacctcaaggacttcatgctggtggtgtctatcgttattggtgtgggcggctgctggtttgcctatatccagaaccgttactccaaggagcacatgaagaagatgatgaaggacttggaggggttacaccgagctgagcagagtctgcatgaccttcaggaaaggtaaggcctgccccttcaggaaaggtgaggccctgccagttcttgggaacctcctatttccacctgggtgtgagccacttggcccctgagaccttgtcagcatggcagcccaggctgcatcatccttccaaaactgcattgcaagtttaggttgctgatattccaattgctattgggcagttattcctcctggggagaaacttgtttctatcttttttgcctcttagcttcagagggagaaatgtgtagctgccagaggtcttgagcttcccattgcttgttatggggtcatt

SEQ ID NO: 63878 - DNA, 1078 bp, Homo sapiens
tgcctgtaattctagcactttgggaggccaaggcaggtggatcacctgaggttaggagatcaagatcagcctggccaacatggtgaaagcccatctctattaaaaatacaaaaaaattagccgggtgtggcggcgggcacctgtaatcccagctacttgggaggctgaggcaggagaattgcctgaaccccggaggtggaggttgcagtgagtggagattgtgccattgcactccagcctgggtgacaagagtgaatctctgtctcaaaaaaaacaaaaaaagaaagaaagaaaaaaagaaaattataaaaatagtcactatgattttcaaagaacagtggataataggtgataacagttattttgttccttttttgaggtatttacataaagtgtacaagtcataagtatacagctggcaagcttttgcatatgcatgtacctgtgttactaccacccagatcaagatacagaaccttctcagcaccccaggaaactcacttttgctaccccaattaatatttcatccaaaagttaactactgtcacaacttgtaaaccagattagttttgtctaattttgaacttcatataaatggcattatacagtatatactcttttgtgttttgtttctttcactcaacattatgtctatgagagtcatcaaagttgcatgtagtgatagttggtttatttccattgctgagtaataatctattgtatgagtatactttaatttatccactcttctgttgataaacatttgggttgtctgcagttttgttgacttttatgaataatattgctatgaaccttcttgcatatgtctcttggtgggcataagccctcatttctgttggacatataatattcatgtatttagctttattagaaactgtcaaacaattttccaaaatgattgtaccaatctatactgccacaacaatgtaagagaattctagttgatccatgacctcagtatttttaggcattttaattttaaacattctggtaaatatatagtagtatcttgtgattttaattttcatttccctaatattattaaacacctttttat

SEQ ID NO: 63879 - DNA, 1838 bp, Homo sapiens
tccctctccctgttcctcccattgggtgaagagatatcctggtggtgggttctgtttctttcctaatgttcagctcctgacagtgtcctcaggcttctggaggagggaatgagggtgtaggggcattcctgcctgtcttctgggaaagatgaaacaagtggaggcaggcagagggaaagctctgccagccccaggctgccatggggacagaggtcctcctggggcaaaagggctatcaaggacccctttgcttctcccctcgctttctctattttgtccccctcctttttcttctaccttgcctgcctttctctttttcctctttctcttccctttccttgtacagcctcagttgtgctaggaggagtgggccccagccataggggaaggcctttctcatttattccattctcgaatccctgctctttttgagctgggggcctcatctttgcaggctgagaagataaaaaagaagagaaacacactctttggcaccttccacgtggcccacagctcttccctggatgatgtagatcataaaattctaacagctaagtaagtaacaccagttatctactctggcaatgtccatatcatcctcagaatttgagggcatacagggcctccaacaccaattccatttcctcattggtggagggacagctctggtctcctgcctcagcctttatttatctcctgccttgctcttaagtttgagtttattgtgtgttttattcacacatattctcaaaacttgttcctctgagaagaggcttcattcctattggggctcacaccaagtccatgcctgcagttctctttcctctgtcttcaggcaagcactgagcgaggtgacagcagcattgcgggagcgcctgcaccgctggcaacagatcgagatcctctgtggcttccagattgtcaacaaccctggcatccactcactggtggctgccctcaacatagaccccagctggatgggcagtacacgccccaaccctgctcacttcatcatgactgacgacgtggatgacatggatgaggagattgtgtctcccttgtccatgcagtgtaggtgacctctttgcggggatgaaggaaggagcctttgatgtacaggttgagaagtctgtggcctctgttgtgcttaaacagcagatggggcagatacccaggaagatagttcaactcatgaccttggtcaataaagcacaatttactcaggttatttctttatagttgtccttttggtgttctttccttgttgtatgctctgtgtgcccctttgggtctattgtgctaagtgtgtctcccttcattctttttcactttattgtccctaactaccactctatctacctttataaaaaatatgtcctttagtgaatttcaatgtaaaaatggcatttattctatttattgaacttatttattttgatttttgttccttattcttattgctaaagtagatgaatggaatgatgtttctttttgtgtttttgtgagaggccctataaagaaatagtcccttaaagtgatatagtcctaaatcctctaagctggaaaggcattcttgcccaggagggatctcctgcacaagcatgtctggctttccacctggactcttggatcctacccgctcttcctctgtcctggatcttccctctcccttttctcccctgcaagtgatgagagttgagtagagcagagccaaaaggaacaacactggaattcttcagtgaatgaagggagttttcccttactggcccacaattgaatttttctttggatcagatgctattttaagtaagtagaatagcccttatggtaaagctatt

SEQ ID NO: 63880 - DNA, 1038 bp, Homo sapiens
cggatgatcagtccctctggaaataccccggtttgaggagcccctttggggcattttgtttttctgactttcgggactaaatcaacactcttaccccatgggtcccttctcctgcctgcttcacgcccctgcctgctccctctatcccctcagcactgtccctactaactacagggaggggttcgggggtgagaagaatcagcttgcttggcaagagctggacagagaacacccatggtaatggaaggcttaggcttctccctttagcgcagctgtgcaggtaacctggtagcccttcttccatctgggctgggagggaaagagggaaggacaaatgacccctttcttttctctttttcatgtttctcccttttcttcccagtttcccccttctttctcccccttcccccccctattccagacttcctcatcctcttcagcctctctttcgtaccttgaaagctaccagcatagaagccctacctcctgaactctccatcactatggaattatgctgtctccctggtggtccttccaaggcttcgctcacccttgtaacctggccctttctctcatctttaggtagaatgcagggaagcttatctatcaggctagaggagaaagaataaaggtctgcactctcttttagctgggagtgagcccaaagggggatgcactagcatattcctaagttacttggtgcccatgtatcccttcactgggcatagtggccattatctccaggaccccgatttgcagcctgatccaagagctggttctttgttgtttatgtgcttattggaaagcgaaaaagagtgaacattagcataaaaagcatccatagtcccaccatatttgagcaccttctctatcactcttttctgtgaaattttttatgtggttaagataatgatagccactgccacttattgagtgccatgacctgtttcaggtgccttaaagacattattgtgaagtctcagaagaaccctgcaggattttagaaattaggaattaaaatggggaagtcagctgctc

SEQ ID NO: 63881 - DNA, 1044 bp, Homo sapiens
tcagttctgaaggctacgggaccagctctccatctgcctctgctgctgcttcttgctcctcttccatcaccaccatcaccactaccaccaccaccaccaccaccttcaccaccgtccatgtccaccctgtttattaccaccacagcacttcctatttcctccagatggagccctaccctgacacacccccttctgacagcaccgctgtgatgcctgggcattcagagagcttggggtatcagctgtctctcttttctttcttcccttccttccctttctgctgcttttaccttggtttctgcctgccagctgctgcttgatcaactctgggggtgtgtgcagtggggaatcttcttatcctgtttgttcccagctctgggattcctttttaaggtcagcctactttctccccttctgtgtttggggtttgctgactctaaaaatgagtaacgactttcttccctcatgaccctatagcacttttgcctaaactatgcactttcacattagttatctcacttgggccctcacttcctttactccttcaacaaacatttactaatgcctactctgtgccaggctctgctgggcataggggttcactggtgataagatacaatcccagccatcaagaactacaatcttgtctgagagagatacataaataattatggaaaaatttattaagtgctatgggggtgttgaggaaggagtgactaacagtgtgtacctgggtggaatgcttcaccaaagagatgaatttgtgctaacatcctgtgtgaagggaaaggagaaagagtattctaggcagaggaaacactgtatgcagagacatggagattccagagaatacaatatatttgtggttagaacactggatatgtgttggtgggaaggagaaacaggtgaggctagaatgacgaaggctccgaaagggaagggttttggcctctacccgttaggagatggagaactacaaaagggtttctaagagaaagtgaatcagtcacatttgcattttagaaataacattttagtggctgt

SEQ ID NO: 63882 - DNA, 1280 bp, Homo sapiens
tagcttctgacatgtgtgcctcagatctgttccaccccactcacagtggttctgtttgctccagactggggctagggcctaatctttgaagtttgttctttggtattgatgtgggtcagaaggagcctcatcctaatctcactcaggcctccagggatccatgggggagtgaaaccaattctcagagaacaacccaccagagacttttaaagagaggccaggcttgggaatgggttgggagaggcatctgttcattggagcatgagtggatgccagaactgtaggttataaggcagtcactttttctctctactcccacccacacctgcctccctcttacccctgctcccccacactgcaggaggatttgtctctaagaggtgctgccccaaagctccccaagcatcaatactcctagggctcaggacaagtggctcccctggccaggagagccacagccatgatacagggctcttatggagccctggagttgttgggcaaggatgctgtcattttttgaaccaaaagacaaacaggttaaaaggaaaaaaagtaatctgaatttcccaagtgcctacgctgcatattccccttgttagatcccattttcatgttactttgtagccttggccagaggctcaaaaaggacacaaccagtttggggaaggggtggctaaggaagatggtataggtgaaggcggctgtgtgaccactttcccccacccttcccaccctctagacaactctctcccttacctgtttttgctatggctgtaaaggtatttttcctctgccccactccctgccatacctttatcctgggatcctattttgggcctggggtgggtatacctggggctggtcttaggagggtgctaggctgcagactgccttgtactccctggacaccctcaaatggggttttctgtgttatttcataaaattctttgaagtccaataaagcatgtaggagattttaaccactgctggctttgactctcattgtgttctctgtgctgtggcatgatgggataaagagacaatctttcctttgcccagggaaaatgaaacttgaatgcacatgcccagaagctctgtgggcagggttaccagataaatgcaggatgaccagttaaatgtgaatttcagataaacagtttttaaagtataattttctctcatgcagtatctgggacacatttttatttgctaaattgggaaaccctatgtctgggtaaacttgaccctatctatcctataacttcacttacgacttttaa

SEQ ID NO: 63883 - DNA, 1021 bp, Homo sapiens
attataataaatgtcagagcaagaaaaacgttcccgccggttaggttttgttatttcaaaaataaattaaccgcctttcctccggcggagacgcgcaggtgagagggcggcgcctgacccagcgggctctaggtgctacgccagggccccgagggtcccgaactcggcttgcccacacaaaacatggtagcaggagagcagcatttccgccgggcatgtccatatccaatggggcccatgggagaggcgtagtcttctgggtcttgcccagactcaacatggcggctacacgtcgcctgtcagtctgtgaagcctaccccgggcgtgggccgcagcgtcgagtaacgtcattcgaaccccgtcgcgcccctttgtgcgtcacgggtggcgggcgcgggaaggggatttggattgttgcgcctctgctctgaagaaagtgctgtctggctccaactccagttctttcccctgagcagcgcctggaacctaacccttcccactctgtcaccttctcgatcccgccggcgctttagagccgcagtccagtcttggatccttcagagcctcagccactagctgcgatgcatgtgatcaagcgaggtgagggggggacgaggtgggcgagaaggaaggtgaggggatgcgggctgccgccgccggagctgatgcccagaccgcccgcccgccttcgctgcttcccgcctttcccgcatttcccgccgcggccttccgccctgtcagcccgctcggccttctgtcttcagtcagcctgccccgaacctccttcgggccttcaggctgcgccccctcggctttgtcatcctgccgcctttcaaaaggataacacttaccccgtatcgagtagtgactgcgtacgccgagcacttgccaggcactattttattcctccctgcaagcctctgagagatgattagcttattacagatgaggaaactgacgctcagagcgaggtgtcgccgactgacccaaagtcacccataggtgacaatacggtttgatt

SEQ ID NO: 63884 - DNA, 1050 bp, Homo sapiens
ctcgaactcctgacctccagtgatccacacccccccccgctcccttggcctcccaaagtgctgggattacaggtgtgagccactaggcctggcctgtggattgttataacaattttgacttttattctggagatcataagccactattaggagttttgaaggaggtaatgatatgattctgagtttaacttttaaagggtaattttggctgccatgtgggatgggggaaaaatttaggaaattatccgtaaacgtctgtctgtatagaattcatactctttgaaggtgacatcagagaagacaatctcttcatgaatcttttgagggggcctcaatcttttctgtgaaatagcacttcatgttggtcaatttacatgttaattacatttgattctttgacattgtagtcttaataattgctaacatgaatttaataattgctaacatgatttgattctttagatggccgccaagaacgagtcatgtttgacaaaattacatctcgaatccagaagctttgttatggactcaatatggattttgttgatcctgtaagtaaatatggtttttatcttgggttccttctttcatgtgtttctttccatttgtctcttatccctggaccttcattcacctgatatactttggtattctggctatgcccttcgatataaaatttgaattcattgcttaaaacatttttttttccttaattttggttctgtcctgtgagttctcacttttcagagaactatgaatgtgagtaaagaggaaaatttgatattaacatttaatatcagatatttccttgagtaaattgttttattcattagtggaaaagcctaggccaggcgccgtggctcacgcctgtaatcccagcactttgggaggctgaggtgggcagatcacctgaggtcaggagttcaagaccagcctggccaacatggtgaaaccccgtctctactaaaaatgcaaaaattagccgggcctggtggtgggcgcctgtaatcccagctacttgggaggcaggagaatcacttgaacctggga

SEQ ID NO: 63885 - DNA, 1033 bp, Homo sapiens
gccgggcgcggtagctcacgcctgtaatcccagcactttgagaggctgaggcgggtggatcacggggtcaggagatccagaccatcctggctaacacggtgaaaccccgtctctactaaaaatacaaaaaattagccaggtgtgggagctggtgcctgtagtcccagctactcaggaggctgaggctagagaatggcgtgaacccgggaggcggagcttgcagtgagccgagattgggccactgcactccagcctgggcaacagagtgagactcagtctcaaaaaaaaaaaaaaaaaaaaagaatgattaattgactatctctctaaacatgtatctgatgttaaagagactaggagaaaactgagttgtttgtgtgttgttaatttgtgtaatctcgaagacaagttgaagacaaaaatacagcagcagcaacagcaaaacctgtgtctaaaaatatacctattgatagtcaagtatttcagttctctaatattcacactgggcccatacctgcctttggcaacaaagatgaccttaaaattttaagagaaaaggaaagcaagctttcgtataggtttttctagtccttagatatggatcattatgtagaaacactgtcagtattttgaaaacctggctccttttttttctctccaaaatgattatttgtacgttattgcttttattttcctctgaatgactttgtagcctacaaaaactctgtaacaaggaccagttatgctctaaaatcttactgttacaatagttctttgttggaaacttgttaaaggactatagattttgaagagcctcagaattaacataagcctgcttcctgtcattgtttattatatatactgttatatacagtttgaagtaggctagcttttaaaataaatatatatatatattagtaaatatgtggtaccaatacttttggattaatagccaatctaaaaacatgtttaaggatgataatatagtcccatttatgctcatgttttttccctctttcaaaacatactataaaca

SEQ ID NO: 63886 - DNA, 1052 bp, Homo sapiens
gcgcctgtagtcccagctactcggtagcctgaggcaggagaatggcatgaacccgggaggcagagcttgcagtgagctgagattgcgccactgcaccccagcctgggcgacagagcgagactctgtctcaaaaaaaaaaaaaaaagtgccaatgataatgttccagatgaagctaggaagagtaaatgtgctattcttttcatttgaaattttatagaaacggcgaagatttaaagagattgccttattgtggatgatatatccactgcgtctttaaaaacggtgctctgaaaattttttgttgtttctctctttctagacgctagagcggtcttatttgttgaagatcaatggaaaaggtgagaaatgaacatgtttgtctgttacattttctactcattatattgaatgtatagctttgagctataagtcttaatattcttgcttagactctagataacattttggactttaggtttagtttgtggataattgtcctgtttattagtataaagtttttctagtttccttttggtgtccttttctgaaattcaaatacgtatctcaacctactttttctgacgtctcatcatgtgaaaactcctcttttgtctatagtggctgaaagaccacaacatatgttgatgagagtatctgttgggatccacaaagaagacattgatgcagcaattgaaacatataatcttctttctgagaggtggtttactcatgcttcgcccactctcttcaatgctggtaccaaccgcccacaactttctaggtaggtgttttgagtagggaaatacgccttgacctgaagaaactgggcagttagttcatcacataaaaaataatttaatgaccttttagtagctgcctgctctgattaaatgagatttagattctggaaagatctctgactgtaatgtggtaaatgaattggagaaaaggcaaatgcttataacaaaaatgttctaaaattgattggattgtggtgatggttacacaagtctatgagtatattaaaagccattgagtagtacactttaaat

SEQ ID NO: 63887 - DNA, 1675 bp, Homo sapiens
ttggagaatctttagtaaagtgaaacgtgtatatcttttgacccagcagttcctctcctaggttcatattctacagaaatgcttagagataaacacaaggtgttgtgttcaagaatttttatagcagcattgtttggaattgcaaatgaattggaaataatccagatgttcatcaacaggcacatgggacaaatgttttggtatatttatacaatagaataccttatagcaatgaaaataaagtttgtttacatatatcaaaaggattaatttctgtaaagcaatattgaattaaaacaagttgcagaatgataaacagatatgcaaccagaaaaattctaagtgtataacatgtaaaaatgtcataaaggaaatgcttgaaaatgttagaggattgcaatgagggtatatttgtggtgtctaattttttgaggtaggtggcaagtacagagtatttgttacatcattctctatatttttctgaatgtctgaatatttatataaacacctagtcaatagatagaatccatttgcatgattgaatattcaaggcagtgaagagattattgatagagtaaggttcctgaggtggggagcaggatgagatccaaagtgaggtaaaggggttgtctttaaaaagactgtaaaggagctatgattttggtagacgtatcaaagaattggttgacaattggagagattattttcataaatgtttgtttttcttggcttactaacaacctgaaaagacggtgatgtatgtttatgaatatgcatgagaaaatgtgaaaatagcacgtttgcagtctggtgaaaatgtaagccaatattttagacttatctataagacttcctactaggcttatttacttactatctaggggaggcagcaagatgattttaaaatgatatttcgatatgttttattgtgtcatgtacagtaaagtgggttttcttctttgaaaatcatttaggaactttctaaacttcaactcttttttttttttttgccttagtgtctttgtgttgagtaatcatttttgtgactctgcttcatttccttgctctaagttgagacattttttcccccgtagctgttttcttctgagtatgaaagatgacagcattgaaggcatttatgacactctaaagcaatgtgcattgatttctaagtctgctggaggaattggtgttgctgtgagttgtattcgggctactggcagctacattgctggggtaggtttctgccatttgacttttaaagggggattcaagtctaaaagcaaacagattcatggttgagagggcatatgctattttttgggagtcctgggtctctgttaaattactaaatggctatgtgacttggagtgagtcattttacttctggcttcattttcatctatgatattagatatttagatttgactagataatctctagaatcctttttagctcaggttttagaattctggcttattttagcagtaataagagcagttatcattgattgattgcttactgtatgttaagtttgttataaatgttttacatgaggtactcatttgacccttactacaacgctatgaggtaactatgattatagactcatgccaggaattttattccttaaaataaccttgtgaataaaggtaccattgtctaattttacaag

SEQ ID NO: 63888 - DNA, 1643 bp, Homo sapiens
aaacagtaaagttgagagaattgggttgtttaccttattttatcaacaggatggtttacaactagagtctgccttttgtgactgtaggcacactaatcgcttgttggtttatgaatttctctctgatggactttggggaccttgataagacagatcaactttttgacctacaataagagcatggcttatactgtcaaagcaacttcctttgggctttatgtacatgtcatgtggtgtaaagagagctgggctgttgctgaagaggaggctccatctgtagttcatcatgtcactttagaaaagttaatcttgtttcacattttgtttatatcattcgttcgtttttactcatagaattgtaaaatattacttttacaattatatatggaaaacttacacttttataatacttttatttatgttatttaattcattgtagtgaaaatcaaaggagatactataaaagtgctttgggagacatgatgtttctttgtttcatttttattctgaagagaattatgatttatttaccactagcgtcctggggcatttgctatttacctggagccttggcatttagacatctttgaattccttgatttaaagaagaacacaggaaaggaagagcagcgtgccagagatcttttctttgctctttggattccggatctcttcatgaaacgagtggagactaatcaggtgagagataggtacttgttggtaatagcaacttgattcacatgagctttctcttttttagtcatcttaagtcatgcttaggaagagcccatatgtgtgtgatgccacagaaggcattctgaacaagttaagagatgccgtgcttgtcttcttatatttctattctctaaagtagatgctttgtgacctaaatgcttaaaaggtcatgtataaacaggcagacctagatgtttgggcctgaacctgaaaatgattatttctacagcaaatttccaagagagcttgtaaaagtcaccttatgcttgcagtgtttctaatggattatggttggctatttgaagtttcttatgagtgattttgtcctttcctttttaggactggtctttgatgtgtccaaatgagtgtcctggtctggatgaggtttggggagaggaatttgagaaactatatgcaaggtatgggaaaaatatgaaagaaaacaataatgttttaatcatggtttctcttatttcaggggtccaaatatcaaaagtacttgtcaagaatcttttgaagcatctaagagaaaaagtgactaataattttggtcagatttgcttcctgactcttcaccaaaattgagttgtgtcttcttctttcttaaaactttggaatgtataaataggttcttgggatttttaattgatccttttaaaatttaagatgactagtagggttattattttgctctgtcatatagtacttttgataagctatgctttatgttgcataaaggaatcatgagtgactaggacacatatgtcagtagtttattaaaattaaataggtcaggtgcagtggctcacatctgtagtctcagcactttgggaagatgaggcaggtggatcatttgaggtcaggagttcaagaccagcctggccaacatggtgaaaccctgtctctag

SEQ ID NO: 63889 - DNA, 1392 bp, Homo sapiens
gtgcaactgagaaactcaaattttatttcattttaaatagatatatgtagccagtggctaccatattgcagggcactcatctactgaataatgagataggtatatgtaaaaagctaattataacatagtgtgatatatgtctggtaatagagctgtgtactgtggaacatagggttctctctctctcttacctattttgctgatgcatgttataactaacacatatgactaggtattgaagaaatagaatcagtgggatttagaaatggactgatgaatgatgaagagggagaagtcaaatataaaaatttaaaattttaatgtctgagtattagaggctcacatggtggtgtaattgacacaggaagtagaaataaaaattgtgtgattcttgacctgttttttgcattccaggttgctgtttgtaatttggcttccctggccctgaatatgtatgtcacatcagaacacacatacgactttaagaagttggctgaagtcactaaagtcgttgtccgaaacttgaataaaattattgatataaactactatcctgtaccagaggtatgaatagatttctctgcttattggtaattattgaaatccaaattgaaaggaatcaatcatgatcttcaagtcatcatttaaatggttatcaataaaatggtttgagaaaaagaggtagtctgtctcatttggtacagaatgttgcttttcctgttcagtaatgttttctccttttctttaaaatctgttgacacaaaggcatgcctatcaaataaacgccatcgccccattggaattggggtacaaggtctggcagatgcttttatcctgatgagatacccttttgagagtgcagaagcccagttactgaataagcagatctttgaaactatttattatggtgctctggaagccagctgtgaccttgccaaggagcagggcccatacgaaacctatgagggctctccagttagcaaaggagtaagtatatggatggaattgtttttgcctgtgagtacctgtagtgggctgaatggtgaccccacaaaaggatatgtccacatcctaattcctggaacctgtgaatttaatttcatttggttcaaaaaaaggtattttgcagatgtaattaagaaccttgagataaggagatttacctggattatccaggtgagccctaaatctaatgacagttgtcctgcaagaggcacagaaggggaagcaacgtgactatggaggcagaaattggagtgttacaaccacaagccttggaatgctgataaccactagaagttataagaggcaaggaacagaatctcttctagtgcctctggagggagtgtggccctcccaacatgttgattttgggcttctggtcttcagaac

SEQ ID NO: 63890 - DNA, 1050 bp, Homo sapiens
tgacaataaaaattgtgtataaaaccaaggtatacagtgtaatgattagatatgtgtatatattatataacgattaccacaccacaatgtttttgttgtcgatactgtttttgagaaaatgtctcactttgtcacccaggctggagtgcagtggcatgatcttggctcactgcagcctctgcctcctgggttcaagcaattctcatgcctcagcctcctgagtagctgggattacaggcatgctgcgccaccatgcctggctaattatattgtttcttgaataacagatgtcaagatcttaaaggaatatagctttcgtgtggtggcattgatgtctcgtctttataaaagatagaatttaccaagcaatctagcattaaataactcttaagtgattttagtttaagcttcaaagctgtagtcttttctaagcagtcactgttatttatttcttcatacattttctgcttttccattcagattgtaaatcctcacttattgaaagatcttaccgagcggggcctatggcatgaagagatgaaaaaccagattattgcatgcaatggctctattcaggtatagaatgaaaatgaagtgtgctctgcaggggctgagttggacattgtggtacctcctcactcatgctagacaatggagagaatgacttcattgtgttcatctaggttttgcttgtgtagctctgttcacctctgcattgttgtgctaggattgtacacatctttacataacccttaccatcttgtttttatgcaataatataaaaaagtagttctcaatttttctgcatcttagaatcaactggggagcttttaaaatcctgaagcttaggttgcattccttaccaattaaatgtctaggaacaggaaccagacatcaattttttttttttttttttttttttgagacgaagtctctgtcgcccaggctggagtgcagtggtggaatcatggctcactgcaacctctgcctcctaggttcaagcgattctcctgcctcagcctcccaagtagctgggattacaggtgcctg

SEQ ID NO: 63891 - DNA, 1157 bp, Homo sapiens
tttggattccaaagggagtttgaaatcctagcttatttaaagggttttatctcattgcttcccttggtccctgtgaattacagcccttattttttgtgttttctgcaaaactcaagggtcatttattgctgcttagctctgacttttcctttctttaagtgcctctagaagaatgaatgtttgggtcataaatcaattaaaaaattaaaaaattggtttatgaccaacaaaaaagggatgctgaaattactatcaccagattgatatttggttggttagatgggggttttgttcaactttctaaatagtcttggtaaacttgataaggatcatatcatatgatactgaatggtaaggtcagatctggcaggaagtaaaatgaagatcaaagcttgtgtcactattctattaatcatacactgctttctttaactggagtaaagtaaacattgggttttccttctttagagcataccagaaattcctgatgacctgaagcaactttataaaactgtgtgggaaatctctcagaaaactgttctcaagatggcagctgagagaggtgctttcattgatcaaagccaatctttgaacatccacattgctgagcctaactatggcaaactcactagtatgcacttctacggctggaagcaggttggtagagaatatcaaggagtacttaattgccagcttgagatattttggcattggaatgattttatgttttagccacctattaaatattatcacctagaagttctttaagttcaaatccagaacgttaaaaccaacccatggtttttgtaccagaacagggtcttgccttggattttcttgtttctgttaggtttatttccttcttaggtttgaaaccttgtagttacctgtgatgctttccttcctttactgtccgtacaattaccaagttgtgttgattgttcctttgtattatttcttaaatatcttccttccttttctgctgctgttattctaaactgaccttattgcttctaggatctctgctcccagccattttgtgtgcattaccaccattcctcagataaaactttgcacacgtcaacccgctattcaaaaacatccattgttttctcactttataaagtgaaagccagcttacttagctagtcgttgcc

SEQ ID NO: 63892 - DNA, 1026 bp, Homo sapiens
ggacggggcggctggccgggcagaggggctcctcacttcccagtaggggcggccgggcagaggcgcccctcacctcccggacggggcggctggccgggctgggggctgactccccaacctccctcccggacggggcggctggccgggctgggggctgactccccaacctccctcccggacggggcggctggccgggcggggggctcacacccccacctccctcccggatggggcagctggccgggcggggggctgacccccccacctccttcccagatggggcggctggccgggcagaggacctcctcacttcccagtaggggcggccgggcagaggcgcccctcacctcccggacggggtggctggccgggcgggggctgacccccccacctccctcctggacggggcggctggacaggaatgtattttaaatattggtgtggaatgtctagtattctcacagagtttctcctaataattgtctttactttccttgtagggtttgaagactgggatgtattatttaaggacaagaccagcggctaatccaatccagttcactctaaataaggagaagctaaaagataaagaaaaggtatcaaaagaggaagaagagaaggagaggaacacagcagccatggtgtgctctttggagaatagagatgaatgtctgatgtgtggatcctgaggaaagacttggaagagaccagcatgtcttcagtagccaaactacttcttgagcatagataggtatagtgggtttgcttgaggtggtaaggctttgctggaccctgttgcaggcaaaaggagtaattgatttaaagtactgttaatgatgataatgattttttttttaaactcatatattgggattttcaccaaaataatgcttttgaaaaaaagaaaaaaaaaacggatatattgagaatcaaagtagaagttttaggaatgcaaaataagtcatcttgcatacagggagtggttaagtaaggtttcatcacccctttagcactgcttttctgaag

SEQ ID NO: 63893 - DNA, 1013 bp, Homo sapiens
gagttgggaggaggacagagaaaataaaccaagaaggataaataggtaaatgcaattttattactgggggtgaaaacaaagagcattctaagaatttaacaagcaacagttgaccaacagggaacctgctgttgagcccgtaatctgctgaggaaatttgagcctgtccctgagtactgcctgcttatctcttctcagagatcatagccccaactttcgaaggtagtaaagtccctcaccctggcggtttccagtctcatgttctgcagcctctttggcttctccccagccttctgggctgtttccttttcacagagcatcttttctacatgttgctggatctccctagtcctcaccccataaatgacaggattcaaggctcctggaagcagcaagtatatggcactgagtagattctggacattctgggacacagtcttggctactcagaaggtgatggaagtggaaagaccagagacgtagatggagaggatgaccagtaggtgggagccacacgtgtgtaaggccttggcttgggctccccaagaagagatccggaaggcagcatagatgatgtgggtgtaggaggtccccagcagggccatatcagagattacagtgaccaaacacatagccagccccagccagttgttgaaggtcaggtctccacaagctatgctcagcagtgcaatgcactcacaggtgaagtgtcgaatcactgctgtccggcagaatcgggcttttgcagttagtactaccaagggcactgtcactcccaggctctgtgtcaaggcaagaatggccagcagtcccagcagctgggaggtcatcaggtcagaatagcagagtgggtggcagatggctacgtagcagtccagggccatggccagaggaagttgtagtccaggaggagggtgaagtagataaagaacacctaggccaggcggccatgcagcgatatggggttagcataatatacaaagccctccagcattttaggcatcacggctgtg

SEQ ID NO: 63894 - DNA, 1050 bp, Homo sapiens
agatagagagtgatagtggatcccgtgtttctgtcgggggatgggagtagataaggaaaagtgtttactatttttaccagcaggggaaactacccagatgaaaatggtgctggatgctttgggcaaaaagccattcagagccataatcaactacgaagatggtcaggaatttagtgtatttgtagatcagatgatcagtctatggctttggaaaattgtgaacattagttgttgagccttataatgagaatgtgatgattaaatcaggtctactggatactatgaatcagaatagataacattgttagatataattacctagtcagagagcagagatgaagtcaggaaagcaaaagataagaaataacagaagtcttctggtggcagagtggtggcttagcctgctggggcaaaatggagctcaaggccatgagcagatacaacagcccggtcaacccagctgtcttcccccatctgattgtagagcttttggccatcgacatgttcttcaccacctggttctttgtttacgaggtcacctctaccaagtacacttgtgatatctataaagagtatctccttggtggcctcactcttcatgggctttgaagtcctcttcctgatgctctgggttggcatctacatgtgagtgcccaagagtaacaaccaggtggcttcactgaatccctgcttttgtaaattaagttttctttctattgctggaagtgtcccgcctgttgcttataataaatgcagatgtatggcattaaaaaaaaaaaagaaataatagaagttaggcagggattggggcatgaaggttgaaaacaaggaaaaggagcccaaggaaatgcaagtgttgtaaaatgtgctaagtagatgtctgagtggcattcctccatgagagaaagcttaagggaagaaagagaccctgagtgtcttcaaaactcaaagttttacgaacagaatgattagtctggagaaatcatttttcatcaatacaggatctcaagtgtttccccacaacgaacccaacccctcacacacacacac

SEQ ID NO: 63895 - DNA, 1052 bp, Homo sapiens
cttccgcaaactcctgacctgtgggtccgtccgttcaacggccaaaggctggcggaggagggatcccctgcctttctcggaacggaacggagcagagtcgtgcgtggttgagtttagataaaagccgagtgagcgcgctctgttccttaagattagtttaaggtgccttggattgctctgaagagctttgaccacctgatattgcttacatctggaacttcttggcttctcattccccagatgtgcgggtcagagaggtatgtctaccgttctgttgactggctcttattgtcacttctggcagaggtgacagggcagtgaaagagataaggtcctttccctttcggaactcattatatctttatttctttttctttctcactgcaaatgaccccactgaggttagagacattttaatcagtcagtcaatagagacagaaatgtgtggttaggagcatagatgccgcagccagactgcatgtgttcaaatcctgactctgacagacactggctgtgtgcccgaagactgttaacttgacttctttgagctttagtttcttccatctataagatggacggagtaatatgtatatcttagagttttggtgaggattgagtgagacagatttaaacacgtaggaggctgcctgacacaaattatggtcattattactggcaaactccatgcctagctttaaaaaaatgcacaatcaaaacaatttttaaattataggtttctgaaatgcagggggtagaaattcttttgaagtggaaattaaattttttgttttgaaactgattatgttccaattcaaatatttattgagtcctgttagataatcaattgcagataataggttaaatataaccctacacaaagataaaaaaaaatgttattcctaaagtgcaagaactcatgcccaactcacttataaatgcaactgccacctattttattccactttcactagggctcccagctggtggacgggcccgctctgtcattcctaactctgaacccccagcctacaccagccccagtatcccctgct

SEQ ID NO: 63896 - DNA, 1039 bp, Homo sapiens
gaatcatgagttgtaaaaatattacctccccaggctgggcgcagtggctcacgcttgtaatcccagcactttgggaggccaaggcaggcagatcacttgaggtcaggagttcgagatcagcctggccaacatggtaaaaccctgtctctactaaaaatacaaaaattagctgggcatggtggcgctcacctgtaatcccagctactcaggaggctgaggcacgagaatcgcttgaacccgggaggcagaggttgcagtgagccgagatagtgccactgccctccagcctgggcgatagagcaagactcagtttcaacaacaacaaaaaaattaccaccccttattgtggccattgctgtttctttggtttttttctgagaaggcgagcatgtggtgagagggctctatgtggagcagggccgttaagaagtggaagtgttttcacagtcttagagatcagataccagagagtgatgcaaaggtgatggcagagaggtgaaagagctcatggaaaggtcacagatgatcactgtagaggatgagggggttctgaccccctcattcatccaaagttgaggacctatatgtcaggctctatgctagctgccgaagatacaaccatgaacaaaaagtctcagatctcatggagcttacatttcactgcgaggattcaaacaagtaaagatctgtattaagtggtgtaagaagtaaaatagaccgggtgcagtggctcatgcctgtagtcccaaccctttgggaggccaaggcgggcggatcatgaggtcaggagatcgagaccatcctggctaacacagtgaaacctcatctctactaaaaaatacaaaaaaaattagccggacatagtggcaggcacctgtaatcccagctactcgggaggctgaggcaggagaatggcttgaacccaggaggcggagcttgcagtgagtcgagatcacgccactgcactccagcctgggcgacagagcaagaccccctaatgaggtgaatatgtggagagtgattgtatggtggctgtgct

SEQ ID NO: 63897 - DNA, 1039 bp, Homo sapiens; identical to SEQ ID NO: 63896

SEQ ID NO: 63898 - DNA, 1039 bp, Homo sapiens; identical to SEQ ID NO: 63896

SEQ ID NO: 63899 - DNA, 1039 bp, Homo sapiens; identical to SEQ ID NO: 63896

SEQ ID NO: 63900 - DNA, 1054 bp, Homo sapiens
ggttgctagtgtgattcagtaggatggaagggagacaagagttgccgaactaagttcttttaaacatcttgcatttgaggtacctgtgacatatttgctggtgtatatattaatcaaaatcataaggaaagggggctgagcagaagtacagatttgagaatcatcaacatgtgtacattaaaatgaaggaaatggatgaagtcagcaaaggtagggtagaaggttagagaaggtgaagtttgagaaacagccatatataaagtccatgagcctgtatcttcagcaaccagaacaggatgtaagctactcaaggatagaaattatgacttcatcatctgaggttctctaggccaggcacaatgcctgacaaataatacatgctatacatacataacattacacacacatatgcacacacacaatgttgtgaaaatcaagacactgatgagtcaattgagttattttttgatgtcttcacatgggttcttagggacagtctgccctgagttttttctctactttgtggcctccacattaggattatctttatttgtatcatatcatggggtaggggacatggaaggagaaatgtggataagggcatgacctgttactccttgacttaacctgtctttttccttcctaggatgtgagtgatgtcacagaaaggtatgtgtaaggagaacatgaggtagttcccctggactgacaaatgattcctttacccatgatcagtgggaaagggaagaagaatcagagtggggaagattcaagagagtagtcttgaatcgcgcatcacatggagttttggcatccccaaataaaggggatgaactggcctctctggtaggaaaatgtgggtgatgggaggtcagtaggtggggacagtactgttatttagaataaagagttgcagtattgcgccactgcactccagcctgggagacaaagggagactctgcctcaaacaaacaaaaaaaaatgaataaagagttgcagtatcagtgactccccaagtaccctgttagtgtacttttccataaacctctgtgcc

SEQ ID NO: 63901 - DNA, 1576 bp, Homo sapiens
cagaaggctgaggcaggagaatcgcttgaacctgggaggtggaggttgcagtgagccgagatcgtgccactgcactccagcctgggtgacagagcgagactccttctcaaaaaaaaaagttaaatcttacacaagtttatgtagatggtgagatgatagtttctagtctagctcttctggctccagtgccagggctgtttgcagaatgatgctaagtgtattcagaaaggaggattggaattcatcagtaggcttgggaggtaagggagatgggtggtggaggaacccacagtcagcagtgtgggaactcagaagtcctgtcctttctaggagtgagttctggaccctgaggaagccagaagctctccctacaaagctgagaagtatgttccgagccccagatctgaaaaggatgctgcgagtgtgtagaggtaaggagattcaggggaaagagtttggatgtgaaattactgtcgtgggaagaaataaacgggatagaggctatagtcggtatttgagcatagtggcaaagagggaggtcccagagggagggacatagtgtgctgaagaagatgcggtttgtatttaaggggagatgaaatggccaggtgacatcctcacaggattcctcaccattcccctcaatgtagtaaggagagagataccagacatgagacagttggtcctattcaacattattgactcttttcatcattacagagctgacagatgtccaaagctactggggtaagtagaagccatggcctctttgggctggcacattctgatctcctttcacatgccctccccagacatagccacacagatcctaggtgttgatgcctcccccatccccgccatatagttccagttcctccaaccacttcctgtgtttcctcttctcagcataacgagacccatgtccccgttctcatctgctgatgttgtaccttttcctacagttgacgtgaccctgaatccacacacagctaatttaaatcttgtcctggctaaaaaccggagacaagtgaggtttgtgggagctaaagtatctggaccttcctgtctggaaaagcattatgactgtagtgtcctgggctcccagcacttctcctctggtaagcattactgggaggtagatgtggccaagaagactgcctggatcctgggggtatgcagcaattcactgggacctacattctctttcaaccattttgctcaaaatcacagtgcttactccaggtatcagcctcagagtggatactgggtgattgggttacagcataaccatgaatatagggcctatgaggattcttccccttccctgcttctctccatgacagtgccccctcgccgtgttggggttttcttagattatgaggctggtactgtctccttttataatgtcacaaaccatggcttccccatctacactttctctaaatattactttcccactactctttgtccatattttaatccttgcaactgtgtaattcctatgaccctgcgtcgtccaagctcttgaatattcttctgttcccacccacttctgataagtaccctgaggcttatc

SEQ ID NO: 63902 - DNA, 1091 bp, Homo sapiens
ataagcaaataaattactttgtttttgtataagtatgtataggattgagctctaaaaccaaaccattataatgataatttgggtagcttcaaactcaaattgaagagagtcttcactacaatcttcactacaacctttggccttcctctctacatttaagagtagcaatagaacaataaaaaaaaatacgtctttcaaattaattgcagtaaaaacaaaagagtagtggggagagaaaaacaatccaatacatatttttctctcagaatagaaagaaaacacaaagagaaaatatgaacaatataaagcacttaaaggaagaggatgatttcttccagcttttccacactctctttatgcgcaggaacaaacagctgttgagtgagctgctatgactttggtagagaggtgcaatatgttttttgaaccagctataaaagaaattaagaggtacatgtgagggtagaaacaaatatcaaggatgagaatggcactggctgtcccatatggtatccaggagccaccaatgtctgttgagtacttcatacatgcctagtctgaattgagatgtgctcaatgtataaaatatataccagatttcaaatacctacttcaaaaaataatgtaaaatatctcactaataacttttcctttgtgtattgcaatgataatatgttggctctattggattaaataaagtatgttattcattttacctgtttcattttacttttttaatgtggatactagaaaccttaaaattacatatgtggcttacattgtatttctattggacaactctggagtagatcctataatgaaatttctgtccctaagtgagccctagtgtaaaagcctatggactcaggatacagaggaggtttcaaggcacatatgtttatctctacagaacctgcaccttcccagctgccctgaggcatttttatggaaggtaatgacagagaaaagaagatctcaacatatctagaagtgtagaaatttggaagatcatagaaagggctcatgaccagagaatgattctgcagactctggcccctgccgttagtcctcagtctgttgggcacttgaag

SEQ ID NO: 63903 - DNA, 1014 bp, Homo sapiens
ggatattaaggatgagagcttttactgtcagacttcggtgacttcactcatttaattcatcctctgtccctgcatccagccctggatcttttattttatatgtgtttgtcatacacatggagggccttgtcaaatcctaaaatagggcatggagacagcttctttatatgtactttgcttacttagaaatagaaggtaccggatcattatgcaaggttctctttagatttccaaaagtagactcgagcctcaggacggtagctgtgactctggtgatgataattaatctctgccagttcacacactttagaagctcctatggaaaagtgtagtccttgttccttgtgtctaccattgccaacccacttggaaacatcaagtttcttacaaagacataaaattctaaccatttttagttaggttgtcataacttctcctttgccgagtgttcgtgtttcccaggaatctgaaatctcaaatatgcgccattccactggagttcaggctttgaactcgggcacaggctgacaggatttccctacagagccccgtatcacagtcaggatctacagctcagaataccacatctctggcccctcccagaaggcccactgagatgcagtgagttttccacatatcacataccatttctacaggtagcaaagtcttttcctatcgttttatccaattttttattatttccattagatatcaaaggagggtttaattatttcatttttaaggaagaaactgtgctttcaagaaatgaagaccttctcaaggtcacccagaggataagagggaaagtagacacagtcacatttcttctggatccagggtccggctctcccttctccccctcctcaggctcagggagaagggttcaagtgcatcagtgatgtgaaggagatgaaaccagtgatgtgggagggatggacacaggatgagagatgtgggggtcaaaaaatttttttcatccctaggagtgagatctggaggctgaaaaagccaaaa

SEQ ID NO: 63904 - DNA, 1062 bp, Homo sapiens
tgctgctgatgggattatatttaatgggaaatggctaggtggctgtttcatctcatcattcagcaatttactgccctaccatagggcatacctactctttccctaatctggagagaaaatgaatttcagtgctgactcctttgtttgtattcaatattgtgcatttttatcatttcagagctgacagatgtccgacgctactggggtaaggagaagtcacattatcataagccaccctgcggcttatcattattattatctttatcttttagaattttatgttctctattaggctcatgttttaagatttatgattctccttccaagacacacataacttacccctccttataacttctaaacaaggttcctcccagttttctctcaagtctttatcaagatttctctcatatcacaaataaagttacattatatcccttagctgacctgttaatttttctacagttgatgtgacagtggctccaaacaacatttcatgtgctgtcatttctgaagataagagacaagtgagctctccgaaaccacagataatatatggggcacgagggacaagataccagacatttgtgaatttcaattattgtactggcatcctgggctctcaaagtatcacatcagggaaacattactgggaggtagacgtgtccaagaaaactgcttggatcctgggggtatgtgctggcttccaacctgatgcaatgtgtaatattgaaaaaaatgaaaattatcaacctaaatacggctactgggttatagggttagaggaaggagttaaatgtagtgctttccaggatagttccttccatactccttctgttcctttcattgtgcccctctctgtgattatttgtcctgatcgtgttggagttttcctagactatgaggcttgcactgtctcattcttcaatatcacaaaccatggatttctcatctataagttttctcactgttctttttctcagcctgtatttccatatttaaatcctagaaaatgtggagtccccatgactctgtgctcaccaagctcttgaaccttcttac

SEQ ID NO: 63905 - DNA, 1076 bp, Homo sapiens
acgttaacttggggaaggtcatatagctagtaaatagcagagttaggatactaactctgtctggctctagcatacttgctgttagccactacctcaaaaattgtagctgaggtttagaacatgagtttttagaataggtggagcaaaatgcacccattcctgggagaaggagttcaggagattttgggattggcaggtgatcctaggattgctgaatggagagatgtacaaagagctgtaattatgtggcagtaaatggtgagctgtcatcagttcagggaggagaggagtactgagcaggtgggagcagtcggttaagagccatgaaggagagggttaggaaaaagtgctcttgtcttcaagagaacactaatggaacttttgactgccttggacacttgctctttgtgcaaagattgtttgtaaggtaaattacagaatccataagcccaaaaagtccaaatttgaagtcattgggttcttggaaatctactgtgttatgcatttcccattctccagtaatccaagatacactgggagatatcatagacttcgtctttagaaggttccttggttagtctcccaagctccagttcatacttatagaagctatctaagcacatcttgggaaccaactggctggtcttttcctgtgacgttgaccattagaggaggggatctgacacctgtgatctgggggctatataccagagcctgctccccagagcagggtgtcagctctctgtgaggagttgggtggggtagggagaggggaggcttgttggatttcttagttgctgttagactgacaagaaaaataggataggagggttctgtctggagactgactctgattttctcacatttttggctagtgcagctaccaccaacatctatagaatagggttcttagataacagctggctccatgtgggcctgttctattgttttccgcttaaaatgatccatgagcaagaacacatatgagtagcttattactttacatgatagattacagatcagaaatcttgggtcctcgcggtgttgtacagcactaaatcctcttctggaaacct

SEQ ID NO: 63906 - DNA, 2335 bp, Homo sapiens
tccaggagaggaattatgccaaatattaatattgagctcttttgtgctaggagctgtgcaaaatactttgaattcattatattaatccatttggtatcctcttgaagtagttactactattatctcattttacaagcaaagaaacaggttcagagaggttgaataattactccaaagcatatagagtgagtttatagaggatctaggattcaggtaaaagtctgcttgactgaacctttaaccaacacgttcctttggctcactttagtgtgtggtgggaggagtgtctgccagatggaaagtaccaagtggtttagtgaaaaggaaatgggcaggataagagaggagccacgatgggccgaatcagaaaccccaagtttcttattaagacaagtgaaaccaaattccttcctttagcacattttgattatggttgacaaaaagaggtcacctggtgtagtatagctgcacctctgttctctccaggaaagaattctgagtgaggcaggtggagatagagcaagagagagacatacacaaggacaagagacatagatatgggataaaactgacaaatggtgcaaggagacagagatgcagtggtacagagacaatgagagtgactgatagagaatggtgtacatccagatcccgaggggattccagaatgagaaggggagggatgaggtaggtgcagggatggtggactgtggtgactttaccactatgcagtctatgcatatagcagaattgcacttgtacccttcaaatttatacaaaaaaaaaaaaaaggacgaggaggatctctttaggacttttgggagaggggctcacaggggaaattgtgactgaaaacttctgactgattacttctcagttagaagcccatacattcttctgctgcctgattatcatgattccctaggatccctaaattccctactgatctaccccaacactaagtaagtcggtctttccttttgactcagagagagactgaaactaaaagttactgaaggaaaatggatgactacttggtcctggatggagatcatgagcctaagggctgcgctctttgggccatatcctgcttataggatttgcctctggtatggcatgagagacagaccatctgcagggtatctgagggtggtctgaatggagagcatggggggaataaacagatggatctttttatccagagaacacgaggttctcagtatgaacctgtagggcagtatagaatagtattgacagcaaagactttagagtgataaagagccctaacaagtctcttcatgtctctcagacttcaaggataatcacacagacccctcacaccttatttgaaacttttagggacagatattttggaattcagtttttttcagattatagaaaaggaatatgatatatatatatcatatattaaggaataccccagtgggattcaggacagtgccctataatcaaacatcaacatttctgaagttagatgtatgaacatttacactaaataagataaataaagattataaataggatcatgatggttgagatgtcagcttttgggccaaagttataaaaaaatattgtttcttcagagttttattttggaattatggatgagggattgtgggcttataattaattctcaggttgtcatgaggaatgagagtgtggtaaagctcttgaaacacatcatatggtaggtatgtatgcaatctcaatttggaacaagatacaaatgtccaagggagtggatttttagcttgaaggaagaaagttgctacaatggacaacgtacagctctggaaccagctaccttgaaaagttgtgcacaaccaggggttgaaggtgccttagaagagagtcttcctgtggtgggagggtgacagaattcattgtttatgaacgttggctgcagatgatttccctttcatgtatcagaggggaaaggcaaaaaatggtatacctgtatgtatgtgagacgcaggattatcatacatatatttatttataatcaataaatattttactgcatatatgcttgttcacatctcaattattttcttaggatagatttattaagggggaacttatatatttttgagacaaggtctcactgtcaccaggctggagtgcagtggtgtgatcacagctcactgcaataaaggggaatttagagtaagagaatgatacgaacatcttcaagacttgtgactcattaggattagaattgtgtcacagttatctgcaaaatcattgcttggaggccagttaaacccagaacttcatgaaaaaaattagtcttgagaatgaatgagcacacact

SEQ ID NO: 63907 - DNA, 1006 bp, Homo sapiens
ttagcctccttactttacctaccttatccttgatgagggtccaggtggcatcagcttcatccagtgtcagcaggttgggggtacccaccaacatggtggggtatgggagggattgggcagggcagtggctgctgcaggaaccccaggcagcccagggaggtgagacctgaggtcttgggccctaaaccactgcatgacatcatagaggtcctgctagataattgtaccttggatagggggaggacagtgactttcctagcttcactgcagtctgtaattcttactcttgagtcacctatccatcctcctgcattaggggaagaaaatgcagggtctgttagggtgtgtttgtatatgtgtatgtgtgtgtgtagttcttggtctgagttctttaaggaaacaggatcaggcctctcctcccttcagcagcatctctgaagcaatttactatcttagctgcagatgcttctctgtgaggttggattggggtcctaaaggacacgggagaagtacagttatgagccacctaacagtgttttggaaaatgatatgtgactgacagtggtctgacgccataagagtataatgccatgtttttactttactttttctatgtttaggtatgttttgatacacaaataccattgtgttacaatttcatatagtattcactacagtaacatgctgtacagatttgtagcccaagagcaataggctataccatagagcctagctgtgtagtaggctataccatctaggtttgtgtaagtacactctatgatgtttgcgcaatgataaaattgcctaaggatgcatttctcagaacataccctgttgttaagcaatgcatgactatatagatcagggcttatactgagaaccaagcagtggtcccagccttggctgcactttggaattgcctgggagcttaaaaattactgttgcctggatcaattactggtgccagagattctgatttaattgatctggggtgtgcctgggcatc

SEQ ID NO: 63908 - DNA, 1156 bp, Homo sapiens
agtagaacttagtcactcaggaggtagggaaaaaagaatcctcggctgtgcaccctggctcatgcctataatcccagcactttgggaggccgagacaggtggatcacctgaggtcaggagttggagaccatcctgaccaacatggtgaaaccctgtctctactaaaaatagaaaaattagctgggtgtggtggcacacgcctgtaatcccagctactcatgatactgaggcaggagaattgcttgaacctgggaagcggaggttgcagtgagccgagatggcaccactgcactccacagagtctcaagaaaaagagaaaagaatctttaaggattcttcttaggtgactggttacatgggtgatgtctttaatcaatagtaggttacgcagaaatagatttggaatgtccattcttataccatatctcttacctcatagtatatgccttctaccctagctgcaaggggtagttcttgtagggaatttgaggcctcatctttataatgttagttacggtatactttcagggattttagttaatcgtgtgtgtgtgtgtgtggtttgtttgtttgtttgtttgtttgtttcatcatggcctttttggggttggtaaccctggaaagtttatttcatgactaattgggaaacctataagagcctctctagtaattgtacttaagtatggtttcaacccattcaggattttgtggctgatgtttctggttctctgctctactagggagcaagggcacacagaatttcctctttgggcatctcttatatttgagcccagtgcttacagtgctgtactctactccctacctccaggaccaaatttcgcacatctatgcccctactgatggcattgccctctttgttggccttctggtagaattcaccagtggctccttaaggctgatctgctttttctacaaagctgttttggaagtactgcctcctagcataagaggaaggtagctaactatggagttgcatctgcaccttggataagctgaggtagcttgtagactactgtcttgtcacctggctgaaggaataactgatgttcttttgtggtctgcatgggacagtttcccatcattccttctcctttgcttcactggaaaacacttccttttgggtggggctctgaga

SEQ ID NO: 63909 - DNA, 2786 bp, Homo sapiens
agaggctttggtgcaggacagggactggtgaatggtgaagtggtgaatggtgaagagcatattttggagggacagtagagcatgacagaagtgaaattgtcactgaactataattgcatatatagcccctgtggatattgtaggagcagaggatgtgggttgggtgttatagataggctggggaagagggaagtggttgactagttcggaagggtgatgggaagcatgaaatcagggcatgctatagacagaggagaaatagcttggtggtggtagattagtgattggaaataggagaattcgtcagggtgagagggcatggagaaggaatggatcttaactgggaatgaagtggctaaagtgttgattgattaagactgagaaggatggttggctgggtggggaggctggatagagggaaaaaggctgggcaggcagtatttttggtgttggagtgagaaagaactcctcactctactcctcagagtcaacttcagggatgggacaggaaatggtacctgaggttcatttctggtccattttgtccttttttccatttcctcagaaccctaaaggagaagtccaagaacctagggggtgggggaatctcccctctcagtccaagggaggttccctgatcccagcaccttcatgatacccctgtttattcccagtgaagagccggaggccatccttgggggagttactcctgcggcatgcacacagtccaaccagggcccggcaggcggcacaattggtccttcagcctgggcgagacggagcaggacttggcctaagtgggggctcccctggggcttcaactccagttctactcacccggggcggggcccctgaacgccaaggtgaggctcttcgagtcaagaatgctgtctactgtgcagtcattttccctgaatttctcaaggagttggctgccatctcccaggctcatgccgtcacctcgcctttcttgttggagacttcagaggaaggatctggccctctcatctcaggctgtgggcccctcaatccttaactttcttccatggacaatcagggccatgggtggcccgggctggggctagggcacaggctcctttttatgtttggaggcagtggcaaaaggactttttaatttatttcagatgaatgttttatggagaacttgttgcaatatgtataaaagggaaatctctattctgtgctcatttttctttcccatttttttctgtggggctggggccccagaaaaggttgtacatagtcggggaggtggtcagaagtattttctctttggtaaggacattgctgccaaggtttcaaggtaccccttatgcccttagagggtgaagggactcttccctcttctctggatcccagaaggaataagcagcatgggcccaggatggtttgggggagcagcagctgatgtttattagagaccagtacccctatgccagatcttgggggctttgcccccggaatcttttgcttcagcttcagtcgtcactgtcgaactctgaggatagaccctgcagcaggggcagggacatggagtgcccgtcggggtccctggggcccccaccctgggctcctggtggagggctgcgggggctgaagagccagttctctgccagggttggggatagtcacagcttgactcatggctggtcttttccccccctagcttttccctctggtcctctgtgccatcccaatccccttcctagggcctcctcattccatctcaccctccccagtctccctcattccatctctttcaccagagccctgtgctgagtaatggattcctcacatacttaattctcatgccttctccctccttcactttgtccctcccatccatctcatcatcatttcccctagtagtacctgacagtatctggggccccctccagaaggggtttcggcccttgtaggagaatctggtgggtttgtcctctggcccttcctggggaggtggcgtaggtggggctgggacaggtgggggcacatcagcagcttcagttgtatcagcaggtgctgatgtgggggccagaggcggcatgatgctgaggttgggtctgacccagttggccccatggggcaatgggtctttagtgagaggcttctgtggtcccagcacgcccttagactgcagtgaaaacttgaggcaggagaaggcaacaggtaatgaccgaagtagccggaggagctggggctcacgggctgtagacgtcagccccagctgcagccaggaacaagagaagacctggtagatgacatagatgctgtgggtgcttcggagccagggaagagtctgctgtaggctcacctgccctggtggcagcaacaggaaggcaaccttcttgcgcaggtcacccatatgtaggcggatcttgcagggctgtccatccaacattcgcgtctcttcataggctctctctgctcggccatttggtgagtattcccgagtgcagtgggcgaaggcaccctcagatcctgcctgctccaggaggcttggtagtggccccactggtttcagtgccctccggccctgccgacctggcaaagccaggcgggtatgggctgggcgggactgttttaccagcacacccagtaggtcatagcaggctgcatctgacaggaaaggtactgctactgcattgggcccaaagtgctcctcgatgacctgcaggtggccagtttataggtcagggacttagggtcagaagttaactggttgcctactttaaattgacccccaggttcacgttcagttacat

SEQ ID NO: 63910 - DNA, 1023 bp, Homo sapiens
aagtacctcattgcccgtggcaagttggactgggctgagggccctgcagcaggacctgccccacgccgttctgatcccctaggtgaggcctatcccaccacacccgtacctgccctccctagatagcctattaacccaggttaattgagctcttattaagagtgaaatgttgtgccaggacctagtgagttgtagaaaattgagtcttcatgtttgttctcaggcttctggtcaggggacagaacatagttctatctattaagagccagatcagcagttctagcaaaaactactctagaatttggggacaagaaagaggacagagtagtctctaggttgcgatattattacagcttagtaaaggacatgacatttgacatgggccttgagagatgggtaggacttaggtaggcaaaggagtggggaatctttttttttttttttttttttttttttttcaggagaggtcctggactgtttagttggagtaggggatttaaaagttggtggaataattggcagtaaggctggagagatttggctggagctgaatttctcagagtagaagttgggatgttttaggcagtgaaaaaccactggaagttctaaatctggaagtggagagattagtatgttagctcagatgcagtcaagctaggagaaaagagtcaggaagcatcaggaggcttctgctataatgtagatgttaccagggaggcttgaattagaatagtggacgtggaagggaagcatttaatgaggcagaaatgagaaggaagtgttggtggagtttggtgagtggtataaggaaggaggaagaattaaatatcgttatgaagttttaaatctagacttttcgcttaacaggtatcttgaacatttgcaatgtgtgccgggcattgtctttagtacagggaattcagggaggtacaagatgtaatttctgccttcaaagaatgtacaatctggagagtgactagaggaacgtaataccagaaggagcaaggtcctaaaggtgttggg

SEQ ID NO: 63911 - DNA, 1072 bp, Homo sapiens
tcttggttcccagcttctgaaagacaaaactgatgtcttctctggtcctccaaatatttttttccctaactttaaattggctcacatagttactttgtctttgcaacaccatcttctagctttctttctgagcaggtttagtgttatcctccgttttttgtggaacctaattctttttggacctaattactttctcaacctatttgttcttctgttgtgcctcttgggtgaatcttttataaaaacaatatgtaattgtagcttatggttataactgaacacttaaaatttgccagatctgaggctaaatgctttatattgataactctttgatcctcttcatcaccttatgaggtaggtatattttcctattttacgaactaggaaactaaggcttggacaattttgacctgtccaaactagtaaagggcaaagccagtgaaaccagatctttcagagtccagagcctaagatctggcttgtcagcttgaatgtgtgtaaagctggcatctggaatcttgtgggtccatatggtgtctgccatcttatttcctccagaataggtggccacgggatatttaaacatacccagaggctgacatacaaatacttttcatctggtgggggtctcttgttttggggaggaatgcgtgcgatgtgcattgtgttcaggctttgtatccttgtgcccacctcccccccaacccaggccccttcatggctgtgctctttgccaaactcgagaacatgctgcagaactccgtctatgtcaacttcctgctgacggggctggtggcccagctggcctgtcacccccagcccctgctccgctctttcctgctcaacaccaacatggtcttccagcccagtgtcaagtccctgctgcaggtgtgcgatgcatgcatgcatgggtgcgtccaggctccgtggtgggccaggcccgcagctggagtgaccctgggtgggctgggaacaggcccagtgggactagaaaggactgtatcagtctagagctgctcagaaatgtcacgaaggtgtgcttcataggtgctgggctctgtgaagaataaga

SEQ ID NO: 63912 - DNA, 2004 bp, Homo sapiens
gaggttggagagttagctgtctgaatagattccatgtttctgcctccccattgtcttctttcttagtctcccgaggtgtcttatctctccttctgaacctctgtctccttgatttctcttatattttttccctttgcaggtcctggaagcccaagtgtggactcctcttctgtgacgacagtaccccggccctccacaccatctcgtctggctctcttcctgcggcagcagagcctgggtggctctgagtctccaggcccagccccttgctcaccagggctttctgcatcccccgcctccagccctggccgacggcctacccctgcagaggagcctggagagctggaagacaattacctggagtatctgcgtgaggcacgtcgtggtgtggaccgctgtgtccgagcctgccgtacctggtctgccccctatgatggcgagcggccctctcctgagcccagtccttttggctcccggactaagaaacgcagcctactgcctgaggaggacaggaacaacgtgggggaaggggaggaggaagagctggggaggagggggcgggctgggggtgcaggggagggccctggtcacctgccccctccccagctcaatggagtgccaggatcatggcctgagggggccaagaaggttcgtctggtgccaaaggagggagctggggaactgctagagggcatctccgagggcatggcaggactagagggctttgggcaggagctccgggagctagaggtggcattgagcaatgggggaactggctcagagtcccccttagaacctccactgccccttgaggaggaggaggcctacgagagcttcacctgtccccctgagccccctggccccttcctcagcagccctttgcggactctcaaccagctgccaagccagcccttcactggtaagctacttagcctaggccttcccttctgtgtactctttgcatgttctcgacatgtttgtgctggtttcttggacctcttggccatgtcatttctgtgtacttgcctagcccctcatccatcctgcttgcatcacttccagatacgtgtcatgtcatacttgtgtccctgtgtctgtctgtacgtcttccatgcttgtgctggtttgagtattgacttacatctgagccttgtatgtatgtcctatgtgcatgttcctcctctttccctagtctggccatttcctgcgatttgtaattaggatattctgtgtttgatgtttcctggtgaatcacagcaatatttctgaaccatattgaagacgtatgtgctgtcctgtatggagaggcacctaaacactctctatgccattccgtccagtttatctgtctgggtcttgggttttctgtcagctctcctggggcctaaggttaaccttctggtatttttctccctactcagctccttcctccccacctcttcaaagaaggacttgatttcaagtttttcctgttcgctttccttgtaccttcttggttgctgtgactgtctgctagcactaagactgtcttaagcagatagagtgcaatttctttgaaggcaaatgacaaagcgtggccctgagctccctgactgagttcatttggactctcaaggatgccctggagctagactcgatctgagtggttggactaactcctctttgtttttgtatgagagccagcttaccccgccattctaaacctcaggccaggaaaaccaaaaaacaaaaaaaccaaccaaacaaaaaacaaacccacctctgagaagtagtagctaaggctaagatcacaggccttggattaggcataccttacattagcctcccatctctgccatagatgcatataaatcatttactacaattatggcacattgtgagaactcagcaagtggtagcttttcactaggatctctgggtacatagcagatttaagttgactaaggcaaacactcatcttccagttgttcatagtcagattgtcatgccttgataagttcatgt

SEQ ID NO: 63913 - DNA, 2323 bp, Homo sapiens
gggagatgatttgaaacaaacaaacaaacaaaacgagcaatgacagcaatgtgaaaagcaggagaaggacattctagtctaggcagagggaacaaaaagtattcaagaaggcctgtgtcactaaagtgtgagtgagaaggagaatggtaggaagttatacagattagattatgtaggctcctgtaggccaagataaggaatttgaactattacagtgtgttaggaaattattggagagtattcagcagaggacaggtcatataatttaggttttaaaaatatcactctggttgttttgataactcttaggaggatagtaaaggaatcatggagaccagattggaagctactgcaatagtgagacatattttgaaggtagagatgatagagtttgctgatgaactggatattggaagtaaggaaaagaaaaaacaaggataatgtacacattttcagcttgagcatttaggttaattttggtatcattttcttttgagatggagaaagttgaaggagtaacaggtttggtggtagaaatctgagttctgttttagacatgtcagttgctgattgtgtgtatgtgtgtatgtatatataggtgtgtggagttttcagtggagtggtggttctgagttctggaaagtgagcttctatttatcccttccattatctcttctctgaattagatttagaaatctggactggccagtgacctctgggcttgccattccagcctggtataacctctggctccatgggcagctactggctcctacagaccggatgaagcagactggagacacaagtggagaaaacctccagctggcaaatcctcagagtgtaggcctctggctgccagtcctgcccagcctgcctcatggagaggatgaattggctgagcagactggcctcccggggccctgggcaccgtatacctcaaggggccaatctccaaaccccagtcatggctgatcccgagacctgcctcatggtcttcaagaatcactggtcccaggtaggagactgtatggcaaagggccttgtctgctgatcacctgagttctcccagccttctatattctcctcatcccatttagtaaccttatcaatttagattccttccatcttctgtcctttttccctaggtggtgcgaatcctggagcggcaaggccctcgggcagctcctgggggtgcagacgatctcagtgctgtgcgcaaccacacttaccagatgttgacactgctggcagaggaccgtgcagttccctcggcccccacaggccctgggcccctgctggagtttgctctgcacgaggatctgctgacccgtgtgttgacatggcagctgcaatgggatgagcttggggatggggtcgaggaacggcgggctgagcaactgaaactatttgaaatgctagtgagcgaagctcgccagccactgttgcggcatggtccagttcgtgaggctctgctcaccctgctggatgcctgtggccgccctgtgcccagtagcccagcactggatgaaggcttggtgctacttctcagccagctgtgtgtttgtgtggcccaggagccttcattgctcgagttcttcctgcagccacctcctgagcctggagccgctccccgtcttcttctcttttctcgccttgtcccttttgtgcatcgagagggcaccctgggccagcaggcccgtgatgccctacttcttctcatggctttgtcagctgggagccccactgtgggccgctacatcgcggatcactcttacttctgcccggttagcaccccctggcttggagggtagggtgtggtgtgtagatactgaacagcaccttcctatccaggagatggggagaggctatgttccagggcccgttcccctaggaaacagttcctggatttgaaagcagccccctggagttgtagtggggatgaatcatgggcttagatggatagggcagatactaagtctctttgtaggcctgtgaattctaggtgagtttcaggcacattgggtaggcaaatgcttgctttggtaatagcttatacccctattcccatcaaaactctggattactagctcccctgttccagtttttatattttataaatgtattttatatatgagcttttggtaacttctcataggtgctggccacagggctcagtgccctgtactcatcactgcctcgaaagattgaggttccaggggatgattggcactgtctgcgacgggaagactggctgggagtgccagcccttgcactcttcatgagttccctggagttctgcaatgcagtaattcaggtaggactg

SEQ ID NO: 63914 - DNA, 1051 bp, Homo sapiens
gtgcctctcttctctgaatagtctgtgattaaggcacactaaatttgcaactgttctttgaatttttcgtgttctttcacggtaccatagttttgtacgtactgtttttaatatgaagaaaacctttccctctgctctctgcttaattagtatctcattattaaagatctaagttcaatattaactctgtggaaccctctaatagcccaggcagagttagttgttttccttcatgcccccatgacactttttataaatacttctatttacaatatttgttggatttatgtttatgctacctcaactgtttttatccatctttgttatttccagtgcttacttagaacagtgcccagtattttatccatatggatatacattgagttaatgagtaagccctacctgctctttaggactgggcccctccctttataagactcacctgttctatagaaattttgcttaaacatagtggctaccttcctttagttgtgagctggaaattgtgtgagagagtatctgggtgaagggagatattgttaatataaccttagggcaaaatgtggggctggtgccaggtctctggattccttcggcctttgttgagtataaagaggaaggacaactgaaccacccctttcctttcaaggttttatgcttgtgagagacagtactgatgagggtgtggtggctgtaaaggagaaggaactatggttccttctccaatagctacttggtacttttttcctttttcttgtgaggatgtcttaccattttcttgggagcgagtttgggttgtgtctggcaggagtggagatgggaatgtgtctgtcttccttactggaaaggaaacagctcttctttattggttggctctgaattcttcctcttaagagtattcagtcagttaagggtcttatttgctcatctcccataggtcactgggtaggtttctagggaagcacctgtgatagacagaaatttcttcttcagtagtcccagagggctagagtcagatcaaggctggatttcttgattgattgttcattca

SEQ ID NO: 63915 - DNA, 1020 bp, Homo sapiens
cctatttttttttttgagacagagtttcactcttgttgcccaggctagagtgcaatggtgcgatcttggctcaccgcaacctctgcctcctgggttcaagcgattctcctgccttagcctcttgagtagctgggattacaggtgtgcaccaccacacccagctaattttgtattttttaaaatagagatggggtttcaccgtgttggtcaggctggtctcaaactcctgacctcaagtgatctacctgccttggcctcccaaagtgctgggattacaggcatgagccaccacgcctggcctaccctatttttatcctttctcattttactgaatttcctgaaagtacatcttacatttcgattcctattctttaactaactaatttgactaagtttgtaaaaaacttgattgcaccatttttagtcttcattctacttgatctttctatagaactatacactatgggcaacctccagtttcttgaaacttcctttctttgatgtctagatcatcgttatttcttgggtttctccttttatttctggctcccttcaaagtcttctttaaagactcctcctttttaactttcctacgtcctggttttccccatgattttacccttacctcctttcatgatctgctgttctccttggataattccatctacttccatagcttcatagttgtctataagctgctaactcttgaatttgtatcttttgtcttgattttattcattatctcaagtatggtattcctacttgctttctggacatcatgaatatcctgtagatgtctcaaaacttaacatgttcaaaactgtactcaacctcttttctaaaacacaattccccttcttatgtgtttctagtctgttaatggctttatcttttactgaatctcctatacttcctatgagagtcttctctcatcccccatttgtttgccaggtcttgttgcttttactttgcggttaatttaaatctggaggcagatattctgcatttgcattttagtcc

SEQ ID NO: 63916 - DNA, 1047 bp, Homo sapiens
tacacatctgatctccgaactccttggcttaaaaacttttggctctttgtgtcctgtaggacaacatccaaatttcttaatatggcatcatttagcttcagcttacctctccagtctcgtgtgccactccctagtctgtattctagtttgaataaattgttcacagttccctaaaaccatgctgcttttttgagccttgaaatctttgtaatagctgcttcctctactaggaatgccttttcttctctgcccagtgaactttccttatcctttaggatctagttcagtttcacctcctttttgacatctctgtcaaggtagagataactgtgtgtgacatgaggattcattgctgtaaagaggagtcactgtagaatagaggttcacttttgtgaattggatggaccccgctggagtcagatgaggagatccctgcaagaagcagaagtgatattgcggggagggaagggaatgagttgggaccataccctgacatcccatttgtctgagggatggaaaagcagggaagaaatgtgtaagctgagctctagtataaattcctagtaggtggtgtttttggttggttggtttttccctttgtatttctatgagattttaatcaggtcattcaacttccagtatttagggtaacagcccattcatcctccttatgtcagtaattagtcttcttgcctaggaagagccactgtaaggagagagacaccacagaattttactgacctgttcttggaagatcattttggtctctctgtccaatgtaggtgttgcaggtatatcccttcccccagctccctcctctttgcctctcccagggcaaaggttcataagtgaggctgagccacttcctgccctgtatctgcagttccgaggttggttgtcacccttgctgtgtgtggctgtaaggctgtattttgggctataaggtgagtgcctgatcttggccattttgggtctgagagatcagctcgttcccctttttactctgtggctgagcctgaaggtaaatctggagagtggcaggttctg

SEQ ID NO: 63917 - DNA, 1831 bp, Homo sapiens
ggcggcctgaactcacctaacaccgcagcagcaaccgggcccggccaggttcggcgttccgtgagtgaacggtacgcatgggccagagggcctggagagtcgtttgtggggatgagagactgggaaaagacggtgacgggtttggttactgtactggttgtgaggggttggcaggtggtgagggtccgggtgtgagtgtctaagatagggaaggagggtgagagcttacaggtgagtggacaaatgaggggctgtgagaggctgggtgctttcggaggtgccaagttgaagggactcctgaacgcggtttactagggctggggctactgagggctggtgtgaaggataccctgggactagagtgaggggtaaggcctgcgcgaggagagagagagtaaaaggcgcaggtgggagcctgcggggtggcggcaaattggtgagggagttgaaggcgaggcatgggaggagggaattagggcttgtgagacttggataaaggtgagaggttggttctgaggcctccttcgatggactgccctgtccagtgagagcaatagttttagacaaagtagggcagcttagatggaagtgttgtgcacctgactcctctgctcccatggactttccatattctggaggacgagaaaatgaaggtgtcataggcaatagtactatggtaatgaaagtcatatttgaggctcagacttcaacagagtaatcacagaaacttcagttccttcgagttccttctctggactgcatagttgaagatgggccctctcatgaagggttttgcgctgtgacagcttgtgttttctctctacttgcttctggacaaccttattccactgttgctccttacctgtgcttaactgtgggtctttgattggattgaccatattcagttgctaattctacttttatggaggtcatatggtttgccctatacagtactatatttaggatcccaaacaggatggccttactctcctttcttacagttgaattttttaaaaagctagtttatattatatttaaaatgtgtgtttgatgagttttgacatgtgtacacatctgtgaaatcatcatcagtctcaagatactgaacattttagccacctgaaaatttatctcttcctctccacaccctgtagttgggttcatcttactagcattcttttaggtcctcttctccccaccaacccaaatgcacgtgaaattctggaaagttggtttggcattcagtgataatggccactttcacactactaaattttcctctctactgctagtcagccatggggttgggacatcctattctttccagactcagaaagagttaagtctttccttaactctacagtggacagggagagaccatttcctgagaattagacagcctcagtccccattcttttccagagtcttagcttcagagccaactcctatatcctgtggtatattctcattgcttctttctggagtccagacaggcctccatattggtagaacacttggcaacttgcccagtcagtcagaacttacagttcagagtttagagtagtggttcctaaacactggaccaaggaccctgtacatgataaaattatcatctatccaagatggagggagagaaagacagtatggttattcatgaagataaatttattctcagagattatcattcctattcttttggtgttgcagtgctctttcgttgatgcagtaatggtaacagtagatggtgggttaaaaaaaaaaagatctaatttacccaaataaaaagtgtcaacccaatttttaattttaaaaattatttctatagctttat

SEQ ID NO: 63918 - DNA, 1002 bp, Homo sapiens
tgggggctggggctgatgctggtgcgctgggctcagaatgcatccctgatggagagggtggcatctacaatccatcactgagtttgctcccctttggggacacccatggctacatgccaccatcaccccattgtgacctttgtgaagtaagaaaataatgcagacagtgcctgaggaagtcagcttgccaagcaaaggcctcatgccacaggccgctgagctaaagaagaagcgatggcctggtgctgcctgagttacagggcaatatctggaaggcaaaggtgtgcactgagcttggtgcactgagtcctgcccagccccagtttggaaatggaggcccaaggggtggtggccaggggttggcctggttcctctgctctgcctctgatttctcaccatgcgctcctcccactgcagaaggaacccaatgtggctcgcgtgggctccgtggccatcaagctgtgcaatctgctgaagatagcaccacctgccgtgtgccaatccattgtccacctctttgaggatgacatggtggaggtgtggagacgctcagtgctgagcccatctgaggcctgtggcctgctcctgggctccacctgtgggcactgggacattttctcatcttggaacatctctttgcctactgtgccgaagccgccccccaaaccccctagccccccagccccaggtgcccctgtcagccgcatcctcttcctcactgacctgcactgggatcatgactacctggagggcacggaccctgactgtgcagacccactgtgctgccgccggggttctggcctgccgcccgcatcccggccaggtgccggatactggggcgaatacagcaagtgtgacctgcccctgaggaccctggagagcctgttgagtgggctgggcccagccggcccttttgatatggtgtactggacaggagacatccccgcacatgatgtctggcaccagactcgtcaggaccaactgcgggccctgaccaccgtc

SEQ ID NO: 63919 - DNA, 1016 bp, Homo sapiens
gatctgctactgcagctggaggatgagacactaaagctagtggagccacagagccaggcactgctgcacgcccaacccatcatcagcatccgcgtgtggggcgtcgggcgggacagtggaaggtgggaatagggcttgggattcgagggtgggagttcatccagcatcagagtcctcctctctaactctgttatttgcctctcttgtgctgctggacccagagagaggtactatgcctattttccccctcctacacctggaccagatgcctggaagcacccaagctcccctcttctgccctgccccttcccacccgctatgctccaccattaccctccacctcagcatgcttgcctgtctacccctcccccccaagaaggcagcacctatgggggaccagctgtgggcagaagccctggaggagctgtgatgggcagggaggacgtgggtggggtggggaccaggctcagcactggatggtactgggagacactgaggtgccccttccccaacagggactttgcctacgtagctcgtgataagctgacccagatgctcaagtgccacgtgtttcgctgtgaggcacctgccaagaacatcgccaccagcctgcatgagatctgctctaaggcacggccccctccactccctggactagttgccacctttgctctacaagggtgtgggtggggtcactgagtgctgtaggggggccccagggcaatgaggctctaatagattctccctggctcctcgcctcccttccttcctcagatcatggccgaacggcgtaatgcccgctgcttggtaaatggactctccctggaccactctaaacttgtggatgtccctttccaaggtcagtgtcaaaacccctccaggtccagctcagctttgttggcaaaggtgggtgacccaaggaaaggcatgagctcctggacagcgctgatagaaaaatgaacacatgaagactgaatactccaatacgtggagggactccggttaaagggaggcag

SEQ ID NO: 63920 - DNA, 1651 bp, Homo sapiens
gagacataattgtggcagactatgacaaccgttgggtcagcatcttctcccctgagggcaagttcaaggtgagaggcctgctgtcactttacttaccctggtgtccagctgaactgaccagtctagtgcctcttggtggtcagggtctggactgatccaatcctacctcctcctactccctgttctttccccagcccaagattctgctttggtactgggttaggactactttccccactgtcagaataaagcctcttatggatattctcttcctccagaccaagattggagctggccgcctcatgggccccaagggagtggccgtagaccggaatggacatatcattgtggtcgacaacaagtcttgctgcgtctttaccttccagcccaatggcaaactggttggccgttttgggggccgtggggccactgaccgccactttgcaggtatagggggacagctccaagatctatgctgatacccctgttccagagaactcccctagataccccagctgtaaaggccctctcctcctatatcttggctctggagatcccacttcccttacgttagccctatcatctcagaaataatttgtctcagtcctggagaccccacccctctcctaacaccctagcttttatcttcccagatactcttccccatcccactcagcatcccagcttactgccctgaagaccactttgtattttcagggccccattttgtggctgtgaacaacaagaatgaaattgtagtaacggacttccataaccattcagtgaaggtcagtgtcttccctccctccgtgaccactgtcccaacatcctttcctcttccacaagactcctctctattttacctcctccttttcccctttgagatcattcactcaaacaatacacatttacacatttatgcatggctgctttgtcccaggcagtatgctagaagctggagatacagtgatgcacaaagcaaatgtattctgtgtcttcttgattatagtctagtagggaagagaaaaaggtaaccaaaaaattacaatatgatgtaatagattctgtgataggaaggtgcagggaactgtgggaagggatacagaagtgtatgattcaggaaagactatatgaggaggacctcaagcacaagtgggaattaaatggaaggcagaggaggacgagagtgtttgagacaaaagacacaggaagagccaagaatgcaaggtgggaaccttaatagtgtgttcgagaaatcacaagtagttcagactcagcttgaggaggggaccgtgaaagctgagagtgaggcttgtgtgcccccttaaggggcttgctctcctcccaagagctatggggagtcacaggattgcaggcaggggagtgatgcagtcctgtgtgtcttagatcactcaggctgaggcaagactgagacaggaagatcaatcttttgcagtgatccagatgagaaatgatgtgagcctggaccgtgagaaagacgagacagtgtatgcatagggtatagacttgagagagggatttgagatggaatcaagagttgtgttaattcattggcctatcaaacagagaagaaattggagtcaagagtgactcatggccagctgggtggcaccagtcattgagatagaga

SEQ ID NO: 63921 - DNA, 1047 bp, Homo sapiens
aattttgattttatcctataggggattgtttctaactaccatgcactttacttcttcgaaacattttactgggtagcaaaacttttcgctgaagatccttacttctaaacacctatacgtttaaacttcctgaccctgcttgagtactcatgtcatcgatccagctctgctaaggtcctttccctcagtgacggctactctctgacccctgcttttcacctaacagtctaaaagtgcaagggactcttctgtggccatattcccagttctgtccagtcgtcctttactcctaccctatttctaagagcagaggaatggagaggccctgtgcagcacaggaaggcatttgggcccagcctggatagtgaggaggggattgcgggggagtaatgaggtggtgctcagttccctactcagttacaccttccagctcctttccaactccctaggctgggaatgcttcctggcataaaagttgagatttgggaccccttctctgttgtgcacacacacaggtgtgctcactgctcacatgcacagaaaaacaagtgccactttgtctgtcctggtgagggggctgaacttcctcatagtttttttttttttttttgagacagggtctctgttgtccaggctggagtacagtgctatgatcacagctcactgcagccttgacctcctgtgctcaagcaatcctcctacttcagcctcccgagtagctgggactacaggcgcatgccactatacctggctaatttattttattttatttttatttttagtaaagacggggtttcactatattgtttgggctggtctggaactcctaggctcaagctatcctcctgccttggcctctgaaagtgctgggattacaggcatgagccactgcacctggcctccccattgtttcagagtggggaattgagagggaacacctggtatagctccactctcttccaaacacctgctacttctatagcagtcctcctcttgcttctacttccacctgccctctatgtcgccactgctaggagcctggctcag

SEQ ID NO: 63922 - DNA, 1072 bp, Homo sapiens
cttctcctgccactccctccctgttttccctacagacaaagtaccctcacatttgccaaattcagtggacattttcctgtccttaccttacccaactcgtcagctgcttttaacgctgatgactactcattccctcctggaaatgtaccactcagttttctgccctaacacagctgctcttcctgcctctcggcctggtcttctttgttgtcctcattcagtttttgctaagtgctctgtccctctctcttatcactgtctatgctttcttgtctgatctcatcctctcccagtgctaccgaagccatctaaatgttgatggcatgcccatctcttgtctctaaccttcattctcctgtctactggtgacctcaacctgggtgtttattgttacagtaaattcaaccaggacaaggctgaactttcctatagctactcctctttctatgtttctcatcttagtgaatgtcaccactatccactcagttatcaaagctaggaatttggaagtcagcgaagactcatcatctctcttgctccccatatctaatcagacaacacctcccaccttccctccttcttaaacacttctcaaatttatttccacctcatagtctacattactattgcctaaatccaggtcttcttcacttcctacctagatgattgtaagagtatgctggctaagcacatactttgcatttgaagacaggcttcagcacctactgctgttgttaccttgggccacttgccctttctcctgctaacagaaacgtaatcagaaagcatggcacctggcacatatgcacttaataaatggtaactagctggtgatgccactgccctcgccccccaaccccatctgctgtctcattccctttaaattcactccccacacagagggggtgaagaggagcttggtaaaatataaacctggctataccactctcttgcagcttcctattgctggcaggataacttctaagctccttgacttctgtcaccattccttgccttggactttgtctctagccagccacatcaaactgcttacagttgcttattcatacta

SEQ ID NO: 63923 - DNA, 1033 bp, Homo sapiens
tgaaattggagagaataagggcagtttaagggggagcttgtaggttttcagaaagtgtttggattttattttaagtgcaatgggaaaccattggagtttttaaaaatatatatatacagggaaataatgtaatgtaaaaagttcaccctagctgttatggagagaatggattataaaggagcaagagtggaaacagagaccagttaggaagctatcgtgagccaggtacacttgacaaataggaaggggatattgctgaattagaaggtgttttgcatggggaaacactagattcagtgagcttggaagaaagctgctgaagaatagagtagaatggttgaaatgcagtgatagttgatgagaagtgggtgttagtgggagcatgggaaatgggggaaaagatcactgggggtgagaaggtcaaggaattaagaaatcacaatgggggatggatgttagtgccactgagaatgatggcagagtggtgcggggggtaatggaagaagagagtgagccaagagaaagatgtccacaattggaagtgggggcaaccattaggttagcagagacaacaataaggaggagtgatagagatagaaggcatgagcttcaaaggagctagagttgaatagttcagaaatgttccagttgggaagagggagggctcaagcccaccttctggccctaaggagtgtggagtatgagacagaaaccactctacttgagaggactgcaaggaaaagtaagtcacaattaaataagttacactgggcatggtggctcatgcctgtaatcccagcactttgggaggccgagacgggcagatcacctgaggtcaggagtttgagaccagcctggccaacatgacaaaaccccatctctactaaaaatacaaaaattagccaggcgtgatggtgtgagcctataatcccagctgctcgggaggctgaggcaagagaatcgcttgaacccgggaggtggaggttgcagtgagccaagattgtgctactgcactcacacctgggtgacagag

SEQ ID NO: 63924 - DNA, 1047 bp, Homo sapiens
gcattctgcacagaagaaagaccattggaaaagctcatgtgacatgagaaaatatgtcaggtaagaggcctggaggaagcctggtagggctagagcagagtgagtgtgactgagagtattatgggatgaagctggagaggtaggtggaggccagaccacctagggctttgtagacctgttagggaatttcacctttaccctgagagccacatgaagcctttgcagggttttatatgtgatcacatctgtattttgacaatattctcttgggcccttatctctcattgttctgtcttgggtggcctggtccctaggtcttctcaccaccactgcctctatccgcacttttcctctgccttctgccccaacggaaacctggctctgcaccagagatactgcttccctgccagccctgctctttgagattccagctccactgcccactctcctttatcaactggaaatggcctcagttttcctgtccattcaagttcttctgtcagcctggggacaaccaccctcttgtgcctgttggttcttaactgtttcttcagggttgtcccccattccacctcagtaacactccctcccaaccatgccctgaatcttataatccagaatcttatctgtagtcataaacgccaacgttccactcctggctcccgttaccccactcccattacaccactttcgatacaatatagatatctagcccctttgactgctccctcttttcccagtcaccagctgcgtcctggcctccctgtctttcctgcccatcctggaccctgtggctgaccgactggctcccctgcagttccttcacatctttatcctttgcaaaacccatgcaatagaagctcaatgttggatcagagctgaaattggatgtctctgcactttctcctgtgcccagatcactgagcactcctggagaaaatctggctgagaaattgtaataacagtagctaccatgtattgattgcttactgtttgccagggactggctaagtgatttatacatactgatttccttaatccctgcaa

SEQ ID NO: 63925 - DNA, 2272 bp, Homo sapiens
tccttatgggtacctttttcccttttcttcgtgatcgtaatatcccatctgtggctgagagtaggagcctggggggtgctggggtagatacctgttgtgtggggaggctgttagggtctctgatttattcccccatttcccaatcagtgcacaaagcaactgttatcagaacgatttggtcgaggctcacggactgtggacctggagctagagctgcagattgagttgctgcgtgagacgaagcgcaagtatgagagtgtcctgcagctgggccgggcactgacagcccacctctacagcctgctgcagacccagcatgcactgggtgatgcctttgctgacctcagccagaagtccccagagcttcaggtgcctcacccagaccaaagagggtgggggaactgggcatgggccctcccaggcagtcattcctcatcctccctccctcctgcagcccacagggagaaccccttcagggtgggcccagccctacccccagcagcactcacctgtggaggcagcctaagggtttgtacagaggtccagaagttggagggggtgggggagggggcacactaggtgcctcacaaataacccctctctgcactggggagaatgccttcgtgctcagcctaatcagagcccctcccctgcttgccacactagctctcagactgttccagtcttgtgaacttacccaagaatgcccaccacccacattcctaccccaggtatccccagggtgatcccactaactttccggctaagagagccttgctggaggcagtccttggttgttccagttttgctggctgtgtcctccccggggaggaggggaatgaagggctctacagcttcagtcaggtagggagtgttattcaaggtctgttcctcccttctgccctcaggaggaatttggctacaatgcagagacacagaaactactatgcaagaatggggaaacgctgctaggagccgtgaacttctttgtctctagcatcaacacattggtcaccaagaccatggaagacacgctcatgactgtgaaacagtatgaggctgccaggtgtgggcactggcagggcttagggtttggggagttggctggtatgggtggaaatttgggcattaggggcataagaattcaggaaggaaaggagagtatgtgttgaggataaaggagtggagaccagcctttatcaccccctccccaggctggaatatgatgcctaccgaacagacttagaggagctgagtctaggcccccgggatgcagggacacgtggtcgacttgagagtgcccaggccactttccaggcccatcgggacaagtatgagaagctgcggggagatgtggccatcaagctcaagttcctggaagaaaacaaggtgccaaccccacccccttgaccctagcccacctttccatctgtaacactaaccttcccctcagaccctccccattattgaatgaggaaatgcagcctagctggggagtagagtgttcaccccctcaacccctgggcctttccagatcaccctccctccaattcctggccctttcctgttggaggatttggctgctggtcccaggaacataactgggaaaaatcaccccctgagctggggtacaaaaaccctaggcccacaaatccagtgaggtttcttccatcatactgacccttctcctttgactccctgggtagagttcagcccctaccccaaaagcaccatcagagcagagtccttgtgcccctggtctgtgcctgggctcaggctcatagaccctcaagaagggcgcctgagtccagccttagctgaccctgctggacccccagatcaaggtgatgcacaagcagctgctgctcttccacaatgctgtgtccgcctactttgctgggaaccagaaacagctggagcagaccctgcagcagttcaacatcaagctgcggcctccaggagctgagaaaccctcctggctagaggagcagtgagctgctcccagcccaacttggctatcaagaaagacattgggaagggcagccccagggtgtgggagattggacatggtacatcctttgtcacttgccctctggcttgggctcctttttctggctggggcctgacaccagttttgcccacattgctatggtgggaagagggcctggaggcccagaagttgctgccctgtctatcttcctggccacagggcttcattcccagatcttttccttccacttcacagccaacggctatgacaaaaccactccct

SEQ ID NO: 63926 - DNA, 1018 bp, Homo sapiens
gcgttttggaggggagaaatacatatatctgaagaaaggaatgatggccaaacgctgggacactcaaaccctgggacagcctttaaagaaatgacagaggaggcctccttcttctagagtgctggccagtgtccagaacttctgtgttgggctttgcagggtgctggggtggagagttttactccaatacctttcctagccatgacggacgggatcctagggaaggcagccacaatggagatccctatccacgggaacggcgaagccaggcagcttcctgaagatgatgggctggagcaggtgcttctgtttgattcttctaattgtttcaatttaggaatccaatttataaatcctaggttctcaccctccattccagtagccttcccctgacttatctgactcccttcattctttttacgtatcattttgattctgtgcagacttcccttgtgtactatctttatgatgcttgaatccaaacttgttcccacctccaaaatgcttctgcagcccctatgttcctgaagcaacccctcttctctggcctataggacctccagcaggtgatggtgtcaggacccaacctcaatgaaaccagcattgtgtctggtggctatgggggctctggtgatggactcatccccacaggtatgaatgttcagaaacaggaatcttgggtggaggaggggacaggaatggtttggggaagcataggatatgtctaggaaagcttgaattatgtctggagatcttgggaacttctgcttgtaggaacctcatggactctcctcagcccaaaagcaactcccagcgttgtccatccatttcccttttgccacttagcccctgaaatggctcatttgtcctttccctgccaccacctgagtcaagttaagacctgcttcacaggaatgccccccctctacagcttgaggctgagttggaactttgtgaagcttctcagaatttttagattctaaagtttagaggaacaaacagccctgaatctcacact

SEQ ID NO: 63927 - DNA, 1012 bp, Homo sapiens
cccacacttctagtcaaggtcgcgccgcccaaagtttcccaggcccgcgcgccatagcccgaagtttccagccctcaaatccctggccctgtggggttcccgcgatgtgtgcaggaatgcgagctgaacgtctggcctcgaaacgacttagttctcacttacgtttcgcagttgctgttgctgctgctgctgccgctccatcacgccaccggcgcatgccgtacgccacttccgtttcagcttctcggtgccgccccggaagtaacctctcgctgatctcgagagctagctcgagtatcgccctgccctggctgcgacgtcagctccgcccttataatctgcgacgtggccggcttcttctgcccggagaggacgtcatttccgccgagtccctgacctgctgctaggatcgcgacgggaactggagcccgaggtccccgcgcggcccgggcctggcgccctgaggggaagagcggcccggcccgaggtgagaggaacatgcttgggcgacgggaagttgaacgcacaaacctgtccagagggcaagatgccccgagccccggggaaggatgaggacacacctgatgtccaggtgtatgggggtgggggcggggactcacacacctgggagacataactgactgtggaagggtcaccgatatcctgggagagagaggcttttaccagagactgggaacatacacccactgatctaactaaggcctggtggggagggcccgaggaagacgaggtgtatgagacggaggaggggagaccccctgaaggaagggggaagaaacgctaaaggaatgtgaaaggccaagcaatggagaacaaacctgaataggggggtgaagacctgagccctggaaagggttcatctcctcagcataaacacgcctgcatggagataagttctaagagagcagactttccctcttcactgttgtattttcattgtcacaaatagtgcctgacacatagtaggcactcactaaatgtctgctgaatg

SEQ ID NO: 63928 - DNA, 1023 bp, Homo sapiens
cctatcttccttctaggaggcctgtctgcacagctgtgctgggaagctgatccattccaaccaccgcctcatggccgcttacgtgcagctcatgcctgccctggtacagcgccgcatcgcagactacgaggctgcctcggctgtgccaggcgttgctgctgaacagcctggggtctctccatcaggcagctagccatacccaaccccaggaaggaaggccttggatggaccctcagattgaaggacccggtggaccttggggttggtgaatcctaaacagagagaattcgaggttgcctgaaagctgggtgtccttgctccttttcctggagccaatatacccagtttttactcagtttgatttatattctgggcaaggaagctttgcctactttattggcacaatccgttgttctgtcgtttagtgcatatctgctggcttcagccctggcagctgagaaattgttttctatatgtagaaggaaaacctgagcatttgcaggcatctggttaaagcagggtctgtgtgtacaattttaaaacgggtaatatgtcatgctcttagttcatcttcacaacaaaactatgagtaagcggtattagcctcacttaacagatgaggaagcaagattccagaaagtaccagaaggtcattttatacaacaggagattggttcctgcccagatgacagaaaatgggagctctgtctagttgtccttaagtctgactgacttcagtggctcataaccgtgagccaagtatttgttggttcataactgttgttttgtgaactatgtcttacatgtctagagttctgctggatctagggaaaggaggagctatcgaagtacaacggatcaaaaaaccacagggcttttgggcactgcctccttgggaagttagtggccacagaagagagatgaaacctgtaagaagtctggagtcttttggaacttcagccatttccccaggttgttactttcttagtatgtacagtcttctcaggatgagcagtaaaacct

SEQ ID NO: 63929 - DNA, 1088 bp, Homo sapiens
aggcaagcatacatctgtctaaagccagtgcctattctgtgctcggaatcttagtccttccatcttggaggatctttgacttccactttactgaattattctcatcagtgtttaaacatgctaaagattctcctgttaataaaccacttcatacctcatttcccctccagttacacttctatcttttctactttacagttaaacttctcaaaacagttggatagtttgggcctctccattttacaagtcatttcccattttcattcctcaaccgagtccattttgacttctgcaaccatcattctgttgaaatggttcttgccaaggtcaccttggtgatcaccttcctatccttcaatccggtggttatttcccagtcctcactacctcacttctcagtagcatttggtataattttctagtttcttatcattgatactcttccattggcgtctgattctactttcatggttttactactacctctttgatctttgaccacagctgcttagcctcctttgcaggctcatcctcctcccagcctttaaatctgaaagtttctctcggttctgttcttctcactctaattttcctaggacagtttcatccccactctgaactttagttactgatgacttccagatctcctccaagctatttgacatctccacttaagtatctcaaaaacatcccaaactcaacatgtttcctaataaactatcctatgcctggtactcatccagttggagaagctagaaggcatttgcctttttctatcactcaattgccagatcttatcagtttacatttctaaatatcccttgattctcactgcctctctctccaccttcaccataatctcccaccaggattactgcagttgctgctgcttcctatacccactcttgtatcccttcaatctgttgttcactcataagccataaaatgcaaactaatgcttaaactttgcaagagcttcccattcttaggataaaaactgaaattctaaatatgacctacaaggccctgcatgatccagcctgtgactacttccagctttatcttatcagtaactatcaaacaatgga

SEQ ID NO: 63930 - DNA, 1026 bp, Homo sapiens
acctcagcctcccaaagtgctaggattacaggtgtaagccaccatgcccagctgccctttctgcctttaaggattccatcagccaatatgtagagccagtaaagcactggggtctcaaaatggtgagagaagaagctcctcctttcccaaggcactgtgggcagactccaggccagctaatttccctgactagctgctatgagtatccacgtaactccatggaagtgctttgtaagaactagagcctctagcccgggaagagggctgaatggctccaggaccctacgtaatatttctatagcaagaatgcccattctgtcttaaaacgggtcttggtagagaagctgagaacaaacttttctctcatagtcttagtgcttggctccctggtgctgcttaaagagttatcccttcatgccacaagtgcttggtaagactagggctggaaatgaggtagggacactaattggggtaaaaatgagaagaatcaagaaaggaggtttattcagacacatgtaggactctccaaacatccctggtgggaagaaaactcattatcctgctctcagagtcacacaacttctactccactctctagagaaaacagcactggactaatgctttcagcccctctgtctatcttcttcccttactcttccccatgtgaggaggcaaagaggcccatcttttatgctctatgggatatgaggcaggccacagtcctctacacagctacctgtgtaactgtacttcagcttttctctgcatatccacacagacctcaagttctcaattaattgggggaagattatgacgaggtagcacgaagtctcacttgacctagatccaagctgtgtctgccaacatgatacataaaaagcacaaacttccttgggggtgatggttctgatagtatactttcattttcatatatatccttgtcctcatttggttaagaatctaaaggggagattaataatttgtaggtgtgcccaatcctgtaacaacctgtcttcttgaggtaag

SEQ ID NO: 63931 - DNA, 1175 bp, Homo sapiens
tggattctcactgcctcgagaacaaaagacaaacttttcaggccccgtgtgatcttgcccaggcctccgtcaccatcaccatctgcatcttaacccactcctcccctttcacaaaactccagccacacagacttgctttttattcctcaagctttccaaactgtttctactgagagtctttgcacatgctccatcttccttgaatactctttccccagtgagctcattttcatcttcctgaattcataccactattacctttgcttctgtggaagaaactggccagatgctcacccaaatgtcctctttctggacacaggtaaactgcatttcccagctccatgcatctaggcctatgtgagtagttctcaacagtggaaaatgagtggaagtgatgtttcaatactagaccaaggcagttaaagggtggctgagccatttccattattctcttcctccttcctcttcaaggtaaccttgaagcacatgttttgacggtgatggagtcatagcatagaagaagtctgaatacctgagttactatttagggcataatagctacttgaccaaaaacatccatattggactttgaacaagaaaataaacttgattacattctgctagtgagttttgagggtgttttagcagttatcattatatacactggatatatcttctatggtatcctgtccaccttactcttgaccacagtaccctctttgtttccttcagggtgtttcagatatttaattatcttgccagatgccagtcaacactttctttttgtcccatgagtttaaaatcaggggaaaacatgtactcccaataggaagttgagatactcttttttttttaaatccgtcattgtgactgtgaccggaaaaacaaatcccactaaagaatgtcctaaacagatgtttttttttgtcatataacctggagttaggtgatttggcattggttctggagctgaaggatgttagggatgaggtctctgtagttttcttgtctcatggtcacgaaatgaagtgttattgattaagcagggatgccctacttagtattagacttcttggaagtctccttaattgccacagcccctatctttttggcttcgtttcaagggtccttctacattgttaatactctggtataaatacgttccattattccct

SEQ ID NO: 63932 - DNA, 1022 bp, Homo sapiens
ccagcagtgctgcacagcgtctcttccaggaagaccctgaggcttttcttctctaccaccgcggcttccagagccaagtgaagaagtggccactgcagccagtggaccgcatcgccagggatcttcgccagcggtgaatgggggtcagggactgtgagaagccatgtggtgggtcagtcataggctcagatcagaccaatatgtgacccttgccttccactctcaggcctgcatccctagtggtggctgacttcggctgtggggattgccgcttggcttcaagtatccggaaccctgtgcattgctttgacttggcttctctggaccctagggtcactgtgtgtgacatggcccaggtaaacccctatgttatctggcttgtgctctagggccaacctccgtatgctaatctctaacccttccttcccctttcccatcctggtatctcagtgctggctttcttcttctgcactgtgtgccttatacaacactctcactctccacaggttcctctggaggatgagtctgtggatgtggctgtgttttgcctttcactgatgggaaccaacatcagggacttcctagaggaggcaaatagagtactgaagccagggtaagagcccccaggacacagatgcatgtatgtatgtgtgcatgcatgagtctgtgcacttacacagaactttctgtctttctcaggggtctcctgaaagtggctgaggtcagcagccgctttgaggatgttcgaacctttctgcgggctgtgaccaagctaggcttcaagattgtctccaaggtgagggccccaagacatctgtacctgtttttgtctcatgtggccctattcagggtactggtgttcaggaaggaggctttaggcacaggaacagacattttgctccccaacggaagtgggagccctgggaagctttgtgagcagaggcagtacatagagggaggtgttttaaggagttgggatgaggatttggttctcactgggtcttttctgcccctaggacctg

SEQ ID NO: 63933 - DNA, 1049 bp, Homo sapiens
cccttcagtttgttttctacactgcagctagagacatgttaaatatttaatatacgtgtgtgatcatgtgtctcctgtgttcagaagcctccttacctcttacagaaatgtatcagctctaggcaaaagctcaaggtgaagggttggaattcctggtctctggccttggtcttgttgcttgtggcctttgcattttcctttggggaaacctccattagctcatttacacattgaagaaagtgggataggtggtttctctgctctccagcttcccagaagttggggtggtgacataaaagttcttctgggttctggcaggcttgactgggaagaattcagatgcttctgccagtctgaatcaggtccacatctctcccttcttgttctccaggcctcatccattctctttaggcccactgtcatcccctgttttcctccagggctccaagcgccgccagctcttggccacattacgggccctagaggcagcatctctttcccagcatccccccagcctatgtataagtgactctgaggaggaggaggaggaaaggaagaagaaatgccccaaaaaggcatcatttgccagtgcctctgctgaagtagggaagaaagggaagaagaaatgtcaaaaacagggcccaccttgcagtgactctgaggaagaagtagaaaggaagaagaaatgccacaaacaggctcttgttggcagtgactctgctgaagatgagaaaagaaagaggaaatgccagaaacatgcccctataaattcagcccagcacctggacaatgttgaccaaacaggtaccattggatgtgtatatgtgtgtgtgttggtgtgtgtgtgtcggggggtcagctggttctacatacaagagtgattatccactgccattaggattggggctaatggtgtactcaggcaataagaagtacttctctgcaggccacagtcacgatctcaaagacagaggtatggctgggatgacttgccgtgactccgaatgtaagagatcttgcctcatgtgcaccttcccatctccctccct

SEQ ID NO: 63934 - DNA, 1067 bp, Homo sapiens
tgtcaatccattccctcaagaaacttaaaggtctaacagacaagacagtccattaacagatttttacaatccagtgcaacaagtgctgaagtagggggacatataagatgtggtggaaaacagaaaggaccaatagatgttgcagaaggggtgcaagagaaaccaggggaagagcactaccacctaaggaaatgagatgtgggatatggtgaagataacacatttttttatagaggttgttgagatatctaggtggttggtttggtttgaagctcaggggaaggtctgaaatggacagctttgggagttgctggcatgaatgagaatcaaagtcctagagaggtaagccttcccagagagtatgtaattatcagtttttcaggaatcaaaacctttgccccatcccacctccagctcaatgaccattgccccttcctcaaagggacgatcatggcttctcccccttgcactgggcctgccgagagggccgctctgctgtggttgagatgttgatcatgcggggggcacggatcaatgtaatgaaccgtggggatgacacccccctgcatctggcagccagtcatggacaccgtgatattgtacagaaggtacgtacaaactccttcgtcatccacatcacatacatgccatgagggtcagtcacaggcactgtaacatacagtagaaagcatgtgtgctcttcccccttttcccatgccctgacaccagtatctcatttggaactgactgtactttctgcctcttctttttgtctggccatggggtccagctattgcagtacaaggcagacatcaatgcagtgaatgaacacgggaatgtgcccctgcactatgcctgtttttggggccaagatcaagtggcagaggtgagtactcagcccttaattcctgagatgggtaggaagtaaagtctgagccttggtgggagattttggaaccctcaacccattctgtcagtactactgtgtgacacttacaggattaagttctacatttgtgcattcatggttggttcagtgactgccagcgaggtagcagtggctctca

SEQ ID NO: 63935 - DNA, 1024 bp, Homo sapiens
gctccggtgtcggcgggtggcgcggcgcccccggagggggccatatctaacggggtttacgtactgccgagcgcggccaacggagacgtgaagcccgtggtgtccagcacgcctttggtggacttcttgatgcagctggaagattacacgcctacggtgggcttccgcccgaacaaggccacctagcctgctgtcaaaactttcagccacatcgtgcttttcagcgttctcttccatttgctcccctagtcgctcttctgtgtttgccctctgctcacccaaactgtgagcttcctgataatcaggcctatccatttccctcaccctcctcccgctctgctgacagttctcttaattgatttctcagatcccagatgcagtgactggttactacctgaaccgtgctggctttgaggcctcagacccacgcatgtgagtaaacccagggcaggttagttttgggtgcttgtgcagtatgttgtccatctccttctcatctaagttttttctctctagaattcggctcatctccttagctgcccagaaattcatctcagatattgccaatgatgccctacagcactgcaaaatgaagggcacggcctccggcagctcccggagcaagagcaaggtgtgaggggaggcttaatgaatcagtaattaccttccacaacagtggaggcttatcctgccacccctttggggaaactgaatcgtaggggaggtgtaagacttactcagggtcacccatctgggattgaagtccgggattcctgtgctcagttggtgctcttccctcttccctcaggaccgcaagtacactctaaccatggaggacttgacccctgccctcagcgagtatggcatcaatgtgaagaagccgcactacttcacctgagccacccaacctaaatgtacttatctgtccccatgtccccacaccagcctgttttcataataaactttattgtgacaggcggggctgatccctcccatgttgggagacaccatgtggcaagtgaca

SEQ ID NO: 63936 - DNA, 1036 bp, Homo sapiens
caaatcccatcaggccacttggatgaaaacccttcaaggattactggatagaattcaggctttcccctccagcccccaatcatagctcacaaaccttccttgctatttgttcttaagtaaaaaatcatttttcctcctccctccccaaaccccaaggaactctcactcttgctcaagctgttccgtccccttaccacccctgatacaactgccaggttaatttccagaattcttgcaagactcagttcagaagtcaccttctttcgtgaatgttttgattccctgaggctactttattttggtatggctgaaaaatcctagattttctaaacaaaacctgtttgaatcttggttctgatatggactaggagagagactgggtcaagtaagcttatctccctgaggctgtttcctcgtctgttaagtgtgaatatcaatacctgcctttcataatcaccagggaataaagtggaataatgttgataacagtgcttggcacctggaagtaggtggcagatgttaacgcccttcctcccttgcactgcgccccctgtgcctacctctagcattgtaacgaccacgtagtattgaaatggccagtttacttgtctgccttcctttccaagaccgttggtgcctagaggactagaatcgtgtcctatttaactttgtgttcccaggtcctagctcaggagttggcaaataagaattaaatgtctgctacaccgaaaacctcacgcctctcattcgttgtgatttttgcatatgttgttgactcaggctgaaactcctcctcctcctacagcagcactgtgtgccgccccactgctgcccccacctctcggggcagctggcggagaagagagggggctttccaaatccactatgaatccttaaaaggctgaataagggaacttgaaacgatgcagacaggcaggcaacccgtagtcgagggacatagggccataaacgtcgaagccaggtcttgagcgtcagacagaatgaggtgtcccagagcggcggaggagagccagac

SEQ ID NO: 63937 - DNA, 1359 bp, Homo sapiens
gaacctcggtgagaatcagcccatctccaaactctcactcaggaactacccttaccccctaacaccttgaacaccttgcacctagaacccctgactccttagagatgtctgatactttaaagcatcactcccaaaaagtccaatcactcagaacccctgacctctacttgcaccttcactcttgtaggcctctactccagtgtttggggggatcctatccttgatcaatgagcacaggatccttagtggccgcccccctcttggctttctcaacccaaggctctaccagcagcatggggcaggactctttgatgtaagtatggaagggaagggtgtggacgttttcaaacaactatggggagtgctaagggggacttgggggcagttagggtggtgtggaatagcctttgaaatgtgagtacagggtgaggagatatactctttaagtactggtactagtaggcccagatctgatgccagcctcctccctaggtaacccgtggctgccatgagtcctgtctggatgaagaggtagagggccagggtttctgctctggtcctggctgggatcctgtaacaggctggggaacacccaacttcccagctttgctgaagactctactcaacccctgaccctttcctatcaggagagatggcttgtcccctgccctgaagctggcagttcagtcccttattctgccctgttggaagccctgctgaaccctcaactattgactgctgcagacagcttatctccctaaccctgaaatgctgtgagcttgacttgactcccaaccctaccatgctccatcatactcaggtctccctactcctgccttagattcctcaataagatgctgtaactagcattttttgaatgcctctccctccgcatctcatctttctcttttcaatcaggcttttccaaagggttgtatacagactctgtgcactatttcacttgatattcattccccaattcactgcaaggagacctctactgtcaccgtttactctttcctaccctgacatccagaaacaatggcctccagtgcatacttctcaatctttgctttatggcctttccatcatagttgcccactccctctccttacttagcttccaggtcttaacttctctgactactcttgtcttcctctctcatcaatttctgcttcttcatggaatgctgaccttcattgctccatttgtagatttttgctcttctcagtttactcattgtcccctggaacaaatcactgacatctacaaccattaccatctcactaaataagactttctatccaataatgattgatacctcaaatgtaagatgcgtgatactcaacatttcatcgt

SEQ ID NO: 63938 - DNA, 1676 bp, Homo sapiens
agttcctggagcagtatttccatgactcagacctggctcagttcatgcgcctcttcggtggcaactttgcacatcaggcatcagtagcccgtgtggttggacaacagggccggggccgggccgggattgaggccagtctagatgtgcagtacctgatgagtgctggtgccaacatctccacctgggtctacagtagccctggtactaccaagaggactggacagtggggaagggggtgggagatgggtgttgatccctgctccctcaagggaatgctataagctggagagagatcctgacaacccccagtgactatctttgtgcccatccctcaaaaaaaaaaaaaaaaaaaatccaggccggcatgagggacaggagcccttcctgcagtggctcatgctgctcagtaatgagtcagccctgccacatgtgcatactgtgagctatggagatgatgaggactccctcagcagcgcctacatccagcgggtcaacactgagctcatgaaggctgccgctcggggtctcaccctgctcttcgcctcaggtgacctcctaccctaaacttagacaatgcttacacctctgcagcctgggagctttgactccacagtgatccctgagcctggtctctgactcataatctgaactcagaccttccagtagggaccactgacctgacctctacactctgacctcctacagtaacaaatttcccctctgacatccgaacccacatactaagccctaaccaattaatatgaatgctacacttggtctctctcaggtgacagtggggccgggtgttggtctgtctctggaagacaccagttccgccctaccttccctgcctccaggtaagtactctagcctaccactcaggtataaccaccacctttcacttgtgatctcatgatgtagaacctttgtcttgaccccaccatgtgctcctgtggttcagccttaagctttgcctgccctggttgctgtactcctgtctcttcttcctgcaggtcccaggccccaaatctcttgtgtgggatacagctcccattgttccttttcgtcagttcccaggcattttagtggaagatttggtgggtgttctgtagagaaaagtgtgcacagtcacctcgggccatgccttgaaggctcaaaatctcttagtcaatcccatatacatgcttccccacagagtctagttcctccagcaagacctgggctatactcacccctccccacatatcttggaggtccccttgggtcccctactatccaaatgctgtcttctcccctcagcccctatgtcaccacagtgggaggcacatccttccaggaacctttcctcatcacaaatgaaattgttgactatatcagtggtggtggcttcagcaatgtgttcccacggccttcataccaggtacgtgtgtttgtgtggatggatgcagggtaagagtgaggatgggggatcctcagttcagctgactgctgggcaggccacatgccaatactcactcaaaaatgcctttcaggaggaagctgtaacgaagttcctgagctctagcccccacctgccaccatccagttacttcaatgccagtggccgtgcctacccagatgtggctgcactttctgatggctactgggtggtcagcaacagagtgcccattccatgg

SEQ ID NO: 63939 - DNA, 1116 bp, Homo sapiens
cctatcattcacctcatgtgatctgtatctgctcctaggatcctccccaaggtctcagctcctaatctggaaccttccatgaccaatattttccatctccaccctaaccaaagccatgtccctgacccctgaccctacaggctgcccccaggctgggtgtccctgggccgtgcggaccctgaggaagagctgagtctcacctttgccctgagacagcagaatgtggaaagactctcggagctggtgcaggctgtgtcggatcccagctctcctcaatacggtgccttttgggactgaggacaggatgtgggatgcggtggagggacacagggctgggttgggcatgggatggcgatcatgtcagagcctgccaagacacttgtgttcctcaggctagaaacctaaaaggggatgtggttcagtatacaggctttatgatcaaatacgaactcaaattctgactctgctacttactagctaccaggcatctagtacaacttacgttccttcccctaccctcaaatccattctaatttcctcttttgttcacatactaaggctgccagttctaactcccaaagagcctttggattaatctccttcttgccgtcttttgttacgaccaactccgttatttattcccactcctggactactgcccagctccccagctgatctgcagtctcctccctccaccccacccctcactgtactcccccactctgcttcaaaacagtctctccaacagtcaaaatggattggttccttctcctggttaaagcccttcacagcagggggagtgtgtgcttgtgaactgcagaggctggggacggggcagtgtgacactagtgtgcatggcaggaaacagtgactcaccatcgtgttaagcttaaaatcaacaagtatgcaaatttgagctaaactgaataactggtaccgaaagatttgaaaacatttaccggacataagcttaaaattaaaatggaaaatttatatgtattaacctcattcattttcatgatcatggcaatacatgctgtggtgcgacatttgcaacttactggcctttagggtaaatccatattattggccatggcatttcaagtctctccagcc

SEQ ID NO: 63940 - DNA, 1299 bp, Homo sapiens
tcatatcaagagaataagaaatgaaaccacataatcatctcagtatacacagaaaaggcatttgacaaaattggacaccttttcatcataaaacacccagtaaactaggaaaaaagggaattttttcaacctgatgaaaggcatggatgaaaaactgtacctaacattatacttaatattagaagactggatgatttccctctaaaatcaagaataacacagggaggtccactcttgcctcaacattgtactagaggttccacaagagccactggaaaagaaaaataaataaaagacttttatattggaaaggaagaagtaaaactatctacttgcaggtgacaaggtcttgtatataaaaaatcctaaggaatttacaaaaaaaaaaaacctatgaaaactaataaataagttcagcaaggctacaggatacaagatgggaatacgaaaatcaactgtatgcaaaattcaattgtatttctgcacagtaacaagaaacaactcaaaaaggaaattaacaattctatttacaataacatcaaatagaattaaatgctcaggaataaacttaagaaaaggacaagatttatacactgaaagctacaaaacattgttgagagaaatgttaaaatgcctaaataaatagaaagacattatatgttcagggattagaaaatatcacattattaagatgccaaactgatttacagattcaacacaatccctatcaaaatcacagctatctttttgtagaaattgctaaaccaatccttaaattcatatggaaattcaagggactcagaatagccaaaataatcttgaaaaagaacaaagctggaggattcacacttccagattttaaaacttactacaacataatcaagactgcgtggtaccagcatctacagatcagtggaatagatttgagagtccagaagtaaaacattacttttatgttcaattcatttttgacaaaaatgataagaaaattaaataaaagagaagtcttttcaacaaatgatgctgggacaactagatatccacatgcaaaagaataaaattggactcacatcatataccaaaactaactaaaatggatcatttacctaaagtaggagctgaagctattaaaactcttagaagaaaacacagcagtaaatcttcttgaccttggacaatgatttcttagatatgacacccaaatcacaagcaacaaaaggaaaatcaaataaatctaacttcattaaaattaaaaacgtttgtgcttcaaagcacactgtcaaggaaatgaaaattcac

SEQ ID NO: 63941 - DNA, 3199 bp, Homo sapiens
tcttctttagaaaaatatctattcagatcctttacctattttcaaatcagattttttgtgttttcttgctattgagttgtgtgagttccttatatattttggatatcagccccttatcagatatggtttgcaaatattttctcccattcggtaagttaccttttcattttgttgtttcctttgatgtacagagccttttagtttgatgtggtacaacttgtttatttttattttgtttgcctatgcttttcgtgtcatatctgaaaaatcattgccaaggccaatgtcaaggagctgttcccctatgttttcttctaagagttttacagtttcacatcttacatttaagtcttgaatccattccaaattcatttttatatggtgtaatacaaaagtccatttttgtcattttgcatatgtctatccagttttcccaatactatttattgaagggatttttgttcctcattgtgtattcttggtgcctcatcaaagattagttgaccagttgggcatggtggctcgcacctgtaaccccagcaccttgagaggcaggggcaggaggatcacttgagcacaagagtttgaaaccaggctgggcaacatccggagacctcatctctacaaaaaaaaatcaagaaaattagctgaatgtggtggtgtgtgcttgtagtcccagctcctcaggaggctgagatgggaagatcacttgagcccgggaagtcagggctgcagtgagccaagattgtgcctctgcactccaatctgggcgacacagcaagaccctattaaaaaaaaagaaaaaaagatcagttgaccacatgaccatacatgcatgggtttatttctgagttctctatcctgttttattggtctgtgtgtctatgtttaagttgtacatgcaaaacagtatggtacataatgttttgattactgtaactttgaatgtagtttgaaatcagcaaaggtgatgcctccagttttgttctttatcaagattatttattctatttgtagtcttttgttgtcctgtactaattttaggacttttttctacatctatgaaaaatgccatggaattttcatagggattgaattgaatgtgtagatcactttgggtaacatggacattttaatattattaattcttccaatccataaacatgggatgtatttccagctatttgttctttttcagtttctttcattggcacctcatagttttcagtgtatagatctttttttttttatactttaagttttagggtacatgtgcacaacatgcaggtttgttacatatgtatacaagtgtatagatctttgtgtgtgtgtgtgtatgtagatttttcacctccttggttaaatttattcttaagattttattctttttaatgctattataaacaggactgttttctttattttcttttgcagtccagttttacattgtacattcttcattacaacaacggtataattatattgttcagcactcattactaaacagtgaactacttaagagcacaaacacgtctaattcacttttcccaccaccctgtaaagaacatgaggcaaaatagacatctataaatgtctgttgaatgaatcaatgtgttatactgagttcttctgcttagctctgtcttttggactcactgactcctcccttctcctgtttcctccttcttcatctaaaaaagaacttcctgcaaagctgattccctattgttcatgcctgggtaatatctgtacccttaaggctttcctctctgtgctcttaaatgcatgggcatagtgtagctctcctttagtttctgggatataaatttgttagttattgatgttttcgttttgttttcgttttcgttttttgaggcaattctcctgcctcagcctcccaagtagctgggattataggtgcctgctaccaggcctggctaatttttgtatttttagtagaggcggtgtttcaccatgttggtcaggctggtcttaaactcctgatctcaggtgatccacccgcctcggcctcccaaagtactgggatcacaggcgtgagccactgagcccagccttaaatttggtagttaaatctgagatatcttaataatagaaatggtttgtgtgcttacatttccaggaaagaactaaacttttctgacatttttgcattctgttccacaacatatctgtttaatagaaaaataagatttttaattctcacaagttaaatattgtacattacacacagacacacacacacacatgaacacacacaattttctatcaaaattgatgtcttgggaagacaagccttgtttacactgtggtttcatatataccttggtacaccactgtgtagcccagtacaggaagcacaccattaaagggtttttctgctattcacttgaaaacacaaaaggagatgaaaacacaaaagctgtacctagggatgtcactgaagacttaatgacattgtcctggcttaatttctaactacttttccgtaaaatggtttcataacctttcctacaattacttctccttttatcccagaaggaataaaaagaaaaagaagatagttcagtttcatatgtgctgcatttgagatgcctggaagcatctggagcttgagaaagaggtttttgctggaagaacaaatttgggagttgtcagcaattaaagctaaataaatggatagagtgactcagagtatatatgtagagcaagaggaggctgaggtcaggcagtagggaacagacaggatagagaacttttgaaggagactgagaattttttaagagaggaaagggaacctgcaaaattcatcacagtacccagcttgtgtcttctttgtcataggaggcactcaataattaatcagttaacttagcaagcatatttctccctccaaagcactatgctttgaaatattggaatgacccctcaaaggcccaaaagaccagttagagagacagatcataaataagtacaacatagtaaaacagatactatgaacatggttgcacctgaggcctactggagtaccaagaaaggaagtggtccatgcagaacttctcaaaataaacaatgctagggctgaatcttgaagaatgattaggaactcatcaagcattggggaaagaaattagtttggagggcattccatgcagcaagatctgtagatgcattgaattat

SEQ ID NO: 63942 - DNA, 3091 bp, Homo sapiens
accctccgggtgcctttctcttcagacgctctctttcccaggagtctccgcggcggagcgccccatcgccctaaatgccactggctgacgcagccccaaaaaaaacccgatggcccgcttatcccacactagggggcgcctggttcttcggccgccacagagcgctctggatgcctgaagcccgcccagctcgccgcctctggaaaagctcaacaccgtttctccgcccttcccgagattgccaacgaggcaggctctgatgcgcatgcgcaaacacgttcaccacgctccgagctaaggcgcatgcgttccctgaaattgccgccaccggctctaccttccagtttccagttccggcctccaaggggcgggcagaagttggaaacatgcggctgtcggtcgctgcagcgatctcccatggccgcgtatttcgccgtatgggcctcggtcccgagtcccgcatccatctgttgcggaacttgctcacagggctggtgcggcacgaacgcatcgaggcaccatgggcgcgtgtggacgaaatgaggggctacgcggagaaggtgaggagcgcggccctcttgtccactctgcgggtctggtctgagggggcggagccggctgcaagtggaaagggaccgggaccaacctggtaaaccattccccaagtctgagtcccccagaaccttgggctgaacccgcccctccatcgcctctaatggaagactggttagggctgcggagttaggggtggcgtagattggagatgcttggctagtggaaagaatggattgccttccggcattagagaaattagattggcaccttgttttcttgctcggttggatccgtgatgttatgtcctcacagctcatcgactatgggaagctgggagacactaacgaacgagccatgcgcatggctgacttctggctcacagtgagtgcgacctatctgccttcaaaatcccaccctttgctccctgggggtgggggttggaaaaaggagaactatgcagaattaaacttgggtactcacttatgggccagtgctgctaactaaattagaaactgtgtcttaagttagttgaagtcgatgtgaatatacctctgcacaactgcctataaacgacccctttgtgtaacactgactatgccagattggcgaggggagggggaggtctttctatgtgtggatggaccttacctttgggaatggtgtaaagttaaatgcctctgcagttttgcctgactctgctgtctcttggataattctccctctaggagaaggatttgatcccaaagctgtttcaagtactggcccctcggtacaaagatcaaactgggggctacacaagaatgctgcagatcccaaatcggagtttggatcgggccaagatggcagtgatcgagtataaagggaattgcctcccacccctgcctctgcctcgcagagacagccaccttacactcctaaaccagctgctgcagggtttgcggcaggacctcaggcaaagccaggaagcaagcaaccacagctcccacacagctcaaacaccagggatttaactggatctgaagagtctgcagcccttaatcagtacccatgatcacaggcctttggagcacttttactctctgagaagaactggagctagagatgtaaaatggacagtcttgatggggttgagaaccttctggggagccagatgaccctctctttgcacaatagataaaagtctttatatgaatatatataaatttatttattttttccttcctgtgggatttctggagaatgagaattatccaaatgctcagtctacctgagatagtaaattcatggcttatgcttctggtccttaaatttgggttatttttggttagtgcaattttgtttttcttaatgccagtttacatgggaatgcatcctataattccaaatgttgccagaggtggttgtgttttgacatctggtctcctagagatgagtgcttgggatttcttagagaaagattacttcctgacaggggtaggggagtgacaatctgcaagtgaaacttccttaaacaatctagtaccctgcgaaccttcaggggatactgcaatcagtcctctgttttgaggcaggatcacacattaccttaatgtgttcccttcaaccccctgaatgggcctgggaggagaggacccaagaactcagatgttccaccagtttggccaaaggggtggagacattcagcagaggatgttgggctccaggataagctccttcctcttggtgaggggaaggggtaagaaagagggtctatgcgagagaaggattaggaaattaaacctcctaggaatttcctggaagtttttattgttgtcaaatctggcctctctgggaacccagaaaagggaaatccggcttcagaatgtgagaagctgggagcccctttcttggcacagccaggctgccgttcccttgggttcagaggctttagtagggtagtagttatggaaggacttagaaaggagccatcagtcttggtccaaacacttgatagcagtgcctgataattgccatatccccagtaaagtgggtagaagagattttatcttaggctctatcttctgagtgtatttggcccactgaacccatccactgtctgagataataagtaagagtaagggtaaagggatcactggtgtagcagacatggcttcagtgacagaacgaactattctggtgctaatttagctgtagctgccttagtctgatactcatctactcccaacagagctctttatctctttttctctactatggtttgttcttcacactatagccagaaagctcttatattttaaatgaaatatagtagacactcaaaacatttatgaaataaagctacaactctgcttctgctaaaaaatatacccctcttctgtcttagcatgaatatccaccctagctaggtatctaggagtcatacctaacttctagagaaaccactttccttaaaaccacatctttattttaaatagatggattgtggctgggctcctgtagcttttcctcttagaccccagaaatatatctccctttg

SEQ ID NO: 63943 - DNA, 1033 bp, Homo sapiens
aatggaggtatttattggaaactcctgcttgaagagcattctccaaaacaaagagaagggtgtatcatgtaggagacagagggttatggattcaagttcaaattgcctccaacttcccaaactcaaaacatgaactcatggataagaaagagaggagagaggaagcgaaaaatgtaaattgatatgcacttctgtgatctcttgctctttctgtgattctctttccttttctggcaaccttatccaaggaaaaatctcaatgaccttgcagtagggcaattggggatgatcctaaggcttacactacacctcagaggatgtacagaaacattttactctctttatttagtctataatctgatgtcctcccaaatccctatctacgagttagcaggaggaagaaaaaaaaactaataatgcaatctaattttaatttagtctaacctgacacaatgtaaatatgccttcagaaattattgtttctattggataaaataatgcttgatcactcagaaagcctctacttcccctgcttctctccccagtgtatgatggagagactatggttatgcaatcccctggcacagagaaggaactctagcctcaggctggtttttatgttgtggcagctccatctgctggtctctgggggactgtcctttgggcactgaattattcaacattctgcaggacaccactgctaaattggctaattcacatggggtctgtactttctacagggacaatgttcctgagttgctaaggctgttaagaaaaattttgctgtctgcagaaccctgagttgattgccacatcctccagcctgcaaattggtccagcagtctacgctaccttattgttgagtcaactcattctgctattgtaggcctatgacaatccactgggtttcaattcagtatccaaactgcataaaaactcaaggcacctttgtaaaattaagccttcttctttctgaccatgctgtgctacatttctgtgaatgaatcctaaagttgatgcatggcataatcca

SEQ ID NO: 63944 - DNA, 1146 bp, Homo sapiens
ctgtgtgaccttcaccaatcttcatggagatgcaaaagaacatgagcagcagctcagcttcctgaaggaggtgtctactgtcattgtggtcctcatgtcagcctccgatgacaatgaaggaaaccgaaaaattgtccgtaacttgtggcagtcatcaaggccattgatctgcttgctcgatgacaaagaagcaaccatgaccaatatttctggccaaagaatgagaatgggtatcaagaatagaaatgaggcagaattaacagaggaactcacaactacaatcagacatttgctagaactctcagatactgctctcagcttggaggactgttcccagattgctcaccagcaaggatttcttatcgatgaagaccagagagactgcaaggaagccaaagaaaaggcacaggctctaatggccttcctggggaaaatgaaattatctcagattaaggaaaaattactaccccttcagggacaactgtggcaccactggtgtaagaaggacaaagaactctatcatcttagagaaaagggaaatcagagcattgaacaacacaagagtgagattgagacagataaacaaataatacggcatgaacagttggccagagcccttcctctcaatgatttaatgcaatctgtccttcagtttctccaagagcattcagaaattcacaccaaactgtacttcttgcagtggctgagtgtatttttggacaaactgactgcaggacacttggaagaactgcatgagaagcaaaaatattggtggtcactggttcaaacagtaaagcaaaaggcacctaatagtcactccctgatatgcctgcaaagtgagatagaagccatttccacagagattagtgactgtactttgggaattgagcaacttatcagagaagttggtcagatttatgaagctctggaagaagcttcctccataaaaaagatttttttctcgcttccccaaattgccgcagacctgatgatatctggtgttcccattgagctgatggatggggatgcagcatatgtacctctaacatgggtggcagctgtttttgacaaggtctctgagaaacttggagacaaacggctatttgttctttctatccttggcttgcagagctcagggaaatccac

SEQ ID NO: 63945 - DNA, 1026 bp, Homo sapiens
aggcttgtttttaatatcttcttctcaaataccacagttacagacagcctgatggtccgcaaacaccggcagtgcttaaggcagaaagaagatacaagcaaatgtattttctcacaaatattaatggcaacctttgggaaacatctcattgcctggcttataaacgctttatcttgagtctcatacagacagtgaaacaactccagaaatcccagctgtgatggagaatagtcactgtttcctaatacttccatacactgaagtaactttgattttatcttcagtgacattttacagttaaaagtcctctccagttgttttactcgatcttcattcaaaaggccaaacaaaaagcacttcatctgtgtcaaatgggggtctttataacttgtgctttgaagtaatgacttcaaatcttcaaaaggctggcaggaagggttcccagcttcccaactgcctttcaacatatagaacatagctgcaaaaaactcctgaacatgaaggtgggtgaacacatagcagttttcatactctgcgtccttctgaataatattgctgtccataaaactagagacatcagattgagttaacccaagccttctgagattttctctgtaaaacacgtaagtcatagtccatattcctttggcagcgacttggcacagtcttctcagctgggcttggttgggtagactaggagagcctccatctactggtgtgaacaagctagaaatatagcaggtaaacagagctgtggttgtttggcaggtcaatgtgacatcaccacccttctccatttgctgcttcagacaagtacaagcggcccagcacactagggggacttggcacatgctaaacagcatctcattgctttttagtgaactgaatactttcatggcccacctcttatcttcaaaaaactggtaaatatactcctctcttgcatcctcagacattcctagtagctctacataatggtgattcttcaacaactgctttagtctcttagaagttgtgagtcttgtt

SEQ ID NO: 63946 - DNA, 1169 bp, Homo sapiens
ttaaaaacatacttttcagagagttttatgcttttcattttattttagcctctcgaccactgtgtgaagtagaacagacattttacagagaagtagatgaatggtatctgacagctgccaagtgcactatctctgggcatagagtatctgaagctaagcacccaagtctgggtatatatctatgtatgtatgtatttatatttatatttttaaaggaatgtcagtttcttcaaatcagaaacaccaccaccaagacacatcttcttcattatgatagttacaatctggcttaatgattaagtgtggattgctaactcccacagcttccagcagcttctgggcttcctcatcaaatgcctctttgcacaacctgagaaaacaagggaacatctcttttcctgcattcaatttccctacagccctccactttctctgtaaaggatttatttcaggagaaaaaaaactgttctgttaaaatagagagataatattataacatgggtgaggagtggggaagcgaactgagagagatacagtgagggagataaagtagtggaaggaagacagaataaattaacagaagagaaagagaaaccaattaaaattaaaaaggatcctccaagagccttttgctatccaagcaaaattaatattactactgataataataaaaacagagaacatatttattgtttattatcatgcaaggcaccattctaagtacttagcctatattgactcagatcctcatgataaccttatgggtagattttatcatttcacccattttactcataagcaaatcaaaacaaagagtgatgggggactagccttaattaaacatttagtaagtggtagggtcagaattcaagctcatctaggctggttccagggtgctcaatatttaaccactatgctatattgtatctctcaatattcagtgttctatgacagaaaaacaaataagtgtctagaaaatacccaatgatacacaattaggtggattctgaggcctgtattaatgagtggctccccaaatccctcattataggaaatgctccccctgagaagccaatggagacttaccctagaacttgtagtttacacttaggagacttcaagactttatataacttcacaattccttcatatcctaaggtattctgtgt

SEQ ID NO: 63947 - DNA, 1047 bp, Homo sapiens
taacttaataattttagtaatttaaaaaattcatactatttttttctgtttgaaaatggtttgggtagcttaggtttgggatcattacaattgttctcattaaaactaatagaaaaaaatttttttccacctaacggcttttccctgagctttcaggaggccattgaagccgttaagaccgggtcaggtgaacaggaagttaaagactgaaaaggagacacaaaactgccgactttcccgacggcgaattggccctctggaaacagccgaccaatcacaggcagcaggggcgcgccctgcagcggggctccggctgcggttccgtggactcggcgactaggcgccgcctgaccagtaggagccgccctcgacgagcgagctcgaaggctgcgactggcgccgcctcaccgcctcccaccgccactgaccgaccgttcgaccggcaaacatggttgaagcggatcgcccggggaagctgttcattgggggcctcaacctcgaaaccgacgagaaagccctcgaagccgagtttggcaagtatggccgcatcgtcgaggtgctcctgatgaaagaccgagaaaccaacaagtcgaggggcttcgcgttcgtcacctttgaaagccccgcagacgccaaggccgccgccagagacatgaacggcaagtccctggatggtaaggccatcaaggtggcccaggccaccaaaccggcgttcgagagcagccggcggggcccgccgcctccccgcagccgcggtcgcccgaggttcctgcgcggaacccgcgggggtggcggcggcccgcggcgttccccatcccggggcgggcccgatgatgacggcggctacacggcggatttcgacctgcggccctccagggccccgatgcccatgaagcgtgggccgccgccgcgcagggtcggcccaccccccaagagggccgcgccgtcgggcccggctcgcagcagcggcggtggaatgcgcgggagggccctggccgtgcgggggcgagacggctactcaggcccaccgcgccgggagccgctgcc

SEQ ID NO: 63948 - DNA, 3411 bp, Homo sapiens
tctaagatctttgataaacatctgctcacctaaaatggaaaaacggatcattctgctcatttaaaccaactagattttgggtggagagtgggagggattggtgtatgctactcttaagatttcagggtatctttcaaactgaatctttgtttccagtattaaaaagcaaacaaccagcaacaacaacaacaaaagtgatttagatcaaatgtttatgtaaagaaaattattttcactcagtaaatctgaaaagtaaatggataatgttggccatgttttgcctttttgctttttctttgggaatctacaggatcacctgtcccctcactcccaaaagtactatctatgttttgaacaacagtggaatactatatcaaaggtttggccaaccaaccacaaagctacaaaacaagcaaatcccaaatccttcaattgatagcattcattttcactaccaacaaatttattaagaaacaagtagaaaataaatcagtggtcgacttggggaccgtaatggcttccattcctaactccaagctacttgcctttggctctagagccagccactgagtcctgtggagagaattgagcttcttcccttaggggtggaggaatcaaaagtgagcagcttcagagctcaggagcaaaggtcagagaatccctgaaagagcttggcgtttcaacctctgaggatctcaaactggcatgaaggggctggttttcctgtccacaaaaggcgaggggttggatgggttgtttcctagttttaaggtggggagaagggcttcaacagaaaaagattagagtctttctccaagatctgtcaagaggaacgtaagtttcctcttaaacatcttttccattcagcacctgtggattccccaatttatctgtgagaaaggtaattgtacagtcaagggactgtagcaaccagagaaagaaggatggggttaaggttgatgacccatgttcagtgtaataattgctggaggaaacagataagggaacaacagcaaaaagtacttaaagggatctgaatgcaacacacatacacaacttttaacaacatgattttttttgacaataataaagtaggtgcattaaaggagaggacacactagtggctcagaagagcaaatgcaagaaatagctaaaaaatgatccaggaattaatctaacaaaaatatgtaagatctttatgaaaaaattaatctttattaaaggacataaaagaagaactataagagattgatatactcatggttgggaggacttcattatcaactattctcaacctcatcaaattaatttggaaaaacaatacaacttcaaatgaagtcacttcatgatttttttcacacagctcccctcccctcttcccgaataacaccatttatttgtgttgatcaatgatggaataataaaagatttggtaaaccaaccacaaaaaatcaatagcttcatttcaccaccaacaaattattaagaaacaagtatttagaaaagagacactaatgggagatatagctaatcttcaaatttgcatggtggaataaagagcaagaaaagccaaatcaattcagatgaacagttgttaggaaggactcatcctacagataccaagacttattacaaagctctagcaatttaattgtatgatgtcagcaaacaaggatagacagaccaatagaccaaaactgtgatcctagaaacaagtccacttctgtcacattatgcaacagaggtaattttaaaagtcattggtggcaaaatgaaattctaaaaaaaaaagactatttgttaaaagtgagattccataacagcatacacaaaaatacattccagatggtttgaagatttaaatgtgaagaggaaatttttaaacacttagaagaaagtgaagaaatgtatacaccacggtggggttgagaattccgttttaagacaaaaagtacaaacttggaaaatattgataaaattttccatattattattaaggtattttaatgataaaagtgactattaacaaagtgaaatttcaagccataatattggaagaatatatttacattgaaatgacttccaaaagaatgcttaaaaatcaataataagaaaaaaacaagaaaaaaatggacaaagacttacatttttgatagatgtataaattgatacaatcattttggagataattttagcaatgcctagtaaagttggaggatgcatactttacgacccagaaattccatttcaaggaatggacttaaagaaatttgtgcatattcacaaggagatacgcacaagattggtcagtaaagcaccctttgaatgtttacaacaaaagtagtctacctggagtggatcaactgagatttatgatgaagctcagtgtagaagctaatatgaatcagccaggtctacatgtatcattatgataaatatgaaaatattaatatttggtgaaaaaggcgaatcgcataaatataggtatagtaaacaaaataggatttgaatgatagcatgaaaaatcaggatatttagagttaagaggaaaggaaaaagatgggaggaggagtgaactttagctgaatgttttatgtctttaaaagtgatggctcttaagcaaaactgacaagtttaacatcttaaatttctgtggtctgtacattggcatctcttattccgtaagttcaaaatattttataatacacattttaatattaaaaaatagagcttagcataccacccagcatgtaattactgaaaaatgtttgttattaatatgctgaaactcagctgcaacattcttatcttggcaatgattctttctcctggctttgttctttcatcaatatgggtgatgccttattctatttaaatgagtttttaaaacctttctatctcggactgtgcccacagcttgtttaccataatctcaagggtagaaccggcaatacctgagaaccagatcttagaggaaggtgcagtttttccttttgttgtctgttttgaagtgtaatagcgatgaaaaacgttttccaatcaacaagctgtttctgaagagtaatctcctgaatattgaaactattaataaaaacaaagtattaacattaggaaaataaagactcactggagttcagtgagttaattttagagattatagcatacaaaggttgtagatctctcatacatatataatacaacagtctcaatatttctttactggaaatatttttgtaggaaaatatgccagaggtctagtcaattgagaactctttataatcactttcataatgatgagagagagagagagcttatcacatgttttccagaactcacccactgagtaaaatttaaggaatttgtatctcagtgaaaacctttatattttctatcatgtgcttttctccgatt

SEQ ID NO: 63949 - DNA, 1001 bp, Homo sapiens
atgtggcaactgacagcattaccgaatccccacaagatgaaggctgaacatcttctgtttctgatcacaaccggaattctactgtggctcctgtgactatcttaaagagtgctagaggtagaattttttttttcccccatagggcaatagttcccttttccccttgccttaggccaagtgagatagagaaggcttctctgctagtgttcctcctaactggggcctctaacatttttcaacctttatgtggtttccatgccccctcccttttagcctttattttaaaagtgatgtaactttccttcttttcctccatataaatgttctctctggggatagttactgtgttctcataaatgttttcctctttagaatgtgtttaagaactcaccaagcaaaataaggctgtattgctcttgctgtgcacacatgatatccaatgctcatggcaatttctttcagaacctacatgttctatttgtggtgaagtttattctgaagctaattactcttacagtgtagcacatctaagaatgattttaaaatgattttgataaatattttgtgagtgacattgaatgaacatatcaagcacagaaaattagaggaacgacatagcaatgatgtccttgttgaatgcatctcactatcatatttattaaagtgctcaaggggaataaaaaatatgaggacctattatgaaaattttagagaaaacagtaggaagaaatagtaaagctttctcaggtttgaaggctgcttgttatagtagagagagaatcttttgatcatatgcagaagctctcattctgttattcatgtagcttggacaactttcttaaaactttagaccttccgtttttttcatgtgtggtgataatacagtttcatcatatttatggaagttttaaataagatgactcatatacagcacccagcacagtgcctggaatgcagtggggttcgttaagtggtagtattacggcattctgcaaagcagt

SEQ ID NO: 63950 - DNA, 1073 bp, Homo sapiens
cgtggttgtggatttgcaggagttgaggacttgataataacatcagtctgccctagacaggttgacaatgggtcactgaaccttgcagtcaacagctggagaagggagagacagtagaatataaatggggctgagaagaacatgttttttgtgaataatacttttatctaaggtggtaaagggctggagtcaaagtcttgtaattgaagctgtatggcagcaaagcaaactagaggcaggacttgctacatcagcattcaagattgagaatgtactaacattatagctgcaggggtaactgtggcccaggctgtgcagctgaccatgattgactgcattaaaaatgggctaaaagcagctttcagtgaaatttgcagaaggccaatcctttccaggatgccaatctactgaggattagttttggataaattaatccttgtctcttagctaagcaatggagacatattggtgagccaaagtagacattgttaatcctcacatggaacagtgttcaaaaggtaagatagactggttaaattgtcatacaaaaagcaacattttaaccatgacaagcactatgaaagagagatacatagcactatgagacatgtttttaaaagcttgatgtagtataacagggatccccaactcctgggccaggaactgggctgcacagcaggagctgagtggtggacgagctggcaaagcttcatctgtatttacagccgctcccatcacttgcattaccacctgagttccacctcctttgagatcagcagcagcattagattcttacaggagcatgagccctattgtgaactgcacatgtgagggacctaggttgcatgctccttatgagagtctaatagttgatgatctgtcactgtctcccatcacctccagttgggaccatctagttgcaggaaaacaagcccagggcctccactgattctacttatggtgagttgtataattaattcattatgtattacaatgtaataatagtagaaataaagtgcacaataaatgtaatgtgcttgaatcatcataaaactatctcccccgactccctg

SEQ ID NO: 63951 - DNA, 2992 bp, Homo sapiens
gccagattaactttttaaatgtaaaaatagaaacaacaaaaagtttagaagaagatctatttgtgtttttatataattgagttttggaaaatttttctaagcccaacagtaaaggaggtatcaaaagttatatattgataaattttattacctaaagattaaaattttgtttacatctaaatgcctcaaagtttattcatttattatatatatgaataatttatcatatattcattatgatgtggttataggacttgctggttttcagctatggagctgctgtcagttcctagggacctcccacaattccttgccatgtgctcctctcacatgtccttttacaatatggcagtttatttcttttatgccatagcataaaagctcagatctctcttttatgatatcaatctaagtagctcagttctcaccctaaagttttaggaaaaattaataaataaggagtattcactctctaataagcatgcatattatagaaaaatatgtaatgagaagcagaaatacattaaaaattagtgtatagattacttaacaaagataaagcccacacaacatctagtttcatccaatatgttaatacctttttataactccctctttgtacttcctccatggaaaagatacatgggtaggacatgaggacatcctggatatttggtatggcgttctttgctgggtactgactatttttaattattttgaccattagcttccttacagttagcatattatcacttaacttgacagttgttttgaattaagaaatctcacaatcaatcttgaattggaactgatatgtgtgcttttaaaaacaaaatctatagtgttgtttggtatcaaatccagagttaagctcagctttgtcagaatgttggggcatacttccttcacaatggctgctttctagtggcagttgtcagggtataacttgaggttaaaccattctcagtgttccattccctggtttaatcatgcccttacctgaatccttcaactacctcacaggcagcaattcattgactcctatctggtatgagattgtaaactgaaagatgtcctgatttccccgttacaagatgatattgtcttctgttttatccatcagctatctttatcagtaacaccagaaaattatatataatatgattttatctctagtctcaaatttgtgctgatgaacttaatcatcataatgttcttattttcatttgtgttttgtcttattatgtggccacaaatacatagacagtgtatgtggttttagccttccattgtatctggaaatttaattgttataagccttttcttgtagaccttattctgtatttgtatgagattctaaaccttctacagtggctacaattttgttggtccctatcaaaatcagagatctgggaaaacaaaccataatgtttatattttccattaggggaaacgttcttgggaaagtaatcactctgggtatttagacagcctggaaatgcagttccacttttcagatgcttactggtttccacgaaaatgttcattccatgaaaatgttccgttgaggcggaatgaaggggctcgtgacagggaaccactgtgtgcttggcgttgtcctcagccttctgttcactcatttagtatagaccagtatatactactggctgagcatggttctgaagggtagaaatgcaaatatgagacactaattatgatctctatctttgaggatttatttctcagccttgtgaggaagaaaaacactaactagaaattgcaatccaactcacatatgagtacaaatgaaaacacttcatcctggaagcagaaaatacgcttctgctttggaatagaagcaaaattgaagactagaagtgaacctgaaaagaaggcagaagtgaagtaggatctgcataaactgttacatgttttctcttttatgtccagttaaatatttttgacagtagaactgcaaaaatacttaacattgaattgaagaatttctttgtagaagtgttgaagaaacaccatttctctgatttaaggaagtcataaatatatttgaatgtttgatattctaaaattgtttagtaatattagttttcactaaatggattttatgacctcagtcataacactgctttatttacttttattatttccagtggagtaaacactccacatataactaatatatttggaataactcctctgtccttcatttgttttaggaaggattagaacaaagctagatttaggatcctcgcgggaggggtgtgctttactgaaacactcatttgattttataaatgtttctagatatccaggagagatggaattaaccagtcctcagctccttaaggatgtaagtgctggctaaccagaacaataactatcaaattaaaaatagcggtgaagcggtactcaatctagggctaatccagtactatggcaacaagcactattcttggccctagtgagggacaggtactgctcctcctaatcattttgggttgctctttccccagtctcagatagcttcctcacacatttgcatgaatcaatacttggctaaatattctaggtggactctctggagatgtctggagttttttcttagtgcagcctcttttctctgttactctggcctgcaaatggtagcaccttttttcccttctgaactgttgtctttctatcttcaactaaggttatcagccaagctctgcctgagttcttcctccctgatttccataaaaatggatattttaatggaaaaatataattcatagaaattgactcaaggataagtaggatatataaatagggtaataaccatgtaagcaattttaaatctgtgaaagaattctctgaaagcatgcttactttggttagattgcaaataagtaaaataaaataatttccctgttatataaatcactgaagtatattttaaaagatagacaatatttaagttcattttacaagccag

SEQ ID NO: 63952 - DNA, 3229 bp, Homo sapiens
cattcagtccataaccatgtgagttgcctgttgtatatccagtaagatatatgaactgagcagtaggtctgacgctcccaattgaacaagactgaagataaaactctgaaagtcactagtgtattagtggtagtggaaactgcaataatcgattatacaacctagagaattttgttctgtgaaaagagaagagacagccgagaacagatcctgaaaacaaaaacatccaagggatgcctagaagacttgaagacttgcaaaacagcctatgagaaaatgattgaagaatgagaggaagaagcaagaatgttcagaagccaagcttatgggagtgacttcttgctttaagtcacttttgaatagctccccacaatacagctttctcaattaaaaatagccaaacaaacaaaagggaagaaaaatgtacattcagtgacaaaagcctaaaattaaaaccaattcctaataacatcagaatcttttaggaatctcccactccattccttaacactctcatgctttgtctcataccattgaggctctgaaagcatgagtggaaactaatatataattcataatcagctaaactacccacaaactactccatgaccaccttcctcctggcacatttttgtgtatatatatatatatatatatatatgtcttcatctcatccatcaagctgctccctccaccacccatctgcaaggttttctcatcatccatgtgtgtacctttgatgcaccctcctcaaagtttaatgtgcactgaaatcaagtggggatcttgttaaatgcattttaattataggtggagtctgagatcctgcatttctaacaagctccagctgatacatcactgctgatctgaggaccacacttcgagtagaaaggatttttctcacatctccacctgtttataacatacattcttatatatggtctctcaatctctgcccttttatttccccattgatgcctctttcaacgttactatgccctctactcctttctgctgatccactatgcatctgtagcttttattctggcattcaataatgttgttatcttcctcacttcattcttatcctgtgccttaactcgacacaattcctactgctctttccgttggactttactttgcattaggaaagcaagctgattaaatgaagccacactagtgtgttagttcctaatagccattttatgcctttctgggtgtttgttcaatgaacctctcaggaaagtaggctgatgcagggagattttccttaaatcataccaagtggcatcactgtgcaagaccaggcttgtgggttgaagggaagaaacaagaagaacatggtcttccaaaatctcttaattttccctgaaacaggagttgctcctttctccttctctgattgctttttggggcttggggcttgaaaatgccaggcatttcagactccaaattcataagaggcagtgaggattatagagattatggtttacagacccaaaattgggacactgtggtataatgacacagaatatctgaaaatgtgactctctcagaaaattctataaccctgtttgcaatgtaaaaattgaataaggattcagttttggctctggtattgtctatgaatttttaaaaatgttattcactctttaaaaaaacctttgttttttttaatcgccagacataataaaatctatttcaaagataattacaagaattaaatccccaaatttctatataatgtgagaatccagaggcaattcgcctcccttgtacaagtagtattgcattaaatcttcacaacaatctatgtctgcactattttttttactgcaactgtacagataagagaacagagaaacagaaaatgtaagaaattgatccaaggtcacaccactattaagttgcacagctgatttgaactttggcagtctgactccagatcctgcaattattctattttgggcaaagtataatacaacattctttttggacctaatgcaaattaccagcagttttcagcatggtgagcatgagcatttttacagcacagcctacatctgactgatctttgtatccctcctccaccccatcccaggtcttgcgctttggcagttgctcagtatatttcagttaaacaaatgaaaaaacaaaactctatggcaagtggcaaacagttctgaatggagaatgtaaactttagtcaacaaaaaaattatcaaaggcacaaaactttaataaatggccaagatttccaagcaaatttttattttacttttctactaaaaggtcagaattcatcaatcttaaaatccctggtaagactgaagttcaaacgaaggatgtctgtaattccctctttttatcccttaaaagcatatagcccattataataaaatatttgctcttgggcttcttctgtcttattactctaaaaaaaaaaagagatgaaggaattgacactttctttttatgtaactaaaaatatcataatatttttatttagttttattttaatataaataaaatatttatatattttattttaaaatataatgtttttttaaaaaatcatgatttaaaatcatgattttattttaaaatatcatgatattttatttagagttaatagggtaacataatgcagttgatgatttcctgttatcaaatctggatttgggtctggagagaccgatacaccttctcaagaacaatgtacagcaccaatacagcggtgtttcttgcgataattaaatttgtcatcattctgccagccacctgagaactctggtgatgtagtgacatttatcttattctgaagacagtatggagaaaaaaagtcaaaagtaactaatccatgaacacagtagtattttacaacgtgagttacagtctagaataaatatctaatgtccaaaaagcccagctggacaataaggagactaatttttgacctcctaaaagtcagtgtaggaactcagaaatagttattagacttggaaagcagattactatgatatgtgatagttaaacttcttttctgtttccagaattatctctgtttcccaagagattgcttttttcaatatgtataccttagtcatgctacaggcattccttaaatatataatggctcacagttgcccattcatatttaagaataagggagtagtattgacgagctctgtgtaaataagtggaatttagcaactggcaggcttcacat

SEQ ID NO: 63953 - DNA, 1201 bp, Homo sapiens
attataacctattgattaaaataaggatcagtgagtccatagtgagataaatgattaaagaaatatgggagaagcaaaagctctttcttacagtacagaatcaactagtaaatgtagaaggaatgatagaaagttaggaagtcattattagcaaacatcatagtaattatttaggcatgaatcatcaatagagtataaaactagtgggtaaaagtttgatgaggaataagatattaatgtaatatcaaaggatctctccacaaaatacttaattgtaaagggaagactacaaatttatagtgaagaaatttggcaagcaccacctttatctagtgataaaaattaacatcatttagaatgatacaaatcaacattgtcttcttgttatgatctgctgagaagaacatagcatcatttctgtgatgttcctgccataaatgcataacctgaatctaatattgaagcagcattattaaactcaagttgaggggaattctacaaaatagctagcttgtactattcaaaaatgtcaacatcatgaacgagaaaagacagaaactgtttcagacggaagaaaatgaaaagtgacaacggtagcattttatctcaggcagaacttgaaccagaatattcttgtactttcctttgctataatgtacaatattgggactatttgtgaaatttgaatggaatttgtgaattttatggtctcaatgttcattttctcaattttgtacttatataggagagtgtccttttcttagagatataggcataatggattatcatggcttccacttattttcaactggtttggggggaaaatgtgtgtgtgtggataaaggcagggtggagtggggagagagaatggcaaagaaattgtgtcaaatgttaacaattgggaaccctgacaaggcatactgaaattctttttactcatcttacaacctttctctaactttgaaattattataaaataaaatgtttttaatcactatttctttgccactttttgtacttcaattttctttcccaacttcaactaccttctagtgatcttcaaaggctcatggaaataaatttataaaatacagaaatgaattcattaaaataagaagtgtaacatggtgtttaagcttttgtgctcttgaatcaaacttcctgagttcaaaattccaacccatatgtggttttaaggcaa

SEQ ID NO: 63954 - DNA, 1025 bp, Homo sapiens
aatccacgtgagaattttaattataagaatgagtgggttttcttattaacatacttaaaaaccactgccaccactgcccagattcatcagacagtagggaggatggggaagcataaggcagctacttttactgagattcagaacggaacaaaccctggatactgcaggcaatgcccaatagtttttccatgagctatttaaaaactggagaagtattggattttatgaggtcagtcagtgaagcagaaaaagctcagtttgcctgtgatgctcctggaatacaagtaatatatctgcattgcagcagaggagcaatgtagggaaggaaatgtaagaaaactgggtgaagagaaacacaattaaaatcacatgctccaagctctcagtctaaaataaaatccttctcaagttattgtctttgaaggacattatggcagtcaagagcactggttttatagccagacagatctaaatgtgaatcttggctttgtcacttgatgctcaacagttaatcttgaataagttacagaacctctcgaagacttagatacctgaaatagaaaatgggatgatagaacttgcctcagagttttatgtgagcaccaaatgaggtaatattaaaatgactgtcacacgtgttcagtacacatatttattgctccttttctgacagaaagcatgaagcaacaagaaaaaaagacaaatttgggaagaaaaagtttttatttatttttcactattaagttaatattcttgtagttttttgttaactttttatttagagatatacattattaatataatacattaagaaataagaaaatattaaattattaagaaataatacagaaatattccagtttgaagaacctttattcaatttagtcagtttagagtaaccctcattaaactcttccaagcacgaatctcctccatttctataattttgtatttttaagaatgttatataaatggagtgatgcagtgtgtaacctttaaagattggctgttgtttttttaaactc

SEQ ID NO: 63955 - DNA, 1569 bp, Homo sapiens
ttacttctttgagtacttcttcagtccctccctctttctcctttcttcctgggattctgatgacacaaacattaaatcatttgttatagtctcacagatctctgaagctctgttaatttagtctatttttttctctgttgttccaattaaataatttctacatttctttcttcaagttcactgattctttccttggcaaatttatggcaggcctgaatatgcacaggtctttaggccctcagcttgaaaacatgattgtcagcataatgaatgcctagatctgaacctcaaagtgtactcacattaaacaagctcatggaggctaatgacaaaaaccttaaatgccaattaatttacttaatttaaaataagaagtttaaccatcaggtagacttagaacaaatggtttctcggtaggcaaatgaaaatggaaaaccttaattataactaaaaggctgcttagttagcctgcaactaggaaaagaggagttatttggcaattttaatgcctgatgtcatagagccctggaaattactaagtacatctccaccacaggatcatatctgccatatcacctggttggttatgatactgggccaggacactctctcttctgatcgtgaaataaaatactaccacggtttgactttcctttttctaaacatcttttattggctaaatatcttaaagacagtcatgtttttactctatatgtgctagtacatttaaacacttctgttcaagtcttggctagagcttattctgtctctgctttgtgactttatatacctctctaatttaaatgattatttaaaaaatagtttaaaattcaatgtgcaactttctttccaactttctgaaggttctctcattgttttctctatgaaccacatactaaaattactggacaacaaagaccaagtaagaattggtctttttcttttgggcaaaagctttttttttttttttaatggagtcacagctgacaagaccatgtctgctctataaaatcagctttaagaaatagaaagagaaattagagctcttagaaggtgggagagagtgagttcagtttcatgcctatacttctggttttaggggtttgagggaaagagtggcagtagggggcaaaagttaggctatgagggccatgtccaaaagtccctcaggttctgtctttggagaattgtagactgcctttaagggaactgcaaggtttccttcagtatacgttggattaattggttcctctggttaaatagttaccatgcttagttttaatacaactaattgatttcttatcatctgtctaataatttagttcaaattcttttccatttaaggacagaattctaatgttctcacatttaagaaggaaatttagccaggtgcagtggctcacacctgtaatcccagcactttgggaggcctaggtgggtggatcacctgaggtcaggagttcaggaccagcctggccaacatggtgaaaccccatttctactaaaaatacaaaacaaaaattagctgggcgtggtggcacacacctgtaatcccagctactccagagg

SEQ ID NO: 63956 - DNA, 1746 bp, Homo sapiens
cagccccaattaagctttcagataactgcagcctcaaccaacatctggactgtaacctcaggagagaccttgagccaaaatggcccagctaagcagcttctgaattcctgaccctcagaaagtatgtgagataggccagacgcagtggctgacacctgtaatcccagcactttgggagactgaggtgggcggatcacctgaggtctggagttcgagaccagtctgaccaacatggagaaaccccatctctactaaaaatacaaaattagccaggtgtggtggtgcacgcctgtaatcccagctactcgggaggctgaggcaggagaatcacttgaacctgggaggtgaaggttgcggggagccaagattgcgccattgcactccagcctgggcaacaagagcgaaactctatctcagaaaaaagaaaaaaacaaagaaagaaagtatatgagataataaatgtttgttattttcagtcattaagttttgaagtaatttgttacatagcaatagataagttaaacatctatcctttttaagaacagaggataggagagctgactaggagatctgtgttttagggtgggcttggtaactggaagtctttccttaaaatgaatttttagaaaaggagaaagctttgtgaaagtaggggctaactttggtatgataacagcttcattagacaccctcgttttcccttaagagttcatttaatttattcattattctttttcctactgatgattctttctgttatggcgagggttgaaagactgttctatacacagatcttcaactaatcttttagtttgcaaccaacttctgccctcatctagggttttgtcaggcatatagttcccttttccctttggtgccttgcagctatattcagactatgattccctccaatttattgaatttgtcagcattcttctatctgcttttcatttacagaaatatgttgaaatatttgctggaactgcatcttcacactttcttttaccttctgttgttctctttgctattttgattatataagttaaaaagcttattttactattcttttagtaggattcagggattagggaaggcgaagtatgctcaatctgccatctagaaccagaactcttctatgtggcatattttattctattcattcagtacacagcacttcacttttaaggatctacagcagggtatggctgttttgtggtctttatcaagagatctcgtgggccattgccctccctttattcactcttcatattgtcttgccagtggggtcactatcctctctctaggctatttttccattcattcaaaaatttccttcattccccaagactatcaaaggtatcttatggaaccttaggcctctggaagagtgatcctctcatgtctagggtcatatagtggaactcagttgggaatgatccattgatacagacctctagtcaagtcctggccctctttcatgtagctatacaaaatggagcaggagggaacaatccctgctaccaaggctagcatagcaagtcagtatgatgagagatgaagactccattcacctttcccctgccagaagtatcctcaatctccatggtctacaatatactccttctcatcaatccctgtatcacaagaaacccttgaccacagaaaaagaaaatgtagttcttagaataaaagaacatctcttcctccctaaactagagaaaggcagctctacaaaagatactcttg

SEQ ID NO: 63957 - DNA, 1025 bp, Homo sapiens
tacatatattatacatatatatatgatacacacacacacacacacacacacacacacacacacacacacacacacacagtttaccaattcagtcatgtgctgcataacaaagtcttgctcaatgacagactgcatatatggtggtggtgtcataagattataatggagctgaaaaattcctactgcctagtgatgttgtagctctcatagtatcatagcataacacattaccttttctgtatttacatatgtttagatacacaactactaccattgagttacagttgcctacagtattcagtacggtaaaatactgtacaggtttgcaccctaggaggaatatgccacagcattcaatctaggtatacagtaggctgtaccatctaggtttgtgtaagtacactctgatgtttggacaacaatgaaattagctaacaacacatttctcagaacatatccttgcaattaagcaataatatgaccataacaggatatatatatcctgttggttctgtttctctggagaatcttgactaatacagggtcgaattcttataaataaggagaaattttttgctgctgtaaaaattgcacaaaagtgaaagggtcatattaaatttggaaatagagatatgaaatatttaacgtagatattctaaagataagaaaaatgatgatcatagttctgtaccatgagactttaaattgaaagttggctttgaaagtattggaaaattctgacttaaaaatacaaaatatactaagtaaagagaaaaaatagaagaggcacatgaagatgctaagaagactgtagagggagctgtctgatcagcttagatactaaaggacaatctaagatgaaagaaaagaacacacaatcaaagactgccttacatgcactattctctgagaagtaacttattaaacatttgtgtgaataaagctgaaataaaagacaattatgtttaagaattgtgtctagaaaatttgtgttcaaatatgctagaattgcaaaaaatgctgtg

SEQ ID NO: 63958 - DNA, 3362 bp, Homo sapiens
gatcatgctctaataaatatttttgcagatggagagaaagtagatgtctcagtcctggtttggttctgtcttctctttcaaggtataatattgggctgggaaggactctggacttttgaaagaaggaaaagagtgcagagggagagtggaacatcagagagtttcagctcataccagacctagagtttacagtccaccttctaagagtttgcaaaggggattcttaatatattcacagtttggtcattgaaataatcatttattaagcattctgtcctattcctgtcaccaggccagacactgggaatacagatgaagacaatacaatataatttccttgggagtttgaagaattccagagtataggaccacagctggagatgaggaaatgttctgatttctcctgggggaatgaagtgtgttccctgaattagtggcttcctggtttttagacaataaggcttcaaaccaggttgacacatcccatgtcaaacatttggtgggcaataaaagtgagattcagtcttctgagtctataactcatcttactttgattctgctctagcccctagtccttcttctttgctatgtcctcctagcttctagtccttagcttggtctcttggttataactctgtcctcactctctgactaaaatactgaattgactttaattcattcatttaatcaacaaatattgactgaatgtctgtcatatgccagcctttattctagatgctggggatacaccagtgagtaaaacaatgtctctgttttaatgggacttacctctggtactggtcaaaatataaactctctctctccttctccttattatatatatatatatataatatatattatatatatattatgtatatatattttatatatatatgctgtatactgtgtatttatggtatgtgttatgaagaaaaataaaatcagtgtaagaaagacaaggagactgggggttataacacctgaacagagattgaaaggaattgagagtgagagccatgcttgtatctggtgagaagaacatttcaataaagggaaataccagtgtaaaggctggaacagagtgagtgggggagactggtaagaggttatagttgtagtgagagcaaggggagcataggatgtagagcctgctaagccatggtaaagattttgactataatctgagactgtgagctcctgaagggctttgagcagggaagtgccatcatcttatatgttttaatagtgtatcttggattgtcatatatagaataggattggggtaggggtagataaaattagaagaagagagaagagttaggagtctatcggagttatctgagaaagagttgatggtagcttggaacaagttgtaatagtacacgcaggaagaagcgatgcaactgtgaatatattttgaaggtatagcggaaaggatttgctgcttgattagatgtgggctatgtagaatagagacgtaacattcctggctttggccatagtgtcctctaagacatggcttatcctcatcttctgattttatccacttctagatactttggaggctgactcttcctacttccattgagaatcctggcacccaactctgacactggccttccttgactgtgcccctgctaggcttgctctaacctccccacaacccttcccaaaggagaattaaacaggctttttcttctctcaagttaaataaaccccctaattaaaatgactttcattgtgtcttaaaaatgtatgtaaatctaaggaagattggggttaactatgtagaaatctgtagcattttatttatgtttcttcttgactaaggaatcaatgtttagggacttgagtgatcataaaataaaaatgggcacagaaatcgtgactaaggaggagaaggttccaggaagatgaacttgtgttttcatatcaagccaaaagacagatgattcagaagtcttttcctccatgtcatggtgatgaatttattccagaaacgtctaacttattctaccaagagtctaatggctacgagagaaactaagtgctgattactgttctattttctacagttgcagtgcatgtcatgctttctcccctttacactaattggatcccaggccaatgtctttgtaatgggagttaagggtggtattactgcatccctggtcagaccaagggaatccagcttttcttctctgttttgactgttgcacagttgccttgccattcccaaaaatgaacaggaggtgattagcactctggtgccctatttaagctttctggctccaaagagaagctattttgaaaagtgaaaagattacactctgataatagaccagaggccttacacatgtgaatggctcacagaggattaaaagagcagacccagaataaatgcagcctatacctgatggagcaaagagggtgaatcgcccgcacccttgactgcaggagctgtttgaaggaagcaccttactcagattattgatgcctctgtgatccaacgtaatggtgggaggtttaggggggcaatgtctgatccaactgttgtcttctcaagaaaccaattagactgcttcatagtcttctgatgtctcagggatcttagttcctaattggtagactcttcccttccaactttgatctctttctgagtgttcctgcctgggaacattttcccaaggtcaccaatcatctgaagaagtgtatgcatgagggaattcacaattgttccaacttattttaaacacaagatgatgcaaattggaattttgttaatttcaggccaagacccctagaagttgcactaagaggggcccattagtgcacaaggcctttaagtcctataggtcagatttaaagaggccaaagctctgggaagactagttcactcaactgtgataattccagtatgttaatgtgttcatgtactaggaaaaattatatgttctgaggaatcaatgtttattgtaaaattggtctcaattattttctgtccaggaaagctaacctaggaaactaagaaattaaacaaatatattcaataacgtgattgttattaaacacatattatgtgtcaagagccttcccttgacacataattaggtccacttggtccagagctgagttcaagtcccgaatatcccttgttaattttctgtctcattgatctgtctaatattgacagtggggtgttaaagtctcccactattattgtgtgggagtccaagtgtctttataggtctctaagaacttgttttatgaatctggatgcttctgtattgggtgcatatatatttaggatagttagctcttgttgcattgattcctttaccattatgtattgcccttct

SEQ ID NO: 63959 - DNA, 1366 bp, Homo sapiens
attttgtttttggtcctcagattgtctcatgtttggacaatgggagccccttcaaagttgactcctgtgttcttttggaatgacctaccccaacaatctttgaaagcttctccacttttgggtaccaacaaaatgcttcatgcatatcttataaattttatactacaaatttgaattcagccatttctttaaggcatcttgatttcttttaatatgagtttgtattgtattttgctgtgttttctaattataaaatcatattctcaatgcagaaatgtggaaatagcataatagtgtgacaaagcaaaaattatcctacaattttaagggaaatacaggtaacattttaatatatgcttttccagatcttttgcaatgaaattctacataattgaaataatgttacatataaattaatatattgcattttcgtttcaaaaaaaattcataacaactctcatttcattcaaaacttcacgagcattattttaacagtagcatcatgtcccactatatggacttcatataatttccctaaccattctccaaatattagacatttaacttgtgcttataacttatgctttaaaagactgctgtgtatttaagtctttgatctcattatatgtatatttattttaaaatctaatccagaagtagaactcatggatcaaaggatatgaagatatttaaaactctggaaacctattactaaattgctatccagaaataattatactgtacccttgccagcattgagcattctcattttagaataaagtttgctactatgatgggtgaaatattactatcattgttttcatttgaatttgtattccagatatattaacacttgatctgttatgttactgcaaatgttccctggtgtatcatttgattttcagtttttgatttgtttttgatccacagaaacgtatttcatccgccagtatcttcttttgaaacttctttcagtgcatttataatgtctacgttgataacagaaataaaaggcatatttatatacagtttacgtaaattaactataaaactgagtttagtagagcacatatgttccataaagaaagaaataagagcaagaaagagattagctagtgtactgcatggccatgtcagtggagtccctggcctcactgtaatctggatgtggcagagcccttttttttttcagctctgttcatctgtgaggggcaaccaagtctctcatatctggcagaggtgatctctatcaggatagtcactgctgataaccagttgtaatttaacaatccacctcggctaaaacttttttttttgagacggagtctcgctctgtcgctcaggctggagtgcagtggcgcaatct

SEQ ID NO: 63960 - DNA, 1621 bp, Homo sapiens
agtgtttattgaatgaatgaaaaggttgagatgaataatttaaaaaataaagcagatgtgttcatgtatttttcttaagagcatgaagtgcatctcacctattacacataaatagttaaaatgttttagtgttttccaggagaaaacaaatatgcaaaatgctttccagtgtctcctttaatacttacaaccttctgagttacatgctatattagttccattttatagatggagaaactgaggctcaaagagatgaagtaactgctatttaaatcagagagtaggatctgtgatcatttgatgctatctagtgaactgttcatgtggttttatcttattaaaagtgtgcttattgtagttacaccttttctaagtaagattttatacatcttagaacagcagttaacaacaaatggtaaaaagcatcctttcttgcttctttcttgttcagggggtagtgctagcttttggtagaaacagttatctacaaatgaccaggttataaattatcaaatatgggaacaaggctttatctgctccagaatatatatagataataatatagaatgcctcttcagcttgtgggaaaggaataaatgaaggagtgacataatctgttattaaagaatatgtaagagactcagtagcaaactaatgtgtctttctcttatgtaggaaaaacactctgcagtttcctttgggaaatccagaccccttttggaggcagaagtttgcctctcttaacttcatggggtgccccactcccaggagcagcctgctttggaaggtggcctccacttccagctttaagtaggtctggcatttgtctctttgttggctccatgacagacagatggagcttgattctaaaccgacctgctgggcttgggtatgaggctttcagacatgaaatcttgattaacagcaaatgttaattgaagcagtgaattattaaagtgtttttccataaatgataaatgctgttgttggctgttttacccttcgtgacatcataaaactttccaagaaattgctagctgtgaccaagaaaaacaggaagagatggcagcatttgatggtgttcacagtgatctgcttatgctctgtggccaggcccagctggggatgacacatctttttttttttctggaatcccacatcatctcaatgaaaccaacaaatcatctttccctcaaatgcagaactctctgcaagtgatctcatccagcctcctagcttcagcttgtaccaatagctgatgactctcaatctttacctcaaacccagattttctcctgagctccagacttacaaatactacaattattattgagcaacttcacctgatgtctaataggacctcaaactcatattcattcatctaacaaatgtttatcaagtacgtgtcttatgttctcagggtcactttattctaggtaccagggaaacaataatgaacaaaatagctgtagctccttatggaacttacattctagtggtgacaggaggagaaaaaataaagcagagaaagaggatcagggagtgctgagcattggtggtggttgtggtggtggcagtggtaggggtttgtatagggtgctcagagaatatcttgttagat

SEQ ID NO: 63961 - DNA, 1309 bp, Homo sapiens
accatctggagaactagagtttcattttattttcttttactgtttagtccttttacttttaacacttacctgcatttaatcttccttgtaatttcctgataatcttaataccttttatggctttttttctcagaccttatagttactgtagtttgttttctacttcacaattgtcccttgttagcccacccatgcatgttaagatgttgcccacttatctcttcaatgtatactctctgtaaaaccagctcaatcaatcatcatagtatttgccagaggcagggaattttctgttattgtggtttggaagtgttttcttttttccttcaaagggaacagcaacttagcaagataattgatctgtggtaagaaaacataccccataagtgctctataaggattttcccagactcttcagccctctaatctttaggttgtgaaagtgaagattttcttttttcaccacctttggatgttaggtctcctctccttctatctgcatgtagttcgatttctttaaatttgtaatctgagaagttaagtaacatatctgtgactctctgtctcccttccatgctaatgatggaagacatgttcgatctctctcaaactcgaggatacatgttttttatcaattcaggaaaattgctttaggttaatttcttagttttgtaattgtttaattttttcacatctcttttggcaccacaattatgcacaggttggatttgcatctgtgacactccttaggttttatgttcagctggttgtgtacagttgccatctattctagttgtagcacccatcttgattggttagtacccatttcatcagttgaacgcatttctaaatatcttcctggtatgataacctttcaccagtctgtgagccagtgccagtcccagatgaagtttgcacttatctttggctaattgaaaaaattgggataataaaattagtttgtaataaagataagtgtcttcgacttacaaaactcatctttattctgagtctctatatcatccctaaattttttattacaaagtattctttgtcttatgaaaaaatgataatggtagtgtttttttttctttaacattcttacttggctcaaagaaagataacactaagttagtcttcaaattttaaaaaaagagaaaaatttgtaaaatataagaatctggaaacaggaatctttgtcatttctttctaagttaatgtctaggctggcctgttagtttatgaatccatctgcatcatttctctaggaaagatatttgaaatttaacttttgagttcttaattattt

SEQ ID NO: 63962 - DNA, 1086 bp, Homo sapiens
gaccataaaacaaccagaaaacaaaccattacatgaaagacacagaaaggcagacattacatgttctcacttatttgtgggatctaaaaatcaaaacaattgaactcatagacatagagagtagaaagatggttaccagaggctgagaagtatagtgggggactgtgggggaggtggggatggttaatggctacaaagaaaaaaaaagaagagagagaatgagtaagacctactacttgatagaacaacagggtgactatagtccataataacttaattgtacatttttaaagaacttagagattgtaattggattgtttgtaacacaatgggtaagtgtttgaggggatggataaaataataataattagaaataaagggtctgaacaggaaaggtcctccctcaatataacaaacacacaaggcattgggataaaataacccacagtttcatgaaaataataaaacctgataaatataaataaaagttttgagcagatatagcaaagtacattaatagatgggagaatgaccatctgctaattttgactggagttctaggatctagagctggaaagaggaaacaggaaaggctagcaaacagttcaatataatagaatcagagtaatagggaaaaaataacacctaacagagaacacaagctggcaaccagggaaattatcaaaagaatgtgaccaataataataataaagcagtaaagaaaagagaacaaagttcaaagccaaagttctactttgaagagaattcaagcaagcaagggaagggagaggaggagggcaggcgtgcatggtggggtgggtagaacctggagtttcctatgaatgctgattcaaatcctcttttatatgcagttggcagttacatccacaggtgttacagatgccaaactattcaataataattttccaatagctaatttagaagtcacatacaatgctgattaacactccaacaagattttaatcttagaaagcagcaaaatgcttcgcaatttcatatgaataatgaagatgtcacataatcacagaacttacaaagcagctgtgcaggggtctgtcctaccag

SEQ ID NO: 63963 - DNA, 1054 bp, Homo sapiens
aaaatttcaaaaattcatcaaaatacacatgcagtataattattagaaagctaatcagatacccaccagaaaagctaagtgtaaagtgtttgtgctaggattttaaaattatttctttttgattgtatatatttaaagtgtccaatgtgatgtttccatatacctatatgtagtgaaatgattactccagtcaatcaaactgaacatatccatggtctcatttagttaccttttttagtatggtaaggacacttaaaatctactctctagcaaattttcagtgtactaataacaaattattaactatagtcctcatgctgtacattagatctctagatttaatcattctatgcaactgtaactttgtaccttttgacctacatctcctgttccctgcccccatccccacaccctggcaactcctcctctattctgttgctatgtatacaattttttttaagattccacattttgtttctgtgtctggcttattgtacttaccataatgtcctccaggttcatccatgttgttgcaaatggaggatttccttctttttaaaggctgaataatattccattgtactctacatttttttttttaattgagaagcagtctccctctgttgcccaggctggagtgcagtggtgcgatctcggctcaccacaacctctgtcgcctgggttcaagagaatctcctgcctcactctcccgagtagctgggactacaggtgcacaccaccacgcccggttaatttttgtattttttttttcagttgaaatgaggtttcatcatgttgtccaggctggtctcaaactcctgacctccagtgatctgcccacctcggcctcccaaagtgctgggattacaagcgtgagccactgtgcccggcctagtctacattttctttatcctttcctctgttgtggatatttaggttgcttccatgtcctggctattgtaaataatgctgcaatgaacatgggagtgcagatatcgctataatgtgctgatttcattttgggggagtttatggccagaggagggattgctgg

SEQ ID NO: 63964 - DNA, 1038 bp, Homo sapiens
acacaatctgggagaaaatattaccacataggcaaccgacaaaagtaatatagagagcatataaatatatctttatatcttccaagatataaaagtctagaaaatctgtattatcagggccatgagagggttataataattaaggcttttttcttgtatgatatataagtaattaaaacagaaaaatatcatatttcagggtattttcatggatgctaaattacttgtacacaccatcaaaaagttagctgaatgtgtttttagataatgcagtctacatgaaaatagtgacagatttattcttggccttttagttctatatgagaacccagaaaaacaaacatattgcaccattaggcatcaaagtgaaaaaatagtggtgaatgattgataatccatagtatagtttaccaagtgaaaagtactgacatgttagtgcaaaaactcttcttaaaaataaaactaggttagaatcaccaaaaatgaaatcattgcaatgtctaaatctttaaaattccaagcagaaaaatgggtgttgactcagatgtgtaataacatcagcaggttttctccatcatgtcctgtgtcaaggcagatgtgccctccagcaagtgctaagccacagacctatagctatcccctgagggctaatggtaatgcttccaacttgctactaaaagcctgaaataagcatcatctagtgaatactgctaaactcagtttatttgttgctaaaaaaaatctgagaggtgacagataatatgtttgtcatttgccttttgattctctttttcaaatccagacaaaacgccaacacctaattgtcagcattcaagagaacctgaaagttatcaagtgcaatatcccattagtgtttaaatcctccctatgaaatgcccaccaggtgttcatcaagctgattgtacaccagcatggcagagatccaggcctatggtgcagagcagaagtagtacaataaatcagtagggagaagattactttttatgggagaagattatttttatatacatcatccat

SEQ ID NO: 63965 - DNA, 1036 bp, Homo sapiens
tagaaaactgcttattattataactatttctcttgtaactttgtatgatttcttaggcagctgagaaaattttagtttttatataaattagtcaatcttcctcatgacttctcattcttatgccatcccctaagataataaaatatcgctctttggtttcttctagtatttacacaactttaagttcttcctttagattatcaagccatatgaaatttatttttatatgctatagagatttacattcatcttccaccagatagagagccaaatactcaaaagtcatttttctaataatcagtcattccctcacagactttaaatgtcaccactttaattctaaaataatatttgtactttgatctgtttctggactctttcttttgttcccattgatataattcctcatttttacactggcaccttacttttgtaagttttaaaaatggcaatttttaaacatctgctaggcaactcttttattattctttacagtagattctcaattattattccaaatgtacactttcaagtaaaataatcagctggcagtcaatcttcttattgatttttagttcattttgatcttttaatctcttcaatgatgttttgatttgaagactatatgtcctctaatttatctggaatgcagaggttttgatttcaagattttcttttttgtagtttctatgaatatgtttcatattctctcctttctggttctcattaatctataataggggagcagggctgctacctgtagctgcacaggttatgtactgtacaactctgtggagcatcgtttatggagatgcagcacaaatcttgcaaaactgttaggcagcaggctaaggatctgttgtatgggatcttttatttactgaagagttggcatggagtaattctccttgattttcacctatggatacctggacactatttcaattgcggcataataaactgaactagagaatcatttgtcttagcttataatctttgtatagtccttcagttattgtcaagagacgggatacaa

SEQ ID NO: 63966 - DNA, 1038 bp, Homo sapiens
ataataaatggggaatagtaagcaaagcacttccgtgagttctgtgagtcattctagtaaatttagtaaattattaaacttgaggagtgggttttgggaacccctgatttatagccagtcaggcagaagtacaggaggcaacctgaaacttattattgagtctgaagtggggcagtcttgtgagactgagcccttaacctatgggatctgtcatagctctggatagttagtgtcagaattgaattgtattgctggacacccagttagttttggagaattggagaggtggtgtcaaaggacaccacatctaccctttagctttctatcttctgggtaaatacagaggactccgaggccccagaggaaggtgaaaccacaagacagccggaacctgtggccctaaataaggtagataataaacacctaccaagaatatttgcattagactgttatgtgaggaagaaattgttttttgttgtgttaaaccacacagattgggtgtttgttatgggacatgctgccaagtaaaatgtagaatcaactagtcaaatcaacatgtgccatgatctctcccacttttccttactgggttttagtgtcttttttgtctgttactctctttattgatgttttgagtcacatattacatgccctctttaactttcctgaaaatgtaaagaagtttttatttcaacttaggataaaaccataggatattattagcaatatcctaattaatattaacagttgccaccaaatataacaagttttaaccggtgtcataattctcctcattttttaccctcctttaagccaagtagataattaatggttcagtatgaagctcttggctcacaattagtcccattaactcataaatctttttttagtgaggtagctttaatttttttgttcatttgttttcatatctgctcagttaattttagtcaattgatgccaaactaatctgatggctaagctaaccttcttctaggaattgaatgtttgtatttcatccttattttccttatctcctgc

SEQ ID NO: 63967 - DNA, 1115 bp, Homo sapiens
gctagcagaaaaacctaaattttcaagaaactttaaccttgttcatggaatgacaaggagtccaatgtggctggagtagagtaactacgaggaaaggtaaaagataaaatcagagggtggcagagacccagatcacgtgaggtgttattggtcattgcaataaccatggtgttactctcagtgagataaaataccactggagagttttgagcaaggggaggacatgatctcatgtaaattcaaaggatttgcattgaccactgtggctgtgttgagattgaatagcagagagacaagggtgaaagcctaaaggccagttagaaagctaatccaagtgggagatgatcatcaaagtgaatgtggagaaaagtagtcagattctagatatatgctgaacacagatattaaaggattgatttactgatggatcaatgtgagctatgagagagggcagtcaatgacgactgcaaggcttgagcatgagcgatgggaaagatgcccttagctggatggtctagagcacaggtggagcagagagggctgggcaggagaggaggctcagttttgggcatgataaatttgaggtgcctatttgacattcaagaaaagaggttgaaaatgtagttggatatgtgagtcaggagttcaggggagatgtctaaactggagagataaatttaggagtttttcttttataggtgatatttaaagccatgagagacaagtccccaagggatagagaataagcaaagcaaagtccatggcctgagccctgaggtgctacagcattaagaaatcaggagaggaggaagtgccaacacaggatgctgaggaatggtaaggaggatggagggaatccaagagagggaagccaagtgtccaatcctacggactagatgtgaaattaaatactggttcaaaaggaattaaatatggaattaaacattgagttattagatttagcaatcatgaggtcattactgatcttaaaaagtgtttttggggactgatgaaagcagtctgactgaatttgagagaaaatcaaagagaattatatacggcaagtatacacaactatttcaaaaagttttgctgaaagctgagcagaaaaaatg

SEQ ID NO: 63968 - DNA, 1049 bp, Homo sapiens
gtgggtgtcacaaaggatcaaagatgaatctcaaaaaaaagattaaatttatatatcatttctaaaataaataagtatatattatgtggtataaaccaaaataacagtcaaaatgattatagcagaactaaatctattatatatgattttgtgaaatttaggcttatgacaaacatcacatataagtatgcattttttccccagtaattcactaagaatcaaattttatccagtttgaaaatgagaactatggaagaaatctaggagtcagaagaaaatttgataccaattgttctctaatcctcatctcactggaattgtctttaagattaggaaacattgttattccatttttgaagttcattgagttcatttctctaatcacatcatattttcgttcttctatatcattgacctctactttgaagaaatagagaatcttctccctctgcccatgttatttcaggtttcccaagactctggtcttttttgacctcttctttctgcacaatattcctgggtaatcacatctatgcaattgcagtttcgagtatcacttatatgcagacaaataatagcgatgtcttccactttataaatctcctgtgtgctagagctgtacatcccaaccagccattcaatctctccctcatgatgtctcataggtatcttcaatttaacaggttcacctcctagaaaccaaggaattatccgagttcttcctttctctcccgactacatctgctctgacatccattatatcagttcttccttcaatagtcattgacacaaacagtttctgagtgcagcaattacagtttttacctgggttattgctaatagtctcctgtttggtctttctgtttccaattctttttccctgtcattgaaactgtatttctaatatacagatctgattaagttacatttcttcttaaaattcttcaagtgtacctatcctgaggatatactgaaatacttaatggaaacattaatgcacatacaaagatgttaatcatagtataatattagtgaaaaatggaaatgac

SEQ ID NO: 63969 - DNA, 1031 bp, Homo sapiens
gaattctactagattctaagatattagagtaagatagaaagatgaattttagtcaaccaatcaatgtgcactcaatggatgcctactacagtcacaggcagtgccctctgggccctgggatagagagatgattgagatattatccctacccgatgatagtctagtagggaagatgagactaatacatatgaaaccagctaatctaacttcaacgttagactattagagcccaaaaagtgtcctgccttgtcaaacatgctattttgccattgaaatactgctatccagacatagtaagtaaatttcttatggccacatgatcaaataatagaccagttcttctagagagaattactctctccatccctttgcattgttttataattttataaaaaacttttacatggctctgtgctttaactaggcatctgcctgtctgtccttccttcagggatgtgatgccccacaggtaagaacctgaccttatacatttaaggagcgcacagtgactgataaggccatatttagccaggaggtgctcaactcatcagccttaagtgatcggaaaggatcaaagacaacagtccagggaattcctcttggccaaggtcgccattcattacaccagatagcacaggtagtaaagacctaaatcttggatacaaattcgaggtaagatattttaaacttggcgtaaaattatagacctgtttctaagcccttctgtcttcttctccattttaaactcagttgctttataattttacataaaagggtaatgcattttcatttcagccagcaggaaaaggttaggctcctcaggtgcttttgaatcttcatgtttgcagacaaaatcattgaaaggttttgatatatttctcctaagggtttttcttgaaattacaccaggtcactcaatcatcagacaagcatttttaaaaacaaaacaaaacaaaactgctctttgtcaaatactgggcaagttgttgtctacaaacttgcttggctgaattactgagcaactactttat

SEQ ID NO: 63970 - DNA, 1265 bp, Homo sapiens
aaggaatgatgcattagtttagacctgagcaattaaatcaataatttacttagataagaaatgttgggtagaaacaggttgagatgaaggtgaagttacacatttgaatagttgcacatagacagattaatacatgaatttgaagctaagagggagatcatggctgattatatgaactggagagtcatcagcatatagaaggaatttaaaaccacggaactgagtgaaatccttacggacaagggtagcaagggaggaatgcaggtctgagaacaaagctctgtggcatgccgacagttagaggtcaggtagaagaggggaagccagtgaaagacaaagaaagagagtagtccgtgagaaaagaagaaaaccaaggcacatctcagaggtccaagtggtgagctgttgtccagcctcccgagtcccaattcctccctaccctcatctcaccccattccattcctggctgtctatatttgaaggtaatgaccagattccacattttaacttgcgtctgtgtttgaagtttcatatagcagattaagtgagtttcactgtcaattgagcctaaccaccgctagatactgaagaaaaatagggacagaattgaaacaaaaacaaaaacaaaaaactccaatcctttataaaacctgtctactgtttttttcttgaataatatatgcaagacattttcctcataaatgtcatagtaaatggctgaaaaccagcctccacaaacaagctttgaatacgtcttctagcattcctaaaattttaaaacatgaagtgaataccgtctcttactatttgattcaagtagtatccttaaagaaattcacaaataacattatattgctttaaacgaactactacttcaaataggacaaatgatatataatgagcttttttatatcttaaaaattaagatgtacttttgttttaatcaatggaggttaaagttatagtttaaaaggtatacctcttctaattaagatatacctcttcttctaattaaaccctccaagtcaggcagccatctacagtgcattaaagttcagattttgcataaaaactcattatctaaacttgatgggttttccttcctttcaatacaccacaccctcagaaggggtctaaaccaacaagaccctttaagaaatgcaaaataagacctcaccttggctcactgctgttcactgacaaacctgaggaattctaattctacttggaaagaaatagtcttctatggggaataaaacatttta

SEQ ID NO: 63971 - DNA, 1015 bp, Homo sapiens
gggaggtttaatgtccagcctatgtgcatctcattgctggatgtgatgtgctgaataaaccacagtcccttatctcacaagctggagtcccaggaagatgtcttaagtcggggaagttcgtccttaagcagcagaagcaagacaattattttgcatgctttgcccaaagcaagtattagtattgaaacatctcacttccttgcctgtgaccagaccacgagttctccttgttatcccacataagcagttgtctttggctttacaagagaagatggatgaggcctatctctgaatcacatctttttggccagttttctgcttctactccttttaatccgggagctggatcctgtgttctcagattctcttcagcccctacaccaggcaacccctgagaaagagtcactaagtaggcttcttacaagaggaaatctgattccttggcggaggaatagctagagataggagtcgaccttgctgctctgagttcctgatagcagtgctctgctttcttaaactaggacacaagggttttgaagtagccccatgcccctgtggctctttggtttttgttggaaagtagccagctcatgaggacaggggtgggggttttcgagtgcaaggtgagaggaaatgaggccaaagattacatccaaagtgcaccctctccttcaggacacttctcccttcatttccaaatctcccttcatttccctccttccttgccttgccgacattaattcttacatcagatgcatttgtcttcatccctctgaagcaagagtgtctttaatctcggaaccctaaaagctgagtagtagaaaagctgcaccacacaacgccgtgtgaataatgtccctgctgttgatagtgtgaaccagaacaaccatgcacagcagccctgagacatgggttcctagagagagtcatctcggtaaatggatgacttctttttctggaaaggaatccacctgaatgccatgtcccagctttctctgttattgtccattcacgg

SEQ ID NO: 63972 - DNA, 1036 bp, Homo sapiens
atatatgggcacaggtgggcagatgtggtttgggaatcttgcagaagtttgccttctgattgctcttgtattcttggtgaaataggaagcagcaaggttataagctgagagtgaggatggttaggaagtaatggcaatttgaaaataagagagttataaatgtttaggagagtggaagagcaaatggattagggaaggaagtgtaattgccaggcaatactaagcacctgcttgaagttggcgatcatgaatttaaagtaatttccatcagcataggtgtgtgtgtttcttccatgttcagctcttttttttgcaggcatggaagagagggaagtttgtgtttaagccggggttgtgtgtatgagaacaaggaaagagtagcaaaagagttgagggtatgtagaatagattggaatgattgattctgaaatttcattggagtaaggagagaaaagcggatatgtaaaaggattagggatagtgaagacgtggtaggattaatggattgtaggtcctggaggggtggaatgcttgttgagaatgcagtgaggagaagggggccagagaatgagatgtttgaaatcaagattctggaggagctgcaactgttgacatgaccacgtccaggacatgatcatgagaggcatgatggggagagggggacaaatgattgaagacaggagctcaaagaactacaggcccagggttttggaagtgttatcgacatggatattggctttgctgagaattatgacaaaagtagttttggagagagtgacagtaagcgagcaactgggctctcccaggaatgtgggggaagcgacctgaggaatgatagatgtctgcaacaaggatgggcagttgtggtgtagtggtgtgttcagacaatatgagatttaaagctgggtgttttttaaagaaaacagcagcaggcagtaaactattaatttttacttaagcagaagtgttgaaggaatattttaagtcagtagagatgccttaagagatatttaagagataaaataattagtacaat

SEQ ID NO: 63973 - DNA, 1050 bp, Homo sapiens
ggaaagtgtggtttgatctgggagcacataggaggggcacctatcccaaacttggaggaagtggtgtcaagaaaggcttctccagagaagaaataaataagctctgaagtgtcatgggaatgagtgttccagtaaagcatttggaggaagagtttctagtaaacaacatgtgcaaaggtttaaatgcttgaagtggcatgtgaccttagggaccctcaatgagttaggattggtggagttgaatttggaagttagagtggggggttgttgatgtaatgacagttaaagtcagagaggtaaataagggtcttgtgggtcatgttaagaatttacattttatcctaatcttaatagttatctatcttatgatagaatctatagaacatgaaatgcagtaggagagtggtataaaggaaatctaaggtttctgatttaggcagctgggtcatataaaatgcagaagtaagagcaggtagagggaatgagaaagagagactgaattgggttttagaaatgtgtatttaaggtatgtagtacctgtagttgtaaatatgggcctgaaatgaaaaaaagagtttcaaatcttattttgaaatttgatagtgattgcattcattattctatactgaggtttttttcttttgttagtgtttttgttttttgtttgtttgttttttgactggttcttctgaatgtccttacattttgatgggcatagttaaggaattatggcccaactatatgtagccaagagagcaaagtttaagaagaacatagttaaagtgcgagagagaacccagtatttatttcttctgaaggcaattaggaaaaaatcaggagtgtttaccctctgatatcacaagagttgcttaaaagaacttgaagattgctgctaagtgagtcccatggccaggacatggcctaatggtagtctgagggaagtgtatgaatgaggttttggggtgagtgataagtaagagcttgtcctacataaactcaatctccagtattagagaggtctccaaagcacctaatttcattgaataaaat

SEQ ID NO: 63974 - DNA, 1144 bp, Homo sapiens
gtagttattctctctactacctctcccctctccaaatggtgtcttcctcttcacagccacactgctcataaaatagatttcctcccccaccttctccaaaccaccttagtccaattcccacacccaccacttctctgaggctgctgtaactacagccatcaatgacctgctaattgctaatcccagtggacacatttcagtggttggaatcctgctgtgtttgaaacagtgattactgcttcctgttctcttgaatttgcaacaccaaatcccattctattttctttcatgggtttcttttcttctacttgccccttaaatgttggcattttttatattactgtgacccatttcttctgtcacttatgcatttttcccaagttgtcctctccaatcctagaacataccagccttcaatatactgataattcaagattcatattccagcccagactgctgaagttcagacctgtatatctagccacctcctggacatctccatttgcatagatgaaggagcctctaaatcaatgtgtccacaacccaagttcattctggcctttccacttgctgctgttcctccacctgaaatgtttttctcacaggccccgcgtggctcactgctcacttcatttatcctctctgttcagtcagcaccttccccaaaagtccccatatgtgccttttccttccctggctttatttctcttcagatcatatgtgtctgaatctatataatatttgttacttgtttattgtttgcgcctcacccccaactagaatgtaagctctatttatctgtcttgttcactattatgtttgagccaatttctggtgtccaaatattaagtgagtgaatacaccatcccccacccccagactgatttctgtatgttttatcttcatgggtgacaccagtcccaccctcagtcactcaggttggaaatttggagttatactagaaacttcttttaccatcaccacatcctcactttcccatatccaacagtcaccagttcccgccagttttatctcgtaataatttctcagatctgtcttctatctctgtccctatgatcaccttatttccagccatcagacctctcttctgtcttattgcacctcttaatgtgcttcctgcctc

SEQ ID NO: 63975 - DNA, 1033 bp, Homo sapiens
tcagattggaactcactgagggaaaggactgtgtattatttatctttttattctcttcatctaactccatgactgaaacatagtgaggatttgataaacgtttgaataaatgaaagaataatgaatgacccatcgagatagatttctggctgaattctggtcattgtcatcaagttatggcataaaattacatttccaaaatctgaaaaatattagtgtaatctgcaaaatgtgaattcattatgtgctgtgtgttactgaacattgcattgttgcttttcagcaagtgctcatgtcttactttccctgttgtcctattaagttcaaaagtcgacttaacaaaatctaaacagaaaaaagagaatgggggaataggaacaagagaagattacatccatttttttttgtcttatgaatttgaagcattttctcaaatgtgaagaaaagggcactttttcagcagtaaagtaattgtgtttttattataaagtgtattatgttaggcatgtgggcaatatgactcaatgaatagttcttcaggattagtgtatgcctagttgaaacttaatgctctttccctcagcatgcatgtaggatctgaattttcactgtgaaagcaaatgctcctgttggagacctttatcatcaacttgttggaattcatgcctagaatattttaagttgaacaattctatcacagtggcatgcatagattgctgagaaaggcacagtgctaatgatgctgtagacatcttaaaagctaggaatgctccatgtaatgtagatggcagagaaaatgaagtgtgccagtctgttttctgttgcttataacaaaatatctgaaactgagtaatttctaaagaaaaggaatttattttttacagttatagaggctggaaagtccaaggttgagaggtcacatatgatgagaatcttcttgccagtgggaactttctgaagagtcccaaggtggtgtaaggacccagaaatttctgatcttcttctacatctaattgccctgggtcgaggcagg

SEQ ID NO: 63976 - DNA, 1045 bp, Homo sapiens
ccaacagctcaccaggactcaccaggggctctgctccttctttcaagaactatgagaaggctctagggagtgtctcacatgtgtttaaaaacaagtctgcacccaatctccaagtcattttctcatatatcctgtgtcttgctcaactgctgtgctctggggaaaaaaaaaaaaatctcctcgtgtaactctcttcatgccaacagaagcctggaagtcttctgcccataccaacataagtacagctagcagacagcatgtatgcagttctgctctctaaacacatgcatggccatgtgtttaaggatcaaggccttgtcctgaaggtgtccagctatacctgaggaaggccaggaagggaagtgtgcctaatcctggggtttggagcaaggacaaacatcccaatattgcaccatgccttgtgtaggaaggtgaaggtcaaatagaagggagaggcaagactgagtgtggctttccaatcaatcaaaaaactcacttcttggaatggagaagtgaggggtgagagaagtgagcaggagcatttagggaaaagtcacttctcatggaaggcaaaaatgggaagaaactttcccacattatatattgctttatgagatttttctaaatgctcattcacaaaggtgattataagcagccttttggtcttgttccacagggtagatgagaggttaaaacatgaatttgatcaaagcaagacaagatctggccaaggaaatgacatccactgaagaagtgtggaaaagggtcctgtgggaagtgtaaagatttgagccaatacagtagtgccaagcttaaaaagaatttcagccaacactatgaaagcactgtgacaggttttatacagatgcaagtgcatagccaggctaggaggaatctcttcccccattgtaaaggtgagaaatggcccaggagagggtgcaggcggcccaaagtctcacagcaggccacaaagctggtctccatttcctgaatcccattcccctccaactccacacagccctacagggcaggttgggatcccact

SEQ ID NO: 63977 - DNA, 1018 bp, Homo sapiens
ttttggcaatattgcatttcccagacaacttaagttcaatcatttaaacaaaaagtatctgatttaaactagaatctattacatgcttcttattcaagatgttgcaggatcaccactcaggatgccctctggcctgttgaggtgtgtatggatctaagttctccttcactggataattccagaatgttatgatgcttgaactcaacaatttctcctccttcctctcctcttcttcctccttcttcttcctgtgtctctttctttttatttaaatatactttaatttttagagaagttttagtttcacaggaatattatctttttaaattgcaaaagagagacacattcattttataaagtttaaaaatacagaaaataagatattaaataaaggctttgtatttacgtgaaagggatattgatgaggtaattgtggcatgaattgttctggattatcagtaagatttcattgtgttcattcttaatacaatgtttcctcattggttcagcaaaatctgaaacacttaacatcagagctgtctggtcccacctgtttccactctctaattacattaccaccttccctacaaagcaccattgatatcctcaagttctccatgggctgattttctaactaaatttcccagtattatatttattagccctccccctgacacacacacaatcatctgaggatcaggaaaatgtcttgtattctgaaccacggtgtgtgtgtgtgtgtgtgtgtgtgtgagagagagagagagacagagagagagagagagagagagagatcagatttattcagagttgagatgcttgctaaaaatggagactctggacctcacccaagacatattaaataagaatatctaagattgaagtcagagattctgcctaccaaaatatgttttatttttactttccatcaggaaattgacaagcatatttaaaagtagagaggttaatataataaactccatgtactcaaaactcagtttcaacaattatcaattca

SEQ ID NO: 63978 - DNA, 1040 bp, Homo sapiens
gagactcaggaagcagctttctttagaatgaaaatattggcctgagtgatggccagagaaatagcatgtgctgttatttggaaggtataaacacaatttggaggtattttttaaaaatatttgctgtttgttctccagaaacagaaataagactttaccctttttatgttaatcgagtttatcctagaggctccactcattctcattaagtgggatggaatatgccagtttctaatttgattgtttcagaaacttattttagcatcattttcaattctgaatcaaagagccaaatctaaaatatgcctctgtgaggagatgggtagttgtctgccgtttgatttagaagaaatcctcagattttatcactaggatttatcttcagatttaaaacttaaatataactagagctctatttgatgctgtcatagagttcatgcaatgtgcagacttataataaaatcctttcagtatttcaatagctaaagccttttagatagagtctccattgaaatttccattgaaattgccccctatttggttctactctgcatgtaacttttctggtctgagttcctccaatatatggtggtagtactgtgatcttgctagatttgatctggggactctgccataattctaacaaactgatagcaatgatgccactataattatcacaatatttatactgggaaagtatataaatatactgcatagcaataaggatttgcttaaaaaataactgttatcactactgatttgtagaaattgggtagaaggaaaaaaattaaaagggagagtgaaggaattatccctgtaaaatgcactttgtgttcagatttattttagttttgaaggcatgcaattacattatcttttctgatggcaaaaatcaagtttagcaatatctgaactactataagaaaactactcttttctagctgcatttgacctaatactgacaatttgcatttttatgcatttaaaacattcatacctaagttactactgacctagttttatggggtctgtctggaaat

SEQ ID NO: 63979 - DNA, 1471 bp, Homo sapiens
tttgaaccagtaagaatttatatccttataaagctataagccagtggcaagaaattctgtgtaatttagagaaagattcattcttcttaaggcaacacttggctatttcaatttcagaattatattatatataaagttgaataattttatttttaaagcagtttgtacaaatctttacattccaccagaggaataagcttctttaatggcatattagacagtttaggaactatattaaacctttaaagctctgaggtcacatgttactaggttcatttcctgataccaagcctcagttgtgagcttcaagccttacggagcagcttactcacactgatgagcattttgaatttaggccacacacacacaaaaaaggcccacagatctaagctcctgacaaaatataacagtctacctacatcccaggcaaaagtttctgagagacccatagctaataaggttataactttgttctgtgttgctcttcattcaaggcataattcaatccgaagacaactcaacttgtcaaacccggacttcaatatccagcagcttcaaaaacaggaacagttgactggaattggtagaattaaaccagagttatataagcagaggtcattggataatgatgacgggagacggagtaacagcaaggcttgtgggaaactgaacttcattttaaaatatgactgtgacttagagcagctcatagtgaagattcacaaagctgtcaatttgcccgccaaggacttttctgggacttcagatccttatgtcaagatctatttgcttcctgatcggaaaacaaaacaccagactaaagttcacagaaagaccctgaaccctgtgtttgatgaagtgtttttatttccggttccctacaatgaccttgaagcacggaagcttcacttctctgtgtacgactttgacaggttctctcgtcatgacttaatcggccaagtggtggtggatcacttcctagacttggctgatttccccagggagtgcatcctttggaaggatatcgaatatgtcaccaatgtgagtccagcatttcttcatttttgtggtggggggcatcttggttagcaaggaaacagattacttacacattatcttgaggacaaagtgtaaaattcctgtcaatgtacatgtagcagttatttcagaacctccttgtaccttttcagaaacagggttttaacaatattgattttgaagtttccaagcattattccatgaaaacaatattaaagaataacattctctcttttctactttcagattcttagctagcccctaagagacagcaggtgttatctgtcctccgtaccacattttctttagagctttttcaggttgtttgtgctgaatggaacctggcattctattaactgtagtctgcagctaagagaccattacctgactctgacagcagtaggtacttacctgtcttctgaggttggctcaa

SEQ ID NO: 63980 - DNA, 1452 bp, Homo sapiens
gtgttggcattccagaaatagaaaggaaaattgaacattcttaggtaactctgatattttaaagccacttgtttctttcacctgtccaaattccctgagataactttgttagctcctcttcctggatatgagctattctgaggccagcgtagctctctttctctgccatggcatccaaatggaccaagcaccaccgtctttattcagctcagacactgattcagcttgagtctggagcctatttagtgaaagactaatctctgcctaatgaccaaatacctgcaccagtaccctcttatcctcagccacttttatgaactagggactcacccatgctctgattgccctgtgggacaccttctctccacatgccacagggttccagtgccaactttgtgctgctatccaaataaacaaaatgtagcatgggagtctgctggcctttatcataatcatgaggaaagaaagaaaggagttggagctggataaggtgcagagaatagcagttgatgaaaccaaggtgatttgggatactggggaaggaataggtctctttatcttaaaagataataatacacataaacccaacaatggatgctggggaaagcaaggcttgtctcccaaatcccaactgacaaaatcaggaagcaacatgagaaggtttaaagaaacaaaatgggaaggctgcttatacaaagatacgaatggctcaggcatcaccccccactggggtatttactaagtctccctggttatgggagctgagacactgccagctgcagtgaggtgccttgaacttaagtctcatctcaggtatggtagggaggtgttggtcacaccatctaatgagacatcaatttatactttttgacaaatggattccataaaatagctggagaggttattagaaagttcaacgaggatcttgctgagagttgcctttagagactttgtggtgagagcaacgttgactgcgcagtggctgatacaaatctggataaggctgatgatccctggtgggaacgactcctaggacaggttcctgtggaacaagaatatggagtggcaggtgatggagaccttctggccctgagatcactgccatttcagcattctcttgggagtaagagtttcttttccattgttggaaaatcctggatttccatagggttaaggagaatgtgaaattatttatcagggaggaaaaccaataaagctacaggcttcagatttctcagttgtttcctcaggcaaacaataaatcttctgagcattgatctaagcctttggatggccacgggagagggtaggtcctgtcaatggaattacaggctatttcatagtctgccatattattacattccattttaaaaaatgttatttggggttgtggggtttttttttgtatagagactgaacataaagagctgagatttgccatgattctctttt

SEQ ID NO: 63981 - DNA, 1424 bp, Homo sapiens
tatttgtctttcaattgagtagaactttagaggtccttcaatctagcagataaagctgagatgaatggccattaggacattcagctgaggttacatagctgaataatagccaaatcaaaattaagaccaagttttttaaataatcatttcagtctgtgcaggaaaaggtggctcaaaatgatcatatacactggtttacttctccttcccctctttacctggctaactcccactaagctcttaaatcccagcttatgtgccatttcctcagagaactctttttctgagccctggactagtgtaggtttttctggcatttgtttccatgacactctgtatttctatcattactcatgcttcttttgtgtatttgttcaattttctttctataagtgcaaaacccacatttggtttgcttcctgctgggtgctcaacctctagaatggtgtctgaaagttagatatttaataagcacttgctgcataaagtgaaactccttatgagggactaatttgttgagtctctagggactgcttgagttggaggctgttatgcagaactgaactcataaactaatcttttttaaaaaattctttgtttctccaaggagagtgtgagttttataaatgttggcactcaaataaaaattaatcctcatgctttcctatgaaagaacaaaacggcaattattgagtgtaaaaatgatggtgtaattaaacctctcaactactgaagccagatcaataatagtacaatacatctttgtgaggattttatcagtcagcaagagagaagacagcatcaagggggaaggtcaaaatttcggagactatgagtccagtgttctgggttaatgttgtctgtcaggacgatcctcttggcatttttagtataccccacttactagtggctttctgaaaaagtaggcattaagcacttcaggaatctctttcttggtggttggcttagaaactggttcggagactgtctctgggagctatgatcacctcagttagactctgatttggagaagatgccacagttctcatgtaatgacagtagaagtaatgaatttccctctatgccaatacagattccagttcagaagaggcaaggacacagtttacaacagcatagactttcttttaatgttaagaacttaaaactcttatttcagcaaggtttgttattttgtagtgactgatttggagactttcctgttctgtctcccaaaggcctgaggccactcgcagacctgatggaggtggacacctggaaccacccaggcagggggaatataagtattcagggaagtccagagtgcttgctcttcatagtcgaatacaaatggggcaggcaggctctgtgattgaagatatttattaatttgaatcccttttcatttcattgtaccataagtcata

SEQ ID NO: 63982 - DNA, 1037 bp, Homo sapiens
ttgctgccttggcgttgtggctaccaaagacaggtgtctgcacagcaggctggatgctcctgagaggcaggttggctttgcagagagctgaggtggacttttgctgcatccccttcacacagttaaattattccatggctgaacacatggggagggttgagctagatgaaaaaaacaaatcttctacaaacctggaacagctgtaaaagaaatagagttgtcaaggtcagcaatttcatctctgaagaaaggtgagaccagtaagggagaacattcccctgggactacatttaatggtcttctacctatggaagtattactatccaaaatagtgatccagtttcctgacagaaagccttgtcccatggattggcatttgcttgcttggaaaatgagttttcaacctttcgagaatcgaaacagtttgtggtatttacaatacagccttactgtccagtagctaagtgtagtctaattctaacagatggctctccagggaaattttccttcagattggattatgcttccaggctgaaattcactaattaaggggagtctaaataaacatagtgggggagtgagagggaggggaaggtaggctgtttcttaggaagctgttttggaaagtggccatatttgcaatctttatctttccagctccacacactcagctatgtggagaatctaggccactgctttgctaaagacatggtagtgctggatcaagggtcagtctgccttcagcaaggagctatgacttcgttttctataaggccctggctctctaacctggttttctcctatgttacctgtcttgaaatgtagcttccagaataaatgtatctttaagatgagcatgactgactttaaaaactgaacagatctatgaatttggctctggtaaacattgctaaccttcttttataaaaagtctaatactttggttttgaagtctttaatatgtaaagatactcctctattacacatttcttaatgcttaccagtttgagacctaaatagctataggacaagtacat

SEQ ID NO: 63983 - DNA, 1671 bp, Homo sapiens
tgcatgagtgggctgagaaaaatccaatttgcaagtcaggaagtgagttctgggtcaggaagttagttgcagttttgtctccatcatcattcaacaaatgtttttgaatactcactgtctgccaggcaatgtattggacatcaagcacataatggcccttaccctcttggggcttttggttttgggagatggaaatgtgggaagaagggacagatagtgaaacataacattgcacagataattactcacatgtgttattggtgctgcagaggaaacgtaggcaagcgcttcctgtggcacctaacctggcctggtatattaaagaaggatgcttggaggaaataacattgaagctgagacaaaaggatagttaggcatttgcctgaagaagggcagagtcccacgcaaaaggaacaggaatgtggaaaggccccaagacaggaacagttttggcaagttcaggggacaaaaagtgcagggtggttaaagatagggaaataaaatggaagagagaccagaactcaggaaggagcaagaataattaagatttttaagacaagaataagtctttgagtctttatgagtaattttgggcagtgaattgacacatagaaatttacttttttaaaaaatcactctggctgcagtgaggaatggacaggaggggagagtgaggggatggtcaatctattatagaaggccactcgcgtgtggttaatagacatggagaaaagtagcagattccagaaattatttaagcagtttcactgaggaataattgtatgtaattaactgcatatgtttaaagcacacaatttgacagtatttgacatatatatacatttgtgaaaccatttaccatagtcaatcaaaataatgaacgtatctgtcacctcaaaaccttgcctgtacccctttgtaacctctcctgcctccactccctgccacccatccccccaatccccaggcaggtgttgatctgttttgtcacactacattagtttagattttctaggattttatagaaataagcatcatacagaaggtactccgcttttacttctttcaatcagaataattatttttgagattaattcatgttgtatgtattaataattcaatctttttattgctgagtactattccattgcatagatatgccactttttgtttatcccttgcctattaatgaacatttgggttattttcagtttgagatattacaagtaaagctgccatgaacattcatgtgctttgtatggacatatgcttttacttctctcacataatgacctaggaatagactgctggattagatggtaggtgtatgtctaccttttgatgaaattgctaaactgtttaccaaaatgattgtatcattttacatttacaccagctatgaactgtgaaagttctagttgctctacattctcaccagcacttggtagagttggtctttcattttagacattctaagaggtatgaaatagaatctcattgtgatttttacatttccctaataacaaatgaaattgagcatcatttcatgtgcttatctaccatctatttatcttttttgataaactgtacaaaatctttggtcaatttttaatagtgttctttaactttcattttaggtttagtggtacatctgtaggtttgctatatagg

SEQ ID NO: 63984 - DNA, 1053 bp, Homo sapiens
ctctctttggaggctgaggggtcacagtcagcgtacccagaagagaagctgggacttatcaattaaccaatactgctttcaaaccgttttcatcaaaatattttttttttttgagatgaagtctcacgcttgtcccccaggctggagtgcgatggcacgatctcagctcactgcaacctctgcctcccaggttcaagcgactctcttgcctcagcctcccaagtagctgggattatgggcaactgccactgtacccggctaattttttttgtatttttagtggagacggggttctaccatgttggccaggctggtctcgaactcctgacctcaggcgatccacccacctcagcctcccaaagtgctgggattagagatgtgagccactgcgcccagccgaactatttccatcaaagcatggggaagtttcatatgcagcttcagggatcttggggctggcagctgtcaaataagcatgctgtgggaactggggagtcaggaagattgtggatatgtgcttctacttgtgcctagaggaaaaggtttcctcttgtttcacaacagccttggccagcagctttttgagggagtgggaagcaggacaaggaattttggtgtctgccagattgagacagggatcaagaactgagtgaggacagagcgtgaaagagtggtctcaggcctcctgaagcatttgttctttcaacagacaggctccgtgctagcactagaatgcccatggaaactgaaggaggaaaccacaggctggcagaaggctaagtctgtggcatcagagcaggaagcaattccgtgaaacagcgactctgctctagctacatttatttccctctgttcctggaggagtgaggggaagggggagacatccttttctaacaagggactttcctgaatacttggattttatattaattcatgctttcagaatttaaaggaactctttctgcacagagggagtcccccatcaggtcatgcaatgtttaacaattatggtttggccacattctcctagaaaaactacaggacctccccctt

SEQ ID NO: 63985 - DNA, 1365 bp, Homo sapiens
cttaatggttaagtatcatgaactttggtggggaaagaaactgaaagcccagtaattccctcggtctttatataagaagagtattatctgaatgtcgtttggggcagtggttatatttttaagcatctgtcattcatgctaattgaccagggatgtggctagccagggtcaagctcccacagtcagtgcaagagggccctgaggctttgggcagcctgtccgatggcagccacctaatgtaggatgcagtggcagtgctggcccacttttgagagcagccgctgagttacggactccttgtgtgggagctgtatgtcggactggagctccagactgctcattccctgcccagagccttaccctgtcatcattgattttatggggaaagaaagcatctccttttgtaaacaccacaccagcatcttcaataagatgatgcaatgggattaatgatgcactttccagcatcctcatcgattctgaagatggaagtagaaacttgagatgagactaagccatgttttgtcaacattttgcttctctagcaagcaaaatatcctcaaattgtgagtttacttgaaagatatgctggtatttgaatccccagggctgggaagattctattttacagacatcaccaggagtgtgacactcaggcctgagagtaaggagaaaggaaggaaaaattaatgagtaaccaaccactctatttcagagtctgttgtatgggtgagctggtggtgattggcttgcaaatgtgttttccaggaaaaaaaactctacaggagtggtgggaacaggatgggagtgggagggcacagagggaccaacagaccttccttttctttgcaggtctaggtctgaggatggcccagatggtgagcaattgtgtggctatttagtcaaatcccaactagctcagcagataactgaacatccctgaggggcttgggaaatatatgtgtttgtgaagtgctgtgagaatttacccagtgtagctcaatctgcctcagactgacttctgacataaatgaattttaagaaagtaggcgttttccttcttgaagaagcataaactcatattaggttagaatctcaggagtttgtattcagttgatgtctaggcacatcagagatggagaggagataaatgtctctccagcaaagccgctgggtttgcacacctgtccccaatatctacactgggcttgacagagggtttatgtagactagtcagaaagttgtgcagcagatattcaatactgaaatcaacgaatgcactttattactcacttgcctactatccctggatgacaataagacctagatctacagtttaaagttcagaaatatatgatgcttctc

SEQ ID NO: 63986 - DNA, 1168 bp, Homo sapiens
aatacatagctacattttgttaaatttctagtgttagggacatatttctaatgcccaccaaaaaatccaataatgtgattattttcattctatagataaagaaacaaatgttaaataacttacccaaactcatatggctggggtgtatgccatgcagatggcagagctgggactgaaccccagatttgtttgactttaaaactgacactaatttgaaaaattaaaagagtatgacaaagacaaattatctcctccagtttttcactggctagttggaaattctctgctgtctcttcattggccttattacagttcatgtggatatttaagatcgttttgtgacccagttgaaaactctaacctgcctgagcagaattagttgtcttcaatggttgcatttatttctgataaatgcaaagcatcactaggactaaaatagaatttggggtcagattccttcatggctggggagctctgcagctgtgacagatggatgagggagcaaatgctagagggaaaaaggaaagaaaaaagaatctgtcctaaactgaacctttgttcagacagttaagacttgcctcccagacaggttttatggattgctaggggtctcaatttgtgccctgatgtgtctgagtgagtgtgattttcaggcatccagacccctcctcccaggcccaccccgcacatattctgccttcacttccttgcacagtgaaacgctccattgactgcaaggcttatgaaatgaaaggctctgataatggagtgtaagcatttttgtcttcatgattgtggaaaaaaaaaagcgatgaaattactaagaaatcctcaagatggggtggggaaatgggaacaaatgattcgttgggaaaataaatgcttcagtctaaaaaaatccaagatggaataaaagatgtattcccctcccaatttatagaggagagcaattttttggtattttctcagccgaaaggaagaaaaccttaaatttcttcttttctgtctttatgagtctaaactatttttaagactttagagtacatcaggttctgatatcgtgtgcattttgtttctttaactgtagttggtattttatatggacttctgagcaaactgaattggaattctgcaaggtcaggggactgtttcgtttgtctttgctcac

SEQ ID NO: 63987 - DNA, 2550 bp, Homo sapiens
agaccagctctggcaccaacctgtgattctgggcaagtgggttagtatcaggttcaactacatataataaaaaccaaaacaaccaattataaattaaaaacaaatgaaatgagaatttatttctctctcttatatacaaaaagtctagaggaaggcagtctggagtatcttagcagctccatgatcaacaagagacctagacttctgtctttctgcctcacagtcccagtgtggctttgttccttgaagtcccctcattatacaatatggctgctaagctccaaccattgcatattttctaggccacaaaaatgtgcaaaagggcaagagccaaaagggcacacattccctttttgattctctttgaattctcatgcaagactgctatttacatttaatttagtcacaaaacttagtcacgtggacatgtcaagttgcaggggatagttggaaatgtaacctttttgttgggtgtcaatgtgtccaactaaaaaccagggttctgtttgcagagaagaggaaagtgaaaacctggagtcaaccggccatcattctgccactcacatcctcattcattcactccctccccctttacttctcattcattcttcccctacttatctttgctcattgattcactctcttatttattcactaacttgttctctcaaaaataatttgcactccctaagtaacatgtctgagggtccaatgctataatagctacagaaaatacagatatgaataagaaacagtcctttcccttgtagaacttacagactgtaaaataaacaaaagatgacatgtaaactaatcttcgagaggcacaaatacaagcatttccatccatataaagtgctacaaaagcgcaaaggagagagatgtttactgtgcttagaggagattgtgaagcatctctccttcatgctctcaataagtaaagagaactgagcccccgggaactggaaagccaggagggcagcagcagttatttactgaggatgcgtgggttccaggcagagagctttcctctgttctcctggtgcaggaagctctcttccatgcaaagccatctgagaggccaagactagagcctcacccagtgtgggcacccctgccattgatagtcaggtgagtctggttgaagtgaacacagggcggctgtggagaggcagagaggcagagaggccccaaacccagacaggggaaccaagggacatctttgttggaagtggggcaggaaggagaaggcaggacagggtttatggattctaaccatcagggcacccagatgtattcaagaagagcctaggaccccctaatttgcgggttcttaaggatagttctgcccgtgggccataggagcaaaattgatccctaagggagacccacaggatctatgagccacttgagaaggagctggagactggtgctcactgaactatacctcacttcttcagctcctggtggaattctcaaaggagtccatctgtgggctcattagattttgggggcctgtcactagcagtggcatttagaagagttgtaatagactttttgcacccttatgagccattgctgactttaattcttattggtaattaggagtatcagagagtgttaaagctctgtgcttctcaggaaacaagaaatgagaaaggagtaaggatgaggtgtgtggtgtagggctgagaggtgagccctgattcatgcacaagcagttttttttcagtgacctgggcaggggagtagtcctgggtggagtgttgcacacgggtccctgagtggcagtatatgcacgtgttacacaaaggagagtgcagggagcaggccttggaggccttttccttcactgtggagaaaaagtgtgatataaattcattcacctgagagatattcctcaaaccccaaacactcagctttttggaaatctgtgctccacagttatgtaactgaaaagtaaatgccattagggttaaaccactgaaacttagaagtcatttgttacagcggctaaaattactttggccaatacaatggtcatttctgaactgttacagcagaactaaggaaatgaaatgcctgtggggcttatatgaagggcaagccttcatataagcagggggagggcaaaccttcctataagcagaggcagagggaggctgcctcttccccgttgcttcctgtctctttgaagtacacgtctgggactccagatccatcctgagagaggaagtgatgctttttcttttaaaaatgaacattgagctggcagaattggggcaatggtaccagatgagatgaaaaacagtattggagaggttggccatgcttcgttagcagctgtaaggatggaggaggcaacaggcagactggccagaaacattcactttggagttggaaggacctatattcgaattgctgtcctgccactcactagatgtttgtttttccccttctgaacctcagtgttctcatctgtaaagtggccataacagtgcttgtctcacaagagggatggtgaggattaaacaatctatttatatgaaa

SEQ ID NO: 63988 - DNA, 1034 bp, Homo sapiens
atgacctaagactttgggggattattgggaacacatggttgtattttgcaatatgggaagaacatgagatttgggaggggctggggtggaattatatagtttaaatatttgtccctgcccaaatctcatgttgaattgtgaaccctaatgttggaggcaggacctggtgagaagtgtttggataatatccctcatggcttggtgctaccctcatgctagtgagggagttcttgcaagatctggtttaaagtgtgtggcacctccaccccccttgctcctgctctgccatttgccacactggctccctatttgccttctgccataagtaaaagcttcctgagacctccccagaagccaagcagatgtcagtgccatgcttcctgtatagcctgcagaactgtgaaccaattaatctgcttttctttataaattatccagtcttggatatttctttataccaatgcaagaatggactaatacaccaatcaagaaagtaaataccatccaaagggattaagattgactataaattttaaaatatgaacattctgaatttttcttcctgttattaatgcttaatgaagtcctggaaatgggaacggagaagtggatccaaatacatccacatctgcgtgtgctttttgctggggctttatctgcattctctctctgctatggtctgagtgcttgcatcctcccaaaattcatatgttgaaacctaatccccaatgtgctggtattaagagatgggaaacaattaggttatgagggctctgccttcatgaatgggattagtgcccttataaaagaggcccaaggaaacttgtttgccccttctaccatacgaggacacagaatgatggccccatccatgaggcagagagctagcactcaccagacaccaaatcagctagcaccttatcttggactttccagcctcaaggactgtgagcaataaatttctgtcatttataaattatccaatctaagatattttgttatagtagcccaaaaggactaagacatccccctta

SEQ ID NO: 63989 - DNA, 1235 bp, Homo sapiens
tgttgtcaatatttattataagcacacttataatcttaaatttgcactttatcctagcctccgtggtgcctattgtatttatgggtgagtagttggaggtgacagaatataatctttcagttgcatttaaagttttatgtttcttaaagttacagaaagttcgttcccaggactggggctaatggctcttctcctgctccttacagataatgtggcacttccattgcctagtatggaaccaatatatcacatgaatgtgcacttacctagaactagtcttatatcaggaatgaggatccagggatccttgcaaagaaagaaataataattcagagaaaccctacactctcaggataagaagggggaaaatcaaggttcccgccatcaaccaaatggtttgagtccaggcagaatctaaaccatcactcacagtgcgccatctgctccagcaccagccctcctgattcttttgcaggtcagcaggcatgaaagagttaatagcaaaggccatgagaaacttgctcgctgttatagagaaatcacttttagttccagttgctgctgccagaggagatgcttgagagcaagataggaaataataaggaagaaaaggacttttgaatcacatgagagtcttcgaggactactcagcccagatgttcctcttattgcttcaagccaataattctctaaagcccccatgcacagatgtagcttccttcactgtctttacagattgtgtttgaattcatggcagaccaggagactgtcctgctgagtatggacttcctcagtagcaggaactagggacagaattaagaataatataacatatatgaaataactgtattccataactggaaatacagtgctgagccctgtgctatagctgaggtggatagtctctgcactttaaaagagagtctttgagcaactgcagacaaagactgatataacttcttgattagaaaatcagctgaaaggccgggcgcagtggctcacgcctgtaatcccagcactttgggaggctgcggggagtggatcacttgaggtcaggagttcaagatcagcccgactaacatagtgaaaccctgtttgtactaaaaatacaaaaattagctgggcatggtggtgcatgtctgtaatcccagctacttgggaagctgaggcaggagaattgcatgaacccaggaggcagaggttgcagtgagccgagactgtgccattgcactcca

SEQ ID NO: 63990 - DNA, 1038 bp, Homo sapiens
tcgcacttctgttcagacttcatctctgatttcagcattagatacagaagctttttcctgctaagtcctctcctcccagatctaattcacagccagcaaatccagctgtgggcagtctttgagcatttactctaaagctctaaaggacccaaaggtgatgcaagagccacctccctccactcagaaaggaaacactcactgtgtccatttggcttcaatcagacaaacccaagacattcagagggatgaaccgacctgaaaaatatccctaaaaacctactttaacagaaagcacaaagtttcaggaaagaatggaagaaattatagaaactggaattatacaaactagtaggggcatggaggcatgcacacagcttagaagagaaggaagtcactctatctgcttcagtgtcatgatggtgtgagaccttgaccaagaatgtaaatttaaaccttctgggaaactttgctgtgctccagcagacaaagaaaaggaggctgaggaaagtgtcagagccaaggtggactgataggagggaggagcgtgtctaatctcaagcagcctgctctggtgcaaggacacagccaggaacactggaactcaggaacactgggacacacctgccaaggctgccagagaagcatttcatgggagtggaccccaaggccaagtcacaggaattgcagtcaagcaacatcaagtcaaaagacaggctgcaaggtaggaggtgaagacatgagcagaaggctggagagattgagcagagacttcaaagctggaaatcagactttagcaaatgagaggtcaggacaaggaagcaggggtatgttacagagcagacaagaggcagagcccaccctggaacatgttattcacggtgcctaccatctcagcctcccctgcatgcatgtacaacttcacccctaatatctgttgaacaagcagccctaaccaccgaggtttgtaaaatgtcctggccacaggtgattggatcaagatggggacatgctcccagaaagctgtttatgggctgtcca

SEQ ID NO: 63991 - DNA, 1043 bp, Homo sapiens
gtcttagtcatacctagcaagagctccacacagcaaggatagggcatggggtccatgttttagggggtagaaggagtgaaccacagagagcacagcccgtgcacatggtaggcacctcaggaagtgctgaatgcatgaaagaggctgcgcagcagacaaggctcctgggagccaaggccagtgtctccagccagctcagctgaaatcagcagctcatgtgctccgttcttcaccttcagcatgcccacttcatcctgaaactctcttctacccaccacctcatctccagatgcagatcctaatgtcccagacaggactgttggcaggttccaagtcaagtgaaggataattcaagagccacagtccaatagtgcaggagccatatctgctctatttgccattgtatacccaatccttcacatagtacctggcacataggaggtactccataattctgtgacggttgttgaatgaatgcatggattttgcataactattcaggcaagagcttagcttctatagagaatttggtcatgattggattcatttgatcagtggaagcagccattccagtttactatagaagtaacattccagttactatagaagtagatttagaacctaatttggcctattggctacaaaaagggtacagactctgagttgtagtgagactgccagtctacctgcaggtcgatgagggctcctccatcctccctgggctgagatttaatagtgcctctttttgctcagcctgctctctaatcctcagggtgagagatcagtatgaactgacaggtctgagaaatcttcctaggggaggaagaagggtttccagctgcaaggagagagcagcgtgcagtgacagtgaggcaccaggatgtagaacaatgctgccagaacatattccctgaggtttgggaatgaacttcttcaagggctgtgctccctttttgatgggtcctagtgggcctctgtgctggtcgtgaccgacttttcttcaatgatccagtggaggctgcaatgtattttgcttaaaacta

SEQ ID NO: 63992 - DNA, 1048 bp, Homo sapiens
gtttgtgattttccaaagcaggattagcactgggacttagaggtcagtggctggagacagacaagagggtggcttgttttgccaaggagcttccaggagagtcttcccctgctgggattctgctagggccctgggctgtcatccacttatcaaagtcaggatggggtcttttcactttgggaacccaggagagagtgtggtatttaaaagcatgagtgctggagctggcttcactttctggctttgccatttttgagttgtgtgtccttgagcaagtttctaaattcctctaaacctcaggttattccactctttagcaacacaacaatagatcctacctcacagagctgtgtgagacttaaatgaaaaaatgaatgtaacatgtttaacacagcatctggaacttaatggatgctaggtaaactttgataattgatattattcaacatacatgtatgtacaagaaaaggagagaggcagaagggagaaatcaaatgtccaaaaatgtgcttcagcgggaaccagggcctctgaaagcatatgtggcatgggctgggactgcccctgggcttcactgtccagccttggactccacggctgctctctgctctctctgaccttgacttcccttggggatggtcgcctgggaacctctgactgcagtccccctctgtacccctcctccctgaccctaccctctcatggctccagcctggtgctcctccaaaaaccttgctgcactgctggtaccctgaatatgcctgttctcctcctacacttccaaccatccttttctctctttctcatgggctttcgctggctgacggtgggatatagtcatgcctcaagtttctgacctaagtcactttttgtttttttctacaccacacaaagcagcatctgggaagacggcccacagggatgcaactgcttcctggcctctttcagccagggaggcaatttttctaatagacaggagtcttgggctgaatcctcttcagactgttcctaacactggaatcccagaggcactgtctatacagtgggg

SEQ ID NO: 63993 - DNA, 1060 bp, Homo sapiens
aaggatgacaacatgccagttccacatgtttctactcacccccttgaacttttagcatctgtcatgggaataacatgcgctggaagacgggggcttcttcagctcggtcctggaacaagaagacgcagaagtagatttctacctgtctggcagagctgcagccaaccacaaactcatcagcaagaaattagtgtgtattgttgtaagcaactaagatttggagttgttattgtaagaaaagctgacaaaatacagatttaaactcacagtgttcctccatctctgcctgttggacatagctaccaagcttatttgggtccaaatgcggacttacttctctccacctgttaggaaaggctttctctcttcattattttatcatcaagatgaatctcacaacctactggaattccagtttaacttttcttttccttctcttgccctctccctggaaaaagttttacacatgccgacacatgtcagcaaacctctcaacctcacatctgtgctggtcaagcggctttgaagacacagctataccagtcagagcacaatcagtttctgacatggtcagtgtcgggatcacacagtaatgctggttttaaaagacttttctttctcagctgttattattcagctcacttaacaattaaaactagaacaatgccttagaatttttaagaaaattcttttgtttccatcctgctggcaccgattcatcatcctttatgacttcacattcccaaatgatttgtgatgtaggttttttgctaatgtactttcagttgttttgcttctgatgtttcctccccacctaatcaaatgcttcaaaataaccataatttctaaacccagtaggacataggacatgcactgaataatatgcactaaaatttattaacagaaagccctttgtttttaaaactctgaaagctaatggaatactcttttttactttagaaggcatgctgtgttctgtgtggttttcccacagatgtgtttttaaatgttgcattctgttaagactaaatgttgtatttgcaaagattttactccccca

SEQ ID NO: 63994 - DNA, 1023 bp, Homo sapiens
cagcctgtctttttagcatctaatcagttgtcagcttcttcaggaagcattctgaagatcctgtggtatgagctaaatgcttctcgtctgtgctatcctctcctagcaccctgtgcctgcccctgacatagcatttggtgccacttgatattatctgtgtgtgtgtcatccccagcacctcccactgctccttgagaatgggcctaagtgttattcatcattgtataacaagcacctggcaaaatgcctggcacaaagtcagcattgaataagttcttgttggacagaatttcaatttcttctatcttacaacttgtaaaatgatttttacaagttttacttactgatttcttagataaattctccatgtcaatttttcttcaaatctacaggcatagtggttctattaatgcaccaaagcaactgagagctagctctgaatgccaaagagccaggcaacacccatgagaatgaagacagtggcagtgaaggtcccagtcatcatctcagatggatttgcagtgtcatgagggctcaaacagttctcataaaggtctttataagagacttaccttagtttaaaaggcaggttgggaaacccatgaccatttcctccagaaagcacagaattcctgcaagcctggggtcactattttggctgccatgctgtcagcttatcccagcaatctttcaaggtgcttcactgtatggcatcatttgctgtattgtaagaattctgttcaagtaagaatcaatcaagcttcctttgaaacaatcactttgcataaggaaatgggagtttcaaggatgtatttatttgttcaacaaatattgattgaatacctactataggtgctgaagatacatttttagggacaaaatagtcaaaaatctttgctctagtgaaacttgactagtgggagacacagatgtattatgttatagtgaaggtaaatgctatgaagaataaaatagggccgggtgcggtggcgcacacctgtaatcccagcgctttgggaggct

SEQ ID NO: 63995 - DNA, 1118 bp, Homo sapiens
gccttctttccagattgggtttggtgaacctgaatggtccagccaccttctgcaggtggcccaaggtgatgtgctgcagggaagcatgtctctcatgccaagaaccaagatcggactatgaacaaaaacaaatgatagatatagtgacagtaccaagagtaccaggactcaatgtttcatatgaagcccttggtgatgaggacatagcatctgccctggaaatcgttattccaacataatattattttctagaatgccctggaaggacagaatatttaaaaatatatccaggtgctaaataggcagcagatctcaattcacacatgactacctttgagctaatgactgtctccagaaaataactgtgccccaagaagtgctccagatttgcaaggaatagccccaagagaataccaagacaagcaggctgttccctggaaaaaatctaatgcaaggagggctagttcacagcaaattcactgcctcctcccatgcacgtggtagagagtaccagtatcaacatggccctgttttctgctaaaaccagattttgaggaatcagagacccccaacactactcactcagtagctagcagccccttcctttcaactgggagtgttattagaatgaaaagtaattagttagaagggcatacatctcagtggcatgagcattgtggaatatcctttcctaggcacattcgtccactaagggaacagcctcagaaactggtacagcaatgggtgagatgagatcatggagagagaacacagccatcccctatagaaaggcacagcttttgggcttctctggcctgaatgccttctggggtatttccatatgcaacagcccagagtcatagccttgggcaaccacacatagaggtttccttctcacttcagacacatacatcactttcacaccacttggggatggaaatacctacaagagtgaaggtcaagggccctccccaggcatctcattcattactcagcttccttcctgaccaagtctgccaaccaatggccagctatgcgcctcatcctcattgcttctgcctccacgtaaatgaaaccaaaggcctcagcatatcctgggaggactgggggctgttacc

SEQ ID NO: 63996 - DNA, 1025 bp, Homo sapiens
acagtagtttagtcttctgagaagcctcctgtctcctttgatacctgtgaccctcagtcatggcagctcctccatcaatttatccaatgtgaggatggatgacactcacctccataacccagtctgcagccaggaaagtgtcagtagaggtgaccccacctttccaggcccatcatatgtgggtcaagaaaggatcatgtccaagaccacagcattaatgtttaataaggcttccatttctattgaaaagttgtccttcacctgcagtgtttgcaactgattgctagcctgaggaacactgggcaagaccaagatgcatcatagtgtggtggacagagccatgagctggggctgggtcccagagctctgctcctgccgctgaggctgaaaccacccctgctggtcacagtttcttctcacatgaggaagggttggcctactatgttctatgctcttccacctctggtgtctgtgtgtctgtgaatctagggaactgcttgtgcccagcactgaggaaaccgggcacctggggtgggatctatgcaatcctagacacacgctgccagaaatccaagcacaggctaactctggagggtaggttttggtgatttccacagacatcagccgtctctttaccccctccattgtttcttagtttccccttcaatgggttttcatttttaataaatggaaaggaatttgactttgagattgtcctgaaagcccttgtaatgaccagtgatgtctagcatggattataaaatgacaactggcccactaaacagaggaaattccattttgagttaaataccaaaataagttctttcaatataccctaaagagttcaccacagtcctacaggtaagccagatggatgagaggagggcagcagaaaggagagcctcctggatggggagcttgtgcacagagaagcaggtattagatgaagaaaagacagaaagacaatctgtgtggttggttcacatttggggcaggaaactgggacccacagggagggtgctggg

SEQ ID NO: 63997 - DNA, 1030 bp, Homo sapiens
cattcttgctgtgtcctcatatgggcttttctctgtgcactaacattcctggtccaaatttcctctttgtataagggcaccagtcacattaaagtccaccctgattgtctcattttaactaaaacacctttttgaagaccctaactccaaatataattacattttgaagtcatgggggttagggctctaccatatgaatctgggggcaacacacttcagcccctaatagttctatgtttcttctctttccccttccacagtgctgtctgtcccagaggcagcaagcccacagctctcaccaagcaccaatgcccagattagccttcccctcaaatttccaagattcaggattcaacatgttacaggtattattctgcctggaatggggtcaaataggtggcaggaggacttgaagaattcactagttacaaaggggagagacctttcaggctgaggaaactgcataagcaaagataccacatgttaaatttcatggggagcttggagacaattagatgtggctgttgtggaggatgaatgtggtagatgccaattgttgaaggaagaaaggttgaccgaggttatacggtaaaaagctttcattttggcataaaatcagccaacactttatctaaagagatgaagatagggaattagaggctgttccaatcactcatgcaggaaacaatgcaattaacttggtaaaaggttggaagatttgaagatgacttacagcaaataactatcaggaagggggaagcaggagaggtatgacaagcaaaagataaagggaaaaatagaggcaaagagaaaaaaaaacagaaggaggaggcatcctgttcatatctaaatgacgaattccaatatcccagaagggattctgttgactggggttctgcatcctcaaaaaggcaaagtctcctccagactttgctggagttgactagcatctctcagcaaagtgagggagtactggaagcagagaaggctctagatatcagaaggtcggttaacgtggaggcacagcagc

SEQ ID NO: 63998 - DNA, 1084 bp, Homo sapiens
taggtatactttaattagtatcaaagtatgttcacaatatatctgcaagtgaaaaagatgatacaaaacatatagtaaaatcacattttaaaaatatatatttacatatgtatgactaaatgcttgggaaaacttttaaaaactgatatactcaagtatcaatactacctttgaatttaggaattatgggagatttcaatttttcccctatttgatgatgtgtaattttctaatccttttctataaatgataggtatttatattatttgggtaatttaaataacaagcaataatttgcaaatttattttctgactgaagcaagggctggaaaaatgtacccaagcaacgagggcatacattcaagaattccaagagttctcaaaaaatatatctgtcatgctgggaagatgtcagacctacacaagtgagtacaagagtgcagtgggtaacttggcactgagagttgaacgtgcccaacgggagattgactacatacaataccttcgagaggctgacgagtgcatcgaatcagaggacaagacactggcagaaatgttgctccaagaagctgaagaagagaaaaagatccggactctgctgaatgcaagtaagaaaactgcatcttttcctagcccttctagggactattatgctcagaaacacacagactcagagcagtcagggagcatcatagagtaatgagagtaagaattggaggtgtgcttttgtgtgcattgctgagagagaaagctatacagagaacaggtgtccaaagagaaatccattctcgcaaagccattctttctttcacacacagtgcctaaagcctccatagatggtgaaggctatagtgccaaaagtcagcccaaagagactacctcctgataaatcttggtttggtggagatgtgtggtcccagattttttcagggaaagtagcagtttggtggattctacatccagtacccaggctgtagatagcatctgcaaatgtaccaagaaacagtcttaaattggaaatggcaacagccaaccctcagggatgggaactgcagtgaatcactattgtgtgtgctgtctgaga

SEQ ID NO: 63999 - DNA, 1049 bp, Homo sapiens
ggggaggctgagggggcacagaagagacaggctgaactcagtgaagccatctccaggactgccagggaggcacatgaggtaggagccttctgttgagagtaggtgcctgggcccagaagttctagctgttcctgatcttatcatgggtcacagtatgaagaccatgttagttttctatttgatgatgattcctacttacaaacaggctggttttagattcttaaactctggccaagaaggtccaattttctttccctaccctcctgttttttagttccctgccatttcttcattgactttcaaacaataaaactcctgtgttttccccactttttgctcagttaacagaatagtcacacacacactttcctgggctagaaatcttccctttggccctcgtctgacaggtcactatatccagtagattttttcttgtgaatctctctcaagtgtactctttccacctgcactgctctctcaccatctctagtcttgattcctatgaaagcctcctcgctgaccttcctgcctcccatttctccctgtttcagggctttatcctatattgccacagagtaatcttgccagagttaccacatcactgctttatccccttccatggcaactgaaacctgtagggtaaagcaacccccccaaaaataacatataaagaaagtcctttacaacctgacccccgccagcctagctctctttggtttaagtatgaaagtaatactcacgaattaaataaaaactatgaatatggtatccgctatatgtgttgtgcttacttttatcataaaagtggataagaagccaacaattgaacacagcaactttgagtatccctcagcatctcgtgccgctgctgcctatccctatctgtctggtgctctgtccatctcacctgctattctgaaaacataaaatatacctcatgcatgcctgagtcatttatgctgtgcctggaacagagtagagaatcaatcttttctgacctgaaggaatcgtttatttgaaaatggagggaactatttgccagagatagc

SEQ ID NO: 64000 - DNA, 1085 bp, Homo sapiens
ctatgatccactgggcactatcagtgaggaggacttgcccaacttgttcttccccaagagaccaagaagtcactccatgatccattacaaccccagagataagcagctctatgcctggaatgaaggaaaccagatcatttacaaactccagacaaagagaaagctgcctctgaagtaatgcattacagctgtgagaaagagcactgtggctttggcagctgttctacaggacagtgaggctatagccccttcacaatatagtatccctctaatcacacacaggaagagtgtgtagaagtggaaatacgtatgcctcctttcccaaatgtcactgccttaggtatcttccaagagcttagatgagagcatatcatcaggaaagtttcaacaatgtccattactcccccaaacctcctggctctcaaggatgaccacattctgatacagcctacttcaagccttttgttttactgctccccagcatttactgtaactctgccatcttccctcccacaattagagttgtatgccagcccctaatattcaccactggcttttctctcccctggcctttgctgaagctcttccctctttttcaaatgtctattgatattctcccattttcactgcccaactaaaatactattaatatttctttcttttcttttcttttttttgagacaaggtctcactatgttgcccaggctggtctcaaactccagagctcaagagatcctcctgcctcagcctcctaagtacctgggattacaggcatgtgccaccacacctggcttaaaatactatttcttattgaggtttaacctctatttcccctagccctgtccttccactaagcttggtagatgtaataataaagtgaaaatattaacatttgaatatcgctttccaggtgtggagtgtttgcacatcatttaattctcgtttcacctttgtgaaacatgcacaagtctttacagctgtcattctagagtttaggtgagtaacacaattacaaagtgaaagatacagctagaaaatactacaaatcccatagtttttccattgcccaaggaagcatcaaatac

SEQ ID NO: 64001 - DNA, 1062 bp, Homo sapiens
aaaggtgaatggagcatactccttgctctctagcagttaatctagacagggaggcagacacattgagaaataatacaaattattatcatcttcataaataatatagacagctctgacgataaaggtgtgtaccagatatgacaggagcagagctgaggcatccagcaccttcagggatgaggggtaatggtgttaggaaaggttttctggcagtggtcatttggataaggccttagcatgggtgggatttgaaagtagagatggagaaaagcacccacgtagaggaagtacagaaaatggggtatttctgtatgcgagggtaggacgtggtccagtgaagctggaactcagagtggtgaggactatagcggggaaggttaactgtattagaggactttggcagagctgcaaaatgcagcttctctcctgaaagcactgtgaagccgaggaatgtttgagagcagaggagcatgtcatgagctccatggaacatgtcttgcctgcacagggaaagaaagacagattgcagggaagttggctagaggtagaaagcccagaggaagcagcttttgcaatctggctgagagatgatgaggttctaaactgtggtgaggtgagaggtaaggagagtttggtggaatgttaggacctattcagggagtttgaatggcactgtagaaagagcaccaaatgagtcatcaggaacttaggttcaaatctcagttctgctggaagggaaagtagaattctctgccccctgccctgaaaagtccacatccccaggtggtggtttggttttttgtgttagcctgttactataaaaagaattcaaatgtacacagaaatagaaatagtaaaatgcatcctcttacccatcatttagcttaacctcttgcttgtattattttttaggggggcaatttttgagatgaagctttttggaaatattcactttgaggttgcatttgaagcatttctctgaatctgtttatgatctggttgaggcaatgaaataatttcacgtccatttgttcctccctggaggtaaattgtgtgtatgca

SEQ ID NO: 64002 - DNA, 1048 bp, Homo sapiens
ggtgttttggggtgtgtgtgcctgtgtgtggtagggggaggtattgtccagcaaagccctgctgtggccaagttcttcatgagaatctaattatagacaccagggagaaaacagtcagctgtctttgtttctccactgacattctagtgaatgagcctctgtacagaaaggcaagaatggagtgaggaaagttggttattttaactttggcacctaaacagtcagaggctccaaacaccgtgaccagaagaatgtgcccaccgcttttcagtttgaggacacagggaggaagctgctgcctttttaaatgcattggattcggaagttgtttaactcgttctcactctgatgttatccggtggagcacacatctgctgtcagcagaatgagcttctgcatttccggaggaaagctttcagggagttctctttgaatgctctgaagctgagggtttatgttgcaagttgttcatgccctttctttagaggataaacctgagtgtgtggtatgagcaaggaatgaacggacgttgggggctggagtagcatcatactcctagaattcaggctgtttcctcttttgtggctgcctttaaattggctaagataggtatgaatttattttcacacgaagggattttaggctgagtgtttttcagaggcaggaagggcaaaagcagctgacaggttagagatttgacattgtaactgcagaaggacagaagaaccaggaagtgtccagcttggaaggggcatgcagatgcccggaccccgactcccggacactgagctggctggcttttgtgtgagtgcagcagcactcattcagcaaatctgtactgagtttgggtactgggtgtatagtagtgagcaaaatagaaccagcctcttgtggatcttctacctaatactggagatgtaggtgaaacagtcccaggaaataaacctcagattacaaacaataagtgtgcctggaggaagaacagaagacacgggactgctgttttgatggagaagggggttggggcggtcagggagtttgaggaaat

SEQ ID NO: 64003 - DNA, 1032 bp, Homo sapiens
aacacacctctaaaaatagctccgagcagggtctgtgggacccacccactgctctttcggcaagagttcattttcccaggaacagaaatcccagactgtcagcatcttcacactgcttcctggcttccagcactctcagtgcttaagcaaattccaactgtaggtcacaaagaaaatggaatcactacaggtcccccatgcagttggctcaggttctgcagtaaaaagtggaattaactcaagctgctaatgtgagactttattctgtgtcatctggtgctcaaatggttgatctagtagcctggccacttgggccagaagagctgcaaaggcagacacggaggtctcctcactccagacactgacttgccttgcattcatgttggactgcagtgaaagttacagaaataggcagcagcttctgtgaaggctgttcctactagttaagagcatggatcctggatctagattccttgggctcatatctcacctctgtgtagacttgggcaatttatttaaccttcctagaattcaatttccttgattatatatatggataaacaattctatagatagatagatagatagatttttttttttttgagacagagtctaggtctgtcacccaggctggagtgcagtggcacaatcttggctcacttcaacctccttctcctagcttcaagcgattctcctgcctcagcctcccgagtagctgggattacaggcatacaccgccatgcccagctaattttttgtatttttagtagagatggggttttgccatgttagccagtctggtctcgaactcctgatctcagatgatgcgcccgcctcagcctcccaaagtgctgggattacaggcgtgagccaccgtgcccagccaattcaatgtatgttaagtgcttaggaagcactttataagtgttagagttatggggaggatgacatcgatcagaactgacaacctctggttactcgggagccaggtacccaaccttgattctgaaaagagaggtttttcaatcctat

SEQ ID NO: 64004 - DNA, 1375 bp, Homo sapiens
ctatttctggccaacacacccgagatgcctgtacattatgtttcctggtataatttagaagctagaattctgccatctctgacatccagcacctgtaactcctgccagctccttgaagagaggcctcttttacccagtgggatttaacaaactggcatcacaccagggtcatttgctgaacaacttgtgggcactacagagcagcacagccattgttggttttgtggactggcagcagcacttagggatcctttgactcatccctgcttttctctgtcccttcctccatagcagctctttcacacttttccattagtcttcaaccttatactcccctttcaactgatgtcactaccaatgtcataggaaaaaaaaaaaaaaaccagccaaactgagatgagtctcttcaccctccctccctttcaccgcaaaatgtaactgtatttcagcatcctgtttcatgggccaggagtcccttctctcagccaaggctatcccagtatcctgtccttgacccaatcctgttccagctcctcttgttgctctgattgtttcttctctcagctcctccctgcctatctgtcccttgcccttggtggaaaatgcttctcctcaattctcagggaaaaaacaaatcaaaactatctttgaccctgtgcttgtctcttcatgctgccttataacttaccttcctttcactgttaagattcttggtgagttgttagcctgctcgttcatctctactccctcctggtcactcctgaagccagtgagcactaactttgttcctatagtcatcttttaaattccttctgtaatgttatttttgctgcctctagttcccaggcaatcttccccatacattttcctttgtattcatttccatttggaaatcttgtaggattaatggcattcttgtgacccgaggagcagctccttactttggctcttgcctaattctgtgttctcaaactttggatctttcatgccgaagagacaccaggctctaaagcctccaggggagctaagacagtcacagcgcccactccaccctaactgtagcacccagtcctgctgcactgtctctgaaggtgttttcagtaataatgactcagtgcatctattggagttggcaaggtgaggacagtcttcaaagagtcttctctttttactctcctcctggctttcacatcctctcattacaggataccagcacacatacaaatgctatttctgcagcccagtgctgtaagctttttatgtgtccagctaccagataaagagaatttagcagtgaccaagctcagccaaggttataattttggggaaaaaaaaaatcttggtaaatgtgtttctctacaaatctagctcccca

SEQ ID NO: 64005 - DNA, 1056 bp, Homo sapiens
catttattcattttctgattcattttctgataatatcttttagactttagctcctgtttatttcttgttttgtttgaacttactttttcatatcacacatcctgctccccacctccaccaaccccggttgatgcccatgggcctgttgcatcttgtattcattccctgtcttaacctttttgctctacatgggaaataagaatggaagcaaacaggtggtggatagaaagccatctattccacacacaaaggacactgagtgccctttttatcctagtacatcccacacagacactccctgtgccacaaagtagatctcaattagcccctgatgataatcctggtttgaactatagttggcttaggactgacagccctgtcttaaaaattgccactttaagcaaatcaagcaatagtggcagaattcctttgcaattcagaactatatccaaatagcaggaattctttcctacaagtctgtttccaaaggagtaaattttagtcagttgatcaccttttgagacaaatgtattaaccagaacttttggttgcaaataacagaaactcagtttgaactaggccaagagggaaccaacaggaagggctggaatatatctctgcctttaggcagcgtgcaccggggatgagaatgcctccagtctttttcttggcttttgtttgcttttctgtgcacactgggttcatagctgtctcttgctgcaaaccagctttttccacgtggagcaggacatggccactgacaacctcagaactgtggcaccaccactaccatgctctgttcccaagtttaaaaattcagaggaaggatttcaacaagtcaagcctggatcaagtggcagggagatgaggatctttctaagaagatggcagccctcatttataccacataattacagtaaaggcgatgatctcagcctagtctacacaaacaatagattccattaaagcagggtgctgattctctgccaagactgatacaagtcttctctgtttcttttccttagcaagaaaacaaggggaacaatttggctgatc

SEQ ID NO: 64006 - DNA, 1063 bp, Homo sapiens
atgcctatgtttttagaaaagacttttcctgaaataaaacattaagtaactgaggggacaatttaactctagacttggcttaggggggctgtgaattcagtcattcatttatcatgcactcccaagcacccgcttctatacactggcagccccatgaccaggctgatttccaggtgctaagaatgaacaaaatgggccctgtcccccagaagctcctgagtcttgcgagggaggggagatatatcctcatgccactaataaaacagagctgtgggtgatacaggcctaagggtgaatgctaatgaatcaagtccaaattgtctgaagctggatctagactgatccctttaatgccaaatcccctggagctggtaacaggggctaagcctttgatagctgtcttgcttgaaagagaggagctccaaaaccttttacggagaaagatcatcaagggagctttttcgctgttgaaagtttgtgtgccttggtaggacatagagttaggtattctcataagaaggctgttgaagaagcaggcccagcactttgctgtgttagctcttgaaaatataaattgattaagcaagcatttactcaaggtctggtatgcatcagatattaattagtgatttggaaaatataaaggctagtatcctaatcccagctccttaaaagcttaaagggtgatgagttagactggtggtagaatgaagggaggggttgagcggggcctggaacccaccccaggctatgggctttagcttggagcactaaggttatgaggtggcagtgtgtttgttttttctctttttaccttacttattttactctttcattgtattttatgaacataagggtaatgaatgattttaaaaacctttaaaattctaaaaatgtgaagaagcaggttaacacttcggccttttttccagtgttgttggttttttttcttttgcctctattgtaaataactgagctcataccaaatatatagttttacattccagttttgtatttttcttcacttcattgatttcttcattataaaataattgggtatcta

SEQ ID NO: 64007 - DNA, 1059 bp, Homo sapiens
gtaactgaattttcttctggtttgaagtattttaccaatgtttcaacctgcacaattgtatgtgaacatacattaggactttgggggcagaattccataaactctgtgagaaggcttaaagtggcagacactcaactcaaagtcacttaagagaaaaagggaggagagagacctatgtcacataacttgaaaagtctagtgtttgaaagaatacaatatgactagatccgggtaatctcacagtgtcactagaaattagtctcagttgtatcacctggttctgctttagccttattctcaagaaggttctccccaggtggtgacagagatagccatcagtagctccggaatgatatcctgccagccaggcaacttctgcagtcaaagaggtgctttctcaaaggttccagcaaaagcctcaagattgcatctcattgggccactttgggtcatatacctggttctacaccagtcaccgcagggatctgtgcatgaggggtgggaggtgcgaatatgaaagtcagcccgtgtgtggaagtatacagagttagcaccaagctaggataatgcagtccctttacagggacatcagaaaggaaggagagctcccacttctgggacaagaagcactaatgcagtcattttactgtttgcttttttctttcttttctgaaggactatttttaaatctgaattttttgtttttgtttttcatcagtctgttcatacataaggcgacgtagaccctgagtgtctggcctcagtcctaccagataacagcccttcccagttgctagtacaaatattaggtttccacgtggaggaattctgtaggctgttcaaacctgtgataatcagtgagcagccacatggcctgaaacaaattcctcgttcttgtaattgcacataatctttgctggtatgcacagaacttctacctctatttgtgagtgtctggagcaaccaggggtttaaaaccacagggtactgcttaagctgcactattgtcatgtgcatggagatgtttattttgagtgagacattttgctaaggtcacca

SEQ ID NO: 64008 - DNA, 1028 bp, Homo sapiens
agcctctgccaggatgtgactgactggtcactggccagggcctctgccagccctcacacacagccctcttttttttctctttttgagatggagtgttactctgtcacccaggttggagtgcagtggcacaatctcagctcaccgtaacctctgcctcccaagtttaagcaattcttgtgcctcagcctcctgagtagccgggattacaggcactggccactatacctggctaatttttgtatttttagtggagatggggtttcaacatgttgaccaggctagactcgaactcctgaccttaagtgatccgcctgcctcagcctcccaaagtgctgagattacaggcgtgagccaaagcacctggcctcacagccatctttttaagatcatgggtcaagtcactctcagggccttgattgcctatagctaaggagtgagaggtttggaggcaggggtacattacctctgttctgcagataaactttgaccttgaaatgatcctgatgccagcccttgctcagatgccctgaagaatcttcagaatcacactcttactgtccctttatatatttcttagtccttcttaatgaaggagaaacaatgttagaattttgtggtacgattataggtttctgaacatgaattcaacaattcagtcttactaccttaatgcttgcagggccttcggagagaactctctcaatcaatgaagaagaaccggagggaggtttcagcaagtggaacgctacaaataaggaccctgaagaattatttaaacaagaggtactgtgtttccatccatgacgtagggtttcagcaggtcctccgagcttgccctgagcttgagggaggatctagtcagacacgtgtcaggtgcacatcttggcaggtgaatacttaaattaatatagtgcccctcaggctgtgatggggatgggcgagcaagaggctgaggctctggcctgtgctctggttggaggcagcatggtggatactggaactttcaaggataggagttctccttttta

SEQ ID NO: 64009 - DNA, 1040 bp, Homo sapiens
ggcttctgttcccctacagccaggaggattgttctttttggagacaggagaaacagaactggagttgagcatccttgtttcctctgcgtcacgtcttgacattgcactgccttccacatcagtgagtcatttcttcccagcccttattcttggcctgagcagagctcagagagccctttccattgtccttgattcctttttgctgtctttcttacaggtcggggctgccttttaaaccccatccttgggttaggtatgtgttctccttgcatctcagctcctcagggagctccccgggtggcccacttgcttccttggctgtctctgccctgccttgagggagcatgcgtgatgatgcaaccagaaacacgtttttgagagctcttcccccctccatatgtcgtatataatagggagcttggagtcatgcccttcaggtctctaacatctttgaacactaccttctcacagtcagtggttcctgggtctgactgcattagtataatctgagataatctgagatccttgttaaaaatatagacatctggggtgtgcttccagagggactgaatcagggactgggcactgggaattcatgttgttttacaagtgctccaggtaattatgaagagcagccggcacatgaactaccacttggaaactgtgggtcttgaccgtatgtctgatcatgtctaatcttcacctcatgggtcatcacaaacttgaaaatctcatagccttcctctctgaaggttctagttacttctactccaccagccagttctttcagaattcagtttcctctcactgtatctctcctttctgaactatttatggggagttaatagtcaatgttcaatgaatgaactgaatctcaaacaatttctaggacatatgtttataagcaaattgaattggaaatatattggatatttggcctttagctaaatggaacttcataagatgtctcagtcacagcagccttccattactgttgtgacttgccagtttgaaatctgttttgttttttatattacttt

SEQ ID NO: 64010 - DNA, 1124 bp, Homo sapiens
gcactcagctcacgtgtacccatggtggttattttaaacttgattccatatattcttaaggccttgaaatagtatcatttgtcacaaaagaggtcccaagtagcagagtacaaaccactgtgataagctattggtgtctccacgtgcaccttcctgagatgtggttgacttgtctatgcttggtctggtgagggacatcaggggtcttttgtcactttggaaactctggtttataaaccaaactttcctctttcagaacgatttactcttcttaaaagtcaccagccaactacatcatctcagcatcaaatgtgccattcacgtgctgcatgtcaacaagttcaacccccactgcctgcaccggcggccagctgatgaggtgagaccacaaatagtatctctccaggtagccctgagccaggacccctgaaacatcgagcatgagcaaacaagaatgacatcataaaagcactgttttttgcaccatggtgcctgggattcttttgtttgcttgtgcttcctgttgccccaaacatccgttacctgcactttgtgtctcacagtagccatagacctctaagctcccaccctccactggggagacacatgctataaagtcatcatagtgattaaaggagatgaggagatggtgcaaaggagagggggagggaaagacaaaatggaaagatgggtgtcacagtagaagagaagagaagagacagaggagggggaagaggagcccgtagaagctagacatttcagaataggtatccctacttgtagatccaaaattaactgacttccaggcccaggtacaggggatccatgagtagtcttgctagagaagaaatagtatacgtaaataacagcaccccaagtcttgaagaaataactgattatgttccatgaacttcggagttcttggtggacccccaaactgaagattgtcagtcacatcctatctcctctgttcctgggaactaggtctaaccttgctgtaaaattaactcagcttcctgggctgctacctttgctgtctatctcctattttctccttattcaaccaacatgttttgaatgtcttgtatatgtcaggcacagcgctgtgcatttttaagaccaca

SEQ ID NO: 64011 - DNA, 1255 bp, Homo sapiens
tctccttgagtgcctgctcttaaattttaagtatattgtcagtcatacctgcacactgccttgattgccttctcataatcttgcattttctgtgttttagccaaggaaactaggattttcacacttcggaaacataagaaaaaagaagttcgatgaatcgacggactacatttgcccaatggagcccagtgacggtgtcagtgatagtcacagggtctacagtggctaccggggcctcagcccccttgatgcccctgaactggatgggctggaccaggtgggacagattagctgatgcccttgtcacctgccctctgtgcaccctgagagctcacagtaacactgtgtgtgtcaccatataactgcacctcacccccgcacgtgtgcatgactcgcagagaatattccagcaattgtgtacccctgggccagtctctttgaaccctgagggtggccaggatctggagctgcatctctaaggggccaggctttggggaccattgccaaaggtggactcaggaggaaagacacttaaagacacttttacatgtctagtaattcttgatgttcatcttcagcaccagtggaaacacatgaacttcgatgcaggtccagagaccatggacactcccacgaggctcagctctcaggcaccccctacacttcagttgagggaaaagctcaagtgccttaggcccgtggaccacagtcttggctgagatcaaagggatgagcaacagggacttctgccacagtgacaatggaattgtgttgtgccttacttcagaggtggtctcttctttcttgtaataaaagcaatatttatgcggaaagcaagcagctcaccatatctttaactttgttggggaaaaagagctgagggtagctggaaatggagtcctacggattgcagagctgaagagccggtggcactgagcctagtcctcagccaggtgcatgctcaggattcaccaggggggtagagcaaggcgggaccccctcccatagccttcagaggaggtccgtggccgcactgcttcagaatttgcttccctctgtgaagccgagggggcttcaagtctcatgcacatcctgaccatagggtccatctgtcgtgcagacctcaaagctgagtgctttcagtggcatgagcccccccagtgaaggggatggtggggagacaagaaggcaccttgctggaaagactctctttcatgtgttttgctggcttctctattactgacttagctaggct

SEQ ID NO: 64012 - DNA, 1107 bp, Homo sapiens
aaaagcacgttctgtgaagcagccccggagggacctcctggtgaccatttcacaaaacacagtctctacagaacattcaaaacagtttttcggaactttttttccagcaggttttatgaactaacagctcttcccctcgagtgtgagagcctccaggctgtcaccaggaatatcacgagccatcgagtctgtgtgctgatatgtcactgccctcccacaaagtggtctgcagtccacgtataaaagtacaaaaggtatgaagcctgcggtgaagagcgcagcatggttgaagacacacatggaccctggggccacccctggacacctgtcccacagctctgcttcatgcctgtcagcagcctgtctgagacaccctgccagcccggactgggcttgcagagggggctgtgtgcccgctccccacagaagcaaaggctccggggcccccacacatgcctccctacgctctcagccacgaagaaagtcatctccagtcatcagagttgggggcaggcaggcgagagtcattcagcagctggtcctggctcagcattgtctgaaaaggacacagccgaagggtcagtttaatagagttttggtccaggctgccctgcggcagctgcaccggaactagagggcactgggtgagggctgcatctgacacaggtgcactataagtttatagtgtcccaagaaaccctgagtattgggtcagaataaacaacactattaagataaaaataaattgttcatcttagaaataaattttctattttcaggccaccaaaggcctagatcataagggcaagtgtgggcagattcctttcatgggtgggccaataaataaaaacgttgagtaaaactgatcctgtttggagtcagggagactttcctgttttgtccttgaaaacaaggagagtcgtgtgtccctgtccttgtcctgtcatcccaatgggccttgctagacaagcaagcaaagtacagggacaggggcctcgatggggacagacactatagccaataggctcagtgatggaatgtccaagaactaaaaggccttgggagtgatggatcctcaaaaacaaatcctgtgctctgtggctggcc

SEQ ID NO: 64013 - DNA, 1015 bp, Homo sapiens
gagtcattgagcctgttctgagcccagagtgttggcacctcaaagacttggctcatccccttgaatcagcttcagggaccagcccctctagtgcctactctgcctgcttttttctcctcctgcctcctcctcctccctgcaccttaggtcttggtttctatccatctctctgttccatcttccttgtctcgactaatttcccgtatgtagtccactcagtttctgagcgagtagaaactgagggagtaaactgactacatacatacaggaagttagtcaagggttagggttacaaaactttctcttgcctctagctcttagtatctcttgattgcactcctgtccctgccactaattgccttagtaatttgagtctcacattttggatccaacaggtcgtagctgcccagtgtgtcatctgacagtgggatgtagtcatgatccataggtctctggccacacctggtttattgaattctacccaggaagggcagagttacatggttaaaaacttcactgctactcctcacaaggccataggccaggaagacatgatattgttgtttcatttgctccatgggtacccaaatcctagggccctgtagtatctgtgagcccaggcctgctctgtgcctagtaccaggatacagatggagtagttgtaatttattcacagatctcagtgatacatccagtttaggaagaaaggagtttgtgaaggccacatatttttcttgaatagacaaatattcctttctaattttttttttttttttgagacagggtctcattctgtcgtccaggctggaatgcagtggcacagtctcagctcactgcagcctcgacctcctgggctcaggtgatgctcccacctcagcctcccaagtagctgagactgtgggtgtgcaccaccacacctggctaattttttgtatttttttgtagagatggggtttcgccatcttgcccaggctggtctcgaactcctgagctcaagcaatccacccgcctctgg

SEQ ID NO: 64014 - DNA, 1051 bp, Homo sapiens
gtttcctgagtgctcctcgggccaaaagcagagcgcacaaattccagaagaaattaccaacggcgggactatttcagtgctccgagaagtatcaccagtaaccaatcagcaaaaagctctagctcacgtggtgtatattcagcctatcaagctcctgatattcatgaatgctgtcatttccgcttccgcctccttctttctcgacaagatggccacaccggcggtaccagtaagtgctcctccggccacgccaaccccagtcccggcggcggccccagcctcagttccagcgccaacgccagcaccggctgcggctccggttcccgctgcggctccagcctcatcctcagaccctgcggcagcagcggctgcaactgcggctcctggccagaccccggcctcagcgcaagctccagcgcagaccccagcgcccgctctgcctggtcctgctcttccagggcccttccccggcggccgcgtggtcaggctgcacccagtcattttggcctccattgtggacagctacgagagacgcaacgagggtgctgcccgagttatcgggaccctgttgggtgagtggtcagagaaagttaacattcttttcttcctcccacttctcatttatctcactcccctaactcattaattctttaattcctggtgtcctaccgtcctttcctcccatccccaatgacctcttaatctatatctgcatcctaccttttgctgtgacttatcttctcaagcacttgcatctctcctctctctcctgccggattgctgtcactttaagcgacataaaatacacaaggagtagttgtgtcatttactgaatattttatgccagtggtttacatttatgccagtggtttacattttacataaacagcagtttatggcaagtatgatgggctgcatctaccaaaaatgagttcacacgccgagtgggaagtcaggaacccttgactccctataccagtgaccacatatttctcccttatccactgactaaatgtcatcgttttccaggtattgacaaagttttctaacc

SEQ ID NO: 64015 - DNA, 1050 bp, Homo sapiens
tgataaggttaagactgaccatgggaccagatggctaaagggaggtacagatgaagctcctgacgtctcagtgtctgaaacttggccactatattagcagtctatgtaaccattaaaatattccaggtagctctgcagattaaattacagggagaaagtgtagaggctgaaaaaaaaggccgtagagtgaaggtctggaataggctagtagtggagagtaacaggcaaaaggagaccttgtaaaggaagaataaaccctatttggtgatgattagagggagaagttggcgatcacaccacagtttcagttccctggagaattctggtcccatcgatgcaccggactaaacttggagctaatgagttcagttaggtgttcattgacattgaagagatcatcaaaagcatttcaaaagtagtcagaggttgttgggagccctaggattatataacacatggacgattctctctttcacaggaactgtcgacaaacactcagtggaggtcaccaattgcttttcagtgccgcacaatgagtcagaagatgaagtgagtgggaatccaagctgtccctctgcagtttttagctgttcatttgctcggctcccctcacggtccctcccacactcataactagagctcctgtagccaaggagcttcttcccatttgtacgtacttcctgggcctcttctgtttattgggggtggcctcttgtcctttttaaccaatttttctttggacttctggcttcttagcttgctttcctgccttccctcttaggtggctgttgacatggaatttgctaagaatatgtatgaactgcataaaaaagtttctccaaatgagctcatcctgggctggtaagttggggaggtgggggctggggttaatggaaggtctcttcgtgattgccggtgtcttttgctactggactggatcttatactcttccttttggaggcaagagtattgcaagtgtattactgactgtgagcagtggctcaatgcctgtaatcccagctgggaggctgaggcaggaggatcacttga

SEQ ID NO: 64016 - DNA, 1708 bp, Homo sapiens
tgagcagactgagtctaaggggagttgggaaacagagttagtaggacgttaagaccatctctttcctggtgggatgactgaattctctctcttactgcccaccactgccgctgccaccctgccaaccaacttccatagttgacctgatcatgaagacctgctttagccccaacagagtgattggactctcaagtgacttgcagcaagtaggaggggcatcagctcgcatccaggatgccctgagtacagtgttgcaatatgcagaggatgtactggtgagaggggaaagaaaaaacaaagggggaggacatagttctctatcctgggatcactgaggcatgtgctgatgaaatggtagggctcagtggttataattaactgcctcatcgagtctttgttttggtactcagtctggaaaggtgtcagctgacaatactgtgggccgcttcctgatgagcctggttaaccaagtaccgaaaatagttcccgatgactttgagaccatgctcaacagcaacatcaatgtgagtgcccttcctgagccccttcttgcctggtttcttcccccacctcagcacatacactcaaatgtgaaaagagttgggtgaggtgacctggagtaggatagagacagggcttcacctatagccccactgaagtccaggttgggaggaaggaagaggtgtgttatgcgtggttggagacttccttccttctcccatgattccattgtctcatttactgctgatactactgtgacttactgtctaaattcgtgatggaaagaaacactaaaattcagaggttaatgaaaatgcaattacttatttcccccatctgagttcacagaccccctatattccatccatgggtttcagctaaggcacccctagtctataagtgtatcagtagagataagaaagccttctcaagcatttcctttctgtcttctacctttttgacttttattcagtctctcctagctgtcatttatccacagctgtcctcatacccagtgtctaccatagagctggccaaagccagcctttttgctccctttccacccaaccccccactcattgtgtattctttgtcttccaggaccttttgatggtgacctacctggccaacctcacacagtcacagattgcactcaatgaaaaacttgtaaacctgtgaatggaccccaagcagtacacttgctggtctaggtattaaccccaggactcagaagtgaaggagaaatgggttttttgtggtcttgagtcacactgagatagtcagttgtgtgtgactctaataaacggagcctaccttttgtaaattaatttcatcttatgtgagtttattgccgggtggaagggaggaaaatgttttagatcacacagaaactaggaagtgaatattgtaggtagagaagttggttatgtgtttggcatgttactgttttaccaaactgttcttttggttttcaatatggaaaggtgtccattggcaaaacaaccttttcttgaggattcatgtgatttctacaggaaatgaaaataagaatccatggagaaaaaatagctaagaaaattggatgcttaatctgaactaaaagagtagagtgtgtagtcactatcttaaaatacattaatagtaagatggagctctttgccactttggttcggggaggcagaattaagatctgtgggttaaagattaa

SEQ ID NO: 64017 - DNA, 1026 bp, Homo sapiens
ggtctcctctgcatgtgcattcctgctcctaacttctcagtctccaacaagctgccagggttgccgtcctcccactacactttatcccacaaagtgtcccactgtggacagtgccccaccttctgcattccctaagcatcattcataggaggtggtggtatatacataccagactttttctgaaagtttcgaggtaatagagcagcaccaaggagcaggaaccaacttaaaatagaacattagacatctccattcctcgagttccttggccatccgtcagaatttctcaccagttactttccttcttagagtccagctttctaccatttcaccttctttttactcaagcttttctcctgtatcctctcttctcccagttccaatcttacccctacaactcatcatttagctacaagaagacaactcctgaattcctatcgctcctctgtgcagagcagctcatctctgcagatgaactgggacccttcctgccataaccaaagggccatgaatcagctttcaaggaaaaagaaccagttcctcggagatgaattctgcctgcctggttatctacggtgtaaaacaacaaccgtttcacagtgttcacagattctctgggtcaggtcagggcggagcaaggatgacttgtctctcctttgtgatgtatagggctcagctggaaggctcaagcagttggggatgacttaaagggctaggggctgtaatcatctgaaggcttcttcagtcctatgtctggtgcctggctgtggggacttgaaggctgggctcagctgggactgtcaattgaagcacccacatatgacctttccttgtagcttgggctttctcacagcatggcagcatcacagtagtcagacttctaacatgtcagcccaggggtccagtgaacaggggatgttgaagggcctttcattacttaacctcagaagttacatagcatccagattaaaggggaggtaacatagaacttgtttctcaacgagaggaatggaaagattttgtggc

SEQ ID NO: 64018 - DNA, 1129 bp, Homo sapiens
cgactctagcccggcgtggatcaatgttaaaatctctatcccctttcttcttataacactagaatcctacaacaaaaatgacttgcctgtgcaggatgtcaccactttcatggtcttcatcttcggccgggccaccaatgccatctctcagtctttctgcttctccctgatgaacttcactcccattgcccacaacagcccttccaaaccttccgcactctcaagacccctctctgcttgacccttatctgcaccccgtgtgttatgtaaatggccctgcctcctgctccttggagaaaaattgatcacatcaggcatcatcttctgtcacgtcctgactccacttcatttccactctacttcaatcactcccttgtggggactttgttgttcttcccagttctttgctattataaataattttgtgttgaacatcttgtatatatgacattctcccctcatgtttgattattcaattaaaacaaacttctgaagaaggattgttagtttccaatgttggctactgtcagattgtcctccaggaggggtgaattgatttctttttccacaggcagtcactgactgcattgttttgcaattatgtttgtgtgtgtgagtgtgacctctcagactctgagacaaagtagcatcactgcgcagaacttggattttggggtcaaagtgacctggctttgcagcccaggtccttaaattattgcttatatggctttagacaagtgacttaacctccatcagcaaatagacaataataatggtagctacgtcttaaggtgggtccattcactcaatatgcatttactgaacaccttctaaatgccaggcaacattttaggcagtggagacagaatgaaacaaagtctgtggtctcgtagttcttaccatctagttgggggagatatggacaaatatatttaatgtatcagtgctaagaggcttatataatatgataaagtgcaaagcagaaaaagcagagtctggaggagagagtctgacagcatgggcatgctgggggtggtgtgtgtgctgtgtcatatagtgtggtcagggaaactctgaggagggggtatttcatccaagagctgaaagaggcgagggaatgagtcatgtg

SEQ ID NO: 64019 - DNA, 1062 bp, Homo sapiens
ttttgtgaaatatcaatgatagcatccttcttagaaggctgtgctcaccattcagtgcactaatgcaaagcactgtgaccgactgaagagtcatgttctgtggggccatggaggacagaactaggactgaagggaggtgtgtttgagctttaggtgaagcagcaatggccaactacaaagatggagggaccgctctgggaagagcaaacaccctgatgctcagagtgtgcatgaggaggtttcataatcaccatccagcagcttagcctcaaaagggctgcctgccccagggagctatgacccttgagagatgcagtttatccagccctgaggttctgtttgaccatctttccccggttgtcctccagggggtcatggcacaagtctcagtagcacgggccccatggtccagccttaaggtaagaatggacctccctggaggaagctggcttcatctacagttgataagttcaccttttttcctggtccactttccttggtttaaccctgtgaccaaacctgagagctttggcaggaaggaaaccagggaggatgttgtgcttgagaaagtgctggcctgagcattggctttgagatgtccttttactctgactggagggtctcattccacctgtagcaagactaaagacacctgaaagagagtttctgggagatggaggatgaggtctccagttgcaggtgcatgcacacgtccacttccccacctggcaggtgccggcatgcaggatgtctgtgcgtgtgccccttgcactgactcccttgaggctggctgtgcagctttggggcatgtgtccaagcagagagaatggaagactccatattgggagccttggctttgacctttcctttctctgagcctgattttcccaacagtgttatgggaggggaaggatgagatgcgcttctcagctgatgtccgtgattcttctgttttctggaggccatgagtgttaacagaatgtgttcacttttgcacccttcttccatgaccacttacagtctgtctgcttagcagatgaggggtctgggtctccagcgtcc

SEQ ID NO: 64020 - DNA, 1023 bp, Homo sapiens
atgtgtgtatgtgttcctccatatatgtgtcagcatgcatgcacacatggtctctgcagccatggagatttccactttgtgtgaatattgtgtacatgttcctgtgtgtactgtacctgtgttcatacatgtgcatgggtgtatgttcctgtgttactgtcactgggaggcacatggcacatctggctaaagggatggtagagtagctcagcacagccttggtgcttacatggcttattctctgccattttaaacaatctctcaaagggccagaaggtgaagaggaggtgggcttgggcaagatggggtgtggaggctggcccgtcctagagtcactctgtcatgactaacccaagtctggagcccaggcctagatgctcagcctgtgtcccctggaaaccccctcagctagacagagaggagagggtttactgtaactcatcagtcagggcagctgtctgctgttgccatggaaatctgaaggcagcatcttctgcaaggaccaggatgtagagtctagagaggacaggctgcatcagcctggtgggatcagtctggagtggcctgtgtgtgtgcgtgtgtgagagagagagaggtgggaggagaatgcaagatagtgagtgagctttctgaagtgggtggcgcatacctcaccattgctctctaaggcctcagccattactctggattatcgctgggtggcgctgtaagaaggggtgtacccctgagatggcttccctgtgcccatcaggacccggtctggcctgaggctgctcttagagtgtcctgggaccacctagacagatgtgctggcatctgcccatcatgggccccagagcccacccagcatctgctgcacactggctcctccttgctcagatgatggggtggtccaggaggcaggcccttaccctggccgcacagatgctgggtgatgggagcagacagacagaggcccctcaccccaggactcagctctgctgctgatgggctgggggtgggggcaaggacagggcaagagta

SEQ ID NO: 64021 - DNA, 1050 bp, Homo sapiens
tgtttatagttgctccatggtgaatagcagaaaacaaagatttttccagtattcagaaactattaacctattcagcaaagaagtcactccgaccaccagtgaaggagtgaagttctgacatgtctttgttgtttcactttcaacttacttgttaacataaatgaaaatatcaagcagcattaagctggaactacagtaatttgtcattgcaaccgtaggttggctacagataaagagttaggcgaaactcattgaatgggttgatttctgggacagtcatctggctatatggaatttacaataaagaatattggatatttcattagtatttgtaaattatgtgctatacatcctttgtgtcagtaaaatttataataaacttattgagtctacgcatgcagacattttctggagagcttgttgttaaatgtcactgttaacaccccgtaggccctccattacacatagtcccaacatgtctccttactgtgcagacggtgaggtagggtggggtggagggacagatgtaacttgcagagaccctgggagcagtgtcttaggtttccagacaagctgtggcttgtcactagatcagcctgacctcctcctggccgggggcactggggctcaggtgggggtcccgttcattggtcccttctctgtagcaggctcagggatttacaggtcagaggaagaagacgtggtcactgcctgtatggagctcacagcccagcagaggagacatccagtcgcagttagttacaccctggagagtacaggggcaaaaaaagaagaaattgcccagctgaggcaggagcgaggctgggacaagaggagctgctcagcggaacagtgcctctcgacatttagtgtgcagcatccacagatttgtgttaaaaatgcggagattctcttttggcaggtctgggcagggtggtgcccgggagtatgctaggggatggtgaagcaggtacccaagggcacactgggaaaagccttgatctgaggagacgagagggtgtgtgctgaggcaggagatgagaaagaagt

SEQ ID NO: 64022 - DNA, 1047 bp, Homo sapiens
tctccagaaatattgagcccgtttactgtgacaccaattatgtatagctgtccccacagccctccagtataaaggttcatcatttttatttatttatagctgttttatttactttcttttttctcattttgcgattttggtcaggagtggtgtggcgagttgttttaatgccgttgtttcaatgattggtgacattggacattctctgaaggactttgagaacctcataggcgtcatttgtcccacagggatatggcaggatcggttctgagtctaagagctggatcaggactggaaaatggatagctctgagttttcagacttactcagttctcagtctcccaccaataggccagaatgtacgtcagggccatagtttccaaagctctgaggctgaacgatgaatatggttttaaaacagcatcacttgccccagggagaagactgagatgaaggggagaaggagaacccgtggccccatgcttgtccccaccttgatggactgtgcctgagctccactggacaggctgcacagcctcttaccccagatgtgaccttctgggtacacagattaccatgttatgcttgtggctgtggccatagggataaaccaaatttggggcttgtagtacacttgcctgttgatcctaatgagcatccaggagctgcaccaagagtttacccagtacctgtaaaaccagggctctgatggtggctagagaggcctggctgggtaagatcagtaacatttgctggggtctgggccctcatgtcttggctgaggtctaagcatggggagttgtggaaaaggagactgttagggaactttgacgtaagtggggtcgaagactgtggccttcagataatgacaggggcctcctcagtgataccaggaactcaaggcagagacagtgagggtcaggggcatgaaacccagtgatagaaactaggtgccatggctgttgcagacagggccacagggcctcctgggatctcagagcaaagaggccagatgatgaggacagtaagtcagggcagacatggctg

SEQ ID NO: 64023 - DNA, 1036 bp, Homo sapiens
atgtggggcaggatggccgcaccgtgtgggcatgctctcacgggaaaatggaggtggtgttgctgatcgacactagccagcgaggcaacatggccacactggctttcttatcacagagcccacgttcacaaaccatcttggggctcgccctcctttccttaaatcatcaccacagggaagcataaaaaaatctctgtacattatcaagtttcagaatccccttggaattttgctttgaactaaatgaagtctcatttaggaagaatgactgtctttaaaacagtcttcctatcatatagaaatacattaggaatctccatttcttcaagttctttttataaatctcagttgcattttataatcttctttatatgaatcacaaatcagtctcattggtattattttaaaacttttcatatgtagtcttgtaccactgtaaatgagatctttttcattctcattttgcaaatgataatttttttatagaaatgttcttggctatttttccatctttttatctggcaactttactcaactttctgattctgggggttttcttgttgattcccttacattttctcaggtccagtacagtaatcatgtgcaataatataaaccatgagtcctttctaacatagtagactaataactgttcatcaatgcccccctcaggaactttaaagaaatacaagtagttgggccctcctcggtccccactgaaccataacttcagtctcagccatagggctttggcttgcggggcagggatgggaagtggattccagacccaaaagtctgcaaaggtggagaaagcctggcttctctaaaagcataccagtatagctacagaccagaaacttcattgctttgtaggaactttttaaaattttggtctgtgagcaagggaagtgagtgaaggatttgaagcagcaggtgcaaggatagatttgcattatgaaaaaatcactctcactgccatgtgagaacagactgcaggggggctggagggaaagggggtgcagatcattatgtaacc

SEQ ID NO: 64024 - DNA, 1045 bp, Homo sapiens
taatagtacctaccttgaagtgttgctctgaggattaaatgggagaagtgatgtgtaattgttaagttgaataggcataggcatgactcatgagatgtaatcataaagcaaactttatttttgtctcccacagtctctttaaatttattctatagggctgttttcccttctaaaattatattaaatttagggtaagtcccatgacttttctgaccattttcaggtaaccagaggttgtcttgtcagtaattaatgcatcctgtctgctgtaataaaaaaaaaaatcttgaaacgtcagagttacaccatctctttcccagcacggtctgctgtaggccagctgcctgtggggaccttgcacatgacagtcctgaccctttccagggtccaaggtggaggggcaggtaggtaggagaggagatggttgggaaaggtcttcaacgactgtactctgatgagttgctgtcccgttgttctctgggccctttctctcactgggctgtttttgtgggttggtggagaccaccccatcgctggagtctcaccctgcacctcccttgatgagggtgatactttctccccgtagccgatcctatggtttctttctcaggctctgggaaacctggtctccctcagtgtcacctcctcccttggaggagccctcttgtcctggatctaagacagtcacatctggctctcttgctgggtgctacctctgtccacaagagacactcatgtgtgctttgccctgcaaaccagggagcacaggctggtcctgaagcagcagcactcttgctgctctttggatttctccactgtggcaccaagaccattttggccacatatcaactgacttaggggtctcctcaaggccccactgtctggctttgaggtgaaggtgatagcaccctgtacccctcccatttatttgggatcactggaccccaaaggctgtctctgaaattcattctaaacctccaacaaccttttttcaacctctctcccattttgtatgcattagagatgggtgtcagctaatggcatg

SEQ ID NO: 64025 - DNA, 1318 bp, Homo sapiens
acatcctgggaggctggaactcctgtgagcagtgtggtcctctgccttctggagctgcactggttcccactgtgtcccagtaagctgccaggcgacagaagccacagatctggacttgccgggggtccagggttgcagccaggggcacagggttgcagccagatgccctggtggcctttcctctcctgacagcccacatctgtgatttcctgggtccagcaggggtagcttccactgtgactgaggggaaagaatgagggcaggaagaggagaaggtgaagtcaacatggaaagtgtggccagagggttgggtctgtccctagattccctgacccctgggcctctggttagcactgatggagtagctggagcatgtaaggtagagtctctgaagagagggagttcggaaacaggctagaggatgttggctgtgtgtgcttttccagggcacagaattgtccttgtgtccttgccccttgttgtcaatcgtggatgactgctctgatatctgtggggtgccttgggggaagtgagtggatgtagaggggcaggttccctgggaggtgaagctgccacctcgttggtgctggactgagcagatggattggtggacactgaagcctgggtttctctgccctcatgagccagtggctttcctgagcctccctgttcaggcccccagcaggaggtgcccgtgatgtaggagactccagggtcagctgaaagacctatccatcagcgccctgtctcttgtctgagtctcctggcggggctgcagctggcagcctgggcttggcagttattccataattggagctgaagtcattaaaaaaccattactgtctccttgtgtggttatcgtttaggtcagcctagaacagggcccatcagaaacaggcaggctggggaagcgtcggtgagaaaggaagatgccttaggaatggtgctggggtggagatgaggaggaagggccatctgggtgggggcggagaagggaactgggcctattgaggaagccaggggagcttttggtgctgctcttcctggagacagccatcgcagttgcccttggtctccacaacagctgctgttggctggggattctttgttattcaccagggagagttgttgcgcacttgtcgttagctaggaacacccacctggtacaagcttgtcactgctaggtaatcgtggtcccatctcgtccccttgcagctcttctagaacactgctttaccaggaatcgtgcccactctcagagcctccccattttagtagatttagtgtagaccctcctagctgggtcttgctcagccag

SEQ ID NO: 64026 - DNA, 1039 bp, Homo sapiens
ctcctctttctccagaaaagacccctaaagattaaggacagtgattggcggtacctgccccaggtcctgtctcttggctacacaccccgtttcctcaacttttgttcacggacagtggtttccaggccactgcgtcacggttggacagtgatgtgtcacaggccatgggcttctggagctggccgagcactctgggcatagctcagtaggcgggcagggtggctgccacctgtgtgggtcaggccttgcttctgttgctgaagctctgtggtaacgggcaggaaagctgacgtaggatgggagatgctccatttgggaaggcgagtgtatgccaattgcaatctttctcaaggggcccacgtttttaatgatgtatgtgagttactgcacgtgtgtatgttgtgtctgtttgtggaagaaaacaccagcattgatggcttgtagctggtcgtgtccatgaatgattgctggccttgcctatggtctggatcagtccttgttctccatcttgtttttccactgtgcagttggttttgtagatggctgccgtctgctttaaggacgtgaggtgttgtaaaccaaccctcggcaattaatttgggggaagagcagaagaaatgaagcccacatcccttactagcttaccagttgttaacaggctggtgcaatcattagttttataaaaatcacttttgcaaataaagttttgcagagggtttccccactcttccctcatccccttcatggacgtctgagaatccaggccctcctctcctcctcctggatgtaactcaggcgtgtccgtggcctgcaggcaccagcgggccagcagcactggcagaagacaagtctgaggcccaaggcccagtgcagattctgactgtgggccagtcagaccacgcccaggacgcaggggagacggcagctggtgggggcgaacggcccagcgggcaggatctccgtgccacgatgcagaggaagggtgagccccatggggacccagtgatacccccaaaactcagtcccaggttctcagatg

SEQ ID NO: 64027 - DNA, 1029 bp, Homo sapiens
cttcggagacaaatgagaaactcttaggcagggcccctgctaaggccccagggaggccctgatttgggggcagatttccttttccttttgctccttagaaaaagctccttttgcaagaagtttcccatatgtttgctgagctactgggagcagggccaggataccaagagacggggtagatcctccgtggaaacctgctgttcagttttcccaccacaagccctgccctagggagcccctggtgcagggtggcagagggaagaagcctggcagtgccacacattgtgaggaatctaatcaaggatggcttcctgtacaaaggactttgagacaacttgaggatggggatggcattcccagggaatggcaggcgggaggacagctgagatagaagctcagggcaaagatgaggagtcagtgggtcccctccacattgggctgaggaaggagctgaggcctgtgccctggcagattccgtggtctatgccagccaaggcctctaataggcctgaggtcagaaatggagattcccagttcaaggtgagctcagtgcaggccttgatacacaagagacagtggtagggtggctgctaggtagtggggtaatgtagggactgagctgaaactgggtggtggggatatatcctgaggattgtggccagccccggctcatgtgtgtacctgagagaatatccttttatatctggacatgtgtgggaatatatgtgtgaatgggagtctatatgtgtagatatggctaagagtgtgtgcataagtttgtgggggtacaggtgagtcagtgtctgaacatgagtatgtgaccatgtgtatttcaggggcagcgtagacttctcctccttcatcccttcttcttctctccttggcccaggcatctccagcagcatgagctttgacgaggatgaggaggatgaggaggagaatagctccagctcctcccagctaaatagtaacacccgccccagctctgctactagcaggaagtccgtcagggtgagtgagtgagtctgc

SEQ ID NO: 64028 - DNA, 1028 bp, Homo sapiens
agatgggaatcacacacccgaccccaagctgttcccaggaggtgggtgcaggcccaccaagagtgatggatccaaccccagggtgtcactgataacgcaggccaccatggaagagttgccttggctccatggtcaatgccaagggacagggctgagagtgagctcttgagggaagagacacacagcaatcttgggggtggggggcagtggtgaaggggcaggaaggctctgagcctaggcctccaggtgggggcagtggggaggtagggtttgctgaggaactgagtaccagatttggggagcataaataaagatgagaggtcaggagctaaagctggagatggggctggactgagacttaggctggctgcgacagaggagatctcatcctctctccacgggtgctaagcctcttccactgtcttatcagatgccattctgtttgctcacctcccatgaggagaactcccatgttcccccagataaatcttctgaagaatcctgattgacctccctgaattgctctcactgaactgaaatgcactttgagtcaactcagagcaagtccaggccttctgcccacgaagtgtcttcaaagatgtggattcagtgagcagtatgcctccctgggcctgctcctgttccagcccagaatgttttgcaggctcctcataggacagacgatgagctgttccctgctctggggcagagggtgcatgactctatactgattgtgcctttatttcaggtccaacttgatgggcaccaagttcactgtttatgacaatggagtcaaccctcagaaggcctcatcctccactttggaaagtggaaccttacgtcaggagctggcagctgtgtgctacgtgagtcctaggttcgggggtctctgatttccaaggtagatatgaaatccaggacttgatgcctgatctaggggctatcccatccatcttagtgggtagacaaggctgtgtggagaggggctgtcctctgtggagtgttcctggcctaggacaggggctctg

SEQ ID NO: 64029 - DNA, 1205 bp, Homo sapiens
ctggaggtctagggaaatccaaggacccccattcccgggatagatccctttctggggtggtcatggtgccaaaggcctgggcctggctcaggtgaggctgccctcccaggagcatgagacactgctagcacgctggcagaataagaacacggagagtatcatcgagctgcaaaacaagacacctgtctggaatgatgacacacagtcctatgtactcaacttccatgggcgcgtcacacaggcctccgtgaagaacttccagatcatccatggcaatgaccgtgagtgtttctgtccctactcattatggtccgtaggatacccaaggcccttagcgtagggttcagcccacctagccctgcctacactggctagagtttaagaatgtgagctatacagctaaggttagatgtatggaactttctaaccctaatgactgggaggtcctggaagaaccttctttgcagccctggtcctagattctgtgtattcaacggagtctcaggcacgggaacaccctttaaaaggacttttcctcttttctgtcccctggtgttcacatgcatcttactttgtcctttgccatctgccacctctttcctgccacttctcccaattggcctttgttttacttccctttgtgattcccctggcatctctgcttctcacttgttcttccctcatgtggtttgggtgtctgtctatccttccctggctctaccattcctgtcctgtccttttctctgtctgtgcctgtgcttggccccagcggactacatcgtgatgcagtttggccgggtagcagaggatgtgttcaccatggattacaactacccgctgtgtgcactgcaggcctttgccattgccctgtccagcttcgacagcaagctggcgtgcgagtagaggcctcttcgtgccctttggggttgcccagcctggagcggagcttgcctgcctgcctgtggagacagccctgcctatcctctgtatataggccttccgccagatgaagctttggccctcagtgggctccctggcccagccagccaggaactggctcctttgcctctgctactgaggcaggggagtagtggagagcgggtgggtgggtgtgaagggatgagaataattctttccatgccacgagatcaacacacactcccacccttggggtagtagtgtgttgtagtcgtacttaccaagct

SEQ ID NO: 64030 - DNA, 1051 bp, Homo sapiens
aggaaaactcttggcctctgctttctcctgtagcacaaagagggagttggctggatcttttggtggagtcaggaaagacaggctgagctttctagcctaagtgtggagaaggatagcctcagccacaaaactctgtcaggcattgaatgacaagcatcagtagctgagtgcactcctggtgatcctggttttccttgaccactggccctggggccatgggtgcatggactcgtaaagctgctagggcccctagaaaccacctgggttcagcctctcccacaataagagttcttgcccttcataccctctacctggatggatggtctttgggcagggaattaatgacagaatgagcagtccctaatggtattgggcagttgggagtgagtttaggcagcttctctgtaaccgcttctggggccacaccccaaaactctacaccctctgccccagaacaattctgcagagtggtgaagttcacttccccaactcttctccaagtctagctttcctttccttctggctccaaggtgctctgtgtccgtctgtgtatgtgtgtgtctgtgcgtctgtgtgtttatttggggaaaagggcaatcagcaatcaactgaggtttcttaattgtgattatattcctgagaatgaatgagtaggaaaggaataaggatgttgttatgatcgcctgtggattttgtccattcatctcatgctctctgaacagaaggtatacctgggaagataccagctttttctctcagggttctgagtcagaggacaccatccaagaatgttgttagcttttcagttcccgctctgcattgcctgaaaaaactggtatgttgcacgtatgcttttggttgaaattgaacatactctagtgaatgtgccttaaaaatcaagacactagttcagaggaagcacataatgtccagatctatggcgaacacaggtgttggaagccaggactgtgataatcagaagctataagagaactttcggagcctgcctccttcagtgacaagtagggcacaaaattctagaagcagaagg

SEQ ID NO: 64031 - DNA, 1045 bp, Homo sapiens
ctcaaaggccgttgattctacaggccaaatacacctccactcctcatcacgactccctgggcccagcttctggagctagtcatggagataatggtttctttgtgctcctgttgtgaccaggaaaggggatctcctggctgcaccacccacctgatttaccaagagtgatcccagattatgcagttgttttgtgagctaactgtccataaaggtatgacttgtgtactctgccacagtgccaaaaggccaggggactgatcaagttcccagcaccctcgtgagaaatgaagaccgcaagaaaagagacagcagccctggcaacaaaaaccggacccatgattttgtcatcctgggttgtatatacacatataactgtcatccccgaaggataaaataattctggaaaatccaaaaagaattttctaaatcctaaataactgaaaggtacatccaaatgtctgatatataaatacacaaatatattccttatatataaaccaaccaagagctagggcaggaagaaccaccataagggcttagtacttctggcaggaatttccataagccaattttccccaaagaccaacaacactttacataacagcctcaccaaaatacttgaacatccatgtattttcacaccctactgcttttttcaacaactctttctgccaagagtgtcctctcttctttgcctacctgaagaagttctttgcatgcctcaaggcccacctcccaagaaactgtgaagtttcttggcaatactttagcaaaaacaatttatctttcctgtagttttgggcccatgtctgaattacagcatagcccttataataaaaacataattaccacttaatgagtggttatcatgtatgagctagaaccaatgctgttttacacacactgatgatttcatttaaccaggacctttaatacccctccctttactaccctgaagccaaagctcagaccagttaaggagctgacccaagattccacagctagaaaatgcagggacagattatggctcatgtttctctgcctg

SEQ ID NO: 64032 - DNA, 1021 bp, Homo sapiens
cagaggctcaatctctaccctcagaaaactcagtgtgacgagagagagcctgacagataaaatgaactatgaccctgtaagagggctcaggatcgtgaatcctgcaggcagagaaacatgagccataatctgtccctgcattttctagctgtggaatcttgggtcagctccttaactggtctgagctttggcttcagggtagtaaagggaggggtattaaaggtcctggttaaatgaaatcatcagtgtgtgtaaaacagcattggttctagctcatacatgataaccactcattaagtggtaattatgtttttattataagggctatgctgtaattcagacatgggcccaaaactacaggaaagataaattgtttttgctaaagtattgccaagaaacttcacagtttcttgggaggtgggccttgaggcatgcaaagaacttcttcaggtaggcaaagaagagaggacactcttggcagaaagagttgttgaaaaaagcagtagggtgtgaaaatacatggatgttcaagtattttggtgaggctgttatgtaaagtgttgttggtctttggggaaaattggcttatggaaattcctgccagaagtactaagcccttatggtggttcttcctgccctagctcttggttggtttatatataaggaatatatttgtgtatttatatatcagacatttggatgtacctttcagttatttaggatttagaaaattctttttggattttccagaattattttatccttcggggatgacagttatatgtgtatatacaacccaggatgacaaaatcatgggtccggtttttgttgccagggctgctgtctcttttcttgcggtcttcatttctcacgagggtgctgggaacttgatcagtcccctggccttttggcactgtggcagagtacacaagtcatacctttatggacagttagctcacaaaacaactgcataatctgggatcactcttggtaaatcaggtgggtggtgcagccaggagat

SEQ ID NO: 64033 - DNA, 1036 bp, Homo sapiens
tccaccaaggaagatttggaaattgttccaaatagaaattataaacattagcctggagctgtgctgtctctgtctggttttgatgctttttttgttttaactaaaggctcatgttgtttgtttaatcttcatcagtactgcaaaaacacatggtataagacttaactctgccccaagcaccctacacataagaagggattttcatctgaattagtttgtatttcaaagagcactgggatagccagattgctaagaatttgctcaagtaaaactttagaactattggaatcttagagatgtcttgaatggatttgttaggataggatggctgctgcctgagaatcctctttgaacctgacactattttttttttttttgaggagacattctttgtaatactttgtgctacttttctctctaggttaccctgaagagacttacccaatttatgacctttcagactgtatcaagcgtaggcaagaaacaatcttggtggattaccctgacccaaaagaactttctgctgaagaaatagctgaaagaatgggaatgatagaagaggaagaatcagatcatttgggttgggaaagtctgcccactgaccccagagcccaggaagataattctgttacctcgtgtgatccaaagccagaaacatgttcctgctgttttcatgaagacgaggatcctgctgtcttggcagagaatgctggattcagtgcagatagctaccctgagcaagaggaaaccaccaaagaagagtggtcccaagactttaaagatgaagggttgggcatcagcaccgataaagcatatacaggcagcatgctgaggaagcgtaacccccagggtttagagtgaaaacagccagtctgaagtatccattactcaagtcccaaggtgacctctctctcctcagatttccttcttggccctgtgccctgcactttcttcactgtgttcaagtgtcatagctatcaggccactatcatggatatcatgtatccttcctggtgctcacacacctgtcaccttg

SEQ ID NO: 64034 - DNA, 1050 bp, Homo sapiens
gaaggaaaattcattgacagattttctccagagaaagaagctgaggaggccccttacatggaggactgggaaggtaaacagtgtcttctcatttttttgttagctgtcagcccagaaaagagatgttacagatttttaaaaaatcagcttcattattgaggtataatatataaacagtaatattaaccagttttaaatgtacggttggatgagttttgacaaatatatagagtttgtgtaatcacaccgtaattttgataaagaacatttccattactccagaaagctccccctttgtagctaatgcccttctcctgcccctggaaacaactgaagtgctttctgtgcctttagttttgccttttctatgtaagtgatcatactgcatatactcattggcttctttgatttagcgtaatacttttgacattcatgtttgttattgagtgtatctgaaatttttttcttgctgagtagtagtcagttatatacttataccataatttgtttgtccattcaccagttgaggagcgtttgggttattcctagctttgcactcttatgactcaagcagctatgaacttttgcatatgagtctttgtttgaacatatatttgtatttcttttgagtctatacctaggagtgagatttttgggtttaaggtaattgtatatttaactttgtttttgtttttcaagacagtctcactttgtcgcccaggctggagtttgcagagcaatctcagctcgctgcaacctctacctcgtgggttcaagtgattctcctgcctcagcctcccaagtagctgagattacaggtgcctggcaccacacctgaataatttttgtatttttagtagagacggagtttcaccatgttggccaggctggtctcaaactcctgacctcaagtgatctgcctgcctcagcccctcaaagtgctgggattataggtgtgggcctgtgggccaccgcgcccggccacctgtttaactttattagaaactgtcaacctgctttcctaagtaggtctactttttcccttcccac

SEQ ID NO: 64035 - DNA, 1040 bp, Homo sapiens
tgaatggtattaacatctatttaattctctgtacttaactcttgcatttggaacttgatgattctgctgggcttatagaattcaaaattctggtgagggtgtttcccaactgtgaccttttatttttctatcatcttagaatcttccatactcagcctcttctggtcttcctgttcatgcagttgctcacgatcctgagccaactgggacctggtttcaagaggtgaatttaaggttaactttaacatagttccaaggcctccaagtggaaatgcccaggaaataactggagttgtgagacaggaatttgtgtggaaagtcaagattaatagtagcattaggacatcttttctatagaggtgatggtctaatctgtaatactgggtcaacttcctgagggcatgattataagaatggagaaatgagagtcctaggattgagccttgggaaaattgttttgggaggtgggtggaaaaaagtgagtcaggatcatagataaaaggaatgtttaaagaagtgggagaatacaaatgtctcaatagctaagggaggaggaggtttcaagcagaggatggtctatggtatagagaagtcaagaagaatgaaatgtgagaaaaagacccttggacttagtaaagtgaaaaatcacttaggagtaaaagtttttggccgggcgctgtggctcacgcctgtaatcccagcactttgggaggccgaggcgggcggatcacgaggtcaggagattgagaccatcctggctaacacggtgaaaccccgtctctactaaaaatacaaaaaattagccaggcgaggtggctggcgcctgtagtcccagctatgcgggaggctgaggcaggagaatggcgtgaacccgggaggcggagcttgcagtgagctgaggtggcgccactgcactccagcctgggcgacagcgagactccatctcaaaaaaaaaaaaaaaaaaaaaaaagtttttgcaacttttcataaaatgatagaacggaatccagaattcagggaggtggaagaaaataatggat

SEQ ID NO: 64036 - DNA, 1026 bp, Homo sapiens
ttataactttcagctttggttttcattgatctataaatacaacaatatgatctgagcaaaatgaaaaatcttaacaccttccgtatcctttgctacaaaccaaaagcttctttgtgttttctcatgaggttcacttatagcttatcaggtgtagggaggtactgtggcctggcacttgttctacccatacaggcagagcataggtgggagtgggcactaactaggcagagggtcacttaggatctagggagtattctacagttcccagttcccataatgatgttgtgctgctggagctttcagtcattcttgttcttccttctctgtcattctcaagattcagtcaaactccatgtcctgctcatttttcctttgaaatatccttacctattctttgatttctcttcacctgtatcttttctccttatgattccttttctagactattgcagggtctttctgactgttctccctacttctggtcaccctccccatgtttgtccttcacgttgctgccaggggtgtcctttcaaatcacaaatctgatcatactgctttcctgattaaaatcctctgatatatatataaaagcctctgatatatatatatatataattataatataatatatatgtaatctaatacatatatatatgtatttgtatacggagaagtgtcagagcatcttggcatggcatggcatggcatagcagagcaggtctttcatgacctgattccagaatgcctttccagtttggggctggatatgtattcctgtgcacctacactgtgctataatgattccaggtcacatttcaatactcggacacaccctgtgtcatatgcctctggagtgtgtatgggtatgtgtgtattctttttctctgtaagattctctcctgggtggacccagctcaaacattaaggccttctatttctctactcctactttaccccaccatagcagagttcctacatttattaggtatatactttctcatgctccacaaaagattttaaggtatc

SEQ ID NO: 64037 - DNA, 1037 bp, Homo sapiens
ccctaaaacaaatctgccattcagatatatacacaccatctatacatgttgcatatgtgggggctgagacaacataggttactagggaggaatttgagtgttggtctgacagtaaagcttgggttctttctactttagcatgagtacaaacatttcgttttaagtttgtgtacatgaaaaatagatgtaaaattgtctcagaagacttttgagattttaatgttgaataactgtttagaaacttggggtctttagactctcaaatggtagaacattcatgttctatttcttaaaattgatatagctttattggcaatagtactgaatttggagtaggggcatttgtgtgtatatatgtataaaataaagaacttaatatttcattgtggaagttacagtgagaagcatcctttggtattttttgtaattttggcactcattagaaataagccatttattctgtcacgttgaaacactgactatagtgaatttgtcactaaattttaatatgttcgttcggcagtagattttgattgattgtactggctggagcctattcttgatgctctttagctttacagtttatattttcagcagacattgatgccctgtgccccctccattgcagagtttcaattgcttgctgaagagttagtgttgaatttggtggccactctctgttcactaaaacctgtgtctgattagggtcagttttggaagtgcccacctaagactattccattacagtagccttttcttttttgcagctcttcagtacaagagcctcatgtcccactccaccccatccatcttttgtgcctattcttcagtgaaaatactcttatttaacccgaatcttttctgaaagtgcttcttctcacttctcatcccaggagagagactcgactttctctctcctatttttcttgccttcaaattgaaaccacctccttccattcatctggaaccacaggttctgggcccttgcatgtgctggtgtctctacttggagaacctttccttgacgtgttcacagg

SEQ ID NO: 64038 - DNA, 1082 bp, Homo sapiens
aaggaagggatccagttttaatcttctgcatatggctagccagttatcccagcaccactgattgaatagggagtccttttcccattgcttttgtcagctttgtcaaagatttgatgctggtaggtgcacagcattatttctgggccctctattctgttccattggtgtgtgtctgtatttgttctagcaccatgcttttttggttactgtagccccgtagtatagtttgaagttgggtaacagacttcacttaaattaattttggcaaatttttagggacgacttaatttttaaaaatttaaatataatttatagaccataaaatctaccattttaaaacatatattttcatggttgtacaatcatcacactatgtaattgagaacattttcatctccccacgaagaaacctcatacctattagtcacttcccaagccctgaaatacactaatctgctttctgtctcttatgatttgcctattctggacatttcatataaatagactcatataatatatgggctttgtatctagcttcttttacttagcagaatattttcaaggttcatccatgttgaatatatatcagtggccaaataatactctattgtatgtatataccatgttttctttattcatcagctgatgggcatttttgcaacttattcatcagctgatgggttgtttgcaactttttggctattatgaataatgctgctgtgaacatttgtgtacatttttgtgtgaacatgttttcaattatcttggatctaagagtagaattgctggatcatatggtagatgtgttttactttttgaggaaatcccgaactgatttctggctataccattttacattcccaccagcagtatatggaggttctagtttctccacatctctttatacactctccagcacttgttattttattttatttgttttttactatagctgtcctagtgaatgtgaagtgatatctcatgcttttgatttgtattttcttgataactaatgatgctgaacatcttttcatgtgcttattggccatttgtatattttctttgggaaaatttattcaaat

SEQ ID NO: 64039 - DNA, 2369 bp, Homo sapiens
gtgagactgatcactgtcgcccaggctggagtgcagtggcgaaatctcggctcactgcaacccctgcctgccgggctcaagcgattctcctgcctcagcctcccgagtagctgatattacaggtgtgcgccacgacgcccggctaattctttttctatttttagtagagtcgggggtttctccgtgttggccaggctggtctcgaactcctgacctcaggtgatctaccccccctcgtcctcctaaaatgctgggattacaggcatgagccatcacaccggccccacgtagctttgtattcctgcaggcaagcaccggaagcaccccggcggccgcggtaatgctggtggtctgcatcaccaccggatcaacttcgacaaatagtaagtgtccttggactgcttttattgacacagcttgggaggtaggggcagagagagggctggcttaaacaaaaagtttagaagcaagccttgcctattgctgttttttaccaagttaacacttggtgtgaactgagaacctgtcatcgaggctagagtcacgcttgggtatcggctattgcctgagtgtgctagagtcctcgaagagtaactgctgaccttattcactggctgtgggccttatggcacagtcagtcaccaggttagagacatgcttcacattcacctacccacaaactagtggatgataaattttggctattcagaagacgtttattataggagtatgtagattttccatagagtgctgttatgtgacttgaattttagtctcggccctgcctctgacattgtcggtggtttatcctggttccaggaaataagactagccttttcctcatgatagtctttggtggtttttaaaacagttgtttaagtcaacagatgtatcatatgcctgacactgctctacaccagtgaataatttacactctaatagggggtggtaactataaagatgataaacatagcatcttaattggagtgtgtatgaaggtggttgttacctcttcctagccacccaggctactttgggaaagttggtatgaagcattaccacttaaagaggaaccagagcttctgcccaactgtcaaccttgacaaattgtggactttggtcagtgaacagacacgggtgaatgctgctaaaaacaagactggggctgctcccatcattgatgtggtgcgatcggtaagttaattggatgtttttctgtacttccataccttcccttacaaaactctggcttaatctaatccacttatataatctgtacttcccagttacctaccagacattgatattcttcctgtggtagaattatcataggtagttccctatccgtagcagtgcctactgtcactgcccaggttgtatcaggtttgcatttcgtgcttgaactatagctggttttcactgagcacagctcttggcccttcatgttctccagataatagaatcctaatatgttccattgatactcagtgccatgcattatctgaagagattttcccccaaaacagatgtattatgtctgtccttgcgggggttctggtccctgtgtcagtcttaactctcatgaatatagaggtagtgttaagaggccagaaccctagggacgctttaaattcacttcccagcctatttaatgtccattgagtagttctggtggtcaggaaggtggttgtcttcttttgcttagcagggggtatttgagcaggaggaggcttatgctttgccgagactagagtcacatcctgacacaactcttgtcctggtgtgctagagtactcgaagagaatctactggtcttgattcactggtgggggcagtcggtgcccccgttagtgcccagatcagaaacatacataccctgcctagggatttagaaagtgggttggcagtctttcctcacgcccatcacgcagttggtacctactacagtgtattgtaaacttttttctctgttcttctagggctactacaaagttctgggaaagggaaagctcccaaagcagcctgtcatcgtgaaggccaaattcttcagcagaagagctgaggagaagattaagagtgttgggggggcctgtgtcctggtggcttgaagccacatggagggagtttcattaaatgctaactactttttccttgtggtgtgagtgtaggttcttcagtggcacctctacatcctgtgtgcattgggagcccaggttctagtacttagggtatgaagacatggggtcctctcctgacttccctcaaatatatggtaaacgtaagaccaacacagacgttggccagttaaacatttctgtttataaagtcagaataatacctgttgatcactgaaaggcctgcatgtattg

SEQ ID NO: 64040 - DNA, 1036 bp, Homo sapiens
aaaaattagctgggcatggtggtgggcgcctgtaatcccagttagtcaggaagctgaggcaggagaatcgcttaacctgggaggcggaggctgcagtgagccgagatcgtgccactgcactccagcctggcaagagagactccgtttaaaaaaaaaaaaaagatgagggggccacgtggaaaaaccttgggctgagaacttaagtcctaaaggaccatctcattcctatcacactgcccctctttagaatgtgacccatcaaaatggaatctttccttttgagccctgttgaacaattagggtacattctctcattcactgtaaaattcagagtacaatacatgcaggcctttcagtgatcaacaggtattattctgactttataaacagaaatgtttaactggccaacgtctgtgttggtcttacgtttaccatatatttgagggaagtcaggagaggaccccatgtcttcataccctaagtactagaacctgggctcccaatgcacacaggatgtagaggtgccactgaagaacctacactcacaccacaaggaaaaagtagttagcatttaatgaaactccctccatgtggcttcaagccaccaggacacaggcccccccaacactcttaatcttctcctcagctcttctgctgaagaatttggccttcacgatgacaggctgctttgggagctttccctttcccagaactttgtagtagccctagaagaacagagaaaaaagtttacaatacactgtagtaggtaccaactgcgtgatgggcgtgaggaaagactgccaacccactttctaaatccctaggcagggtatgtatgtttctgatctgggcactaacgggggcaccgactgcccccaccagtgaatcaagaccagtagattctcttcgagtactctagcacaccaggacaagagttgtgtcaggatgtgactctagtctcggcaaagcataagcctcctcctgctcaaataccccctgctaagcaaaagaagacaaccaccttcctgaccaccag

SEQ ID NO: 64041 - DNA, 1690 bp, Homo sapiens
tgagttaagagcgacgagttctggagggaactacttcccactctgagtcttctggttgtaatccttgtcttttctcttgatctgaactgaagactcatgaggcttcaatctctgtcctagtcctggcaaatggcagagccagaaaatgactttgccttcccagaagacaaaccctccactttattctgtgaggctgacggcaggcccaaaccatggacaggttggggcctgtgcaggcctcagtggagatggggaggaggaagaggggaaggaaacttaggatgggatcatctctcaacagggtggaaggacaggaaaactttactcatggttcaaatcctgtcagacccaaacacaataccaaagaaaatagttgcagcttaatgcctcacttgggagtttgcaaagtctctgctctccgaaggccttggtgggtgaaaagcctaaatcgtccttatttcccaccttgcttctctccttcctcttccatggaatgtaaccgtactttctgtatgaaaacctagggttccaatggaaaaacgattcacagagtgacatgcaagagtcacagggagtaggtcagggctatgcccaagcctgggttggcattagctgggctttactctaccaatgttaggacactcaatgacatcttaggggcttcaggcagaagaggaaaatgttaagatttacctaataatggggccgaagggcaaagagcattctttccatcactggaaacacttaagcacaggctgaacagttgagggaagctgaactactgcaatgactgggtatcttctaactcttaagaccggtcatgcaacttaggctggagaactccatttcaggggaggtcagtgactcacactgaagctaaccccttaatctagtactcagttccctgtgtgatggtgtttcatccctgactggccagtcccagcccattcccaggagagagaactagataacaaagccaaggaacacatgaggctctgggcccaaacaactgtacattgtttattgagaacacccgtagatgggaaggagggatgccctgtaccgcatcgtggccaccactgactgggagccaggcccagagagcactggcagagctgggggtgggcttcccatgacacactgaccatctcggagggtgggaggaatgagaggactaggcctaagaccctggtgccatgctacaaatggggactgattggcctttgcctttcaaaaacagagggtatgggtatgcggactaccagcaaaaaatagaaacttgatttttttaaaaggtcctcctgtacataacaagacagcatctgctctccagggcccgggactggcagcggggacctcaggcaggcaggcaggccgaaggcctccagggaagatcagtggtttggctgagacagtcagctgcacaaaactggccagtcacgagcacccagcgaaacttcatccatgctctggcaggacaggaaagcacccggccccttgggaatatacaaatatttgccatattctctttgcttgttacaaaaaacagttaagaaagcttacagcagattatttacaaacagtatcctgggatatgatgaaggcagaggtgggctggcttggaggataggatctgtgggggcagaggagccacagcagcccagagggtcccaggctgggccttctcccc

SEQ ID NO: 64042 - DNA, 1034 bp, Homo sapiens
taaagatgatctaaagtatatgggaagatgtgcacaggttatatgcaaatactatgccattttatagaagggacttgagcatctgtggattttggtatccttgggtatccaggaaccaatcccccacagatattgaaggaccactactgtgcaaaatgcccttggaattctggctgagaaccttctagtcactatgggatgtctacatcctgttctgtctacagccccagtataacacctgttgacattgatttagagtattcgggaacacaaatctcccagccccttccttcttgctgaacatctatctcatcagtaacaaggccacttacccaaacctcggagaaacttattcattccactctgctcagtgtctgggagttcttctaagtactgctccactcgctgctcaaaaaggcctgggtaaaagaaacaggcacagggaagagaacagtcattggaggaagggaaggagaggcctacatgaagggaaccatggagcacagatgccaaaaaaggagaaagaaaacatctgggatgataatttgcaggagcatcttactagaattcgggctggctcatcaaggcgatcattagtgacatcttgccggggtttgctgctgccaccctgcctccccatgcacattcccaagctgcactaggtgaggaggctgcttctcagttcagagctgccccaagtggacatctctagcttccttcagacaactctaccatgttgttccaaaaaggttgttatactaaatggatagtattagaggacagaagaagtactaaccctgaggttagacagaaaaattgtgatgagatgaaaaagccctcgaatgagctgatgaaatagcaaaaaacaagataaccatctgccttaaatgaagactgccaccaacctacgacagctggcccaatgctctgtaagggaattcccaaccactgggttctcagaacccccgaaattgctcagtctgctccttttctctggatagaagggctttctcctatctttctctttgaggagg

SEQ ID NO: 64043 - DNA, 1113 bp, Homo sapiens
gtacatttccctaagagagtagcattgttgtccttgaggcgctacgcagtgggaaagcggggactttaccagtctgcagggtccctgaaccccattagcatttttgttgcactgggaggtttacgatcaaaggctgtcctgagcctccagcgagctctaagttcctgggcctgggctcaggtactctgtctctctgtctgcccatcagtaccctctccagctgctcccacgcggtggtggccttgctctaccccttctcctggcagcacaccttcattcctgtcctcccggcctccatgattgacatcgtctgctgtcccacccccttcctggttggcctgctctccagctccctccccaaactgaaggagctgcctgtggaggaggtgggccaccgggggaaccagctggggggaagggtggagggggaagcaggtgctgggatcttacttgtggcccctcggcctctttaccaggctcttatcctttctccctgggaggtctatccccggctggagtacttcctgttagctgaccctgggaacctgggaggtctggaggcctggcagagggcattgcgggactcatgccctgagccactctgctaatgactccttttctcaggcgctgatggtgaatctgggatctgaccgattcatccgacaggtaagagggtgggtgcttgctagagttgggctcctgagcaccctgcaccatcacacacactactcaaccttcacaacctgtttgttgagctctctctctgggttcagtactactcacagactagtcaagggtggggagaagctggtcttggaatccttgaccttagcagggtccgcctttccagtgacatcatgagcttctagaaggcagtgtgggaatttgaagaacacggcctgggagtccacagacttggccactggactttgccccctttgagccacatggtcttaggcctctaaattcttctgagctctaaaggagaggtggtgacaacacctgccttgaaatgtttgctgggggttacacaaataactatagattgttatgtaacgtacaggtttgcaatcattgttgtcaactacaaaaagcctttgttagtcgtggaaa

SEQ ID NO: 64044 - DNA, 1007 bp, Homo sapiens
tgtcctgacactggactcccaggctgtaactactcagctccttcagccccctgggcttgatctccttgaaggcagggatgcagggaacaaggccgggagtgggagcagcctgtgtgaattctcaatccctgggggaagggggagggttgggccccagggacagtagggactggagctgggtgctagagagcagagcctgttgggctgcatgcagggagcttgcgaattttggggcggggacagggcctggagcaggtataaagggctctggcatcattgtgctacttctttctgtgagtccacgttcactgaccatttggggtgtacccagcatctggcggatcactgggccttctgggagtacaccatcaggcgggagagacagtggacacagaccgttaccatgccctgtgcccattttgctgcttctctggggcccagaaggatggatgctgagttaggagttagaactccttcatttgcttagactctgaggaacaaatgagatgacgtgggtataaaaactccttgtaaagcattacctttgatgccatggggcaatgagagagaactggtttctcaccctagttttcaggaggcctgcacatctatgctgcacacacatgctgcgggaccaaggaggaggccaggcagaccccagggacagctgctttggcacggcctgagcgtcagcagttcctcctgccctcaccgctggagtcactcactaccttccacccctgtgactcccccagagaagtggctctctgagctgtggcactcaccttgggagcagcctttggaggaaagagggccaggcctggccctgataagacagtcctgcttcctggcaaggctgcagaatggccagccctttgcttatgttttccttgtgactggcatgggacttagggtgatggagataaaggccaggatagcaggacaaacagcctctggaaggaaactctttctgcaggaaagggagggggacagggcaacaaggaccc

SEQ ID NO: 64045 - DNA, 1035 bp, Homo sapiens
agccaccgcgcctggccatgcctaccttttaagtcccattcttcttttgctcctttactccatagcaaacctctacccagtgtctttgttttctttccttcctgtcagaaagcagcaggctttaggggtaagacagccaaacagggccaaagcaaactcctggctccacagcttctagataggtggccttaggcaatggctttatctttttgaactcagttgcctcatctataaaggggataataatccctctctcacaaatctcttgtaaagtcccaagcccaggagtcaggtatagcaaatgttccataaacagtagctcccatctcttgttttcagtttgctctcttagaatggaggtggatcaagaaagggagaaaagaagcaaaaaaaggaatggtatgccgaatgtgccctatggggctaaaaagctacaatggcttgtcctaaggatgtaccctagtccttcccatctgctggggtcccagcctcagggctatgaatccacagacaccctgtagcctctgccaaactgctttgccctttgccagcccccgtcagcgtcctcctgggaggaagggtggagcctgtgtggagcctggcaggagcctggtacctggtgctgggagaccctgcagagctgaggcctgtcctgagagtggtggctgttccttcagggctctggttgcagagaggtttagaggaggcttaaagtcttcctccactagaagggcagtccttactcctccgttcccaaggaaaaggagccagaaatggtaatcatgcattctctgtgtctgtctctctcctcctcctccttgtcctggcccagccaagtgggaaagggccccggttgccagaggtgtactgtgtcatcagccgccttggctgcttcggcttgttttccaaggtaagaggctctggcaggcttccctccccgtcccccagctgacagctcccacaggagtatctgcagccagcttagatgagaaaaccacctgtgactgtgagcgagcgggagacagaatgcaggaa

SEQ ID NO: 64046 - DNA, 1777 bp, Homo sapiens
tctttttgctgagatcagcggtagagggaatagacactacagtaggagagtcatcgaacagatcattactgaacacttcctccttgctaatcactgttccgttccgaggttgcctcagtgaacaacacaaaaccctgccctaaaagacttgttgaacggcatcgtaggtgagaagggggcctggcgaagccctgctccctacggttctgtgagttcctccatgcccaccctccaaagtaggtccccagggagatcccctgagagttgggtgaagggacagccatgtgacctgaaaacccttcctaccttgaactgtgttatctctggggtgtttgcagcagagggaagggagccaaggaaagactcttgttgctggctttgtcctctggctgggcacaggcaggggtggctgagccagtcttgtgcaatccctgaatttataaagcagaggccaggctgagctgggctgggggtggggggttggggggggtgggggggtgggtctgcttctggacttggagccaggatctgtttgtagcctccccactgcagacgggcagctgcatgactcatgagctgaggggccaggcagaagccattctctttggttcacaggaattctgcttgtttatttgtgtgtgtgtgagttcgtgtgtttccttcttcccttctcccccttctctaactcttcctcctctgcaggagatctgcccaaggagaatccatatgaggatgtggacttaaagagccgaagagcaggacgaaaatcccagcaactgtctgagaactccttggactctttgcacaggatgtggagtcctcaggacaggaagtacaacagcccgcccacacaggtaactcagccctgacatcggcctgtagggttagcgtgagggccacagtgggggcctgctcttccaagacttgggcccagcttccactcaggcttttaccctcactagtacttgataaagggtctacggccataccaccctgaacgtgcccgatctcgtctgataaaggaggtctcctcagcaaaggactgtgcactcaaggatgtccaccatgttgaaacctctgtggacaattggcacctgctctgaggggcatcctgtcctatcttctttcccttcctacacaagctctgagctgcaaaactcagccaggagcccttgcagtctcctctctgattatttatcaccctgtgggaaacaggaagacagggccctagtgggagtcttggcattctgcaactctgccagaagtcatctcagtactggcattagggggctaggtgtaggtccccaaaccacatttggagagccagacaggtgtctgtgacacctggagccagtcctgtgggagagagtaagcatgaatctttaaggaatggatggggagaaggcagaatgacaggaaaggtgaaaagccaaaggaagctcttggacttcagctccttctgtccttgtccaggatgtcaggaggcaggtggagaggcttctctgacctccccaggtaactctaattctctttgcaaatggaaggacctggatattatatagcattggccagataatataaaatgataatataaaaatgatttcttctgcctttggaataaggtgtttgtttttataaaagatttaccccatagctgggagtggtggctcacgcatgtaatcctagcactttgggaggccaaggtgggcagatcatctgaggtcaggagttcaagaccagcctggccagtgaaacctcatctctactaaaaatacaa

SEQ ID NO: 64047 - DNA, 1132 bp, Homo sapiens
ctaccgtctcctccaactctgagccattcctttgatacttatttgctctcagctggttcagtttagtggtccaggactcagggtccacttgtctctgtacatctccatcccctggtcccctgtccacctggagagatgactgggagaatctatttgagacagctcctccggggcagtcaggaatggtccaggaagctgagagatgagttagggcagtgaagggaccaagctgaggctggggaggcagcgtgtgggctgcagccagccgtctatttgctggagaactgattagtggctttgttacattagacaggatgttaaacattgctggagaagagaggctggcacaaggggctggggaggagcaggccttcctgaaattgagtttccagagacaggacctatcttgagaacctgatgttgctggctgttttcccctgggttgtcagtgatgtgcaccaggcttgtacatctattacttccctgggcctcagtatcctatgtctttttcttggagctttggattttgtatcaatattcaaagctcttactgtagggaaaagaaggaaggaaggagggagtgaggtgaaggagggaaggatggaaaaaaaagagggctagtcttgggactcatgtcacactcagaagccattggaagtttagaaagctctatctaaagcagtggttctcagttgggggacaacttcactcttccctccctccattcctgcctccctccctctctctccctccttccctctgtccgtcccagagagcatctggcagtgtctggagacatttttggctgttatagctaaggagatgctaatgtctcctggtggatagaagccaaggttgccactaaacatcctaaaaatggacaggacagtctaccacaacaagaattattcaaccccaaatgtcagtggcttggagaaacccctgggattgggacaaggcttcctataggttggggatgacaataaaggccctggctgatcatgcagtccaaggcagtttcgatttgttgagcttggcataaatgttctccctgccgtgatgtggacagtgatgctctggtcctgttttaggggatcagaagactgtgtcctggcattctcccttcttagtt

SEQ ID NO: 64048 - DNA, 1048 bp, Homo sapiens
tagagaatgggaggaccacaggattgccagcacccagcatagtcaagggacatcagaaaaacacagccctctctgcccacggcagcagccacactgggtgctcccagggtcctgggcagcaaactgacacattgcagtttctgccaaactagaatgtaccctgcaacaggaggtagggagggggtggggcaacagagctgcctccccactcattagggaggactctcttccactctgggtgttgcatgaggagttaaaaaaaatatgggagcaccttggctgcctcttgggtggctgagtacagctaggggtcagcgctgtgtgggcagaaggtagaggtagctgctcacctggcttctggatctttggagcacttagagaacagggaaagaagagagggggaggatgcaggagaaagggaggggagcgacccaggcaccagtttgggaatatactgcatcggatgtttaggttttgctttggcctcgtggggtggtgggggtggtttccggagtctgcagttaggacagtgccctgtgcgtgttttccctttttatgtccccatagcagcccaatctgaatttctgggacctgactagggaggccagagggaaatacagaggaaaatactctctttctgttagattctggtgggtttccttttccttccctggggacaggcccgagagtttggagctccccacaaggcttcagggggtgtcttattgctgaactcagaatggcagtttcccgtcttgcttaggactgatcagtggctcggacttcctgggagccgtctctctggtcttggcccagcctgtgctctgtggggtgaaggatgactctgaccccgctggatcaggctcctgcaggcatgcaggaatggagctgttgggaggcagagagcctagtgctcatctccatcttgggtcctggtgattggactggagtcctgtctgtcataggtggagggccagttggccccaagacaaacatgtctgtctgtgaacagtggactcgaatgggggttgtggagggtttgctggcc

SEQ ID NO: 64049 - DNA, 1033 bp, Homo sapiens
taatgggagctatggttttgagagttttgaatagatggggtgacaggagccatgatgctggtggggagtacatgtgatgagtgtagctcattgaggatctgttcttagtggaatcggaagcagaggcagctaaaagagtgaggatgagggaggaggtgttgaagttgagagctggagggaaagctaaaccccagcccggagacttccagtagcactgggctctgagtacccactgttctttgtagatggcttctcattgttctttgtgttctcattatagaggtggagtagtctccgtaagctatctgtggtaaaacggaggtattaggattttgcccagtccctttagcctttattatttcctagtcttactcggagaaggtgcagcttgtggatgataagtttcttctagagcagaggaggcagcttgccatcagtcaggttgagctcagctagaccagagagcgtgggaagggtgagaaggaggtcaggacttagagtcaggaagaagttgacacttgaactggatatttaagaaagaatggggggcaagggacactgaaaatcaaaggaattggttgaacaaaagcttggcggcatgaacattcctggcatgtgcaggaaatgtcatccagtgagatgtggctggccagagtgaaggtgctgctctaagataggactatggcctctggatcatcgaaattgcaggacccaccatgttctccttgccagagcgaaagagggcagtggttggtccccaggagcagggttttttatggatcaggcttccaatctgcctcctttttccaagtggtgacaagatattgggcagagtaggtgccatagtcttgacagagctaggataagccacttgctgagaggctgagtttccagaatggcagaaacagccatgtctaggtttttaaaactatgtgagaaacaactagatttcctttggcctgaaattgcctaacaagacctcactccaattcaggctttcaggaagtgtgtaaacccagctttaaacctctgc

SEQ ID NO: 64050 - DNA, 1517 bp, Homo sapiens
ctgctgctgcccagaaagaaagcacttttagcagtggtaagtcctttgcatgcactatcttactcaatctgtacaacagcacttcgtggttggaactgttctctccattttacagatgagaaaactgaagcttacagagggtaggcaacacatccaaagcttcatagctggtagaggcagagtttcatacccaaagatcacccttttcccattgtttcttacagaggaaactgtgataagccattattttttataaatgttacattttagaatagtttcagatttacagaacagttgcaaagatagtacagagagacagagagttcccatagaccctgcaagccattaattttttttttcctccttttctggtccattttatgagaattcattgggggtggggaacagatttggaatgaggacattttttccagagattccaacttggtaatttttttcagtaggattttttgagcgtccatcagactacattatttcttccccagttctgctctgcctcagctctgctggactgggctgggcctggctttgacatctagtttcagagtcaaatgccccactttctgactctgtctcaatagggtcagatggtaattgggtttccgagagttaggaaggcaggtaggtgtggggaggatctttagcagctgggcttctggatactcttctgtctctgatggggctatgacaggggagtgttaatattttcagctcatgtttgatggcatggagccagagccctcccgagggtcagaggcagcgtctctggggtgaggcctgtttgcttggatgccctcgagtctgtccttgtatggtgccagagtggctcatggtggtcgctgctgtgggccctggccgtggtctgcaggcaggcaggctggctggctgtaggcaggagaatatccctaggtagctggtgtgctttgctttgggtcccaggcacattctccatttaagggaaaggggtctgcagtcttcttggctctgggtgtgaatgggctggcctgaagtctgctcatggcctttgctggatgtgctttttcaatgagatcattccagaattacattcctatgaaattatatttcactcaagatgtaaagctggatttgtgtaaaagcactggcactaaaactcagggctcagagcggggcagaaatgagaagagggataaacagctcttctttaggaggaggggaaggaaagacagaaagagagagaaaacagttgttaaaggattttgcattgaaaattggtgcgctgtaagcatacccaaggagttgggattgccactcacccctggaaaggcaggcttgatgtttgttgtcccagctgcctgccacccccaggcagtttggagggagatgcccttgaggcttcagtgtgtaaggttgctggaacgctggagccgcccaggtgtcccctggtcatggcactctaggcctatccctgcctttctagcctcattttgcaccatcccatatctaatttctttccc

SEQ ID NO: 64051 - DNA, 2683 bp, Homo sapiens
aaggggaagaaaggggaagaaggaggaagaagggggaagaagggggaaggggataagaatatgaggaaacagaagggatctgaagtgggcatagacatacctgcttagctaaggaagtcgaattaatatagtctgcatacttcttgggatcaagcactatgtatttttaaattttctgcagattttaggttagcggtaagacattagtgtaatgtttactctgttctaagcattgtgttatactaggcatttttatttcattgttttagtaaatccttacaatgatctgtgagttaatttgttgatgttgtaacatctgcagggatgtggagtagctaacttgcttaaaatctaaatctaaggctgtttgattccaagcatgtgttcttgccacacttccactctggttggtatatcaaatgcagctcttctttggttatctagaacatctaatgagttttttcctttgtatcactatgtgttatttatggtcacattttgaatgtttgcagaattgaatgagttttttttagctttctctgaaaggggtacctggttaaatactgagaatgcgagtccatataaacaactggggagggtggggctgtggcaagacttggaagcagttaacctgacttacatctctccctctgggcaggaaaaaaatggcctttctccttaacgctccataagtagttagatgtcttagattgcaattccccctattgtataagaagatggaatttacttttggaaaaagtaagtaatttgtcagtaaactagtgtttgtaaataaaccctgatttcctagcgtacagatctcttctagagtcttcaagtttgttggaaatgtttgagaaaagaaatgtatcaggccacaaatttcacttcttggaaattgaacattgactagtttctatgggttgatacttctttttctttttcgagatggattctctgtcacccaagctggagtgcagtggcatggtcttggctcactgcaaccgttgcctgcctggttaaagccattctcctgcctcagcctcccatgtagctgggattacaggcacacgccaccatgcttggctaatttttgtatttttgtagagagggtttcaccatgttggccaggctggtcttgaactcctgacctcaggtgatctgcccaccttggcctcccaaagtgctgggattacaggcgtgagccactgtgtccggtccatacttctttttttttaaaggtttgatcctgtttggattctatcagtagtgaaggcccgggattctgaaatgaaaatgtatgcagtgtttataaactctcattccttggtgttcatgagatctgtggtcagcccaatcagcctgcttagatggaatagtttgtgaagggcagagcagggtgagactgaatttcagatttagcatagattgctagaaaacagaggaatttctttggtaagtcactggattttgctttcctgtctccccttcccagtctgtttcagtaacagacttgcttctgaaggaaagataatgtagttgggaaaggttcctttacagggtgttgttcagatggtcttcatcactgattcacaatgagcagacattgaatggtcatctgccatgagcagggacacacagatgggttggaagatgaggctggaaagactggctgaggtcagatctttaagggattgaaccatccagaaagcggggaatcactttccccaggaagcaggaaggaaacacatttgaatatgatttgtagaaaagaaacctaggagaccatgtagaagatggaaatggagtgggaggaaacttgcctattttattggctgtaactggaggatgatattccagtccctcaaaattcatttagagcagaaagtaagggaagtctcagggtgggcgggatcagaactccagattgcagagctttctagagcccgtagagcagtggttttcagacttgactgtgcaccaaactcacctggagagcttgttaaccaatttagtagaaattttttagtaaaaatttgcatttttaacaagtttggaagtgatgctgctactgttggctgggaaccccactttgagaaccactgcttaagaggcttggcagctgagatgccaataagggtatgagggccagatgttaattggcttgctttcttttactgacccagaatttcatgtctacaaagctttactttagatgttcttaggtggcttactctaaaacatcaacaaagcctggtaaaggtccatgctctcaatgactcttctcaccaaatccgtatcacttctggatgagatttccaggtatgtgctcgtctttaaacagatgcttgtctgatttttggaaaatgcccatcctgggcacttgatttcattaggattggtggcatttctgccaggaaaagcttccccccgccagtcagcactactactggctggcagggctgtttcagggacagccagcaggggctgcacagaatgtgttctgttgattagccaaatttacacaggacatgcctgggagattatctctttaggccaggagttgaatttcaagggcaaagtccacagttggcagccgaaaggctgagaacacctggaagaggggaaggatttcacttgactttcacttccccaggcctcagtgcctcttcccacagaggct

SEQ ID NO: 64052 - DNA, 1711 bp, Homo sapiens
ttgcattagtgtgtgccttctcctggggaggcaggggctggggaggctaggcatttgtttcatcctggaggggaggtgctatgtgtgtctgtctcagtaggtgggtcggaggaactactgggtgcatctgtcttagaggaatatgccacgtaatattgtgctgatagaaacacctgagctctctatttctagccataggccccagaaagctctcctgggtgtgtgtgtgtgtgtgtgtgtgtgtgtgtgtgttttgaagggagaggagggtgttaaatgagtctagattaccttattgaagaatttctccaaagaccccttctcttatttttttggctctgatgtcatgaatgtactgttgttggggagggtgttgaaactatcactatactcttctcatctaaaactgcctgaatgttagatttcactgtccttataaaagagtgaattatatgcagttagcgtatgaagccttcttaaccaaagcagacctattcctacaggcttgtcacgaaaccaccacagtttctcaaagctccagactcttcctctgtgtgacctgtcatcaccaaaggggttgtgtgtgagctggagatggactgttggaaatcacatagtggatggaggattatttggaactgggaaaaaatgagataaactgagggttacgggagacaagatctgaggcaggaggaagactactggaaggaagcaggagtgaggcactgggcaaggggccctgggcggaggcagttctcaggagcagcaggtggtaatcgagagaagggctgacctcggaggcctacacaatttagcagaaggccagactgcccccagggagctcagggtgacagtgtcgtgcaggccctcagaagcactggagggggtaggggtggctggcattagggttaacacctctgtttgtttgttcttggctcagaggtgtctctggtgcccatctatgcagtattggtctgttcacccatttagtcagtgaatacggagtgtctgggccaagagctggggaggaacgcagaagtatcaagtatgggccttactcccatctatgtcatgttataatagacgttgtgttgtagttatttcttcccctctctcccccactctgtctgtgtgattaagagagaagcagcatagacctgctgcagttctgagttttgatggtagggttaatgaccatctcatgctcttaggctgggaaaaaggaggagggtccaacagactgatttcaagcacgattcgaatgaaggaagagagccaactgaaggactggaagtaggagggtgaggattctaggcctgtgttgaagcttctcttgacagtgtcaaaggatggtgtatgtgggagggagtcataggaaaggggaaatgggaaagttggaaaaaaactatcaagtcagctatttttaaaactctagttttgttcgaggaactgacttttggtgtgcttgtgacttggaacacaggctaccttatggagttctgacaactgagtattgtagatggttttaaaatgaactagcctgtggtgtgtttgttcaactctcagtgactcttaggtactcagtgagtgcgtggtgctgccttagagcaattctgatggaaccatttgcatttaatatgagtatctgacatgcattgcagtgcactgcagtgatgaacagctatagctcaggggtcttagaggcctagct

SEQ ID NO: 64053 - DNA, 1101 bp, Homo sapiens
tttggggctcaggaatgatgtcatgctccaacagttggattctattagcttaaggaggagggaaacagccaattttcttgactttgcaaatctagctgatctcactcttgctgaatctgaggtgtttagacttcactctaaaaagcatcattttacttttatttagcacaaaggcacaggatatttttacaggaagaatcttttatatggaaaaatctgagttaacatcactcccgtggtgtttgtagttcttacagggaaactccagtgccttttgagccgcttgttcgtcctagtgaacactgtctgttttgtctcttggtgctgctatgtctgacctgtaatggaaaaaaaaaaaaaaaaaaggctaattaagctcagccaggagcctgtggtgagttccaagtccctctagagcatttattaggacagagggactgtcacagggatgcctgagctggggttttgcactctctctcttccaggcagcttggtaagaatcaagctgtcctcccacatcaaaaggtcgatcacagactttcctaagaggtggaggagggggctggcttggggttggggggcctgcaaacaggtttctcatccagatgtcccagagtgagctctcagcagcagctgctaagagctggggaacatgaggcactgtagttgtgccgggtggattcctttggttacattttgaccaaatctcagggcacgcagtgtccacgctgtgcactcctacactgattgtcctaagttttggtaaaacttgttctgacctagaggagtggtacatggtgagctgtgtggccttggaaaggagaccctcccagaaaggcagttttataggtgatagggtagtggggttgtcagtaatattatgaggaggatgaatgcagcaaacacttcctgcaacggagacccatcaggggttgtgcttccacttgagccatgttatgtcttaaattcacttcttggcctcagggaactttgcaaatgcctttggtttctctgtgggatgagggaacagctgctgtcctggttcttcagtttttcttcttgaactttctgaacagaatgtcttttgtattctggcaaaca

SEQ ID NO: 64054 - DNA, 1081 bp, Homo sapiens
tttgagcccaggagtttgatgatgtagtgagctatgattgcaccaatgcattccagcttgggcaatggagcaagatcctgtctctaaaagaaatttaagaagaataataaataaacttgaaaaaatggtcataaaaatatctgtgcagtgtatttcaaaaggttatgaggatcaaacaaaatgatacatgtaaaaagaatgttacaaagcagaaatgtatgctgggtaggggggagaggaagggacaggatggggatggggatgggactaaacttagggggtctgccgtgtcccagggactgtgctcattttctgacaggagcaatattattaccgactgtgacagcagctcccactaagcctgcaccttagctgcagatccttagcagggcagagagacaaggctgtatttgtatcaggtttgtcgtctgggttgtgactctcgacttgcccaggattcttcctggtcctgaccgagttgtctttgctctccatttcaggaagatgagagactgcttaggcgccaccactagtaccatgagtccctgcactggttaaagccatcgccacaacctggacaggcagcaaggtaagcagagaggccagtccaggcgagctcctgggatgtgagtgcatttccgccccaactgctgcccggaaaaatcccaagtgcacaaacaagtcaaggcagcgcatcagggtccctcctacccgagctccaggacccagaggaagctgggtccccttcaagcgcttcagctagctccctcccccctggcagggattcttccaagttataaaaaatgagacactggaggggaagaaaacaagtccactcactgtcttctcccttctcccctctgagctgttcaagcaagttcccaggagcagttcagagcccctgttggactggaagggaggtaggaggagtggaatgcatgcaaaaaccgagctgatcaaaagacagtgctgtttcatggaagcctcccagaactgagagagagagagagagagagagagagagagagacagtgagaaagaaagaaaaagagagcgcccttgtgcacgcgctaggccaaga

SEQ ID NO: 64055 - DNA, 1016 bp, Homo sapiens
tcaaggatgccatccttctttgcagctgccaatcttcactggtgtctgtgccctggcagggtatagagcccttctcatgggtgctctgcctctttgggggcttgagaacagatggggcttaatttgaagcagatttccctccagggcccaggtatgaaatatatattagaagatgactactggtcttggcttttctttcttatgtgtctctttcttccttttatcttcccactactgtcaggcactgtgagcagctgttgctatcacacgggcggatcagaacatgaagaatggagctaaatagagctgtctgcatgctgttctgatgggctcaggctcagcctcagagaataggtggattggagcctgtgatgggggctctttcccccaccagagtgggtgaaagcagggaggaacaggcgggaagatactttaggagttgggagggtattaattccacctcttctctccttcctctgtaccccaacattccctgtgagttgtcaagggctggagagataacaaagatctttctttccaccatcaggcagtaaggcaatgcagccctcgctgaattttcagctccactgacattgtgatgcaaatattaaataaagcttattttctgacctgagggaatttataagctattgggagagacagtgtttgttaaacaagtagagaatatccaagatcttaactgtgttggtttacgaaccatggatacatttatagttcagaacaagaaagttgtatcttaaaaccacagaaaactttccttggaggaggcaggatttttctggtctttaaagttgggtcaactttataaggaaaggagagatgttcactccagtgtcacggcgatgatctaccttggaggggtaggtgtggcagagcagagccagggacctgagctctggaagtcctgccattacataggtgatgtgaagtgatgcagtgaaggtggagttttgtggaaatctctcctgtagatcgatgaaaataggataattttg

SEQ ID NO: 64056 - DNA, 1029 bp, Homo sapiens
cccactttgaaaatcatgatgtaattatgacaggatcgcattctttaaacttactgtttagtggggttagtggagttatctcctctgatttttgacaaggaaataatacattcttgttgcaatgctgtatcaggtcttaggatggaaagcgtctaatttaaagctacagacctttcctgtaggacgcatatgctgctaatctatgaaaactgaagatgtcccagtgcactgtgtgtaaactgcagcatctccttgtggaatgaacagttcaggaaaatagaatgactttccaaactgtactaggttccaggtgactgaaaatttcctgtgagggtgggaaagcttatccagatgttcttgcttggggatcagcatgtgtcatcccgttccaaagaagtacagtcacagctgattttatctttgtccttctttctgtggtgcccagggatgctctttttgagttcatctttggtcttgtctctctgaaaaaagcagcatgcattttgatctaggtttaaacagttaaaatctgtggccacagggtaaggtgaaactaatggctctaagtagccaactttttacctttgcttcactggcaccaggctgtgagtaactgaactaaccagctgcagacccttattatgcaattttgaggtaaggatgggtgaaatcctaggggctgggagacagacatgtttggctaccagagagatgacatcagttcatttactggtgctgtggaggaaggggagattccaggtgcttagccttcttcctgcatgtgggggtgtccagagccacccttaatcctattcgcagccaaggtctttgcttgggaaaaaccatatttaactctgtgcctcctgttatccccatagggacatgaagttggaagggttcttgtatctttggcttcccgaacaaagctttgaagaacagacgtgtgtctatatgtgtctctgtgtgtattttgtattaatgctagcaactgattaaggttttcagagtccaggtcgtatatgagaaggg

SEQ ID NO: 64057 - DNA, 1012 bp, Homo sapiens
ctacagcaaagagctaaggattaatatcaaaatacaaatggatcatggagcggtttagaaatattgcaggccgcctctggtataaacagagaatgatgagggtttagaggtagaagaactgactataagcagaagtgtttgaggaggctgcatggagaacaaggggcatcatcttggcccttggcaggttggcaggatttgacttggtgaagagaacgagaaaggggactttaactgggaggactactctggggcacagaggagggaagctgttttatgaaaccaggttcatttgttcccatctgtaggttctgccctgtccgcaagcagccgcgtcttggctcactcctcttctcccctcctccccattgtgatgaccatgagccttctcttggagtgtctgcccagtgggcccttcagcctgggcgctgctttggttcggatgatactgtcctccacttgtcttcttccaaggatagatagcgccctgacctctagggccagcagcctgttgggggatcttccttccaatgtcaccagccttaccagcttcttgagtatttattccttcataccacactcagccttcttctggctccttgctacttgttctcttagcatagacactgtcccctctccctttccccagacataggcttccaggttgcaattccatgagtgttcataacaagcctcagcagtacactttaggtcttactgtccttatgtcctctggcacgtccctgtctgtgttgctctgtggaccatggtttcccatctagaaaccattacttgcagtggggaatgatgcacatgaggaccttcgaagggcttgtaggagctgaggctgtgggaataaagtgtgggccctgattctgaagggacttgattcagtcctgaagagaaaccgtgtatttttggtttctagacactctgtaatttatttaatcagacctttattgagcacatttaggctgtcttcagtctctttctgttaaaatataacagtaat

SEQ ID NO: 64058 - DNA, 1380 bp, Homo sapiens
attttgacctcctccacctccaaatatccttaaatctttctgaagagatttaatctctcttaaagagatctcacaatttccctgggaaacactttctaaggaaggtttccagattgatgatcacagattatctccttgtagttagcttttcttttaatgtttcctacttttactgttttcctgtccctcttcaatgcacacatgttcacagagtgaacaaattgtctttcctggactccaaaggcagctaccaaatgtacagactgtcccatctgtacccatcctttccttcccttcctctggctaaacaagctgagctttctctgttttccttaacaagtctctctttttagacctatgattatacttgttgctttgtgttttgttttatgcaggaagttcatatcagatatgttggcaattagagctttcaaactggaaggagccttttggagtaaaatatatatatttttttctatcagcataagtaattgtggaatatatgtaaactctggagatgatcttttaaaaaaattaccatcaaaagaattttactcaagtcctttaagggcttaagaagaatccagcctttgcgagattgcactaaaagtaacagattagcccaattaaggcctatctagaagtctgggaatcatttgtttaaactggaatttaggatctccatgcaaatatgatagaaataatctgcttaaccctttgttagtagcattagaaataagcccctttttatgggactcttaatgataaaaggtcatagtaattagaatatgctgggaatttgtccctgtttgttaatgttttggaaactcctttgagtaggcaggggtcactttgggtggcttttttctttctttgatgtgaagttgggatcttggatgtaaatttagccaaggacaagtttgaatttagattttttaaattttttccgtcttgttccattcttccttttggaggcggctaactagagtggggtaaaaagtgcctttaatcagagtcagtgtcctgagactgtcagacactggtctctgggaagtgctctgtatcactatcatttatatacttttcctttcttgtgtcctatagtttttgaatatctcctgcggaaaaagcactggggtgtgtacgggcatctgtttattctcttattacctttcttcagtgaatatgcttaatgttaggggtttgatgaatcaatgagtggatgaagttaagaaattagatggaggccaggcctggtggctaacacctgtaatcccagcactttgggaggccaaattgggaggattgcttgaagccaggagtttgagacctgcctgggcaacacagtgagactctgtccttatgaaaaaaatacaaaaa

SEQ ID NO: 64059 - DNA, 1023 bp, Homo sapiens
cacccacatttatagccaggccctttgattctcggcagataatgggctcaggaagggcagcagtgggtggagacattttactagaattagtctgccgctttgaatacaatctggatttcttgctatttcttgtgcaacctgtacgccgtttcctctgaacttgctagtgctctggagacttggttgtttggccaaggaatatcccctagcaggagggctcactaaggaggggcagcttgacaggcagaaaagtgatgtttgtcaactaaagaagttttcttttaattaatgttagagtcacccatggttttttgtcaaataaaaaatgcgaaatcaaaatatgatctcggttctccacacccatttttacctttaagagcctctcacaccttggagagcttgccttactgaatggggttttgataggtgaaattatcaccaggacctctacatgggtcaggatatgactcagtttgggttttggacctctgaggaatgtgacccctcttagtgtaggggatttggagtacaaaaacctgggttaaagttccagctttgccatttattcagaagttcctggaatttgatgtttgagagatctctgagctcagttttcctagttcttctagatcagggtaatcccttagggccagatagaggtggtcacaccctgattagcaccttggttccttctcccagtttgtattttgtgtcacctgaaagtcattttattttctctgtagcctctggttataggttatgtggtcattcctccagagaatggcaaagctcattgttggttggggatcatttggtatgtcttcccgggagaatgctcttgaacctagttttgagagttggggcctcaagaagagactttggcaatgcccttatttaaatgttagaaatgtttggttgcatttttgatgcattgcttacatagttaatgtttttgtatttggtacttgtcattttaataatttattaaacaggtgatttaggttttctaagatagctaagagc

SEQ ID NO: 64060 - DNA, 1069 bp, Homo sapiens
aatctctgcctcctgggttcaagggattctcctgcctcaaggctccctagtagctgagattacaggcgcctgccaccactcctgctaactttcgtatttttagtagagatggggtttcaccatgttggccaggctggtcttgaactcttgacctgaagtgatccgcccaccttggcctccaaagtgctgggattacaggcctgagccaccgcgcccggcctcaggatgtatcttaaactcattatttttgatgcttgccctgcagctgagtaaatacctctttaggatatgtgacaattgaactggcttggattttggaacatgtcctggccttggagcctgcttatgttcatacacactggttccttagaaatgtaaatttgtaaagtcaatgtaaaactgaaacttcaaaagtcaattttcattgctgctgttgtgcatttctattatcaaattttatttacagtgatttacgtgagtaaaaaatggattacacgatttcctaacatctcactaagtatgggtttggatcttaagtaatttacatttttcttttccaagttgattgttatactgggctaatgatttccttcaaattccactaataaatcacagattctcagtgctgttattccattgctttattattaaatggcacccttttctagtttttgtttttgcaaaccagtggagtatttaaagtaaaatttcagaatcccttttggagctttcggttgagaccaggctccttggaaccctagtgctttgggagttctgctgctgctgcagtaccaaaagtagcttctttgaatttcatttgggttttgtagggctcccccgaggcccgagaactgggagaagggaaagagctcatcggtttgtttgaaggccggcgggcggtgcaggcagcttttcccagactctcccagctccggcttttcacgcataccagaagagccgcttttttcctccagtgattgaaaccatctggactccaggggggtcacgtgtgtatgagaaaatgacataaagtttcagaccccgttgtgctttgctccagacccagaca

SEQ ID NO: 64061 - DNA, 1107 bp, Homo sapiens
aggagtgtttttatttatctttcatttattcagacagcatatatttactgtgcgcttatttcatgctgggcactgtgctaggcagataggatgtaattattagcaagacaggctaggttgctgtcctcaaagagcttgccatctcttatacatagtcgaccttgtttgtcaagtgatgtgaacattacgttaacgcaaattactaaattactactatttaaaatatagcattaacaccatttctgatgtcagtgtctctaataaatatttggccagtattaagatgaactaatagtcacatatatgaagtttagactcaaggctatatttagactatatttagacaatttaagggatgttaacttttctttctgagagagcagatctaatgaagtttttttcctaagaattaaaacagttccatgcataacttacaatggaattggccaacaaaaagaacaagtatttatatctaattattgccctcttacattgcttcagcacatataagaggcagcagcagcagctgccaatgatgaaaataattattgtcctgggtctgattagagaaaatcttgatgctgtctgttgagttgtctttccttagagatgttacaagaaaaacgggactttagtagtagaggttctaatagttttgaaagtgggagacttaagaacctccttacagagctcagagagctgcaggtagaatttacctggaggctggctaaattctgtggcttgcctttacattcatgagttctcttgttccacgtttggggcagaaccatcctaatttgagattggagagattggaaaagactggagagggctaagttcatccaaatatggcccaggtctcctgaggtgttcaagcacttcagtgaactagagtagaaactcacttagattgtgagtttggagaaaaacttgttctgattaaagtaaaactgttctgatttttggagtaaaacctgtgctgatttttggcctttgtgttttcaatgtgcctcaacaacagctgaaatcttgggctttcctaatgtagaagcaactcaacgaggaattgatttatttttcatgcgcagactgcatcacaccgcatat

SEQ ID NO: 64062 - DNA, 1050 bp, Homo sapiens
tcaggtacccatctgggtgagcagatgatttaaaactgaattagctttttgaattctgtgcaagtaactctgtgcaagttactatgaagaatgcgcctttgtataagcttgggaatgtttattttaaaaataatatttaaaaattatttgattgattgagacagactctcactctgtcgtccaggctggagtgcagtggtgcaatcacagcttactacagtctcaaccttctaggctcaagagatccttccacctcagcctcccaagtagctgggatcacaggcatgcaccactattcctggctaatttttgtattttttctagagacagggccctgctgtgttgcctaggctgatctccaactgctgggctcaagcagtccactcaccttggcctcccaaagtgctgggatcacaggcatgaaccacagtgcccaaccaaaaaatgataatcttttaaaattaaaaataaccatagatgcattttgaaacttacataatatttttctagtgggttaggtttctggttacattctatgattaattaattattacatagtcaaatatttatactgtatgttcacctgaaattattgtaattcaacagctatttattgagtaacagccatttgctagaggttaaagatggaacttatactgatagataaataacccatgctttcaagaggctcacaatctggcagtcagcagattggctcatggtgagcaatacttatgaacaatggttatgggctatgaagtgagccttgggtgccaagggagagagtaatccattctcccaaggagtaggaagaagtcggagaaggctttattaaaaaggtgacatttgagttgggcctatcagagatgttacctttcataatattttctgggaaataacaagttgtttatgagattggagcataggatgccagaagccagcaatgtaatgtaaagtttgaggtgtctggaacatctaggtgcagatatccacaaggtagttggaagttcaggtctagaaattaaaagagagaagtcggagctagagata

SEQ ID NO: 64063 - DNA, 1031 bp, Homo sapiens
gttggttgaatcgtgaattagagggtcttcaagtgatcaaagtaactgaatgaaaggagtgagagagcaacttctgacacaggcatagagcctgaatgcattttgaagatgtgagagagatggaactgtatctctatagaggaaaatctaagaagtcaactaagatacaaagaaattactgacctagccaaggctatagaaccattgagggcagtactggaaagaatggggtgtcttcatttctagatttcatgctgtgcacactaaacaaatggtttgtaaagattcaaaacatcgcttaagtcagccaaaaatgtttttctattaatctaaagtttgagtaagtgaaattttgaagacgatggtatctaattgataacttccttactccttaacctgtagataatctccctttttaaagtgctcattacagtagtgattatgtagagaaaaagcttctgatgaaaatgtggtataaaattgtattctttgttcagcaagttaaaacaagctggtctgtaagcaattattatcttcatcaaatttcctagctctaatgttttggcttcataggcccagcacgtatgccttctcaaacaattggatggttttaaaacacttatgagatgtttgtgcttatatcttaacatagcatcagttcaacaagaaaaagaaaaagaaaatgtaagatttggcattagggcttagtttgaaaaagaaaatcaaaccaaactaaagaaaacaaaaagcccctaatgacacttaatccctgcataggaatgaacattcttcattcagcttcataatgcccttagtagcagtgctctagttaagagttcagaagtgtctttcttttcttcactctttaatcacttgacatttttggaaaagaaatttatcagaatgcttgttggctaaccactattaatatttttatatgggtcatatattctaaagagatctctttttgccttttctttggttttatttgtagttatcccaaatgaaaacaacaacaaaatgtgttctgt

SEQ ID NO: 64064 - DNA, 1003 bp, Homo sapiens
atataataacaatgcacatactacagttaattgtgagcaaatttatatcctttctgcatattgttgtcacataaactaatcatctcttaattactttgtccttccagaatgaattaaaaaagattctataattttagccagcactagaactataggcagccgtgggtggggaagcaggataagaaactgtgatgagactgatatgcatggcatgggacaggtggcaagagaataatttagtttgtgatcaggcctaggcctggggtcaggaaccagataagcatttcagattggtagcatatctgtgacccaagattacaacaaggccatggatcagagccaaatggcctctgaatggcaaggatcatggcaagcaacaggtcagagacaaagcggaggaggttgtcacacaggtaccaatgggattggtagatggggaagaatgagcaaatatccagagttgggagtctcaaagttaagttctgccgttagaaaatggccccttagtacttctggacaacatagatctcttcccatcttcctttcctctctttacaaggtttcagacttagttggaagacatgactctggctttaacacactgatattgaagacttatgggctgagatgaatggctccctgtttaagagaatcagaagtcaacatagcttgcagagtaggtctagagagttctgccttaaagggtggagtaataaagccaaaggattcagcaaaccaagggtcatcattggtaccatgcatgaagagttatcttcatcttgtgaaattggtgactttgctccattctgtgacttatctctgttttgaaaccatattaactcctaggctgcctggtcctgtaaccatcgatcactgaatgactgccttaacccaatcctgtaaacctaccacaacttaattcttagaatttctagctgaatatactagaggaaataaagaataggaaatctaaatcagatgtggtggctcgtgcctacactct

SEQ ID NO: 64065 - DNA, 1091 bp, Homo sapiens
gttcaaaaccagcctgaccaacatggagaaaccccatctctactaaaaatacaaaattagccgggtgtggtggcacatgcctgtagtcccagctacttgggaggctgaggcaggagaatcgcttgaacccggtaggtggaggttgcagtgagccaagattgcaccattgcactccagcctgggcaacaagagtgaaactctgtctacacccctgccaaaaaaaaagataaatcttcaccaaaatcatgatgaaaattaatggaacggtaagatttaatttactgcaaaaatccaacagacatgtattgagtacatgtttgttgagccgtgatgttcatgtatgttaaaagtgacggacagaccactgatttaattgtcataaatcctacaggtactatcatctaaaatttctcggtgcccttttctgcttgttgtgtctatgatgctagtttaactcagtacatttgctttataaaaagccagagaaagatgatagtctgtttatctaggttctccaaagcatttcctgccaggcagttgacatgtagccttggcacaatttcaggaaactgtttgcttctgtttaccctttccagatacagcatctcctaagaattgaggtgaggaatctcctttaacttttttacattttagaagtatactttattctaacactttagaatgctcttcatgtaagagcaatgaaaatctttgtgtctttaaattaaaaaggatatgttttagtgcttcactagtagaaaaggcaaagccttaaagcaagttaacctaataagatgtactcagaagaatatttctaggctgggcgtggtggctcacgcctgtaatcccagcactttgggaggctgaggtgggaggattgcttgaccccaggagtttgacaccagcctggacaacatggtgagaccttgtctctacaaaaaaattttaaaaattagcctgatgtggacctgtagtcttagctacatgggaggctgaggcaggaggatcacttgaacctgggaggtcgaggctgcaatgaaccatgattgtaccactgcactccagcctgggtgacagagctgaaactctgt

SEQ ID NO: 64066 - DNA, 1022 bp, Homo sapiens
tcagggaatatttttatcttatttgtgttgttcagtggttttacaaaaatcaatagcctcaactctactgtaaagtgattaaacccttggttcatggttcagcaaaaggaataatatttgtctttggtttgaggtttagcaaattgctgttcttcatttttgttttcagttcatgcttcagttcaagtctctgttatgaaatggagcctcagaacctcttggctttctagagatagaattaagaattgtgtactgggtttgtctccacagtttgaagcagccactaaaacacatctttaggtctgtgtcctcaagtgctttccccagcttctcgttcttctggtcacatgttttttagacagtgtgcctaccctgttcaaaacaagcagggctgtgatgtcattagtcattatcaagggcaagtctaaggctaactttgagggggaggaaggaagcagacaagagaaatgtaactgttttccgatctttcggaagattcttcttaaattagagacttctccctccactcccccacgcgcaggaagcacagagaaaagggctgcagagcagctcttgggtttgtttcatttcctgctgtgtttctaaatctcaggaaaatgtacccctctcttcccgtgtcctggtctgagacttagacaataaacatggaaccgttcatccacattttttaggggaggaaatgaaaggatatgtgcattggacatgggggcaaagatgtgaaatttgtttaacctggcagagagcatggtcctgcccacctttagttagccagcgttcttgccctatggaggcagcaggtggcagcacggggatgccaaatgcatttctttctctgcagccactttgggtgggctaaggtttgttgcatgacttcagaggcctgtcaagagggcaggtaattcacctttgctctcttgcctccctccttaactgcactttgcccaaatatcagggttttttgaaaatttgacaagacaatttggttagctaacatctttgac

SEQ ID NO: 64067 - DNA, 1091 bp, Homo sapiens
acatgaattaaggtcacaagaaaaaatcaccggcctagaaaatacttttgtatatctaaattgagctaaagagtagctgaatttaggacattatgttcagctgggaaaagaaacaaactgctgtgctagcagtggtgacaggtgattagcagtaggtgaagttggagtcttgaagacttgcaaaaaaatcccaaagatctttcctctttttttcttaaataatactttggtgaagagttgagtttatttcttatattgctatctggtttgtatagaaatcctataggcttagcagatatgtcagtcagttttactattatcatacaaagttctgatttatgggcttgaacaaagatgtaacttaattttcaatttcctttaggttaccattataatttatctctccattttgggccttctacttctgtacatggtatatcttactctggttgagcccatactgaagaggcgcctctttggacatgcacagttgatacagagtgatgatgatattggggtaagttcccagcctgccctagctgctcatggccagtccctgtcatcattcgatgtgaagtgcaagtgaaaaatagtcatatatagatgttcacgtgctgaagcagatcctcaactagagaagctaaaaacagctctgatttcagtatatacctctttatgaagaaattgcttgatgaagccataaatgtgatgatttaaacgatgatctttggtgagcatgctatacagggccttgctttcagtaccaaaggcacaattttattgccattccctgtttacattgagaaaagtatcagagatggttttctctccaagctctcctgcctgaaacaccttctctgtcaatatcaccaaatattttagaaggcagagaggttttcatcaagggaagtgtgaagatcatgatgttcttttcttaatgaagtacaacttgataacctgctgatgttttatatttcctttttttctactgcttaaaaaaaaatctgtgggccaggtgtgggggcatacacctgtaatcccagcactttgggaggccaaggtgggaggatcacttgagcccaggagttcaa

SEQ ID NO: 64068 - DNA, 1033 bp, Homo sapiens
cactccactacagcccatgtgacagagcaagaccttgtctcttaaaaaacaacaacaaaaaagaatgatgttaattcacaaaagagataatcttatatttgaacagtgccccatatcactttaaaccattttaagtagttttccttagtaactgaacaagtctaaaggtgacttgatttgttaagtagtttttcatcccatttgggattttttgtgtgcgtttttgtaactgttaacagtagcagctttgaaaatagacactactatatgtgtgactttgtggcttcttaaatggttaaaacttaccaaaatgctaatattgagagcagaaattattttactttatcttattgattatttgttttttatgctctttcattgggtaagtttagtgattattctagatttcaggaaacttttggtcagagcaagcagaagagctagctgggcttaagcagcattttatctttgttttttcagtgattgccttcatgttgtggagcccatgcctgtgcgggggcctgatgtagaagcatactgtctacgctgtgaatgcaaatatgaagaaagaagctctgtcacaatcaaggtaaaatatatatccctctatctacctgtctgtctgtctgtctacgtcttttctgcttctggatggtttctagacaagacagaaaaatttggacccctaccccaaaaggaataatgggcctgttctgcctgcctcactgacatggtttgtggattagttagggtatgttagatagatatgtgaaatggcacaaaaatgccctatgtgtaattagcatattccagaaagatatcccagcttctgtgtaggccatgtgtgccagaggctgagagagcagcatttataagccctcctctccttgcctttccagccctttgaaaaaattaaatatatagtaattattctagaactattacttctggattttaagatttcccctcttcatttcctgtaggacagtggtccccagcccccaggccacagcccagtctgtggtctgttagg

SEQ ID NO: 64069 - DNA, 1037 bp, Homo sapiens
tgcggctttcactgagtcacggcccggcccgccgctgcccttggctcgcggtcgctgcgtcgcggattcctccccttccagtacccctgctgcggtttcggtggggattccgtcgtagcttttctagcttgcgctcccctcggctgtgcctcctccctggatgtctcttctccagtagaaagaagaggtcctgccctgccctcttgccctcgggtcttctttctttttccttattcttaataccgaattttgttcacggggcttgtgcctcctatgctgtgtggctgttcctatgacccagacagaggtgattcctaatggctttccgtgagggggaaagaagtggaaagagggttttttgacagttgccagatccagaggacttctgttgaatccattgtccccctatgcaaaacccacttctctagttttggtcctaactttgaccttccatcctgagtggggagagagaaaaggggccaaatgtgaaggtttcctgaacccccaacatctcttcatcattctcctcttccagccccgcccccaaggagtgggtagagggaggaagccaggctgctgcatctcaccgaccagctaatgtgtgcatctggagctggggtgggtgcagtctttttttctagcacagttgttcctggcattaagtagaagcacctcaggacagggggcctggggtcaaagatggtactgtcctctttctatagaatgggatggatggctaagggttaccaatataaagaactgtatttgtcatccctcagccactgtagtggtcctgggccaagtttatgtttaactttgtagttttatctggagttttcttgtagtttgattgttttcttgaatttcacaatcgctttattcatttgggtggtaatatgtgaaacactaattaaatgtcttttaacaaatgaaataggtgctctgcataatttttctagtattttttattttaagcttttgaaatatttaattttggatgtggttgtcggccctagttcactgaaattgccatttct

SEQ ID NO: 64070 - DNA, 1109 bp, Homo sapiens
gattatttcctgattttatagatgaggccattcaggcttagagatttaaggaactgacctaaggtcccagcatggcaaggttgcaaagcaaggtttgaaccaggactgtgggactccagagcctggattcttacctgtaactttcctgcgtttctaatgagttggagcaagtaaggaaacacagtagttcttaaaagcagaagaaatattttttttaaacgatagcagtcgggaagcatttggtggagtggcaaacagctgtctagttttctattacaccagaacgcagcacagcaaccgacattcttaatggtaagtcccatcaacaaaaagaggagagatactgccgcagaggaattcaagatgaaaagaaaatgtattctcatattttatattcactaaaataaaagaaagacaccacactaatggagtaccaatgctattgtaaacatatcgaattagtaattgtgactattataccattactttccatttgccatcccttaactgagagaaacttttcaagagttcctctcacacaatttcaatgatgttctcataatgtgtttggctttgtcgcacatgatatgcatacaaagaggcattttttctgtgtctggaatttggaaaagattgtgctttgcatatgcttaatttgaatgatgcctataggaagtaagctagacttcaaagggggaagattggcatttggagaagtacagcatgcactgcatttaatgtgtatatcaggacaaaaaatattaatgagagaacacacacagttttcttcctccccgaccagccaaattctccaccctccagccccattcaaataaaggagagaagagtctttcttggtggataagaagcttgattgttttacataatacaagaatagagaaaaaagcgggaggtggggaggtgagagggaaaggagagcctgatgagctcaacaggaagtgagtatagacagagaagagaagaccaaggactaagccctgggaccctcctttggtaataggtcagagagaagaagaaaagcaaagaagcctcagagaagtaaccggtaaggtaggaggaaaaccaaagagcatggtgtcctggaagct

SEQ ID NO: 64071 - DNA, 1070 bp, Homo sapiens
gtcccagctactcaggaggctgaggcaggagaatggcgtgaacctgggaggtggagcttgcagtgagctgacatcgtgccactgcactccagcctgggcgacagagtgagactccacctcaataaaacaaaacaaacaaaacaaaccaaaacaaaacaaaacccacagtggataccttcaaagtgattaaaagaaggtaacacaggaagctagtattttctattgctgttgtttttaataattatttaccaaatgttctttaatatagggcatcataatcattgactctgagggaaagctcaagatactgattttttattttatttttttttatccttagagactccaaagctgtgataaagagactgtgtgttttcacccatataatgagggtaggctggagagaagcacatcacccccggcccgcctttgttcctattcatgggtgctcaggctctcagaatgagcactcctcttttgttttgtgtgttctgagaatatttagatggtgtactgatgccttttcagggcaacagggaaggtgtcagggtggcaaagtggaggctgtgctttcagcaggacctgttacccgttttatgtcatgttttcctcccaattcacaaggcatatttttgtttggtttccagaaataatcttcagtggagccctgatcttggggtgcaccagaatgggggatttccaatgtttctgagctgtttcccttctggtgaacgaaccatcctggacgtgacaaccagaccaattttggaaagagctagggccatttgctgggctgcctagtttggaacagattaatctgctcaccccagcagtggtcttgcattaagtcagagtgctacaaaggctttgaggtcacttcttgaaaagctgtcagcgtttccagagccatttaagtctctattatgtcttggtaacttcaggtgtagcttgatgtggtaggacattaggtggtaggttctctgtgtatcacaatggcatctggcatacaggcattcttacgaaatatttcttgtgtaggtgaattactctgaggcagtaaaggtcacttt

SEQ ID NO: 64072 - DNA, 1036 bp, Homo sapiens
aaaggaaaagcttgtcacaatctaactggctatgttattattattaaatttatgttttgcaacttagaaaccagctacagtatggcccacttaataaaacacctgaaacaaaaactgcatggatcactgatttttatggaggtttatgagcagtgggtggctgcgggtgcagttgggtccatctgtgaggatggtcttgtggcatcacctctctttaccagcaggctcggggttgtggcctgcccaggatgcccctgagggcctggggtctcctgggtccttctgcccgcagtgctaggagccttcctagctgttatgtggctgattcacatggatgcagacagggttctttccccactccacagaggaggagactgagacacaggagggaaaagacccggccaggggtgcagaggttgtcacttgactgagacaggatgggccctttcttgagagggtaagggagaccaggtgtgggaagctgggggtcgggggaagctcttgaaagaaaggtttgctttcctggggatggcaggtgggagacctttatgagaggtccagcttcgttcatttttattcttcaggctgctttggcaggaagctccagaagaagtgtaacgtgatcaagtcaggcacctcagaccaatcagtgccctcttttatgctttcctggtttgcatgcattttccctttgcctggaatgcctccccttcacccactttgtgtttgttgtacagggtttactttagcagtcacctgctgtgaagtgtccccaatctccctaggcagttaatcattccatccttgtgctccttcattttcttagatgctggcatctcctctctggattgtcattgcctgctttcgtgtcaggctcagcccttgcaccgtgagctcccagagggaaaagggggatctcttgcctgtctccatcccctgggcctggcaggtggtaaatgcttctgaagagatgaggagagggcccagagagctgcagcgcagcgtcctgcctgcagagggggtgagaggccacact

SEQ ID NO: 64073 - DNA, 1043 bp, Homo sapiens
ttgcttaatgacagggatacagtctgagaaatgtgtcattagacagtttcgtcaccatgcgaactttatagggttctcatacaaacctagatggtagagcctactatatgtctagcctgttgctcctaagctacaaatcggtacagccctgtcaccagcccccaggcctgctcttctacacttctcctggagcttcctgccacagcagcctgaagaataaaaatgaaggaatactgtgctgaataccgtaggcaactaaaacacaatggtaagtatttgggtacctaaacatctcaacctataaaaggtacagtaaaaacagagtataatcttataggaccatcatcccataaacagtccgtcactgacaaatgttgttacgcagcacattttatgcagtgtgtgaccatacacgatacacagaggaaattcagggcttctaggaaaccttctaaggcctcatctccctaagggcacctgatgagccattcctcacccctgcactgcaccaggcctccaacaccaccaccaaggctaaccgctgtgcactctgggccctgggtctgcagtacctggctcccaagcacaccagcatctgaaacttgccatccttgccgatgttccggggagtattgttgattgcagtgacaaatcggcagaagttccgggctcttgtatgccagttttcctcagggactacttcattcttctctaatgtctcataataggtttgtgctttttctgtgaagagtagaaaagcttgccagtgaaaaggctctcaacaccaaccctgacggtcctacaggccacttgccatgggcctctccaagtccacacaggtaacttaatgagaatagcacaagtgttctgatgtcactggtcatgtttcaaaatgatccttagcttccctatccttattttttaaatttatgtatgtggcccttgatataaagatgttcttttccctagtctgaagacacaaaaaattctgaggatggtttcttgcatgaaaattctccatatgggtgcaacacagggcttgg

SEQ ID NO: 64074 - DNA, 1758 bp, Homo sapiens
tgtggaattgctgtgcccagatcccaggccacctatgccactcagggtgattctctgatgatacatggtggaaccagcagagcattgaaggagtctctatcctggtttcagagcctatctccagggattggctttgttgatggctcttcctgtgagcagcagggaggagctggctgctctgacagtccattgtctgatcttcaggttcccgtgtggccggtggttagggaagggcatggatgatggaagcctggagcggatcctagttggggagctgctcacatcccagcctgaggtggatgagaggccatgccggaccccgccgctgcagcagtcccccagtgtcatccggaggcttgttaccatctcacccaacaacaagcccagtaagtgggaggaggggttgggccctcatgccatacagtctagggaatgggtggatctctgtgagccctgataatgggaacctgggtcccagcctgtgcagctgcctcaggaaacacttctgctaacaaagccacctcacacatatggcacccttctcttatgaatcactgagagcatttggcactctccttagagggctggcaggagaggagagaactcatgctgccaaacctgggcgctgtatatattcatgcatgatccattaaaggagaggggcctactttctggactccccctgcctgattcctgggcttcacagccaaggcttggctctcttttggttacccacaattccaaggtaaaatggaaactaaactttaccagcatttcttagagatagaactctaaggtgttagcttttgtgtttttcccccaagatttgcggaagagctaaatcagcaaagctgggtgggcaagcgcctctgcttcctagggtccagctgccctgcctctcctatgggccctccccgtgtcctcagtctcctgctcaggcagctaagcactgttagcctcagagattggttagggatgtctgcttgatttttattagagctgaacactgggcagatccaggagtccatcggggaggcagtcaatggcattgtgaagcacttccataagcctgagaaagaggtgagccttcctgccctccaatccagggccttacattgaataagagagaataattttgtttttccgattatcttgttatgctcttccaggcccatgtgctgtggacaccctagagtcttgtagagtgtgtgcctcagctagttggagatggagcagactccttcctctgggggcctttgcctcaggttaccctgttttccctccatactgatgacccaatagagtccctgggcccctagtgaacagtgcctattcctgtcctcttctagatttgcctgggtctccttgaatagtggccacactggctttgtcctccagtggagaatctccttgtgtgtgacccagatccatcatctcttctttcatccatttattcagcagctcttcactgggagctgctctgagccaggcactgtgccaggtgttagggaaacagacaaagtcctagcctgtcttttgcagccctcccaactctgggctgtgggtttagggatgcaatggtgggagggcagctcggctgagacaagcctggcaccctcccctgtttccttacgtagcgaggcagtctgacgctgttgctctgtggagagtgtggccttgtctcggccttggaacaggctttccagcatggatttaaatcgccccggctcttcaaaaatgtcttcatttgggatttcc

SEQ ID NO: 64075 - DNA, 1085 bp, Homo sapiens
gtgatgaatggtgaccacagaccttcatccactgccactcacacaccatacactagctgacagcctagctagaagcctgagaagacctgtgtcatccttgatggaatttcattccagccctcagtttagaaaaggagatttcatgacttctgacacttgatattatagtaacatcaacataccttggacacaggcagtatttgatttttgttgttcctgctgtagcttaaaccgttgtccctctgtcccttagttagagtagctagctttgttcctttatagggtgaacctaaggaacttgaagcttgacatcttatgcttcccttagctgtctccttccagaactgaaaattctagtttctttcccttccttttggtcggagactgatgtattacctcctctccaacagaaagttatataagcgctatgccttcctgcgctgtgatgacgagaaggagcagttcctctatcacctcctgtctttcaatgccgtcgattacttttgcttcaccaatgtcttcacaactatccgtgagtagccctgtgctcccagctggccttctcaaggcagtctttatgaacctgcctgagactcactcattgtcccctttttaaagaaagaagattatcccttgtactttctatttgtcttttgcctctgtggggagagaggtgcacttgccctccttggaggctgtgttttctctgaagtttctcattcttgttctgaactggagagctcagtcttttttgccattgtgttgtcggtgttgtcctaggcactgctctgggagcctaagctgatgaaggtggagtggagtcagttgagctgatgcagtttacctccctccctgcatacccacaaagaatctcccttttgttttcgcctgagaggctcacttggcatcacagaatgtttcaaaccaggctgaagggaaaaagagctcttttctgaggtagcagaaagaactccagataccagtgggagatttcattctgggctcagctttggctaactcattatgtgtctgtgagcagagtctatcctgctgtgagtcccagtctctctatttacagaagaggg

SEQ ID NO: 64076 - DNA, 1393 bp, Homo sapiens
tcagtggctgctacagcatctcagctaacatggaagccctcctaatcacaaagccttgtgtttcataatacatttgtaaagctgtacaaaccgttgggtttcctggcatttttggaggtgagggagcataggagagtatctcaggccctaagggctcagagttagcctggctttttaagggctgtactgtcttttttcctcccaaaatatggtgagcctatctggtaaagctacatggaagcccagtatttggagaatatagagataggctctcccagggtgagataagtctgtctcagcaggtctcctttggctttacaggtaagttattggcagtgagttcatctcccatcccaccctccacttcctttttacattcttcctccaggcacatccagaacatcggggaaatcaagactgatgtgggaaaggccagagcatgggtgcgactgtccatggaaaaaaagttactttccagacacctgaagcagctcctctcagaccatgagctcaccaagtaaggctgctccgccaggagtagaagcaggctcccaggaatggagggaagagattggaaacttgtgtgggaagggggagtattcagtgtgacattgctgctgcattcagctaacctctttgcttatgaaggttttgcagtatttcctcttctccctttttatcagtagaagaatacttccgctatattggttctccctgtcttctcaacctgcatgcccaaaactagctttcttggagaggtagtgggaaggatgaggtcttcctctccttcctgtattcaggtgacatgtatacctcttggacataaggcgtttcctttgtctctttcctgttctggggagcaaaggattggagaattaaaaggaaacttctgagatgtcctcttctctctcttgttcaacacatcatacccctcacccctctcgggatgtctgtagccttttcttgtctgtacttctgcatgaccctagtccctgtccacactctacctggtaaacttcttcagggctcagttttctttcccagagttttcctggactccccagaaacgtggttcatccctcttccaggcatgcataacatttgttagaatatttgttcatccccttttcaccatgatgtgttgtattatcattgtctatttgcttgctacttactgaagtttgctttcattgaaggcataaacctgtccctttcccaaggctgagcatgttgcttggcatccactagggattcagccagcccacataaaaggtatgcttagctgcacagacaggaggtggacagtctatgaagagtatatcttgatagaatgtccctcagtctctgggatttccagctagcccccaagactgtttgtagcttggagatggga

SEQ ID NO: 64077 - DNA, 1048 bp, Homo sapiens
ccttaactacatatttttttttttttgagacggagtctcgctctgttgcccaggctggagtgcagtggcgcgatctcagcttgctgcaagctacgcttccttggttgacgccattctcctgcttcagcctcctgagtagctgggaccacaggcgcccgccaccacacctggctaatttttttgtatttttaatagagacggggtttcaccgtgttagccaggatggtctcgatctcctgaccttgtgatccgcccaactaggcctcccagagtgctgggattacaggtgtgagctaccacacctggcctttcttaactaaatttttaaagcatgcactcccttgtaacctgacctacatgggtataaatatattctgtgtccttggggctaattcatcctgtccttcccagcccaacagatgtactgtgcaggctgtcagaaccctctccggttgtatgtaatcctgctcactgtggttatttaatcctgttgactgcttccttgtagaccaagaggatgctggtggaaaagatgggccgagaagctgtggagctagggcatggggaggtgaacatcacaggggtggaagagaacaccctgattgccagcctttgtgatctcctggaaaggatctggagtcatggactacaagtgaaacaggtaatgtatgtcttgcctctcattgctgagcaaattgtcttcctgttttcagttactagctttcccacactctttttgtccagctgactggctttgaagaatggtgcacagtgccctggagtgagatttgaaataaacaattaaataaatgtgatccaaactattttccttaaagataggctttataaatctgtgtgtttgtcagacttttaaaaagaggcatctttcttcctgggggtagagctgaaggccaacctgataggtcctgtttggcagctggccctagtctagagatagaccagaaagagagaagttggagctcaggaagtaccagtcatacactaaaggttcttcactaatcatatattcacagtggaaaaaaagtct

SEQ ID NO: 64078 - DNA, 1050 bp, Homo sapiens
gattgggatagctccatatgtctaggacctgcaaaaagctgcagatgggttaaaatcatctcatgcctggatcccattcaacagcaagctagcattgtatttaataaatggcagttgaaataatcagaacctgaactgaaaagtaggtaagttagcagaattactcattagttacttttgaagatgactgtatcaaagcccagatagagttaagtgaatatagttttagatctatatgtcaagtgtttgtagatgtttcaagagagacatgttccatgaggaggtgtctctctcatgtccagtcactcatctttaatctgctcttcctcaaggtctctgagctgtctctggtgacatctaggtcatttcctgtgtccagcattgactcgtagtcattcatgttttctcctgttagttgacattgctttttaagtgagacattattaattgcctgctttggttctgattgtgttaggtggacgaaaaggaatgcccctgcccagtggaggcggaaagatcggcagaagcagcacacagaacacctgcgtttagataatgaccagagggaggtaagataccttaagaatgataaggatgaccttgctatcatgctgtgcactccttctctttctcatttcctgttctctggtctgattcaaacgtctcagcaatgacctcaccccataaagaagggttaataataggtctagttcctgatatctaatgctgggcctgggttatcacaaatcagaatgtgggatgttttgcaaattccagctagctactaaccgattgtaatttctcatgcatgatgctccctgaggagttcaataggaacctcagaagttaagagtctgaaacttgggagaaatcctttaaaaattggtgtgagttttgtgtgtgtgtgtgtgtgtgtgtgtgtgtgtgtgcgtgtgtatataggaaaaaagttaattttttttaattctttttttgtttgagacagagtctcgcttttatcgcccaggctggagtgcagtggagcgatctcggctcactgcagcctccatc

SEQ ID NO: 64079 - DNA, 1045 bp, Homo sapiens
gcttatgaatagatgtgctgattattattatcagacgatttaccttcagccaaagggatctcttaaggcaaagatagacatgtagagtgaacatcaggattctgggaagattggttgactcagtaggttacccaagtgagtttgttccagtgtcaaagtttcaagatacctgaacttacatgagtgggtttttttttttttaatgtagagattttgcagcttggtattcttaaagacctaggcagcctcagagaataattaacctactggatcccttgggcacattgacattacccttttccctgtcaattactgcttctttttggtcccaccaggcatcttttctgtcagatcagcctgagccctacctgcccttcctctcaagattcctggagacccagatgtttgcatctttcattgacaacaaaataatgtgtcatgatgatgatgataaagaccctgtactccgggtatttgattcccgagttgacaagatcaggctgttgaatgttcggacacctactctccgtacatccatgtaccagaagtgtaccactgtggatgaagcaggtaaggcctccttggaaatgtacattcaggcctcttggattatggcattaacatgtcccttttcctaaatatgccagcctctttatctgtttctgcctttgtgtatgtggttcccattgcctgcagtcttcttccttgttttctttttgcctggttatcttcttctcatcctttaacactgttagttaggaatggatctcattgtatgtagtagagaccctaatcagcagtgggttaaacaaatagggggttctttttcttatattagcaagaagtacacaattggtggttgctggggttggctcagctgctcaaccatgtaaacaagaactgagattctgtctttttattcagtgaatccttgttgttggcttttatggtcatactgttgcctcattttttttttttttaaatgatgtcaatgaaagcctcatggttacagaagctctttcttttctgcccttttttctgcctg

SEQ ID NO: 64080 - DNA, 1025 bp, Homo sapiens
ccagcttctgcatgcttggtggttctttgtgcttgactttgcaggcaaagctcacataagctccttataggatgttctgcagatgtatcttagtgagaactgagcatgtttttgcttccatgctgaatggagacccaggaccactgtctttctttttgttcagttctcctaccccctttcttaagaggatctacttaacattctgtggtagtatttggagcaagatgtcattaattatttttgttgtatttccatattagattttattatgagcaaggacctgtgtgtgtaggtttatttcaatttgtggtccacaagggtctcttggttgtctcttggacaccctcaagggaatcacattgagcataccctagctgaagtttatcgtgatcgtttctaaataagaaattgtactgaaagttttaacttactgtttggaaagcaagtgccttgtttttgactgatttgtgtgtgtgctttttttgttgttgttgacccagattaccagagactgatgactgtggcggagacgattacagctctcatgtttcctttccagtggcagcatgtctatgtccctattctcccagcttctctcctgcatttcttagatgctcctgttccatacctgatgggtttgcattccaatggcctggatgaccggtcaaagctggagctgcctcaagaggtgagatcttgagtgttggtgcctctggccccaatccaggattggggagagaagggctttgggatgaacccagcatgcatgatgttaccaagtttattttcttctattttggtgattatgaataacttctcaggaaaaaagtaaaaacaatgaatatttagttcaatttatgtcatcccagagacacttattatctttatcaactgacatatgtacattgtaatttctgtatttatgctattgtttttgttttgttttgctttttaagagacaaggtcttgctgtgttacccaggctgggtgcagtagcatgatcgtagcttactgtagccttgaac

SEQ ID NO: 64081 - DNA, 1548 bp, Homo sapiens
tttattatcacaagggaggatggctctcggacatttgggtttgccctcacattttatgaagaggtgactagcaagcagatctgcagtgcaatgcagaccctctaccacatgcacaatgctgagtatgatgtcctacatgctccccctgctgatgacagagaccagagcagcatggaggatggtgaagacactcctgtgaccaaactgcagcgcttcaactcctatgacattagccgggacactctctacgtctctaagtgcatctgcctcatcacacccatgtctttcatgaaggcatgtcggagcgtgctggagcaactccaccaggcagtcacttcacctcagccccctccactgccccttgagagctacatatacaacgtactctacgaggtgccgctcccacctcctggccggtccttgaagttttctggggtctatgggccaataatctgccagagaccaagtaccaatgagcttcccctatttgactttcctgtcaaagaggtttttgaactgctcggggtggagaatgtgtttcagctttttacttgtgcccttctggagtttcaaatcctgctctactcacagcgtaagtcagtgcttactagagccttctgcctgcctcaggcttctttgctttccatgttcagatacagtgaggctgactgtaaaggttaagagctattacagtttgagcaaaacccagatcttttgcaggtaggtggtggatggcaaattgatagacatgagagggccagtatttctgattaactatcttcatggccttttgctgggcattccagtcttggaggggaacattgcttcctatgtcccttctgattgaagtgaaaagaggggtgggtaggaggtgatggtcacaggaagctgactttccatcagttctgttctgtcattctgcagagttatttctgcctcttcctcagcctagtaaaattgaggattcacaaaggataatcctttatatattgagaaaatgtggatgtgttgcatctttttgttgtttgcttaactgaattgttttcataaatgggaggttgagtgtaagcagcatatttggacaaaatagtaaagtagattagaaagaaacagatgcttacttaatgagccaggctagtaacatgaaattcattcattcagtacatatttactgagagtgcactatgtgtcaggcattgtttcaagggtagtggtggacaagacagaaaaattgttgctatagtggaacttaaattttagtgggagaagagaggtgattaaataaatatataaaatatgtagtttgtaaggtacttaataagggttataaagaaaaataaaacagggaaagggatagtatttggggaagagaagttccagtttgtaatagggtggttaggtaggcatccctgagtgacctgttaatatctgtaggaaaagtattccaggcaaagggcacaggaagtataaacggtctaagacaagaatgtgcttcgtgtattcaagaaccagaagctgggtggatggaatggagtgaatgagcgggag

SEQ ID NO: 64082 - DNA, 1046 bp, Homo sapiens
aacaagacttcttcccttagctaatttaaagaaggggcagatgtggagaggtggtggtggggacagaggctctaacaatcacttctccagtgattcatagcctttctctcccttttgaccacacttcagatcagctggtcatgctcacctttggctccattcttcatctcacttttaaaaagttctccccttaatcactcagctttcctatcttctcacacatgcatgtcatgtcttagggagctccttacagccattttagatgagatcaggcgcatttagggtggttatggccatagacgcctagagccattttaggaaggcgtctttcctttacagagaacggtgatagttgtcctgattcctctctctgttgtgatatttcgtggtttttactgaggggattttctggctagttaggaagaaatgaacaaactgataactgaaagtgaagaagcttaggaggaagaaacagttatcttctttcagacatgaatgcagtttaaaaatacatcccaagaatttcagactgtagacgagatcattatgtcagcggcttgctgcttaattactttgtacagtaagtgcaggcttaccatgggtgggctctgcaggtgttacagaaagctctgagcctagctctacataagctgtaggccttgttgctgcagctattaccagctgcctgctgatttttgccagtctttagtgaagattaccaaatgtattttgagggacgaaatttactcaaaaagaaagtttcagaagaatttgtttggaagaaggatcaggaaataagaggaatgaaattgtggcacttgcttttaataacagaaagaaggttgggtcctatcagaatttgaaaattgtgaataagtgagctgctgcttctgatgatggacaaaacctcagagaaaatagaggagagattgtagttataaaagcagtaactttctgactggaattattattagtttctggaacaggtgccttagagttattataaacttttctcttttagaaacttttgaggtgcctttgggatt

SEQ ID NO: 64083 - DNA, 1013 bp, Homo sapiens
tcgatctcctgacctcggaatccgcccgcctcggcctcccaaagtgctgggattacaggtgtgagccaccgcacccagctggatttagttcttaaaagttactaagtgaagcagttagtcaaatgccatattccaaatcttctgtggttgctgattttcatttggcgtatgtagaaccctgggctgagtcttatgagtggtagaatcctggcatggcagaaaatgagagtgtgtgccagatgtcaagttgttttcagtatgccttcaggggatcagatatgactcaggaagtaagatggcaataggtatagtttagaccgttgtgtttctcaaatattgtactgtctttgatatttgcttgttgtcgtacatggaatctcttgtagagcttcctgttaaagagaaccaggttagtaattttttattttttattgttcattatgtgatgggtaagtcaggttaaaattttgcttggccatctgtggtctactttatgtactgaactagctgggttagcctaaaatgctttcctggaatgctgagaggtctgagcagtgaaaagtctgtagaggtttctcacattgagtttcattcctctgtgaatgtgggattccttgatatctttctttctttttttttttttttttttgtttgagatggagtgtcactctcttgcccaggctggagtgcagtggcttgatctcagcgcactgtaacctctgcctcctgggttcaagcgattctcctgcctcagcctcccaagtagctggaattacaggtgcctgccaccatgcccagctaatttttgtatttttagtagagagggggtttcaccatgttggtcggggctggcctcgaactcctgaccttaggtgacccacccgcctcagcctgccaaagtgctgggattacaggcgtgagccaccgcacccggccggaagtccttgatttctaaactattccagttggccaaacaatgtatgtgcattggtttatattggtcacagaatcaa

SEQ ID NO: 64084 - DNA, 1479 bp, Homo sapiens
cctcccaaaatgctgggattattggtataagccaccgcacctggctgcccaactaattattatttttttgtagggatgggttctcaccatcttgcccaggctggccttaaacagcttgaacagtgatactcccgactcagcctcccaaagtgctgggattatagacatgaaccaccatgcctggctgagactgtatattctaaagagaacgctatttgactccatcaggcagggaggatcatactgaaattagtggattttactttaatgatattggggccctgcaattttcttcatagaaggaaatcctgagtcacagtgtttggtgcttaaaccaaattctcttagagtctgctcagcccttccttccttcctaggttaaaaataaagttttctttgcctaaagcctcctttggtaacacccctttccagtcctacatccttttataagcttgttttttggctttgttggaaggtgtacttgggcttcgctcagcttgtaaattcctgttgtggccaggtatggtagctcatgcctgtaatcccagcactttgaggggccgagtgggggaggatggctttaggccaggagtttgagacaatcctgggcaacatggcgagactcgggtctctacagaaaatagaaaaattagcctggtgtagtggtgtatgtctgtggttccagttccttgggatgctgaggttggcagatcagctgagtccagggaggtccagactgtggtgagccatgattgtgccactgcactccagcctgggcaatagggtgagaccctgactcaaaaaaaaaaaaaaatcctgttgctgtccctggctttgaattactgtcagatagtcttagaggtctcttaggaacctgggtacacatgaaggaacctatacttcatatgttgatatgttttaggttcctgctagagatggcctaatgtccagtgagaaagaggcttgcctttcagaagctggtgacttccttgtggaattcagttttttggtttttttttttgagacggagtctcactctgtcacccaggctggaatataatggtgcgatcttggctactgcagcctccgcctccaaggttcaagcaattcttctgcctcagcctcctgagtagctgggactacatgcaagcgccaccacacctggctaatttttgtatttttggtaaagacgctttcgtcatgttggccaggctggtgttgaattcctgacctcaggtgatccacccacctctgcctcctaaagtgctgggattacaggcatgagccactgcacctggccgaattcagtaattaaacacaggctattacggccagatttttatatttagttctttttttttttttttttttgagacggagtcttgctctgtcgcccaggctggagtgcagtggtgtgactgcggcactgcaacctctgcctcccgggttcaagcgattctcctgccttggcctcccgag

SEQ ID NO: 64085 - DNA, 1032 bp, Homo sapiens
cgccgagcccggggcgctttcccgcgcccgctgtcgtcggggaccccagaagaaaccttccttcagccccgctttgtcccgggagccgggcgagtgtcggccgggaggaccagggcgggcgcgggcgaagggggctttggactggaggggggaaacggatgaggggctctgagccatgaggggtccaaacctacggcccgctgcgcagtggccacgtcttcggcgaccagaaagagggagggttgtgtgttctcagtttggtgtaggttgagtgacttcgtttaaaataaaggaaagcttgtcctctggcacccattagggagggaaggcgtcccacgtcctagtgaaagtaagttccacccagacttaaaaaaaaggaaaacaaaaacttggtgagtttatctggccacttcccaagaagcttgtgatactagttcctcaaaaccgttataccccagccctgggctgggccccctgagtcagattgcagctctgcgcgtctggatgggatatgaagtaataaagtgaacttgggcggcaccaagaagagtaggaactcccttagccttggaaagggcttgtatcccggggccatgccttttttgaaaagtaatttatgtcctttatgaggacagaggcgtttgtgaataaaagggtagcagcattgtagttggagaggcttggtgtgttctgatgcgtttcaagtcatatttgaaagggaaagtgatgaggggagtcaaagatggggccctgaccagatttggcactcactgcagaaggccgtgaaaattatacagtccccgtgaattttccactgcactgtcattggagtctttgaattgtaacagttttgaaaataagtttttgtctggagtttccagttagtgggtttcaagtgggtggaggtttgtcgggttgtactttaaggttgtgtcatcctgatgagggggactccttttcacttttctgtcactgtaaagtttctctttcgaaagtgattatcctgttgactaatcttactcggcttcaacg

SEQ ID NO: 64086 - DNA, 1556 bp, Homo sapiens
tttttacagtatttccactgtgcatatgcaaaatgggtattacataactgtatcatatttggtattgataattttttttttttttgagacggagtcttgctgttgcccaggctggagtggagtgcgtggtgtgatctcggctcactgcaaactccgcctcctgggttcaagcgattctcctggcccagcctcctgagtagctgggattacaggtgtgtgccaccgtgcccagctaatttttgtgtttttagtagagacggggtttcaccatgttggccgggctggtcttgaactcctgacctcaggctatatgcccacttccacctcccaaagtgctgggattacaggcatgagccactgtgcccagcctggtattgataatttatattcagataatttgttatggctctttaatatcccacaaggggctctaaaaagcaaacattcaagagtatgtagtttttagacattaagttaattattttaaacagtgacagcaaaacacaagtgattaaatatagtttatttgttccaatgactaaattttacctcatttattaatctggtcattaaggaatatatttaataatattatgtaattattctttttatgcatgatacacctagaaaaatgccttttgtttctattgatggctttgttgtttggagctacttttgattacttattgcagtttcccaatttagtctttactttatctaactcacaaagtaaaattaactgatcacatggcaactactgtatttaaatagttctggaaaaatgaaagtgctttttgctgcttggtaaatgggtaatgcccttgattccttgactgtaggacatagctgatctaaagtactctgtcagttttaccttcacccatgactgttattagttgtcaaagttgaaaagtactttagctgtgagaaatccttgtatgtttttattataagaggtataatcatcctcaaagcctgtttttattacatgatgtggactgattattttttctatcacagtgttaacagatggattttattgtaaatacaaagaaaacatattgattattgtagtattcttatgtcacctggccttttgcgtgagattatttattatttctagcaaggctttcttcctttcttattgcccagagactgactgatacatcttttgttatttttacacataaattaaacatagcctttttggacaaattcactaaatattaatgtataaaatgtaattgagtaaatttttatcagaattttaaaaataaaagagcttagactcagtagaactcagtagaagcttcactatttactccagcgtgtgtaaattgtacttactctattctcagagtatatttactgtccttaccattgattctttccctttgctaatttttttttttgttaatggtagctgcgactttaggtggggtatattttcttctcctaagagaatagacagtttttccagattcatcatcattgactgtcaagaaaggacccttcagcaaggctgtaccctcaatgcagttgatggcctgtcttca

SEQ ID NO: 64087 - DNA, 1145 bp, Homo sapiens
cagtgagccaagatcgcgccatcgtgttccagcgggggcaacaagagcgaaactccgtctcaaaaaaaaaaaaaatcattatccttaagaggtgattaggaaagattgaattctttatatggaaataaacttgagctttaaattcttaattttttttccaaaatggaaatagctgtgttgttttaagaaactttatgcacacagaacattttaattttttaaaaacaattgcggtggtttttactgtatctttttatattttatttcaggtgtcgcacctccttcttttgtagccattaaggcaggaacaacactgtatcaacttacaacagcaggagaagctgtttcctggaactcaatatttattctgatgatcttggctgttctttctattctgccagccatcttccaaaaaaaactaaagcagaaatttgagtaaaaataatcatctgatttttagttttgctgtcatcaccatctcaggattaacaggtgcatccatttatgttttaaaatcacctcttcagtaattaaacaaggaatttgtaaaataaaatttcctatcagatagttaaagtaatacatttaagtgacaaggggagaagaaagtaaaaatggaaattggtatactgtgaaaagtgctatcaatagttaaggtagacatcttagacatcttataaattattataccaagggtagctgtagataatagtagtgtggtaggaaattgttgatccagctaattcattcaatttaattgaatattttttatctttaataactaaaatagatatttttaaattctagattttttaaagtagtgttgcaggttttgttaatgttaggcttttttcagagcataaactggaaaacttaaaaagagatttacattttcttcctctttttttttttttttttttttctgttttgagacggagtctagctctgccgcccaggctggagtgcagtggcgcgatctccactcactgcaagctccacctcctgggttcacgccattctcctgtctcagcctcctgagtagctgggactacaggcgcccgccaccatgcccagctaatttttttgtatttttagtagagacggggtttcaccgtgttagccaggatggtctcgatctcctgacc

SEQ ID NO: 64088 - DNA, 2901 bp, Homo sapiens
tcttattttcttttattctcttgtagttcctattcctttaaaatgagtagtgaatttaggtaaaccttcatagttaaattagaaataattgtatgtacatgatttccctgaaaacatttgggagtaaaataaaatgtattagagaagcactaaaagattacggaagaccttttcttttttcttttgttcctcccccaaagtgcccggttcctctctatctagaacatacggttttttgtcttggaaaccttttagtagcacacacttactagtatttatgatactgtttagtaaatggtcaacttagaggctagacctttggatataatctcattgtatgataatttttgtatttatacttttttcctgaaatgttacatttgtcttttaaaattctacttaattatattctaatccttaacttaaaagttaccagcttgcaaacatttgctattccaggctctatatttctcagtatactctcagggtttctttatccctttccactagccttatttcttgtttgtttggtaagtatgaaaaaataaaattgggagactgaaaaaacaatagaatgatgaggatgatgatgatactttaaccctactagtctatgtaagcataaactcattaattgaagaggagttaatgttaaagtccctccacaaggaggtgttataatttgtttttcccccagaacagaccaattatagacttagttgcatttataagctatgttttagcttttctttcctattggattttgtaactgcgacagtccaaggagtgttggtgagcacaatgagttaagtcccagagccagaggtggtgttttcaagcttaggaactgggggggtcgggggtagggtcggggggaggtggaaattggctcctgaaattttattcttaggctaaagcctagcattaattatttggatatagtcactaggtgtaatcacaagtgccagtttgttttagctgatctcatttgaggtacattttggtctgagaaagtactagatcatctctgcacaagagatgtcatgcagagtaccctccccacctctgaaagaagtaaattaattgagctttttactcaggtgaataaatcaatgtgagtaagacggaaaaatacaaaacgcttatggcttcttttgttttccagtgttctggacttggtgcctctttctgttatatgctttcctatttagttgggagaccagttgtatacaaatacctaacagagaaagcagtaaaatggtcacagcaggtaaacatgtatttttaaattatttgatgtaactctttgttaattggaaggtctgtgtttagtccctacatgaattaactacatgtattaacccaacataaattaattcctaagttaactcaagtaataagaattatcttctgaccaaataaaaatgggtggtaggcaaatatgaatgttaataatttcaaatacaaatgtttcagacctgtgatggtaattttaattctttatcttagtaaatttaatcagcagagaagtcagtgtgaatataaaggcatccacataattagatacctatctgttttatgttaatgcagtattgtgtgcatctgttatggaaacacttgtatcagccaactcccagtgcatttttttcttttctttttttgagacggagtcttactctgtcacccaggctggagtgcagtggcatgacctcggctcactgcaacctctgcctcctcggttcaagcatttctcctgcctgcctcagcctcccaagtagctgggattataggtacatgccaccacgcctggctaattttttgtatttttagtagagacagggttttaccatgttggccaggctggtctcgaactccagacctcaggtgacccacctgcctcaacctcccaaagtgctgggattataggcatgagtcaccactggccttttttgatgatttcttttcttttttgagtcagagtttcgctcttgttgcccaagctgaagtgcagtggcgtgatcttggctcattgcaacctctgcctcccgggttcaagcgattctcctgcctcagcctcccaagtagctaggatttcaggcacatgccaccatgcccggctaattttttgtatttttagtagaaacgggtttcaccatgttagccaggctgttctcgaactcctgacctcaggtgatccgcctgcctcagcctcccaaagtgctgggattacaggcatgaaccacctcgccagcctgatcatttctattgggtatactctgaagtatcaggaatgagaatttgaaataaggtgtttatattaagcaacttattttgaagttgtcctcatctgatgctaattcttttctttcttatgacaggttgaacgtcatagagaacatctcattaactacattatatttttgagaataacaccatttctgcctaattggtttattaatatcacatctcctgtgataaacgtgccattgaaagttttttttattggtacttttctaggtaagccctctggttcttgctgtgtatgagctcactgtgtacatatctaacagtgtccagctgggctagattacatgcatgctctctgcagattatgccagcaccatctagaattcttgggcacaaagcctggctgtataaatagatgctcagaagtgtttgttgaattgtgttgatttaggttatttttgtgtcgcctctttaaagaagaacactttctactgtatatcgttttaatgatatagggttaagcaggacttccagtccctctaagtggagaggaaaaaaaatcaaattgccttttttgagcaattttctcctatgtcccttccccttcctcttccctgagtctcgatctgtcgcccaggctggagtacagtggca

SEQ ID NO: 64089 - DNA, 1076 bp, Homo sapiens
gaactgtgaatttgttacatttttacttaattttcattgtaaattattatttagtttatcatcaggattacccaaaatgatgttaaatgtttttaatttactaacatcagtggttctttttttctttctttcttttttttttttttttttttgagacggagtctctgttgcccaggctggaggctcactgcagcctctgcctcccgggttcaagtgattgtcctgccccagcctcctgagtagctgggattacaggcatgcaccaccatgcccagctaatttttgtatttttagtagagacggggtttcaacacgtttgccaggctggtctcgaactcctcatgtcaggcgatccacccgcctcggcttcccaaagtgctggggttacaggcgtgagccaccatgtgcctggccagtggttcatttcttatattcaagttaaaatttgtttcgatgttggaacaaatgcctttaacccttggtttgcgtcatccagagccttcatatataaattacctgtctctgattctgctgagacattaaaaagaaaaaattgcctgtctcatgaaattatattaaagcattaaaaaataatttatagccgggcatggtggcttactcctgtaatcccagcacgttgggaggccaaggcgggtggatcacctaaggtcaggaatttgagaccagcctggccaacatggtgaaaccccgtctctactaaaaatacaaaaattagtcaggcatggtgggacgtgcctgtaatcccagctacttgggagactgaggcaggaaactcacctgaatccaggaggtggaggttgcactgagccgagatcgcgccaatgcactccagcctgggcaacagagtgagactgtgtcaaaaaaaataataaaaataaaatgaaattaataataatttataggccaggtgcggttgctcactcctgtaatcccagcactttgggaggccgaggcaggaggatcatttgagcacaggagtttgagaccagcctggcaacatggtgaaactccctctctactaaaaatacaaaagttagctgggcatggtggtgcac

SEQ ID NO: 64090 - DNA, 1050 bp, Homo sapiens
aagtactgtacagtgcttaaatataattaattattgtttttatttttttagacgaagttttgctcttgttgcccaggctggagtgcaatggctctatctccactcaccgcaacctctacctcccaaatttaagtgattctcctgcctcagcctcccgaatagctgggattacaggcatgcaccaccatgcccagctaattttgtatttttagtagagacggagtttctccatgttggtgaggttggtctcgaactcccaacctcaagtgatctacctgcctcggcttcccaaagtgctgggattacaggcgtgagtcactgtgcccggcccagtgcttaaatttaatgtcacatcattttaggcaaaagcacacgccattttctggaaggaaagcatgtacagaaattatttgctagcatgtcttcctttatatttatcttaattatactttcttttttcttccagaaaaatcctgggtagaagctggatcagcaagaatgtcactccttatattggtgtccattttcttatctgcagcttttgttatgtttttggtatataaaaattttcctcagcttagtgagtaagtatactgagagataaactgaaaatgtatagatatttataagatgaaagtggattaaggccaagtgcagtagctgatgcctgtaatctcaacactttgggaggccgaggtgggtggattggttgagtccaggagtgcgagaccagcctgggcaacacggcaaaacccatgtggaaatacatacatctatatgtgtgtgtgtatatgtatatttaatatatttatatacacacacgtgtgtgtgtgtgtgtgtgtatgtatgtatatatactttctttttttttttttttttttttttgagacagagtcttgccctgtcacccaggctggaatgcagtggcgtgatctcagctcactgtataagccctgcttcccaggttcaagcagttctcctgcctcagcctctcgagtagctgggattataggggtgggccaccacacccagctaatttttgtattttta

SEQ ID NO: 64091 - DNA, 1198 bp, Homo sapiens
tcacaggttgtacgtagccctctctgagccttagtttcctgaaattcaggtaggttttgctcaacctttgtatttcccaccatcttttagatcaagcactctctggcgcctccaaattgaagacagcagctgcggaattgatgtaatgggctgaatcagcctcagccgcgaaatgccgactaatcacaggcacctccggcggcctggacaaaaggtttgaagtccctgggaccgcacttccgggtaattaaggctacgctttagacgccagggccagcgagtcgcagccgggtgactcgagtgccgcgactgcgcatgctctcgccccagcgcccggcggccacctctttcccgcgggcgggccggggcggggcactgaagggggcggtccaggaccctgacttgtctcgcggttactgggccggcgcgagcacgcgaggctcgggggcggcacggggcggggtttagcctgtggtgggcgctgcgggtgtttgcaggaggttgcagtactcgctgggctgaggtcgtctcgggtgaggaggtcgcgccggaagtggctctagccgtggcgcttcggcgtagtaaggagcctgcaacagagttttgttgtttagggggcgcggcaccgcaccgctcccttcaccttgcagcagccatggcgaaaggcagagtcgccgaacgatcgcagttgggcgctcaccacacgacccccgtgggggacggggcagcggggacgcggggtctcgcggcgcctggcagcagagaccaccagaagggtgagtgggcccggggagcagagctgggggtggcccgaggcttctgtgtgtcgggtggggaaaaggacccccgctattctcggagagtcgcggggaaagaggggggcctgctggcgccgcggcgggagcagagaccgtgggggagttgggcttgggcgctcgcgcagcacaaggccggacgccgagtaggtgcgttgtaaatgctgtttgagtagaattcatttaaaagaagggatgacactggcttgttgacgctcaggtagattgtaaggttgatgataacgacgctaggcagagctggaaggagctgtactgtggcattcgctgcgttgtttttacagatgaagaaactgaggcccagtgtgggtatatgacttataaagtcataaagccagatcagtgaagtagtagttaggagcgag

SEQ ID NO: 64092 - DNA, 1091 bp, Homo sapiens
acgccggggcgcctcggtgtggtgtggtggtggtggctgcagccaaggctgcctttgcttcggatcctgagctgggcctctggctgcggtctaggcatgaggagccggctgaggcggggcgggcgtgacgggttggacacatggctggctcgggtggctggccgacctctggctcattcccagctggttcctcacgtccaggagggggcgaaacttactgggaggtttttcagatgtttctgagaccagtctcgccgtcgcagggtttggaagggctcctgggaatgccggctggtcctttgggggctgcgcctgtcatccttgtcactttgctgggctgatcagtggcctgcctcgggcacaacttcctcctctctggctgagttgctagggaaggctttcaaaggcaagcccgcgcctccttggcaggataggagtagtgcgggacactcacagagtctgatccctgcttttccgctgtcctaatgcttcagtcggggagctggcttatgtagtgggaaggatcaggtgaagtgcacccttctaggtatagctgcaccattgattccttgagtgaccttgggccagtcgcttaacctcttgatcctgagtttttcccattcataaaattacgccacagagttgctgtgacagacaggtgagataatgttaagtctgagtgccttggaacatgctgagctccttatcagttcagatattgcattctctgaaggttttttttttcccccatattttgtggggaccgctccttggaaaacagcttaattgcatgaatatttattgtactatctccagtgtcattctttgtttctaaacttttgcatttttacgtattaatgatcagtattttaaatccttcttaaaagggctgctgtaacttttctgccagttagtaactgtccttcagcatgctgctgaatctgccagctttactgaactttagtgtacattttttaactgaaaaagaaatcacactttaaaatagaaattcaactattttatgcgtcttttagctggtaagtaaataatttaaaaacattgtttatattgacttaccagaaacagcagaa

SEQ ID NO: 64093 - DNA, 1015 bp, Homo sapiens
agtagagacggggtttcaccatgttggccagcctggtcttgaactcctcactgcaggtgattgcccacctcagcctcccaaagtcttgggattacaggcgtgagccactgcgcctggcctaattttatatttttagtagagacggggtttcgccatgttggccaggctggtctcgaactcctgacctcaggtgatccgtccgtcttggcctcccaaagtgctgggattacaggcctgagccaccgtgcccggcctaatggttttatatgtacaggcagcagtgctactttctcacttgctttatatgaaaaagtgatcttgcttttggtaagtttcttgatattttgtgtgtgtgtgtgtttttttttttttaactcacactaccctggatcacttttgggattgtcacaaaaggttaactattactgctgtatgtgatataccttacttataaatggttcatttgattccattttattaaaagtatttaatgaaaatcttaggtctggaaaagtgtaaaataatggcatatttgtaagataatttggaatgtttagaaattaagcaaaatattttaggaagaccagagtagcctgtagtttagataacattccttcaccaggaatattttgaagtactgttctgaatttgggagaaggaaagtccctggatacttcggctgttagatagcaagttattcaatgatatagcttgttaaagatctgaaagagtttgggcgcagtggctcacgcctgtaatcccagcactttgggaggtaaaagcaggaagaggatcgctcgtccaggagtttgagaccagcctgggcaacatacaaaaaaaatttttttttttagccagagcctcgctctgtcacccaggctggaatgcagtggcgcagtcttggttcactgcaacctctgccttctgggttcaagcaattctcctgcctcagcctcccgagtagctgggactgcaggcgcccgccaccactcctggctaatttttgtatttttgg

SEQ ID NO: 64094 - DNA, 1236 bp, Homo sapiens
ctctcgccttgggggcgacagtaagactgtctcaaaaaaaaaaaaaaaattagcggggtgtggtcatgtgcacctgtatgtagtctcagctacccgggaggctgaggcaggagaatcgcttgaacctggggaggcggaggttgcagtgagccaagattgcgtcactgcactccagcctgggcgacagagtgagactctgtctcaaaaattaaagaaaaaagaatgctagttgggataaatgggaagtgcagtgctatacaggctaatgaaaacatccaaaaagttttagaatttaagtcatcaaattccttaaagttcaatataagggagtgatgagaaataagactggaaccagttatgaagagccttttgtgcaagccaagcaatggaaatgtattggagcctctttgatctgtaattttaaagtatatttatttgcagaagtttaaaatggactttttttctttgtaggcacacaagtctctgaattttgtctcaacactgctccagattactatgtcggaacagctggatttacctgtgagacaggcaggcaagtttcctaaattatattgagtgtatgtaatctattgtttaaaaggttcataatcgaatagcagaagtgtcttgggatggccctttggcaattttttccccccaggtaatttgtttaccttcagtgtttacagctaacatcaggtaccttgatatctggtggcagagtttaaaggaataatttgacatttagttgaattaaaatagaagcttcaaatagaaattgatggggtttattaaaaggttctatgtatttttagagtccttccctgatgggtgattataagactcaaacatgtttgtttatatagtcatctcttaccacctttttgcttttatcgttttaacagtttaaaaagtattatactatttttagttcctgttcaacatattgagccacttccctcagtatcaaatagtctgaaaatgtggcatactacttttctgaatattatgttagtctgtaaaaaataatgtagtgtacatttttaattttttttattttttgtaggcagtctcactctgtcctccatgctggagtgcagtggtgcgaactcggctctctgcaacctctgcctcccaggttcaagcgattcttctgccttagcctcctgagtagctgggattataggcgtgagccaccactcccagccttttcatttctttttaatttatttgcag

SEQ ID NO: 64095 - DNA, 1894 bp, Homo sapiens
tgttggtcctatttgattctttattgtaggtgtagtttattttaaaaccttggctcacgcctataatcccagaactttgggaggccgaagtgggtggatcacgaggtcaggagagcgacaccatcctggccaacatggtgaaaccttgtctctactaaaaatacaaaaattacctgggcatggtggtgcatgcctgtaaacccagctactcgggaggctgaggcaaggagaatcgcttgaactagggagtcagaggttgcagtgagccgagatcgcaccactgcactccagcctggtgacagagcaagactccatctcataaaaataccttgttgaggggtattttaatatataatcttaatctatttgaattactataatatggaatatttaattcctaaattaaagcaaactagaatataaaaatcctatttctgtcggttatccttgttcaaataagtacaggacttgagataagaattgctaattagagaagatcgagtgttttgcagaatttaagaattaattttggacagtttccctttacagtacatcttacagatttgtgactctgttctcccccactctctgaaagtgctgggtaaaaagctttgctagcagcctggattttaccacttcatcagtttgttaacttttgtcaaatagcaatgtgcaaaggtagcagtatgataactgacagaaaaatagcaatctgtaatttctgaacacagtaaattctcccataacataatttgaatttgaagtggtatgggattgaaatacttaaatttatagattaagaacctttatatgctattatttttctgtgataagaactggtttttttattacctttgtgtgattagttgtagaagctatgttgggatatgtatgatggttttgtctttagaggcttcatttagaaaactgatttgatttaatttaactctcctgtagaaaacagggttaaaagtgttgtgacgttaaaaaaaaacagttttctctggggttgtttatttgcagagttttcttatgctgtgtgattcgtaataactttgtgcttgattgctgtaacagtgttcaatttgtgcattatcaactttaaaaataattgaatgtagtattttgttaatgaaagcatagctttacaaacggtagtgtgaaagaaatacttgaggtatggacacttgtgggattttcacagtactttcacagtaaacattcttttgtcaaactgatctgtattttaggtgttatctatctgaaaaatatgataacacagtattggcctgatcgagaaacagcaccaggggatatatccccttatactattccagaagaagatcgccattgtattcgagaaaatattgtagaagccattatccattctcctgagctcatcaggtatgtatttttaaaatttacccatttctgcaggtgtgtaactttcagggttttttgttttttggttttttttttttttttttttttttttgagatggactttccctctgtggccaggctggagtgcagtggcacgatccttgctcactgcagcctccgcctcccaggttcaagcaattctcctgcctctcagctccacgagtagctgggattacaggcacatggcaccacgcccagctaatttttgtatttttagtagagacagggtttcaccatgttggcgaggatggtctcgatttcctgacctcgtgatccaactgcctcggcttcccaaagtgctgggattacaggcgtgaaccactgcacccggcttttctggggggcttttgggggcttttcagaacatataggcctgttttttttgtagcagaaaacttacccaacagatgctgttgtaggagaatgccttagtcatttttttttttttaag

SEQ ID NO: 64096 - DNA, 1012 bp, Homo sapiens
tgggccgggcacagtggcctcagcccccggagtagctgggattacaggtgtgcacgaccaggcccagctaatttttgtgtttttagtagagatggggtttcaccatgttggccaggatggtcttgatcccttgaccttgtgatcttcccgcctgggcctcccaaagtgttgggattacaggtgtgagccaccgcacccagcctaattgatgttctcaaatgaaacttgtttattgatgataggaatgaaaaataaaacacctgtatttgtaacatttgctggttttcgtttgctcagtgacttattctgaatcatatatattctgtgtacatctaaaatcactgggttattttgaaattagattttgtctaaacagctattttcctttctatgggttagcaaaatcttacctagttaggattttttccttactgtttttttttggcttccagggtacagcttactacatgcattcatcacatcatcaaacatgattatccaagccgctggactgccattgtggacaaaattggcttttatcttcagtccgataacagtgcttgttggctaggaattcttctttgcctttatcagcttgtgaaaaattatgagtaagtgtttctttcaactcctatagagctttgagaagtaggaaaagttgggaaaatttaagccaatttgaacatgtaaaattatatttagcatagataataaaattagtgaattatatggtaatttcaatttattattttctttttgacatagcattctaactccgcagttgcttttctttattctactaagaaactccttgcacccttttttcttaatcaccgtctctttacctattcaaaaactaagttgtctctaaagacggcctcctcaatgtgtgctgataaaagtccttcaggtaagtttttctaaaatgtgaaggtgatcagaatacattgaggattaaagctctttattacttgtggcttttttttctgtgaatttttatcttaatttaggc

SEQ ID NO: 64097 - DNA, 1691 bp, Homo sapiens
ttataccatgatcgtgactttattgccagtcttaacagctacacagatgccattgtgacccctctaattctgggacttgcagttagcctccaataccctctttgggtcccatctcaaagtggctgatgaactgctgcttttattctctgagcaggagagaaatataccatttacagcattggtactggtgttttcttgtgttcccaccagctacccatcttcctgctaaggaatgttccagctgttacagttctggtaagtgagtgactaaaattggagagaataaaaacaataagctgtcaatatcattgaggaggttcaaggccctcctgtcccataatcttagcaggagggaatatgacagggatttttaagtgggagatacaggaggctgctacatcattggaattcagttcattttcagccagtgttttcgttgtgaagcacaaggtgttcacaagggatctgtgtggactgaagcagttctaagaaaatttacagagaaattggaatttttggtggtcctcaggagcatagatcctcaggaaatgcttgtcagttgaaggaacacaaagaacatatgaagaggaaggcgtgtcacaccatatggagtggtatgaacaaagaaagagatggaaatgtgagatgctgtctttagtgggtagtgaggagactgcttaatggtgctgataatttccagtgagaggttgggaatagttttggactggtaaattgggaccatgttaaagagggttttgagtgccagaatgggaaatttggatgtgatcttttagatactgagaaccactgaaatttttttttaacagaatagtgataagactagtatttaaggattttctatgagtatggttctgcagtttgacacatcacagccttgtggtagtagaattttattagtgtcatattttcatcctttcaggaatgttcaggtcttacagggtagtaataagtttggtaccataattttttactcattagcttagattaacaactagtaccactcaactcccagtccactattcagggtattgagggaggtaggagagaatatctgatgtagaacaagtatttaaactctcttagggtgggtgatggacctgtgatgcataaatagagctgcataatattagttctcacttttagtgtttaaagggaattttgtgtataattgtagtttgtataatcagattggagagtgcaaatggctttcttttgtgaattgttattttgtcaactcaaaggtatagataaccttttaaaatgtatgctaggtataatttgttagcactttaaagtaatatttgaaataatttgtcagtagatagtgttaatagctttagcagtcattgttaatgtgaacattcctttttgtattttttattcctggtgatttactttgttactcatttcacctggtaggaaaaaaaatagcttttaaaaagagtctcccagtatcattttaaaatgtactcagatactcaattctttatattttctctcttaaggaagagggataccaataaatacaactgggatgtgctatggaaaaccaatttaaagctgttttgataatatctgttccaaaaagataagctgtggctcttagaataatgatttctataatcagtaatctgtattttaaaaatttagtctgcctattgactccttaa

SEQ ID NO: 64098 - DNA, 2424 bp, Homo sapiens
tactttctcaactcattctttgagactagcatacctgttgtaaaaatatagccccgtctcacttgtgaaaatagatgtcctaaaatcccaaattggataacttttttattggcctactgagaaataggatttatcccaggaatacaagaatggatcaacagtaagaaattagtttttgtaattaacccttacatcacgttaaaatagagacctgtaaacatctttatggatgtcagataaagcatttgataaaattaaataaccatgtctgctttgaaaaaaataaacaactgttagaatcctagaacagaatctttcttaacttgatgaaaggtgttcattagaaatctacaataaatatcacaccttatggtgaaaataaaatatcccagtaaaatgggaatatggcaaggatgcccactcactgtttaccattatagataacaagcaaagaagtttgcctatgtactaaaagcaggaaatgtggattgaatgaaatacttttggtaggtattgtgaagagtaaaaagaagtaggattttctttagcaaggatttcgaaatattaattcttgacttttatttagtatacactaccactggaactgataaaccaacagaacctgacagaatggatagaaattttaaagactgttgtgaacagggatgtacctaatgtaagtttctgtatgttctcttatattactaaatgtaaatatttaatgatcttttgaagactttaactggtgtttcctgtaacattctttatgaatttttataatatggtgatgtatttttttctagattagaggtaccttttcatttgtttatatatgcattacatctgtacatttacttagtgtaaaaagttgtaaagggtgtttttttaaatatattattggtttaatttcttctgttgtccttttgtttcatcctaaatcttctgttccctctcagttcataaattaagagctcatagctggctcttagcctagttaatttgtcagatgcccacgtacagaggaagaggaagaacttgatttacagattggccaacttttgtagttatgttattttttcttaataactctattgagaaataactcacatacagtaaaatttattcttttaaagtacaacttggtagtttttagtacattcagagttgtccaattgtgttatttgtataatcaaactttttaaaattattataatttttctttatagtctagttttcttttttcttttttttttttttaagctgaagtttcgctcttgttgcctaggctggagtgcagtggcgcaatctcggctcactgcaacctccgcctcccaggttcacgcgattctcatgcctcagcctctcaagtagctgggactacagacgtgtgctaccaagcccgtctaatttttgtatttttagtagagatggagtttcaccatgttggccaggctggtctcaaacttctgagctcaggtgatccgcccaccttggcctcccaaagtgctgggattacaggcgtgagccactgtgcccggcctatagtctagttttctagagatataggggaatttacagattactgaatacgctgttttgttttgttttgtttttttgagacagagtctcactctgtcgcccaggctggagtgcagtggtgcgatctcagctcactgcaacctctgcctcccaggttcaagcaattccctgcctcagcctcccaagtagctgggattacaggtgcctgtcaccatgcctggctaactttttttatttttcatagagacagggtttcaccatcttggccagggtggtcttaaactcctgaccttgtgatccacccgcctcagcctcccaaagtgctgggattacaggtgtgagccaccgtgcctagcctattttacagtgtgttttatgtactgttattaatatatacttatttaaccctcaaaatccttctgacttttattttaaacttacacatgggagggttatgtaatttatccaatataatattgttaatcgcataagtgagaccaaagtcctattttgtagtttaatttttttaaagatttgtttcaaaaaggtttatgaacaatgcagaagaaacaacatttctacaccctccataggaaactagtttggtgtatatttttctttgcacatttaatagatataaaatataacttttaaagttctcatatacatattgtgcacctttttgttgtacaatttataatccgtgcaccgattataaataaacagttcagtgagttagcacaattattatgtacccatgtagccatcacctcagaatgtttgctcatggctggttctagtcatctctggcatcatctcattcccggcacaatagatttaatctgttttagaacttagtaagtaatcttttgttcctggcttctt

SEQ ID NO: 64099 - DNA, 1005 bp, Homo sapiens
tcttttataaccaactagtgaagcagtgaggatgcctctttgatttaaatagggttaatacttttccaagtctaaccttctactatgaaaggccaacatcaggccaggtgcagtggcgcacgcctgtaatcccagcactttgggaggcggaggcgggtggatcacgaggtcaggagatggagaccatcctggctaaccccgtctctactaaaaatacaaaaataaaattagctgggcgttgtggcggccacctgtagtcccagctacttgggaggctgaggcgggagaattgtgtgaactcgggaggcggagcttgcagtgagctgagatggcaatagagcaagactccatctcaaaaaaaaaaaggccagcattagtgaagcattcacatttttgtcaatctattctcatctcatgctgttcctcctatattgtattatctctatcattaaataagtgtctttttaaaggaaacacttcaagttgaagaagatgatcgacctgagttaccatggtggaaatgcaagaagtgggccttacatattttagcaagactttttgaaaggtaatctcatccatatatggtgatttaaattaatttattaaggttttgctttaaagtgctagcataaagcattataaagaaacaatgggcattttgatgttcttttagatatggaagccctggcaatgtttccaaggagtataatgaatttgctgaagtatttctgaaggcatttgctgttggtgtccagcaagtaagtctgtttttagtttttctcagtggaaacatggcatctttaagttaatttatatattgcttattcccagtttctttgacatctaaagagtgcctgtttggaccctgtaccaggtctcaaacatttttggtctcaggatctctttatgttcaaattacttaggataccattgggttctcatttatgtgagttatacctagtaatatttatcatattagaaattagagtaaacagttcattaaaa

SEQ ID NO: 64100 - DNA, 1304 bp, Homo sapiens
ttaattttcacaggccaggtgcggtggctaaggcctgtaaatcccaacgtgttgggaggccgaggcaggcagatcgtttgaggtcaggagtttgagaccagcctgaccaatatagtgaaaccccatctctactaaaaatacaaaaattagccgggcgtggtggcaggcacctgtaaaccagctacttgggaggctgaggcaggagaattgcttgaacctgggagatggaggttacaatgagccgagatcgcccactgcactccagcctgagtgacagagcgagactccatctcaaaacaaacaaaagcattcaatttgtacagaaaagacattgaattctgcttttgcaaaattataaagggatctgggatcattttcataccttatgtaaagattaagcatgttttttaatgctttgttgaagaaattaatgtttattgtcttaattttaaacttgttctctagatgtgtttgaagatttcatttctcctaccactgctgcccagacacttttgtttacagcctgtagtaagaggaaagaggtaggcttatttaatgtttagataacttttctgtattatttaaaatttattcaactatacactttttaaatgttagtcatgtgagtcattttgttagtatgttttttaaggactgttggcctattcagtaacaatacttttctcttttaatctaggtactgcaaaagactatgggattttgttaccagattcttacagaaccaaatgctgaccctcgaaaaaaagatggagccctgcatatgattggctctttagctgaaatacttctgaaggtattctttagtgtgtttgtatgtgcatgactatgcaagtagttttaaaaaataaatagccagccaggcacagtggctcacttctataatcccagcactttcgggatgctgaggcaggcagattgcctgagcccaggagtttgagaacagcctgggcaacatagtgatacccccatctctataaggataaaaaataggccgggtgtggtggcttatgcctgtaatcccagctatttgggaggccagggcggggggatcacctgaggtcagcagttgaagaccagcctggccaacatggtgaaaccccgtctctactaaaaatacaaaaatccgccgggcgtgatggctcacgcctgtaatcccagcattttgggagaccgaggtgggtggatcatgaggtcaggagatcgagaccatcctggctaacacagtgaaaccccgtctctactaaaaataaaaataaaaaattagccgggcatggtggctggcg

SEQ ID NO: 64101 - DNA, 1919 bp, Homo sapiens
taaaaacgtgaaaatgtgtttagtggtttttggtggtgaagttctggaatacgaaaattggttgtggattctggggttcaaagaatgagaataaatatatgtaacattaatagtcatttttaatagtgttatatctgtttggaaattgagatgattatatttggaactgtatcaaaataactgttgtttatatttacagaaaaagatctataaagatcagatggaatacatgttgcagaatcatgtattccctctcttcagcagtgaactaggctacatgagagcaagggtatgttttaaagctgcattatttatatacttttgtcttgtaatgaatgactctgtggacttttatattgaaacttttaaatgttcactttgaagcctgtgtcttattttaggtttctgtttaatgtaaatctttacatggctgctgtaatgtgtgcataggtttcatctgtgtctggtagcagtgtctgtctgtgtttttcattcagatcttgctatccacacaaacatcatgcggccaaagagtaacttgggatcatagtactggtctagtgttgtctctggacacatctaccactggccagcctccaaattcccacacacagaactcagggaatagagattagcttgggggaatttaaggtaaggtatctacagtaactcactgtgtttttacaaaaggcttgctgggtacttcactatttttgtgaagtgaagttcaaaagtgatcagaaccttcaaacagccttagagctaacaagaagatgtctgattgatgatagagaaatgcctgtgaaagtggaagctgccattgcccttcaagtattgatcagcaatcaagaaaaaggtaaaggatttttgtatgtcaagaaaagtgaatgttggccaggtgcggtaggtcacacctgtaatcttagcacttcggtaggcttaggtgggaagagcgcttgaagccaggtgttcaagaccagcctgggcaacatctctacaaaaaaaatttttaaaaattaactggacatagtggcatgtacctgtagtgccagctacttgggagtctgaggcagcaggatcactagagcccgacggttcgaggctgcagtgtgctacgattgccactaccctccagcctgggcaacagatcaaaaccctgcctcttataaaatatatatatatatattaattgtaaaaagccataatcctagaaacttggcatacttcctttttatgtgaaagtacttttttaaaaaactcatcgatatttgttatatcaggttttaagaagttttaggggttttacgcaagttttttactctttctcttacagctaaagaatatatcacaccattcatcagacctgtaatgcaggctcttcttcacattataagagaaacagaaaatgatgaccttaccaatgtaattcagaaaatgatctgtgaatatagtgaagaagttactcctattgcagtagaaatgacacaacatttggtatgttgtttgaacctaccatatttgcaagcattttaatgtagctctcagtatgttccaggttgtgtcaccagtggcttgccttaccttatagcagtcaacctttttggcacctgggatcggtttcatggaagataatttttccacagatggtccgggggagatggctttgggatgaaactgttccacctcttatcagacaggcaatggtttctcataaggggtgtgcaacctagatccttgaatgcacatttcacagtagggttcacgctcctgtgagaatttccggcagtaatgctcactcacctaccacttatctactgctcctaacaggccatggaccggtaccagtccactgcctggagactggggacccctgccttatagtagatatttcacagacattactgtgtagcacgtaaagc

SEQ ID NO: 64102 - DNA, 1009 bp, Homo sapiens
gccttcatggtacttgttcttaactactacctcgggctgcagcatgactatctgcatagtgccctggaatgctcaaaataatcgattgaattttacaaaagataaatcagtgacccccttgatgattaaatatacttttatttggacattgtcaagtgttaaccagtaatattaatgaaaactattcataatattaagtactttttataccttgcctcatttagtcctcgtacggtgtctatgaaatccccgaagtggcatgcagaaaaggtcaagagaagtcaagtagcttgtttaaggtcacccaatgagcagactatttgattatagagcttaagctctttattatcattaatcaatttggagacattgatttgttgtggtatcccaatgagaacgttctaagaattaaaagtcttagaccaaaacatatttataatgcttcagtgacaaacttgagttatattctcttgaatctaggcaatgacatttaaccaagtaatccagacggggccagatgaagaaggtagtgatgacaaagcagttactgctatgggaattctgaatacaattgatacacttcttagtgtagttgaagatcataaagaggtaagaagatgatctagtgttgcagtttttcaagccattttatgctttttagagggctctaatatctctctggcatctcatgtaccatgtttttgccattttcccttttataaagataagattggtacattatattttaagttctaaagtattagtagaaggaataggaagcaggtatttgttttaccatcttagggctcaggattttggctcctcgttatgttttctcagatccagaaatatggtggttcccagaaaaacaaaaatatttttcttagttttctttttctttgaaaaattttggttatacacatagcataaaatttacaatcctaaccatttttaagtatatagttcactaatattaagtatattcacattgttatgcaaccatcactac

SEQ ID NO: 64103 - DNA, 1032 bp, Homo sapiens
gacctcaggtgatccacccaccttggcttcccaaagtgctgggattacaggcgtgagccaccgcgcccggccaactcctttattttcatagttgtttgcatttttcgagaatgttgttttttcctttttaggtaaattaagctagccattccttgtgtttttctcattgtaatggtatttcattctatttttatctgagatcacaatttcataatgtgtaagtcattttaaaacaaagacttatttttttcacaatattgactttatatttaagtgtactgaattataatatgcgttgtcttactaagtcatttagtaggctgtaactgcatatgattttttttcttctcttttagataacccaacagcttgagggaatctgcttacaggtcattggtactgttttacaacagcatgtcttaggtattatacctctgattgtgctaagaatttagtgctatttcacatgagcaagcattttcctaatgacttagtattctcttttagaattctatgaggagatcttctctttagcgcacagtttgacatgtcaacaagtgtctccacagatgtggcagctactaccccttgtatttgaagtctttcagcaagatggctttgattactttacaggtgagtcaaagcagcatggaaatactgagggttttccctgctttgatttatttgtagcttatcatttgaacatacactttttttttttttttttgagtcggaattttgctcttgttgcccaggctggagtgcaatggtgcgatctcagctcatcgcaacctatgcctcctgggttcaagtgattctcctgcctcagcctcccaagtagctgggattacaggcatgcgccaccatgcccggctaattttgtatttttagtagagacagagtttctccatgttggtcagactggtctcgaactcccgacctgaggtgatccgcccacctcagcctcccaaagtgctgggattacaggcatgagccactgcgcctggcctgaacgtacacttttgaatgttc

SEQ ID NO: 64104 - DNA, 1060 bp, Homo sapiens
tgatttgctccatgaagtttttagatttctttcactcatctctttcctttctgaacacgaagtcacacataatcatctagttatgttagtcattttttactgccaattatattatttatattaatattctgggagcagagatatacctatactatctacatttctattcctgaacacttattcatatgtttatactcatctagttttcactagccttcaagtccatgttcatttcttgtctggagtttatagggcaacatttgccctcaacaggctgcctcttcctccctccgttcctctctcccctactggttttttgtgttattgttgttttcttttttaaagagaaaagggtttcctagaaatgtcaacatcttagctttttgtagttctttacgtgagaaaggttaggtgttttagctaccacctgtgtatgagaagttagtggttgtcaacttgctgtaatccagaatggcactacaggataggtgctttgatcacaaagaccaagatgccagagggctagactatgaaagataggaggcagacagctccagatcctcacagctatccagatcctttagtctttcatctgtgcaatgaacattgcagttattcatattaattagggtacctcaagtaatactcagagcctgtacacagggtaggaaattgtttccttgatttagatacctgatttaaaggataaagccttactgcaatttatattctgttttgatcaggttcttacaggagttgcaggagaagatgcagagtgtcatgcagcaaaattgttagaggtcatcattctgcagtgcaaagggcgtggcattgaccaggtcagtgaagctaataatgatttgtagttcagaggggtaatcttttccttccactttctttcttcattttttggcatttgttgcatattctgtatgtttttgtttattgagacatctagacaactaatatttttagttcaaaatgtaactaatatataataatgatcatatgtttaatgtacaggaattggactaagttttatggctactttgttatcatg

SEQ ID NO: 64105 - DNA, 1498 bp, Homo sapiens
cgctctgtcgctcaggctggagtgcagtggcgcgatctcagctcactgcctctgcctcccaggttcacgccattctccttcctcagcctcccaagtagctgggactacaggcacccgccaccacgcctggctaattttttgtatttttagtagagacggggtttcactgtgttagccaggatggtcttgatctcctgacctcgtgatccgcctgcctcagcctcccaaagtgctgggattacaggcgtgagccaccactcccggcccgtcgtgagcttttaatagctccatgaagactactagactttctctaaaattagatttcccagtgcagtgcctcagcagtaaatattggtcatctaatgctacaatagggttaattgaggcaacaaagaagttaatatttttagaatgtttgcatgctattaattatagtcttagaatatcttgctatctttttttgtagtgcattcccttattcgtggaagcagccttagaaagactgacaagagaggttaagacaagtgaacttcgaactatgtgtctgcaagttgcaattgcagctttgtattataatccacacctactactcaataccttagaaaatcttcgcttccctaataatgttgaaccagttacaaatcattttattacacagtggcttaatgatgttgactgtttcttggggtaagtgatgtattgcaattttactacatttgctttgggaggaactctgcttatttaagaaaagaaaacagttttttttttttttttttttttttttttttttaggcttcatgacagaaagatgtgtgttctcggactctgtgctcttattgatatggaacagataccccaagttttaaatcaggtttctggacagattttgccggcttttatccttttatttaacggattgaaaagagcatatgcctgccatgcagaacatgagaatgacagtgatgatgatgatgaagctgaagatgatgatgaaaccggtaagggattttcaatggaagaagacaaaacttatctacttagaaatattaccgcactgggccgggcgcagtggctcaggcctgtaatcccagcactttgggaggctgaggcaggtggatcacacggtcaggagttcgagaccagcctggccagtatggtgaaaccccacctctactaaaaatacaaaaattagctgggtgtagtggtgggcacttgtagtcccagctacttgggaggctgaggcaggagaatcgcttgaacccatgaggcggaggttgcagtgagccaagattgcatcactgcactccagcctgggtaacagaacgagactccatctcagattaaaaaaaaatatatatatatatcactagcccttctcccaaataaatgtgggatcatacccaaatgctttcattcacagaaaagacttcctttcttctcactagagtgatgtaatcaggaacttcagctgtattaccaacatgtagaacagttcaaa

SEQ ID NO: 64106 - DNA, 1220 bp, Homo sapiens
aaagatttatggtcttaatgttgactaaatttattggagacatccatcctatcatctattaattctaaaacctaagcatacttgcactataacattatgttaattaaatgttgataaatacattttatctataagactgtacactatcagtgtataaattgataaaatattaagagaaattattataagggtttcaacataagatagctattgctatttttgtcttttatcatttactaacttagccagccttttaaaaaaaatcttacaaaaggtttggtgggtgtaacggtagtgtgttcatactgcgcagttctttttcagatgtctagtattaagaacacattaaatcaaggttggttttcttggactcctatggaaattttcatttctattcattattgaacatgtatttaaacaccaattcctggagctctctcttgtcacttgtgacttgtaatttactgacagtgattgagatgattgtcaatttgttgagtaacaaaatatgtcattgttataaaagtacttatattatgacttggcagaggaactggggagtgatgaagatgatattgatgaagatgggcaagaatatttggagattctggctaagcaggctggtgaagatggagatgatgaagattgggaagaagatgatgctgaagagactgctctggaaggctattccacaatcattgatgatgaagataaccctgttgatgagtatcagatatttaaagctatctttcaaagtaagtcaacttgttacatgtggatccatttcattgaacaaatctgttgtagtttctgcctgccctttaaaggaagagtttggaggatatcaaacccagactagaaaaggctggttaggcaaagtaaccaaaattatttctaaggttgccatagtttctgagtattctttattcatcctgttattttacatttagattgtaattttggaagattataggaaaataatgtagttcaaaaaagtatacagtgacagtgcctctttgctacttctgattcccaatctcccagctttcctcagaagtaaccactcttacgtgtatacctgtttgttgtatgttattatttgtgtgtatccttttttcctgcccaaacctatacttaacgtgttaagagtatattagcatttatggcatatgatcttataattctttttttcctatattctgtgatgtgttaactaattt

SEQ ID NO: 64107 - DNA, 1107 bp, Homo sapiens
gaggtgccaaacttgttgtttctgtgccttgtactttgtagacagacaccacatgtcagtccctaaagaatggttcctaacacggggcccatgtaccacagtagccttgatgattttcaagttgctttagctctgaatcttttaagatggttgggttagctttattcctgaagtctccctggtttgttacttactatataagaactagttaggctgagtccttatttgctggagagatggatcgtaagaatgattagagtttttggagccataaagataagctgtagttaatttttattcctatatctgttgtttcacaaatatggtaattttaaaaattattgggagaatataaaatagatcagaatttcagtattgcctcgggatggagtaggaggaatagtgtagaacggagctaccaagcctctcttattcatgttgtttttcccttgtttttattttttgatagctattcaaaatcgtaatcctgtgtggtatcaggcactgactcacggtcttaatgaagaacaaagaaaacagttacaggacatagcaactctggctgatcaaagaagagcagcccatggtatgttaattaactgtaactcctctttaattagtgacttttataggtttaaaattttatatcgtttaattttatatcattaaattttatcatttaagatgatataaaaggtatagttgttgcaggtgataggaattaactctaatctgagggatttaattcaagataacttaattttggctttggctacagttggcttttttcgtttttttttgtttgtttgtttgtttgtttgagatggcgtcttgctctgtcgcccaggctgtagtgcagtgatgcgatgtcagctcactgcaagctctacctcccgggttcatgccattctcctgcctcagcctcccaagtagctgggactacaggcacctgccactacacctggctaattttttgtatttttagtagagacagggtttcactgtgttagccaggatggtatcaatctcctgacctcatgacccgcccgcctcggcctcccaaactgctgagattacaggcgtgagccaccacacccagccccagtt

SEQ ID NO: 64108 - DNA, 2183 bp, Homo sapiens
tgccgctgcactccagcctgggtgacagagccagactctgtctcaaaaaaaaaaaaaaaaaaagatttttttcttaacagtgggaagtgaaaattggctaagaagtctacagcatacagtaaaagagattatattctctacataatgcatgctcccttgcccttatacattggagaaatcatggattttggaacttcctggccactaatgatggttaagctactggcttgtttaatgttttgtcagtttctcaccaagttagtagatgattgaatgccctactaaaattttatttgttttctagaatccaaaatgattgagaagcatggaggatacaaattcagtgctccagttgtgccaagttctttcaattttggaggcccagcaccagggatgaattgagttatctctttctttcctgctgtgtgcttgtagtgaagagcttgtgttcctcctagtagtggttccagaactggttcatgttatctattctaaactaataatcaatagatggacaaaagaaacaacaaccccaggagatgggacctgatcatgcaacctggcactggaaaagaaatcagcgggattttgggggtggggggggatgggaggtaccttagagggagtattttctttattttttgaagaaagtaagatcctgactctgaagcttcaaagtgacactgtggaaatctgaaacgaggggatgtcatgaaggcagcttttctttttctgaggaaaaaataggcatgggctacaggactatttaaaatgtctcatttacagtataaaactcaaaggtagatgtaatttttacacctatgagtatttgtccaatttctgtctcttcctcaccattgggtatctattctttatatgtaaataagataaggtcatctgatagccttattcagtcttcatcattttcatcattgttcctatgtagattattggacatttattgtagcactacataactgattataaaaatctgtaaatgaattagcactttcatattgaaacaagcctgctagcctatgtataaaatagcaaaatgtttgctgtttataaaaagatgtaatggggtggggggcaggggtaatttcaagttattaatttaaaaatgaactagcaattttgtacctggtgactttgtggtgcactcacctctgatagtgacttgaattcggtatgtaaaaaggggttagtggtatttcattgctgctaaaaatgacaactccctctgtgtcctgtttttcttaaagctgtcagtgtacaagtgggtatttgaataccagaccttactgtaaaaaataaaaaaggtggtatctagagcatgtaaattggatataaagttctgctcttaaagagttgatctaagagtatggctaaacatctatatatgcaatctattaaaagaacttaattcggctattatgtcttgatttgattgcagttttttcctaattataacaaatttttcctcattggcctgtttttaatcctgtgcctagaaggagtacaaaatgcacactttacaaaattgatatttaacacttacccactcccctttccccatctcttctaccgctcttgttgatcgtggtatctgatcttgactagataggctgaaggcacatggttccctccaaaaaccactattgataccactacaaaaacaagccagcaaaaagatactgtagagaggttggcttgcttccctctcttcctaactgcatgttgaaaaataagccgttattgatcttaaacatcggtcagatgagtcatacattgggttattttttatatacatgtatacacaaaatatttcaaattgaaagcaacatcttaatggattcaaaactattacaagctgttgtctaaaacaggtgagaaaaaaatttataactgtaaaaacaaatgcacatattgatatttaaaatgcgtaattaagaaaacccattgttgttgtgtttttcttgtataccaataattaagccactactgttggcactgtttggttttctattttaacactgaaggagtgaaagtatttcctatatttatgaatttactactaaaatcttggcaaaaaaagaaaaaaattgtctaacgtgtgtgggtgaaaactgttaatcaagtgtttctactcccccccgaaaatcccctgaaagttggacacc

SEQ ID NO: 64109 - DNA, 1024 bp, Homo sapiens
atcagacttaagtttgcaagactctttttctaagcttcctcaagtctcttccttaaatgttgatatttcaggttatcagaagttcctatattcttttttttttttttttatttttgagatggagtctcgctctgttgcccaggctggagtgcagtggtgcgatctcggctcactgcaagcttcgcctcccgggttcattccattctcctgcctcagcttcctgagtagctgggactacaggcgcccgccaccatgcctggctaattttttgtgtttttaatagagacggggtttcaccgtgttagccaggatggtctcgatctcctgacctcgtgatccgcccacctcggcctcccaaagtgctgggattacaggcgtgagccaccgtacccagcccagaagttcctatattctagaaaatagtctataatataataatatacattttatttaaaaacaaaactaaactaagattgtttttccaagaatagggatggatttctgttttctctcacatgatccactgggttttgtaacctgttggaataatggtatataaatagctgtggaacagaacaaaaaggaatgaagtaatgtctgtcatggaaattacacgttgatgactgtagccatatgagtgcatggattaaccactgaattgagaagtactcttagattagcatattatgtcctttgagggggaaacattttttttttgctctctttctgacttcatgggaggtagaaagtgatgaaagacgagagggaccaggaatcttcctggttgacaattatagtagtaatggattgttgaaattgctgtttacttactggttctttatgaaataaagaagtgatggaggttccttttatgtcactaaattattaaccatacctcagataatatgccatacattgtctttacacagtgaggtcattgtgtactgatggtttgcaatcaatcagttgtgctaaagaccaagtttagtatcagtgggtgtgtttgcaaaccattctggctttg

SEQ ID NO: 64110 - DNA, 1037 bp, Homo sapiens
ttgcttagtattcaatttttattactgttttttaaaaataatgaatcatcaaagtttaaccacaggctggtgcccgggataacagtactgtaattggaaatggctttactctgaaaattaggttagtgggttggtgtaaattatttatttttgcttatgtacttttgttttaaagcttatttaccccaaagtttattattaattttgaatacagcaatttttaaaatgttacttttatatttatttatttatcatattggtggggggttggggggaaatggtgcagaaaatatcgcaaatgtaatggaatgtaacctaatacacatattgaaaggatgttgtttatcaagtacagagtaagtgcttttccatatatttttatatattcacaacaattttgtgagacatatgggatttactacctccgttttttacatgaggaaaccaagagtccaggagggaggctgactgtcgtaccagccctcacagctatggagaggcaggaccaagacgagaacccagactttctggctccaagtctagtgtgttttcactgcaccacagttacctcctcaaatgctcatttgtggcagagattatcaagatgaactttggtgatttctgattgcctaatgaattgagcagtataaaaaccattttctaatgctggaaaatcagcgttcaccaaggtcaaaaaaaaaaaaaaaaagatggtgtgttccgcagcagcccctcctgcactgtagttcagcgagctttatttgcagagagctgaaatgtggctttttcatttcaagctttacagtagaaaggggaaaacgttgtgctgtttgattttacataaatgttatctttgatcaggttctatgatcttgctaaaaaggatggtgacttacttgaaatcggaagcccttcagggttgggcagaacttttcctgcagaaccctttacagatgcataacattagcaaaagccctagtcaaccaccgatcgagtcttcattcttgacagagacacagacccacacagaactcccc

SEQ ID NO: 64111 - DNA, 1142 bp, Homo sapiens
gactcttcgacaccccgcacacgcccaaggtgagagcggcgggcgcgggcacccggcggccggggccgcggcgccggaggggccagcgccgctgcctgggttcggttacagaagcggccggccgctcccccctcgctttcctgcgccgccccccaaagttggcagcccttgtgtttggccctgccccgaggttgtccgttgagattatgtaactgaacaatgggcctcgtctggaacttcatcttacaaaggggccgatcggcccgtccgggtggccaaggatttgccgcccgttgagtccgggccgccccgagcgtgtcagccccgagtgcggcaccgataacgcggttcgcgaggatgctggagggtgccggcccggccacctgacactcccgagccataggatgccttttaaacgcggcgatcgggcctgtaatttgggcggcgcgggcagaaggagtttaaagaaaaataattgtcccgccctgatcgtgtcgtgtcgtgtggcgtggatgggggaaaggtctggggcatgcagggagactacgcttggacttgggagtaaaggctggccttccaagcatttacagtcctacagactcatcctaagtccaggcagtactgaggcctgtttctggacaaggtcttggcccagcatttgtttttatcgtgggtttgcggtgcccagagtttggccggcctccgtgtgattaggaacatcctaccgtagataaggtatcttaaagaaggaggtgttcagcacctgtgttttgaaaggccttcgagtactgcgcagatgaccacttttaaaactgcagattttaaagctgatacttccagagattaagacaagcctcgcatttgtaaggttaacagggaagatgcaccttttaaagtgagtttgttttgttttcaatgtactgtttgtcatcagcctaggcaatctgtgtgctttcgagctgtactgtttattggccgacttgctcaaggcaaaatccctctggaagtgaggggaggagtccagcggaggtggctatggaagccctatctagatgggggaggggagattttatggggctctcggactgctttctatttttggatgggttgaaagaatttgttaacttttagccactagaatg

SEQ ID NO: 64112 - DNA, 1714 bp, Homo sapiens
tcaggaaaaagggaatttgatgtgcgacagactcctcaagtgaatattaatccttttactccggattctttgttgcttcattcctcaggacagtgtcgtcgtagaaagagaacgtattggaatgagtaagtcgtttatttaacagtttggttctccaaataacctaagattggtttggtatacttatcaaaatttagttcctatttaatggcatggatgtatctgtcagatatattgatagaaaaataacattttttttagttcctgtggtgaagacatggaagccagtgattatgagcttgaagatgaaacaagacctgctaaggtaaatagctttttatttttatttttttgaaatttacttttctgccacttaaagcatgctatgaatatgttaataagcattaacacataaggtagaatggtttttaaatttcacacatagccctatcaccatagcaagaaataactgttttcgtatatttgtattacatatatggaaacactttttattacagagaattacaattactgaaagcaatatgaagtcccggtatacaacagaatttcatgagctagagaaaatcggctctggagaatttggttctgtatttaagtgtgtgaagaggctggatggatgcatttatgccattaagcgatcaaaaaagccattggcgggctctgttgatgagtatgtattaaacattttgtcttttgctcttttgtcccctatggtgttactaacattaaggtttcagctggtcaaacactgaattccatctctaacttttgagaagctgtaatgatttaatcaggtccttttcacttaataccatcagttcttattggacttgttgaataatatgagtctgattttggaacctaacttaaatttcttatttctagtcagcatccatgaattcacagtaaaatggagtttattcttacctgagtcctagggcaagcaacatttcttctttctgataaatctttaatggaatctgcctttggaaaaatctcttacaagtctaaaccccttctctcttaagcaagttgctttttagcataacaatagataccaaaaatttattgtatgaagtttcagataaattaattcagtttaagcttgagtgaaaattatttaccattctattaatctcaaatttcttctaggcagaacgctttgagagaagtatatgctcatgcagtgcttggacagcattctcatgtagttcgatatttctctgcgtgggcagaagatgatcatatgcttatacagaatgaatattgtaatggtgagtgatgtaatggttttcttgtgagcttgagaaaatgaacatcgaggaaatatttatggttatctaaaatcttgctctatttctgtcacttttatcttttataaatttaaagatcagagacctaacataaatttcaagtacaaggttaaaaaccttgtcctttctgaagcaccttgtacatatctcagtagtagaacttcgcatactatttatgtgcttgtcgctccaactgagctttttgacaagactatggcctcgacacatatattttggtgtccgtagtacctagcgtagtgtgtgaagcatatagtattatgaagtgttaagttgaatagattcttcctgtgtctggtctttgatttccatttcatgtgaggtgctgctaaaactgatgtttgttagtcactgagtctctg

SEQ ID NO: 64113 - DNA, 1086 bp, Homo sapiens
atggtgacctctgtggagtggggcaccaccaggttgcctaaagaggggtaaactggcctaagttggaaacagcacaagtcaaaactcctatgctgataagtagtgggatcaagcctgtgaatagccactggattccagctgggcaacatagatagaccctgtctcttataaattaaaaacaaaaacaaacaaaaaaaaagccaacctgataatactggtttactctgagaaagaaacaggtggattgctgaggtgtatgattgagagagagactttacattttattttgtacccatgcaaatgtattacctattgaaaaaacaataaaattttgatttcacaagcaggttgaagggagaaggtcctataaaataacactttcttggttgagattggttggttgagactcatttggtaaagatggaagaaagaaaatatttcagaaagaagaaaatgctaatattttctatctttgttaggtggaagtttagctgatgctataagtgaaaactacagaatcatgagttactttaaagaagcagagttgaaggatctccttttgcaagttggccgaggcttgaggtatattcattcaatgtctttggttcacatggatataaaacctagtaagtattgcagatcttctgacctgtgttctttggggttatagagaataaattacttcattatgacaacattgaaaaaatatatatcttctgttttctcattgttagttttaaaaggccttagatccacttaccaatattgttttatgatttctattcatctcttcccttgttaatccccaaaatttgagataaacttttttgagacagtgtctcattctgtggcccaggccggaatgcagtggcaccatctccgctcactgcaacttccccatcccgtgctcaagcagtcatcccacctcagtcttccgagtagccgggactataggcatgtgccaccatgcccagataaattcatttttattaaaagccagaaatttttgctgcatcttacaggaactacaggtgggatactaatgagggcactaaaaatctgtgtttaaagccccactcttccact

SEQ ID NO: 64114 - DNA, 1047 bp, Homo sapiens
ccagcaactataaccctggtttctgtcccctgagatgcttattccatgggtttgggctagaacttgagaatcggcattttaaaaagcattatggatgattctggtatatgatcttgtttatgaactctggttttattattattagtttggcttacataattaactgtttgacaggtaatattttcatatctcgaacctcaatcccaaatgctgcctctgaagaaggagacgaagatgattgggcatccaacaaagttatgtttaaaataggtaagaaaggtaatcagattattaccttcagataaagagaaggctgttttgtttttgctcttcactgtaagtttttcaatacttctaggtgatcttgggcatgtaacaaggatctccagtccacaagttgaagagggcgatagtcgttttcttgcaaatgaagttttacaggaggtaatttttcttctcccttaatcatagtttgctttgtaacacttagcagttgatagaagaatataaattcagatatattaaactttgaagttaactaatagaatggaaataaaatctaaaccgtcatctgagggcatttaataagcaaaaagtcatgaaggcaaagatttataatggagttgtcgtaaaaaatatgttctcatacaccactggtggaactttataatggcatatcctttttggagatcagagtattagtattgcattaatatttaaaaatcatgtacccattgactcataattttcacttctaggagtttttcctatagaactattcatatacaaatacaagttgagaacagtgtaaataagtgtttactaataagagaatgattaagtaaattatggcacatagttattagtatggcctatagtttcaaaagagtgtgacagtatttcttgataaaaattttgaatgaaaatagaataagtagaaaaatataaagtgtaattgtctgatcccattgctctttgtaaatatgtgtatatatatgtttgctttatcacgtatatgtgtatttgtaacttgtcagtgtgtttcta

SEQ ID NO: 64115 - DNA, 2101 bp, Homo sapiens
atataaattggagtttttgaaattattatttatttttaattttttttttattggggataggtttgtctggaaattgtttattattatttatttaaaaagatggggtcttgctctgtcacccaggctggagtgcagtggcactatcatagctcactgcagcctcaaactcctgggcccaagcgatcctccagcctcagcttcccgagtagctgagactacaggtgtgagtcaccacatccagctcaaattattttataagaaccaaagtcattactagcatctttactacttgttttcaagtatgtgtgatactgtaattcaaaaagcataaaataaaataatttcataaatttaagttgttttaatagaagcttcagtttcctgttttatttttcaattacatcttagaataatgatggcatgcaaatatctcccaatcgacaatatagtttgtgttagtttcttagaatctcttcctaggaataataccttgttttctatttttatgtcagagaactcaagaaagcacagatggcaaaagctgcagctgaggaaagagcactcttcactgaccggatggccactaggtccaccacccagagtaatagaacatctcgacttattggaaagaaaatgaaccgctctgtcagccttactatatactgagctactcctttcccacctccccctgaacactgtgacaagaggaagctaggttgaaatcactgatagaatccagtttgcaattactttctcgattggtgtcagtagttttactgattaggacttttattgtgaattacagttgaaagctgtattttgatgattgctatgtcaggctttcatctaatcttaccagtctgtcttctgtaggatgtgtcactgttggatgttacaccagcctttccagggttaaccactgtggtggtgtgctgcttatagtttgctgttgcattgtaataaaaggtgtctttccctgtagtgacctgtaaaaagtactcaagggctttattacagacataccctccctttgaaaagggacatgctaaaagactcattactactcagccttcaatgtacctgtgtgtccatcttatatttcttttttttttaattgtgaattagacttgtatatcccactgggagcactttgtaggcattgcatgaaccatgggatgatgattctgtggaggtattgccttgtgaatttgctgctattttagttttgtctttgctgtaaacttgtagcattaaacaatcattgttgttaataggtcttctttttgaaacaattatgtgaaatgtatagctgcttttgatgaaaagcagctatttgcctttttttttttttcctttgaactttgaagctagtgcattggaaaaatgcaccctttccctcctttggaatgctgtattaatgtagtataataattactggttttgtaacttgttctggtaatgtccttcccggactctttttaaatgtctccccctaagttttatacttgattgtattattagtctgtttttaaatgttttgcccggtttttctcttcaatatttgtgtatataaaccgatcttcgtgatactgtacatagctgtttgaaatgccagaatgacttctgacattccaagtttttcacaaaatatattttatctgtgattagccatttgactaataatactggctaacagatgttgaaaaaaattgtctgtttgttttctcattaattttggtctaaaacatgtttgcacttgtctttgacttgtgttttattaacattgattggcatattaaaagtcactctgagcttaccttaattgtctaaatccttgtgatgcctgttttctaatattttatctctattattgctatactataaaatgtatagtgtgtataatgtactattataaaagcagagggcacattttgattgaatatgaatatcacattgcatgttatgcatgtgacttgctagaaatgtagcatgatgtaatttaaaatatcttcaaattattaagtgaatataatatgattcataactttctgatttgtactgagtcacagaaaactttaaagtggggaggttttgtttttgt

SEQ ID NO: 64116 - DNA, 1036 bp, Homo sapiens
taccattttattataatttggtttctgctttttttttttcctctctttttcttccatctttgggattatttgaatatgctttagttttttgttttttttttttctgagacacagtcttgccctgttgcccaggctggagtgcggtggtgtgatctcggctcactgcaacgtctgtctcctaggttctagagattctcgtgcctcagcctcccaagtagctgggattgcaggtgtgcgtcaccacacctagctaatttttgtatttttagtagaaacggggtttcaccatgttggccaggctggtcttgaactcctgagctcaggtgatctgccctccttggtttcatgaagtgctaggattacaagtgtgacccactgtgcctggccaatatttcattttaatagagttttttactatatttcttcatgtaggtttttttagtacttgctctaggagttagaatatccatccctaacttttcatagtgtacttagagttaatattttaccactttaaggagaatgtagaaaacttatcaccatataggtccctttactctcactgctttatgttgtaattgtcatatttattaatctacatacattgaaatccccatcagacaatattaaattttttgctttcaaccatcatttctcttttaaagatcttaagaggagaagaaaattttattctttttttccagatattcccagatgacctcttaattttttttttttttttttgagccggagttgcgctctgtcacccaggctagagtgcagtggtgtgatctcggctcactgcaacctctgcctcccgggttcaagcgattctcctgcctcagccttctgagtagctgggactacagacacgtgccaccaagcctggctaatttttgtatttttagtagagatggggtttcaccatattggccagggtggtctcaaactcctgacctcgtgatctgcccgccttggccctgcaaagtgctgggactacaggtgcccgctgccatgcctgactaatttttttgtg

SEQ ID NO: 64117 - DNA, 1055 bp, Homo sapiens
ttagtttctgaagaggggtaagttggtaagttatccaaaataactttaaaaaggtggttcagttagagtgtaatccagtgccatccatgctgtatgacatcagtggcatatattctgtggacagcattccaacagatgactttgagttacttttccttaatctgtctgtaagtgttctgctcttactgaatcttcgcttagccctatgctagtcactgaaggatgcagaaggaaaatatttatttcctcccttcaataagggaggatatttgataagttagatatttgagataccattagtatctgaaacagaacatagttaaatgctgaataggagttcatggggcagggtggtaatccataaagatttcctagagtttatgaatgacccaatcttgaaggatgtgactaggcagaagagaaatgtttccagcacagggcatcactgtgggacagagagctaagagatttgagttctagtccctactttgttgctaattattgtgtgacttaggccaagtctcaggccacagtctttttatctgtgaagtgaggagatagaaatagtatattttctaagattattgttaatattaaagtatcacggctttagtgttaagagaatttttagaaagaattcacttagcagttattgaaagtcttctggattctgggcagcatgccaggtgccatgggcatgcaatgttgtataagatatgggcctttcagaaatgtacagtcttacaggagagagaaatcatgtgtggtagttagcacaagaggtactgcttgggaaacagagtgaagaaagatcatcttggtttgggtggtgaaggcttcagaaagagatgccatttttgttaggcaggaaaggaggtaggggtaaattgagcaagggcccaggggagaaagggatgtggtacaagttgcctgggatgcagttagtaagcttatttggctggatttatatggttggtgcagagggtgggaagaaataaggaaggtgaagtgggctggcctgtggagtgacttaaatatacaactcacatatttcc

SEQ ID NO: 64118 - DNA, 1818 bp, Homo sapiens
tgacatagtgagatcctatctctataaaaaaacttaaaaattagccaggcttggtggcacatgcctgtagtcctaactacttgagagactgaggtgggaggattgcttgagcctaggagtttgaggttacagtgagctatgattgtgccactgcactgtggcacaatggtctcactgtgtcacccaggctgtatagtgtgtatatatatatatatatatatatagtctctagatacagacagtaaatagaattgtgtctgttattaaaatattatagaacatactgggaaattctcagaaattcgaatttgtttttcttatttcagtgctagaatttgtgtgtgctgggccagtggatagagaaacatggtttaatatcttgaagtgctgcaccctactactgcattttgttctccttggtgtgacattctttaaacttactgaattttatttagttttaaaatgttctttgttttagtatttcaagtttttaaagttttataactgggggaggaaatatagtagtgttttaaaagtcaaaaatgagccactaaatttggagagaaacttattcacggagggaatgaggatgtgatggaacagtgagcccttgtttattattgcttagccacctggagtggaattttgccagtcctgcaatccaagtaaagcagccaaggtttccatggtttgagtttaaattgagcaaagattagtgccttatttgaaacttggttgaaaaaagaaatgccaacagtgactgaagaatgttaacataaaacttagagattataatcagctatgtagagaaaatatgaaatagttattaaacagttgcaaggtatgctgtcatgtatacatactgtctcatttgatcttcatgttaattctgtgaggcagaattggaattatcccccattaactaaagaggaaacagcttaaggtggcctagctaataagtgataggtagatttttgaacctaagccatttaatttcaccaccagtgtttctttaactgtactattgaaggattatttgctccctttaggaattaagtttttttccaatgtctcatatttggatacatgggggaaatattggtcgaaggcagggaggggtagagttgtttaaaagccattttgattacctcacacttgctcagttttcatccagttttcttctgttctgtctcaagttgttttaaggtgattctcttgtcttaattagtgtatggtgttccttagtgttcattttggtcagtttttttcagtttttttcccaggttgttttaggggttttctgcctttgcctgggagaattattctgaggaggttcataccaagagttaaattatattgaaactttccaaaaagtaatttttacggttggtttttgtatttactttgttattttacattgatagaattaattttcagctttcctgagacttcaaatgattaacctgtctgttgttcctttaccaagtattttttccttccaaatgttaactttttttttttttgagacaagtcttactcttgttccccaggctggagtgtgatggtggaatcttggctcactgcaacctccgccttctgagttcaagcgactcttctgcctcagcctcccgagtagctgggattacaggtgcctgccaccacgcccagctactttttgtgtttttagtagagacggggtttcaccatgttggccaggctggtcttgaactcctgacctcaggtgatccacctgcctcggcctcccaaaatgctgggattataggcgtgagccactgtgcccggccccaaatgttaaat

SEQ ID NO: 64119 - DNA, 1142 bp, Homo sapiens
cactccctctcccctatagctctaggcaagtgcaaatctactttctgtctatatatatttgcctattctggacatataatattaatggaatgatacaatagccagccttttgtatctggcttctttcacttagcataatgttttcagggttcatccacgttgtatcctataacaatacttcattcctttttatggctgaataacattccgttacggatataccatgttttatttacatattcagttcatcagttgttggacatgtgggttgttcactttagtgcaatcacgttggccttctctctgttccccagattaccaagacccttcctgcctcagagccttcagacatgctgcttcctgtgctgtaaggccaactccgcccatcaaatgcagcgaatttttgttgatcctttagctctggacttgattgtcacttcctcagggaggtttctcctggtagaacccacccttcccagagctaaccagctctcctataatgtgtttcccgcagcagcctgtgcttttcctctatagcacttactagttgttgggttgttgctgtattgtttggtgtctgattccctctccagactctgagttctgtgacggcaagaactggttcactgttatccagctcttagcatagtaactggtacctggtaaacactcacaatgatttgaatgaatgaatgcgcaaattaatactgcaaaccaggcagaggggtacaaaactgaataagatatggcctttgatttcaaagaattcatgatttcatgtgagttgtaataaaatatagaactgggactcaggaaagagtttgaggttagaaatgtatatgtagttatatgagaagagcctaccattttactttctccttcttggctcttgctctggtttaaatggttttatgaaactataaaaccattgagatataattcacataacataaaacctaccattttaaagtgtacagtaaaatagttgtgaatgtatttactatgttgtgtggccatcatccctatccaaattctggatttctgagaatttcccagtatgttctataatattttaataacagacacaattctgtttactgtctatatagagagagaccatatatatatttatggccttactg

SEQ ID NO: 64120 - DNA, 1326 bp, Homo sapiens
aaaaaaaaaaaaaattacagtattttaaaacattttgtagttatactgtgttccacaattaattgtgttttctttgaaaaactggatgtggggtgggtctcttacccttgatgttttgtttttttccatcactaaaatatttggtggacttgaaagtgaccttgtcctgatttcagaattagaaattagtgagtgtttttattgccttaggcagcacttgcttaatgtggatgacatgtcaatggcattaaatcaccattgagccacaggctgtgaagggagccagtcagcatcagttttctgactattgtgcctaagaaactcaaaagatttgtgctgcaggcatcccgaaggattgggacccacatgggccttgatgtgcgtttctgtaggccagagcccagccaaggctcctggcatgtttttcttcacctttgcaggctaacagaaatgtcttgattctctttcaaatcaagttaatctcatttgagaagtgaacagcctttctttgatttgttagaatagccaggcagcataccttgtcatgttactgtttggactcactctgtgctttgacagcttttactctctcatcatttcttctggttagaagtagaatttgagttagttttatagattttcctctggggccaggagtgcttgtgtggggaaagaagggatcattggagtagatttatgtgagattgctttgtctagctgctgaattaccctcctgaggttaatcacatggatttgtatttatgaagctcttagcctatcacctggcctttgaccaagcactgcaaactcaaggttatgctatattatgaaaaatacattctctgttagcttttgcttcctttctgaataataacacttcaaaaactatatttggactgattgtagacttacagattttaataaaatttaatgtgaaaacagatatatttaaaaaataaattttgaagtataatgtcataatttttcatgaacatataggtgggtttaacttgttatcagtagtttttaggatttataaatttgaagtaatacttctttccaataatccacttaccgtaatgatcatttgcattttgtttagagtgttttttaagaaagatttttttttaagccttaattaatacaatgtaaaatataaccagcctggcttggtggttcatgcctgcaatctttgggaggctgaggtgggaggattgcttgagctggggagtttgagaccagcctgggcaacatggtgaaacctcgtctctacaaaaaatacaaaaattagctgggcacagtggcacatgcctgaagtctcagcta

SEQ ID NO: 64121 - DNA, 1139 bp, Homo sapiens
aacctgaaatagttttaagagaccctaaataaataaaacctattaagccaataaaatgccccttattaatgatgatagagaaagcatttttaataaaataaattttggaactgaaggcctcgaaaatcacatgcatcttgaaagttttttctttgttatttttggtgaaacttgcttggaaggaggaagtaagctgcttcctgaaactgaatgagctcttagaattgatgcaggccactagagactaaaacggcaacacatgatttattatttagtataattgaatagtggagaatggtaatgtttgtctctccttggcccaatataatgaatcaaaaggcccttaagttatttggttatgatacgtatatgattgtgttgaaagtcagcaggaaatgaatctagattagttgtctggcacagtcactgggaatgctgagcagatcgaagctgggtgctaatgacaacttcataaggcttgggagggcaccttcagaaaggttcaggatgaacctggcaagctacttctagagctgagtttgctactaataggcgctttctgagttacaaacataacaagtcatctgattttgaagaaactgaagcttggagtgtgaatgacgtgggttcagtaagaggtaggtgaggaagagctaaggctgattcttgacttgtgccaggacatggtcattcggctctaccatcttgtctcacccacgtgtagtcatactgcacacacatgtggctatacacatgtgcttcctttgccttgctactaaaacttcgacttgtgcctgtattccctgtaccccaagttgtaatctgccagcctgggcccttctttttgctgccttagggagattgaatttctgtacctgttaatgctactgcttattgtaccttgagcaattgtttatcttaatgtcctttttgactctctttttcttgcttttatctcttcaatctcttcttattttttatttttttaaagatggagtctagctctgtctcccaggctggagcacagtggcgcgatcttggctcactgcaatctctgcctcctggcttcaaacggttctcctacctcagcctcccgagtagctaggattacaggtgcgcaccaccacacccagctaatt

SEQ ID NO: 64122 - DNA, 1064 bp, Homo sapiens
gccatcacacctggcttctcttgatattttttgaacttgtgatattttgtgaatatatatgcctttgcaaacatgcatgtctatttttctgttaaaatatgttattttacaaaaaacattataaccaaattattggaaatgcaaagaagaaaaaggaaaaaaattaactcatgatcctattgtaacaaattaaacctactgtttctgacaaatagttgtcaaaataattacataatcttcgtgcagtagaaataataggtaaatttagttttgtattcttcactttcttttgtttcataaatgctttctttaaatgtaattttgaatggttgaatagtatttcactcagtgcagaagggaagcaacattagtggagtacctactatgtgatgggcattgtgcaaattgctctgtatttgtctcatttcaccccacagcatttctgtaagtattattatgcccatttcatagatgagaaaattaaggcttacttagttaatttcagtttagcaaacattagttgagctctgaggtaccacgctgagctttggggattaaagatgagtgggacatggttcctcctacaaggaatgcagaaaatggtagaaaagcgaatgagtgaaaatacgttaagtgcagtgacctagaaaaggaacacgtgacctgggttagggttggtcagagcaggtttgctaaagcagcagtgcttctcaaaactttagtgtgcaaatggaagtactaggggttttaattaaaatacagattctgatttttggtcctttggttggtctgacagtcttcatttctaacaagcttccaggtggtgccgacgtcactggtccgcatgcttcgttttgagtaggaatattctagaggatgtaggacttgaataaataccaattaactgggtcgagaggtgggaaaaggtattctagacagagaagacagagtggggaatgacataaagcataaggaaaatatggtaagagggtaaactacttataatctatggcaagtggtggcaaactacagcttgctggctaaatccagcccacagcctatat

SEQ ID NO: 64123 - DNA, 1060 bp, Homo sapiens
ttgtagtgttccagtgggaggaagcagcatgaattttaaataattggcttatgtggaaagtttgtaaattgatcaataacttgtacatattactttgagatgtttaatttagcgcttgtttgttgagtaagactaatgttctgatatattgaaatatttaacagcgagtaatcagatcacattaattagtttgtatgctgtcatatatctgcagtttgttttagttctgcagacaaatatactacactattagagggttatcagtttttgattcctttacttattctgcactaatacagaccagtggcattttatttatacttctctccctgtattttaggagactctaaaggtaggcatttttggaactgtaaagagtatttcctaagttgaacttatcagtgtttataacataaatacataactatgttaaagttttttttaactaggaaataattatttcacattctttatgtagattgaatacctgcttaagaagcttacagaagctatgggaggaggttggcagcaagaacaatttgaacattataaaatcaactttgatgacagtaaaaatggcctttctgcatgggaacttattgagcttattggaaatggacagtttagcaaaggcatggaccggcagactgtgtctatggcaattaatgaagtctttaatgaacttatattagatgtgttaaagcaggtaagaattctgttactgtttttttttctcatctttagaatttgacattttaaaattaatatttttgtcacaaagatgagtataagtcacttattttcttacactgatttcgtttttttattttttgtttttttgagacagtcttgctctgtcgcccagtctggagtgcagtgacgtgatcttggcttactgcaacctccatctcctgggttcaagggattctcttgccttgaaggcatgcacccccatgcccagctaatttttgtatatttagtagagatggggttttaccatgttggccaggctggtctcgaatgcctgacctcaagtgatccacccacgtcggcctcccaa

SEQ ID NO: 64124 - DNA, 1411 bp, Homo sapiens
tgttgaaaccccatctctattaaaaattcaaaaattagccaggcatggtggcatgcgcttgtagtcccagctactcaggaggctgaggcaggagaatcatttgaacctaggaggcagagaggttgcagtgagccgagattgcacccactgcactccagcctgggcgacagagcgacactcctaaaaaaaaattttttttttgtagaaatgaagtctcactatgttgcccacactgatcttgaactcctggcctcaagcgatcctcctgccttggcctcccaaagtgctgggattacaggcatgagccactgcatcaggcctgatcgaggttttaatttacagagaatcattgttaggggttcattctttctttttaagtggaatagaccagtataatgaactcccacatatgcatcaaccagctccagtaaccaccaccatgtggctaatcctaccccacctacttttacctctcctgtattattttgaagcaaatctcaggtattttattttgtttataaatatttcaataggtatctctaaaagataatgattttttagaaatctcaaatgctacttaatgtcaaggggattctattgtctgcatatcactttggggaggggttgtctctgaagtgtctgaaattatatgcaaatttttgtctggttatgcttgcatgactaggtgtaatgcccctccatagattctcagaggatccaagaacaattggtgttcatgttttcaggatcatatatcaaataatggagtaggcaagtatatcaaggaagagatgtcagctcttacaaataaaaagacaataatttatatcacatttaatctttcacagggttacatgatgaaaaagggccacagacggaaaaactggactgaaagatggtttgtactaaaacccaacataatttcttactatgtgagtgaggatctgaaggataagaaaggagacattctcttggatgaaaattgctgtgtagaggtgagtctactcttacttctttgcatgattaccccgtgctgccccctgatgctgaagtagcttctcaccttcttccacctagactctagaaccttaaaataatccccaaatttacatttccaaaataatataggcatgcagttgccatggtttctgaaccaaaaattaaacatagctgacaaaatttttttctaatgtgaatttattttcaaccttctactcgtgaataaagtataaggattaaatcatttattggaacatttaaggaatcatttattgaataaaatggagtcataaaagagataataaagtaaaaaaaagttcagtaagacaatatttggaataaagaatatgccagaaaatctgggacattttgagtgcaagaaataaaagaagatgtaagcattgtctttgaa

SEQ ID NO: 64125 - DNA, 3748 bp, Homo sapiens
ggaattaggttacatatctgtgggtttcttaaaatttgacaggcctcattttaattagaagaaggaataagaaatcatggtagtttttataaattaatagatttacttaaagaatttacttaaatttttatttctacttttgtttcttttaaaaaatataatcatttgggtaggttcaaaaatatacaaatataaaaaggcagctgtgaaagattttctccccctcccccacttatgaatttccaccccttgcccaaggtaaggaaatatgaatatacattcttattttcccatttgttaaacacacaaaagtatatactagtgtcactgttctgcctccagtttatttcacttaatatattttttagatcttttcatatcagtataaagagagttacctcattcttttttatggctgtagaatattctgttatacaactgtgtcattacttagtcattccctgttagtgaacatttgggttgtgttaatcttttgttttaataggtaatgctgtagggaataatcttgtacctgtgtcattgtatatgtgttcatacatgttctgatatctctagggaatgaattctcagaagtgggaatgctgggtcaaagtgtgtaattatgaaatccgggctgatggaccagccgccatcttgagtgttgctattcactgtgccggaagaaaaagtgttctagggtttggcaatgcggtgctccagcctagaaatgtcacactgtacttctattgataatatcttggtgagaactagtcagaactttctgatgagtagtcagctgtcaagcttgcaggagttcccttgtgtgtggtaaatcatttttctttttctgcttttaagattattttttggtctttgtctttcaacagttttactgtggtgtatgtgggtgtagatctctttgtgtttatcctgtttagagtgtattgaacttgaatatgtagattaatgttttgccttaagctggataagttttcagccacaaatattttttctacttttttttccctcttctgatactttcgttatgcaaatgttggtgcacataatggtgtcccacatttctctaaggctgtgttcatttttcttcttttttattttctgttttccagttgcataatttctatagatctgtctttagtagatttttcttgtagcccaaatatactgttgagtccctctagtgaatttttcgtttcagttatgggactttttacttccagaatttccatttggttttttctgtgatttatatctctttattattctctattttatggtatattgtcattccttccattacttctctaagtatggtttcctttagttatttgagcataaaatatttataactgctttgaagtcttcatatgctaaatccaccatctgggcctcttcaaaggcagtttccgttgcctgctttttccctgtatatgggccatactttcctttttctttgcatgtctcataatttcttgtagaaaactagacattttagataatgtgtggtagcaactctggattctgattccacccctctccccagaggcctgctgttgtttgctcctttatttgtttagtgacttggctggactatttcagtgaagtttgttttcctcacagtgtgaagcttctgactgttgctcctcagaggcacaggcttggacaggaacacagtcaccctgcgaagaccctgatttttgcagggctctctttgagtgtctttctctgatctctcatttaagctttccacctctgttggtaccacaccaacagctgttagagttcactaattttgttctgttgttctccataatgccctggaacctgaattgcctcacagtctgagatcatttaaattcaggcctacatgtagtctttaaggtcagtctttgagacttgttcctactacatgagaactcttcttagctgtctctttctctggttctgtctgtcagacgtttggctggtctggaagagcagtggctcacacctgttaatcactttgggaggacagggtgggaggatcacttgaggccaggaatttgagaccagcctgggcaacatagcgagacctcatagcagtcaaccaacaaaccaacaacacttttagctggtccgtgtgttagtgtgttgttctcatggagcttctggcctcctcttaattctcagccactcttgcctggaataaagtttctgcaacatgcagctggggacaaagagaaattctggcagccagcctgcccctcccaggaaggtatcatagccctaggcttgagctgaggggaggggaacccttgtttggggttccatctgccaggagaagagctttcttctcactgacactgtgggggtggggagggagtgcatcatatgccacagaccctcacgattcttactgagagttagattttcttagataaatgttctccattttagaatgtccttagcataatttctagagacttttaaaggttttgtttttttaacaataattttcaccagttatggttgttttgttggggaaagggtctgtggagctccttatgccacccttctagaaattggttctggtaaaagttataatgaataatgtataagatgaaaaaactgtacagaaagagctcaagaaatagctctcaaatctcatgaatgtggctgggcatggtggcttacacctgtaatcccagcacttcgggaggctgaggtgggcggatcacgaggtcaagagatcgacactatcctggccaacatgatgaaaccccgtgtctactaaaaatacaaaaattagctggatgtggtggtgtgtgcctgtagtcccggctactcgggaggctgaggcaggagaatcacttgaacctgggaggtggaggttgcagtgagccgagatcgtgccactgcactccagcctggcgacagagcaagactcagtctcaaataaataaataaataaataaaaatctcatgaatgcaatcccaagtgaatttaattcaatgactgtactaaaactttctttgcaaaatgttgttcaggcttatcaatagtctttcatttacctaatttattttgtatgttgattcagcagatcgttagactggaattctaatggagctaaaagtttttattctattatctttattgaatgttaagaatgtttggcttttcctgtacttaagtatgactgtctctctctctttaatgtacttctactctaacacctgcttttctgtggatgggtttttgattggctagaaactggaggaagcagcatctcgtgcagcagaagaggaaaagaaacgccttcagactcaagtggaacttcaggccaggttcagcacagagctggaaagagagaagcttgtgagtatcacatggctggagaaagcagctgcagtagctcagcctgggtcggtgggaacagggaagggctggaggctacagtgaggcatgtcatcagcttggctttgctactgacctggaatgggctgtaggggaagttgcatgtttgttcattcattaattatctgtttattgaacaccttctatgtgccaggcagtgtgccaaagatgtaatggcaaaagacataaaccttgttttcaagactcctaagtggaaatttatggagccaggcatggtggcccactcctgtaatcccagcactttgggaggccaaggcatgagaattgcttgagcccaggagttcaagaccagcctgggcaatatctaca

SEQ ID NO: 64126 - DNA, 1030 bp, Homo sapiens
tagtgtcgtgttctgttgtgtacatcaaactccaagagacatctgaggagacctcagtgtctccaaagaaggatattgagtctggaagctgggtcccattagttaaggctggaggtggtcttcttggagaaggatgttctcaacaggcaacaaagctgccttccagttgcgaaagggctatcacagggaagagggagtagatacttcctttgtggaactagggtagtggatgggagaactcatcttagtataagaaaaaacttcgtaagaattgaagctgcccataaataaactggcccaatttgtgaggcaacgagtggtagcccatcacctagagtattggagctgagttgaataacaaccttgcaggaagttgtagagggaatttggaaattggtgttggtatagtctgttactttattcctttgttgttagttttataagagcagatgctggcaggtagtagtaactgaccagtcatgtgacttgactttgttaccataatattgttgctcaagccactagatatgtatcctgtccttggctggcatcgaacgacactatatacactttaatgcaggttttggctgtttgttagtttatttaaacaactacatagctgggtattcccagataggtattcctgttattttggagtcacacagacctgggttaaaatccattataacctgtgcaacatacttttaaaccctttggtttttcattgcttcatctgtaatgtagggacaatacctttcaggattgtcaggggattagcaataatggaggcaagggcctggcatgtagcaattgttcaataaatagtatctctattctgtctgcgttcactcctttcttcatcttcattatcagctttttccatggtaacaggtttttactagatgaaaatgttttcatgttgtagcaaccaggcaaacttcaaatcttggccctgccacctggcaggtggatgatcctagtacaggccactgaacctttgtgtctcacttgcaccatctctaaaatatga

SEQ ID NO: 64127 - DNA, 1057 bp, Homo sapiens
ctgcagagtttggaggggctcactgccactgggtactcagaacctctgtggactggatgtcagctctttcctttggcagcgtgtttccttttccgagtatgtgctgttaaactagattggccggttcgctttccatttcctgacacttgacatggaatgcctttgaccattggtgctctgacagagaagtcatggagtcattgccatttcctggttgcccttttggaatgtgatcctgttagtagaggttttctagcttctactaagatatttctttccctaaccatcatacacttggcatgtttcattcccatctcctttcccctcaccttaaaggagactacccctttgccccatattgtcaacctaattttctctcgtactctctctagtgaatgatgtgctaccaagtatatgccaggctgtgagaggattatactgagtagtagaaagaagctaatttgaaataaaaattatttgtataattaagaaagcagattagatgcacatggtcaacaggaagttgactgtatgtctgctagttagattcaaaacatcataaagatgatagcatgtcaatatattagcctagccattatgttagcctttgttaggtgggcagcttttctgctttttcccttcctctgtggtgacaacggaggaaatatccaacagaaatacgtctaacagggaaattgggatcatagtttatatgcatctgatttgaaaggagtattgaggaaggttttcatatatgatctatctttggattaaaaagaacatttatgaaatcaagccttctaacactagttataattgagaagcaacagtaactccgtggacagcaatcaagcttaaaattgtaaataaatatggggataattcagttgttgcaaaaaaagggcagaattcagtagaataaagtccttttctcttacaggtattaaatgaggacagagaacctcaggtgttcttatgctagtgcttgctgagtgcatactaagaaagcaattccaaatagatgtatacatctagagagagtggtattagagattca

SEQ ID NO: 64128 - DNA, 1874 bp, Homo sapiens
aggaatggaacctttcctgtggtttgactgcacattacaccagaagactccagtatccctcattccagaatgaggaaaaagtattctacaaagaacctaatcacctctgtgaaatctatgggatggaaacagtgtggccttaggagtcaaatagtctctgcatggtggggaggatcatgatggaatatgtgaatttctacttctagaagttgtgaaataggtcctgcacttttgcagaatgtccttctttaaacctggcttattccacagctgtagctgataacatgacctggggcttagctgctctagccctgggttcttggagacctcacactgcctggcccctggccatccacctaaggactgcctgctttctggtcacatgtggaccttgatacgactaagcggttacatatgtggttgtgcaaaagctttctgtttaatgcatagtgttaccgatttacatcttggttttcagtggcactatgtctaggaggcaatatccttttaaacagtgctttggctaagatagatacttgtgaatcaaagatagcacagaaatgaactaagtatatcccatttggaattatattttgatactatttaaaatggtttcacctgttaaagggccaacagaactcttggttttacttttgtaattactgtacagaaaatttcaagagtgtttgagtgcttgtcatcaggtgttttccttaataagtagggatatgatcatttacaggaattatatatgaaaaaagtttttgaaatgtatttttgtgatgtgctatgttgaggggaaaccaaatatttatgattttaaaacattcgtatgaaaacattgtacaatgtaatatgctcaactttctcaattttttgctaatttttctaagatacattaaaaatgttttatatttttttttaagtaaaatggacccagtaagaaaattaaaaataccagaacatacactttaaactgtctgatttaataaaacagtggggggtaaagttgggtgtatctatgtgtattttcatataatgagatggactttggtttagggacatttcctgaaaacactgggtttggagtttagaccccaagaagttagctgtggcctcatgtttggtgtttgagtcacgaatgtggggaagccatggctgatgtgtcagctcacaaacgggaacttacaaagatgatttctcattcattgttgctgttaccttcaaattttcttacctctgttttccttagttttctttttatgcctttcagtttttctttcaccagagtaaaccgtgtggctttttgtttgtttgttgtggtttgcattgttgccaagataaaatgcctgttgtggactaagtgggcccactcaggccagcttgattgtatattggaaagctgatctttccctcttggagggagggagaggacactggttggtgtgtttaaaaactgttctttctgaggcgggcagatcatgaggtcaggagatcgagaccatcctggctaacacggtgaaacgccgtctccactaaaaatacaaaaaaattagccaggcgtggtggcgggcgcctgtagtcccagctactcgggaggctgaggcaggagaatggcgtgaacccgggaggcggagcttgcagtgagccaagatcatgccactgcactccagcctgggcgacagagggagactccgtctcaaaaaaacaaaaacaaaaaactgttctttctctatcacagtggttctcaactggtggtaattttgccctccaggggacatttggcaacgtctggagacattttttgttgtcacaactggagggagtgttgctggcatcgagtaggtagaggccagggatgctgcaaaacatct

SEQ ID NO: 64129 - DNA, 1333 bp, Homo sapiens
ccatgcacactctgatagaatatttacgcccaacactaactgtttggcttggcaaataagcaaagccataaagtcacagctggcctgtaggctcccagtcaccatgtgcagctgagtcacaaccacttcccccaccccctggggagcaagcgcctatgctcatgcctgcactcagacacatatccacacagatacccacagatgccgcgtgccactgagtcatagctacctcctcagagagcacgtgcctgcatgtacttgcacacaggtccccacagatgccatatacacctgagtgtgagtcatcatcaccactgaaccctgagggagggcacccagagtgtgttctgccatccttgcttagagatacccatatacacacatatacagatatgtgcccaccacacatcctgttgtacctgctgcatcataccagcagatcaataaatgtttgtggaatgaatgaatgagtaaacaaatgaatgaactaacaagtgaaaacgtgagtgacaaccacactgcgtggatactcagtaaaattggttggggcagccctgcggggtgggtcccaagctctgtgtccagaaggagttgtcttgctccaaatatatcctctgtgggcgggcagggagccagggctgcctcccagaccctgacttcactgggccggaggcccaacctctgaggagttgaagaaaattaacaaagaagaggccctggctttctgtagccaaggctgagctgtgagatgagttggtgggggcatgtgtactctggaaataccacttactcagagacctgagatgcaggacagagtgctctgctgaagggcccagagaggactggttctggattgggcttcttgggaactctgccccaaatgtgcagaatgtgcaggaggcctggttccacttgagatctggggcaaatacagtgcttgggctgagctggtgattgcaaaactgaggccccctattagacagttttccatctaggcctgcccttctggcttgggcttgttcccagagctgctttcctgtctctcccttgaatcttcttttctgaagcccctgtgtctctgccctaattcatcatctggaatattttaatattaccccaactggtcttcccgcctttagacagtaagacctatctatcttgcttatagctgtcagagttatttttctaaaatacaggtccaactatataactttcctgttcaaaatccttccatagcttcccacttttcagcattaaagttggatggcctcagccctgtgatgagatccttcatgaccttactcccctctacctggaggttatgaaagggtaa

SEQ ID NO: 64130 - DNA, 1044 bp, Homo sapiens
ctcatgaagattggaactggaaagtcaggaacggtggctcttctctccgtctcccgaggacctcaaggttcctctctttctcacatttctctgtactcattcctgtctcagcaggctccctctgctcgattttcttgctcatggtctactctcagccactcttactcattccttctacaagtttttaccaagtgcttatttatgtgactgtttgtacctcaacaaagctcctacgtgttgaaaaatagcaagcaaaacaaagttgctgcatttatgaagcatactttctaatgaggagagagagacagtaggcagttacatgtgtgctgacgttaaatgctatggaaaaaataaagcagggagcagtttggggaggggttgggtttctgctgcatataggatactcagagggggtgtccctgatatggtcatatttgagcagagatctgaagaaattgagggggtgagccgtgaagatatctgggggaagaatgctctaggaagagggcgtggcaagtgcagtggtcctgaggtgggaactgtgtggcactgtgtgaggaacatcagtgaggctggtgtggctgatgttgtgtgaacatggggaggatggtggaagatgaggtcagacgggtagcagaggacagatcatgaattgtgttacaagccattgtgaggacttagacttttactccaagaaggaggggaggcattagaggatattcaacagagaaatgacatgatcttagattttaaaaaggacctctctggctgccgtgatgagaatagactgaaagggacaaggtgggaaagggagacagacagggagaccacttaggaggcaactgcagaaatccaggtgagagatgttggtggcttggaccagggtggcagtggtgagggcagtgataagtggtccagtttaggacgtattttgaaggtaatcaggatttgctgatggatgggatatgggtgcgacctccctctggtgaggtggccctgctcaaatcagctgtggacaaggaggatacgtggtatagtgtggct

SEQ ID NO: 64131 - DNA, 1028 bp, Homo sapiens
ctgtaagtataaaatacacactagattttgaggatttagtatgaacaaggaatatatttcattaattttttttggtattgtttactcattaaaatatttttgatatattggagtaaacatatggtaaaaacaaatatattaaaattaatgtctttttttaacttgaagatatctatggggcttgcattatatatgtttgatggtgctgctgtaaaccctatctcttcgtcaacactgctttattcactgcttaattcatagctttggctggcattgctgagggcacttctctgttatcagcttgggatctttcagaaattctttatgggatgatagggctacttagtaactcttacaagaatccctgattaaatacctataaatgtcagtttcccttgagaagcaaatgtgccatgttattagcagtttaagctctagctctggagtggagacaatagagtgaaggggtttgggaggtgggaataaaggatttgggtcaaaggggttgggaagtgacttatgctatgtgctcctttgagtttgcatctttcaagagcccattattagaagggttttgtcactgggaccacagaaggaagggccctgttaaggcttctgcaggttgccaagccctggtctttctcccttggaactgtaaagcaaaaaagtatatgagacaggtctcaatcaatttagagatttatttttccaaggttaaggatcatgacccaggacacagcctcaggaggtcctgagaatacaagcccaaggtagttgggttaaaggctcttgtttttatatgttttagggagacataagacatcaaccgacacatgtgaagtatacattgatttggcctggaaaggcagaagcttacaggtcacaggtggattcaaagattttctgatcggcaattggctgaaagagttattatctaaaaggctgaaattaattgaaaggagagtctgggttaagataaggggttgtagagacctaggttcttaggtagatgaagtctcataggtggc

SEQ ID NO: 64132 - DNA, 1098 bp, Homo sapiens
acttctacacatgaaaagtaagaactgtctttagattttctttactttgataacttgtgattgtttagcttaagacccaagaaatgctgtttgctcatggtaaacagaaacagcatcttcgctacaaccactgacaccagctggcgtcataggtagctagatcattgcatttgttttgaaatgttaatatgttaaatactaaactaatatttcaaaaatgtgtatatatgatttctatatccttgtttttcagatagcctgcttataatttaatataaattaactgatgcattcataagatttcaataatgaaatggttcccttttaaaaaataaaaatactttgtagattaaaaataaatcagaatttcaaatttaaaattgtccacacactaggaaatagaactgtgttaatatataagaaatctggggataattaagaatgaaggacttttctatcatttccattttataaattgccacctgtgaaaatggtttttgcacattatttgtatttttctttgtatatgaaataattttttgtactttgtaaaatatggagcccattgtaccttcagctatttgagactatacacagtgcttcttttgtaactggattactttaactttcgtgaaggcattacattgcctcacattcactaaccaccttgaattaaatttatttcttaagaaaaagcatccctcatttactgtgaactaaagttcattctgtagtgcacagcattcaggagggtaacactcaggattcatacatgggactaaaggttcaagaataaaacaaagcatgacccactttgttccttcattctcctaatgtcatcactgccctttgctcaagaagtaactagggatactggacatgttagcatgagcttctgggttccagacacacttctgcagagtttaggtaagagacttgaggccaagattctcatatgtgctgccactcctaccactgtctctaataagctgtttgaaattgcttaagtcccttacctattctgggtccattccaccacccagagtatatggtaatttgtgaaaattttaggcatgagacattgaagtctgtttgagc

SEQ ID NO: 64133 - DNA, 1020 bp, Homo sapiens
gagaccgttttcctgacagtgggcttccaatatggctccaactaaagaaaggggacacgaaggccaactttatggtatgcatgaatctcaggcatccccctggagcacaaggagctccctcaccttcagtgcattggtgcagtgcatgggaaaggttaaaggcaccattcattgctgacccttcctccttagtcaaagacgacactaagaaaatgcaaaataaggcgctcccagtgtgtctccctttcctgccagtacccttctatcaacatcccctatgactctagagaccacaaaagtaaaggcaataacagtatggtagttgaggaagaaaaattcatacagacgttctggggcagtatggaaaagaaaggtcacaggaactgatttaccacttacccaaatccataaaacagccctgcccttcatctctggttcactgtcatttggttttgtagctcaagaccagcaaacgtgtgtataacttctgcgcccaggatggacagagtgcccagcaatggatggacaagatccagagttgtatctctgatgcctgatgcccatggtcaacccacgcagaagaaacagaagaactcatgctgccagatagatagaaaaagaagcatggatccttgaggagctgacaacaagttatcccagggcctgaggttctcctgcccagtcccctcttgcaggggttgctatatctacttaacctgaataggtgtttcacacaggtctggtcaacagccccatgcactccctgtatcttgcactaaatttttctaacagggtcttagtggttaatgatcagaagatgtctcctgagccaactgtgaacctcacccaggcaaaatggctaccacctacttgggtccttcttcatgaaagctatagatccttttttgttctctgaggtcataatttcctcggagacctgtttaacaagcaaaaatcaaaaccctccaagattgtctcatattctacctggactaggtttcctatgagagacatctactt

SEQ ID NO: 64134 - DNA, 1085 bp, Homo sapiens
gatcattccaagcctcacagatgtggtaatcccagcagaaagcagcagtctttccccagaggtctagcagaaaaaatccagggagaactcttataggccatttttgaatcatctaggggaaatagagacttgacaaaaacaacagatatcccctcccctttacagcattttgtaagtgtaaatcaaaattaactctcctgtcatcatttcttctaggtcctttgagggaacactttataaaagaggggctttgctgaaaggttggaagccccgttggtttgttttggatgtaacaaaacatcaggtaatactcttaaagccaaaagaaattacttctgtctaggctagtcccagtccctggctattatgtggctctagcagacagatagattcctcatgtacagactgcttttttagtgcctctcatatgtagtctggaggctcctcaagggccccagatgtccctgagtaagggcaatagccttctgagggagtttcccaagtagctcggcctggtacatgcaggcagaggcagcaacaattgagcccagagcatagagcaatagaactctttttttaatgctcaaatatctcttgctgcctgatcttaacacccaggtgaggggattcctgaggttttcagccagttgcatacataccacatgcacatataagcctatgcctgtgaacactccccagaatacaagttaccttcgtcctcgcagcagaaagcatccattcaaaacagagggcattaatttattctacaaacatttatcgaacaccacctctgtgcccactgctgtactggttactaaaggaggcactgttacccttcaaagatggcagcaacaggggagtaaaggggccccaaaagcggcagaaggggatgtgcccacccaaacttggaattcaccgtgggcaagtactagactggtccttgctgactatgtcaagaaatcttttgactactgttaggttcttagctattcctgtagcagcctctgcaatccttagcatcatagtctttactccagtgatttcaagggagagcagttcctacccaaacctccagcaactctgca

SEQ ID NO: 64135 - DNA, 1031 bp, Homo sapiens
aggaaggctgggacatcactgcacaagtaaactattagacatattttttgatattttatatttatatttccatttggtcatttttaaattcttcagatgactcttttgtataatgactaatgtgtttatggacagagaaagtcctgtgttaaacagcacctggtatccatcagaaaactccgtaccatgagctcttagcccctacgcagcctggagctctggctccgggcatcaagctctcccatccacagatgtaccatgcaggcttgcggatggagcccttgaccagcagtgtgaggcgtggaccatccttcctgggttttgtcagtccatcccctggctctctataagccccgccttaactcactccagagtgaaaagtgtgagttcagactacattaagacattaatctgcatctgccaaaaagtagaattgattttaactgatcctctggcctctgattaacttaggaaaaggttgctgtcagcaaactggccagttaaggattaaagtctcaattccctgaaagtaaacttgtagccaaaatgaatttgagctttagtttttactggcaagtttacaaaattaattttattggccatcctggaatggttagtgaacaaatttgctgtccaggtaaatttgtgaattagctatcatcagaaggaagtgcttttatcttagtaataggcctttttcagaactaaaattaatgacaatccatcctgcttatgccctaggtgacatccctggttcagttactcagtgatcccttttataggacacttgaaggcttccagatgttggttgaaaaagagtggctctcttttggtcacaaattcagtcagaggagcagcttgaccctcaactgtcaggggagtggttttgctccagtcttcttacagttcttagactgtgtacaccaggtaagtagagcaagcttgagttgacttgatatgaaggaaagaacacaacatactagcattgatggagcattgcgatggtgtgcccggtaccttcctgtcataac

SEQ ID NO: 64136 - DNA, 1018 bp, Homo sapiens
aggaccaatgtattcctaacattcacccatacacaccccaaattccttaattttattataaaaatttgtttctgactgaatgacaatcttcaaaagcttcttccatttggtataattttttagtggcaccttctgctgtgtgctgtccatttcattgtgcttatagtatttataaacaggtgctgaaatttcatttaacaggtactcaatacatcttttttttgtgactgtgcagctttttgtttgttaattaaatcttctacttttattatatttacatttttcccctgctaattttaaaaattaaatagcctattcttctcttactcaatctgctctgacatttgctgctatatacattttatttctctttctgtctttaatcttacctaccagtgcatgggtacagagataaatgttttactcagtcaaatcccaaatcttcagctaagggaagagtccataatcaaggtactgtattatgtgtcctgatatatcactcttttaaaccatcttcatgtgaaactacatatgttacaagtaatttttttgcatttgtaaaattatatcctttattctcatctgcattctgaatttcctctgattccatttacaaaaaaattaataattgccataatgtctaagaaaacctcgtaaactacgtagaaagattcatgcagccgggtgtggtggctcgcacctgtaatcccagcactttgggaggctgaggcgggcggatcacctgaggtcgggagttcaagaccagcctgaccaagatggtgaaaccccatctctactaaaaatacaaaaattagccgggcgtggtggtgtgcacctgtaatcccagctactcgggaggctaaggcaggagaatcacttgaacccaggaggcagaggctgtggtgagccgagatcacgccattgcactccagcctgggcaacaagagtgaaactccatctcaaagaaagattcgtgcatgtgaagctgaaatgaccaataaaaacttttcttgggaac

SEQ ID NO: 64137 - DNA, 1030 bp, Homo sapiens
tagcatttaagcccaatggggaaacacatatacttacaacttggataaatttctttgttgagtagaaaaatgccttgagaaaattagtactgcctctcaaataccaaaatataatagctgggtatatttgagaagtagccacttggaggcagctttttaatttttcatcctttacattttaagtttttctccatgtattattttattcttgaaataacctccaggatatgtatttaaagaggcccagggagattaagtgacttggccaaggctgcatagcaaatattagtataactgggactagaattagttcagtgttgcatcgtatcagtgcagatatatttactgaatacatctagtgtctcatgcactgggccaggtataagatcacagtgatcaataaggccccacatgtgacctaagcatctcttttccctctcccctttcgtcagaacagagtagaggaaataacaccagtgcttaggaaacactagttctctgaacagtaacgcattcctatggggaaaatgaactgtgtcatatcttccctgaagcagtccccttagccggttcttactgattgggtccaaggtcacatggttcctcaggaaacaatacattaagagtttagtggccgggtgcggtggctcacgcctgtaatcccagcactttgggaggccgaggcgggcggatcacgtggtcaggagatcgagaccatcctggctaacacagtgaaaccctgtctctactaaaaatacaaaaaattagccgggcgtggtggcgggcgcctgtagtcccagctatgcgggaggctgaggcaggagaatggcttgaacccgggaggcggagcttgcagtgagccaggatcgcgccactgcactccagcctgggtgacagagcgagactccgtctcaaaaaaaaaaaaaaaaaaaagagtttagttacattctaattcaaaccatagtcccactacttactgtgtgattaagcaaattaggaaacctcttaattctcagtgtcttcatcttta

SEQ ID NO: 64138 - DNA, 2809 bp, Homo sapiens
ttttttgttttttgttttttgttttgttttgtttttgtttttttttttttgtttttgagctggagtcttgctctgtcgctcaggctggagtgcaatggcgcaatcttggctcactgcaacctccgcctccaaggttcaagcgattctcctgcctcagcctcccgagtagctgggattacaggcgcccgccactacacccagctaatttttgtatttttagtagagatggggtttcaccatgttagtcaggctggtctcgaactcctgacctcaggtgatctgcctgcctcagccttcctaagtgctgggattacagacgtgaaccactgcgcctggctgacaactagtatctttgaaattgcaatgcatcttacaattgatgtgatcagaaagaatagtgtcatagtttaaatggcagttttttaattgataagcagtttttattgttaggcaataaaataacagtgcgtcttagaattgatgacatattaaagttgataaaatacaataatgctaattatttattttctattcaagttgtaagaaaatttatgaatatctgttgtccttgtagtgagtccatcccctgtcctctttaaactgtctgggccgatttcagtgattctgttttgcttcacccaaaccaggcttatatgcccatcaacccagaattgctctcacaattgtgtatactttttgctcctcatttagaaggaccagggattggcagtagttgctcctatcttctccccatcttcttccactcttccctctacaaatctttataggctcatgtcccctggtgggcctgtgtggcagaattgaaataaagttgctggtattggaaagttcttaactctacccattctgggatgtcaaaggaacccactcccaagcaataacctggtcaggatggttgggggatatcatcaaggcgttgttgttcatgaatcttcattttgagttgcttggataatgagaagctatgccctgtgctttcaagcccaatctgtgcttggaagggtagccctgtgctggttttccagacctgggctctttctggaagcataatgaggcaatcaagaagtaggtgtggtaaaaccagcattacagtggaggattagccatttaatagactggcaatttaagtggggctggtttctatatttgggtgtggtaacttgtagactatatagagaaaaataagcatagatagataggtagatagatagatagatagatacttgttttgttaacacagagacagtttattttattcaatatattttccttttatagctcctacctcctctttagaatcttccagtagcatagaacaagagaaatacttgcaagccttactgaatgctgtttctgtccatcagaaactcagaggcaacagcactcttactgtcaggccagcctttgctctatctccaggtaagatttgataatacttttcttcttgacagcttctaatgaaaggtcagttctgttcctagggttatttgtactgttatttgttatttgtactgttccttcaccaagacttcttaaaagttttaccctgaagggttataagtttaactccttttacttagaaatctaccactattaatgtctagtaaatagtaacttaacttagagattcagttttttcttttttgttttattttcttttttttaagagatggggtctcactgtgttgcccagtctggtctcgaacttctgggctcaagcagtcttcccgcctcagcctcccaaagtactgagattacaggtgtgaggtgtgagctcagttatttccttttcaaaagagtaattggagaggaagtggggaatataaataaagtcaccctttattcccatatttatcatacccagctcagttatttccttttcaaaagagtaattggagaggaagtgggaaatataaataaagtcaccctttattcccatatttatctttcatagactttaaaatattcttatgacatggaatatgtaagtggaacatgtttgttaaatgtgtatttattaaaatcatcatttataagtttgaaattcccaaaatatctgcagcctattatgattttcagtacaatttgttttcactggatttggatgaagccattaagacttgtactaatattctgtttcagttatcatgtgatggaaccccaaagggttcatgtagaggtaaccctaatgtgttagacacaggagcatgtgacttgagaagttggtctctttggcttaatcagctatttgaattagctcaacataagcagaaagtggcttttcttgtaaaataacaccatgcatgccttgctccatttatcattaaattctctgattgcacttgccaaacctaactctctataatcttgcaaatgtgtgttatctctgattaataataacattgccttgttatctctaataaagctttgggtacttaaaagtacaatgtttggcagcagttaaacatgctacacctgaagataactttttgtcatttgagtaatgttaacccaaacaacatggtttttgttcttctttttggctgactttagggactgaaaggaggacttcaagaatgtccactgtgcttaagcaggtagtgccaggacatttggatgtaaacccatccaatagctttgctcaaggaggttagtaagattgattttataactgagcactgatgcaagcttaaaagcagaaagcatttttctagatagttgatattttaaatcaattaattatgattcaaattgttcttaattaccctcttctgaatgaatggtcaaa

SEQ ID NO: 64139 - DNA, 1025 bp, Homo sapiens
aatatgttggccaggcacaatggctcacgcccataatcccagcactttgggaggctgaggaaggaggatcgcttgagcccaaaaatttgaaaccagcctgtacaacaaagtgagaccctgtctctacaaaaataaaaataaaattaaaaaagaaaataaatatatcttacccttcaactaatatgtttctgaatcttagaaaattactatgatattagtattcaatttcttatattctctgtctccctcttctctcatttcctttccccttttcttcccctctgttccttcccccaatcattctcttctctattctatgtctctgaagctatcctggccttttagtcgtacctcaagctgtacaggacagtagtttaccaagagtagctcgctgctatcgacacaatcgcctgcctgttgtatgttggaagaactcaagaagtggtactctgctcctccgatctggaggattccatgggaagggagtcgttggtcttttcaaatctcagaactcccctcaggccggtaagcatctctctataacacaattaccacccgttcacataaggacagtgctaaaaataaaggaagtaaaatctgggaatggtgccttttcatcaagtcttgtctcacacacaaacttttccactttgctacatgcaacatgtacagcttaaacaagaactatacttgatagtgtgaggctccacattgaatttgacatcttaatatgtctggtctgtacttggattttaatagaaattaatataataaagtctttggtcctaggcaattttcattccagcaaaccagagtattcacagatggaaactaggttataccaatcttttttctttctcctgggaagcatccaaatacatttaacagcttcagaggtaagatgagcttctgtgccatgtgatatgagatatccatcctcactcttacaagtcatacgcacacacaagacagcaaactaatgactgcaaatgctgcttcaggatctttcaagcaaagaggttttt

SEQ ID NO: 64140 - DNA, 1042 bp, Homo sapiens
agcagccacagacagtaaggaaatgagtaggcatggccagttttggcccacaggctataatttgctgacccaggtgtaggcaaggctttcttatgcggtctaattggaatgttttcaagggaatattacttaaaggatgtaaataaagaggcattttcttttttcagttcttgtcatctctcactgtttttcaaatatgttgagtcttattccatgctttactatatgtaaatatatattttctaaaattacattttcaccatccacaagtttagtcattttcatctccaggtaagatttttctttgcatttataaattcctgcttaaacagctctgaaatcactttgtaaattgtaagctttgtacatattttagaaagttatcttaatgttactttcaaccctgttgctcttgaagatagatatgtcattttaaatggcaatttaagtttacaaatattaatatgaaacttcagaaacaagttgggaatatagttttgagattgtggccaaataaacattttgcatgaagttctgaaaaattggcactctgagtatgcagtaatttttctggaattctccgtcattctaactaaattttctctgaagatgagtcatgttgtcggggtgtgatgtcctgctgtttggaaagtttgctatcaaaattatgccagccattgagaaaacagactcatttatcattccaatctgtcagaagtaaaataaaattttaatagatgacttattagaacactggttataaagcatttatgatggtaaaaagtaatatatatccattaagttattagcaggaaggaaatggaataataaaaaataatccaaaagaaggcaagaaaggaaaaaaaaggggacatagaacaaatggaataaataacaagtagtaagatggtagatttaaattcaaatatatccataattgcattaattattaattgactaaatgttccaattcaaagaaagagatcagggtttgctttaaaaaaaaaaaaaaaaaaaaagtggctgggctcagtggctcacg

SEQ ID NO: 64141 - DNA, 1040 bp, Homo sapiens
ctcactgcaacctccacctcccgggttcaagtgattctcctgcctcagcctcccgagtagctgggattacaggtgcctgccgccacacctggctaattttttgtatttttagtagagatgagatttcaccatgttggtcaggctgctctcgaactcctgaccttgtgatccgcccacctcagcctcccagtgctgggattacaggcgtgagccaccacacccagcccaaaaggaagtttttaatcctgtgctttgagctaatcatttcttcaatatctgtctctaccatcccagtttcagatgagagtgagctccccacaggtactaccctgaaggcctcaattgctttgagctaatcatttctttgatatctgtctctaccatcacagtttcagatgagagtgagctccccacaggtactaccctgaagacctcaattgctttgagctaatcatttcttcgatatctgtctctaccatcacagtttcagatgagagtgagctccccacaagtaccaccctgaaggcctccgagaagtctacaatggaacagttggtggaaaaagcttgtttcagagactatcagcgtttaggtttaggaaccataagtggcagctcttcccgttcaagacccgagtattttagaattactgcctccaacaggatgtattcactctgccggaggtaagtgtgtcagtgggctccaaaaagaggtcttccttcctttcttcttatttgaatctttaataggccatttgcatccatagccctgagatagataaaaatgcctgaaaataagaacaaggtctccaggatacgagcaagcatctcattggcattctcggaacaattaccttactgaaagtacctctagtaggtgagaaggtgaaaggtaaagtactcaccccctatgaatttctcttgtctttctcttcccagtttgcttcttttctagcatgactaaagataacttgaagaacaggattttcccagcccaatagaggacatgaaagtcttttgtaggctggggagccacaaact

SEQ ID NO: 64142 - DNA, 1016 bp, Homo sapiens
ctttgcctaccagggaacatgttcctcagttgccaagtagccaaagatagctgtattacttgttctctatgtaataattaacttgggaggacaggttgctttagaaggcccaggtagtccataataaatgaaaaaatcctcttttgctttattttctgtggttcctgcattccttttgggagagtgactaaaggtattccttacagaaacaaatctgggtccaaacaaatttccttacagaaacttactgcctgacagtagtttccaaatgtagactagtagaacattgtgttttatcaccatcacttaccaaggagccatggagttaagtgagccttctacttgagtagacatcactttgctcatgtttctgtcgctatgtaaattgactactatatagtagtcatttgttgcatttaagtactgaccatgatttctttccttgactgtcttagtattgcaggaagtgtagctgagagctatgatacagagagtgggtttgaagattcagagaatactgacattgccaattctgttgtgcggttcattacccgatttattgacaaagtttgtacagagagtggagttactcaggatcacatcaagagccttcattgcatgataccaggtaatcactctgcagatattagagaatcagaatattggagattattgagtttcagcataaaacctggcaatacatgtcttccattatagttcagccatgctatttatttattttctgattagtttttaaaatgtttttaaattgttgtaaaatacatatataacataaaataatctaagtgtacaattcagtggcattaattacatctacaatgttgtgcagccatcactgttatctatttctaaaacttttttattaccccaaacactctacccattaagcagtaactcctgtttcccctggtaacttctaatgtattttctgtctctataaagttgcctgttctagatatttcacataagtggacttagataatatttgtactttt

SEQ ID NO: 64143 - DNA, 1366 bp, Homo sapiens
ctgttgttaatcacctcttaagtttactcttacgctgaaacccagcaggaagtccctgaaaggaaggaggtttggtttgtgtttatctttccctgcacaaatttggttaccagaaaatgcccttgaagcccagggcagtcttctagagagtatgtgagccaggcaacagctttggcggggaggtaatgggctggaatgagcagtaggaaaagtgcagttctcctgagtccctaattcatgctatatcctcattctgtgtgtaaggccaagctgtaggttcactcatatttcagttgctgtctctttaaaaagagtaccctaaagccatagaagaaatgttaaattatctggagttttatgtttacatcgtgatggattttattatatgccctaattgtaataatattcactaaacctacagtgcctccttttcctgtattttctaattgatataataacagctttgatttttagctgttactaaaatacccattttgataaagtgactgagactctcaaggatccaacagcaagcccacagttgccagttaaaaaggagtaagttgctgattgctaagcctgtactaccatacgatattctttagagaaatcctttgatctcatctatgattaactgtggcccctgtgaccttatgaactgttataattctgccagccccatgatgatgtattttgtgtgttctcacagaaacttgcccctggagtcagccagtttgcttacacgtgtgtacaagaccaccccatttggacaaatcagcaattttgggagacaaccttttacaatgcagtgcaggaacaggttcgctccctttatctctcagccaaggaagacaatcatgccccgcatctgaagcaaaaggtaagagagaagaaaagaactctaattgtgtgggattaggattctggctttaaggaaagcagatgttcccagggcaaaaaaaactctagctacttcctgccagtgtatttgggttttatttagggagccctgtgatatctttcctctgttgatttcagacattatgtttttccataataacttcttaatacagttcttcagcactaggattgttttaatatactttaataaataagaatttcctggaaatgactataggaagttgaatagaaagaacaaacctaaaataacaggcatacttctctatgcaactaacttccctggaggaatgtcaaattaaagttaattaactccaaaataaatgtaaaatttggtagttgtattaaaaaaatgccagtaataaatctaggtcttcttctaggaatattctacatgtttctctatgttttatcagcataaaatatttttatgaaaaatatcaaaaaa

SEQ ID NO: 64144 - DNA, 1017 bp, Homo sapiens
atggacatacacaggtaaaaaacaaaatgggaatgataatatgtaattcatgatcatggttacctctaggataggagagaaatagaatcaggagaagtatacagtggacttgtatgtattgtatgtcctttctttaaaaaaaaaaaaaaagagagagagggagggacaaagcaaatatgtttaagatttgataaagccaggttttggatacaattttttctattcctgtcttccttttgtttgtctctcaagactaagcaaaagaaagactcccaatttcatcagaaaatgctctaaaattaattattaaagtgatttaatatctggacttggtcaggccagagcagaatcacaggaggacttgctagcaccatccctgaattgtgcagttagttaggtacacttatattccagggaccagaactagataggaaatctccagcaatttagacaatgaatctctctattattctttaagaccattacatgtttatggaaaagacctgccagctagccttctttcctgaaatctggttttccctgagctcccaaacgagagccttgagcttggggaactaacatgtctagccagacaggccttcaacaggcccctcatgctgatatcttaacctttcccttaaccatctcatctctcagatgatttgcatcctttatttggatttgaatctggcctgctggttggtgagccccatgagtttattcttcatatcctgtcccatgctgggtttcctttgaaagctttgtggaaaatgaatggcattgcttaatctagtaccttcacgggctgttttttctagataaagaaggaagtcaacacattcttaaacatctcataaaattgcatggcacaataccacttttttttttaggacagaatcttaaaaattattatgaaatgtaaatattgttgccagaattgaagagaatgaaagagagatgtgatttgacaaaagcattcccaaccagcaccaccatctcacaccctcagtatgagtt

SEQ ID NO: 64145 - DNA, 1049 bp, Homo sapiens
ttgttgaatgaaagacaggacatgaattcaactataaattgaatgtctgcttcaccagtcactggatatacattgacaaataaaacagacacagtccctatgctcaccaagcttagcccaggtcctccagctggcaaatggcaaaaccgatgatgatgcatgtcagcatcctccacttttggggttggaagtcacagggcatacttgattatgttggtttttagtggactctaatattttcatttagggcaaggactttgtagcctgaagataggaattagaatacttttgataagatacagcctaataacataattgagaaaagaatggaaaatgcaaaactcatgactcgtgaataacaaaagcaaagattttaataactatgtgtccctaaaaagaactttatgaatagattattattctagtttaattttgcttaggtggcactgtttcctttgtattagccagcattgttagcatttttgagaagtcatagatttgatggggatttgtggaggagctgctaaattacagaagaaattattatggcagaaaatcaattatgtggtgctataaatacttgattcagtaactcagcaaattccctttatgtccaaagtgcaaacattttgtacctaagtcaaaaggtctgtttttaatttctgcagctttgcagttgttcctctttgtcactgatagatttttacatgataagagagacgtaaagataaagaggggtcactttcagagggagttttaagtgttggggagatgaaagcatgagcttaaccctcggtcataggcatgtttcagtactgatagcaggagattacctggaagaagtcagagagccatcttgaatgactgtggagttagctggttttattatactcttgggtgacatttccagctaataaaattagaattaaaattataatcttagaagcaagcctctgggaaatatgtaattaaccttttggaatttaacaagcattgtgtgtacctccagtacctatatttaagatgctttaacctagcatttgaattga

SEQ ID NO: 64146 - DNA, 1356 bp, Homo sapiens
ggcttccccaagtgttggagttataggtatgaaccaccatgcctggccattttcacgtatttctaatagggaacatagttttcaaaattacactaaatacacttttgtatttcactaataattcagaagttccttgaatactggctttgccttagtaattaatatggatcctgattgtccttctatagatacgagagtttgtaggtaattctgatggaatacaaatatgccgactttcatagtattgagattgtggctagaagaaaaatcttatagaaatataaaaaatagatatttcctaagtcatcacttttaattggtaaatgataagaggtctcaaaaatttacaaaataggaaaaggattttgttttttttcagacttcgtgatctggatacatcgcatttcctacaataggtctcaagggattatatttttgaccacaaaaaaaaaagataggggagggagtgggtgatgaagggttttttttcatcgtttttttctgctgtaaaccaaatattaatcttaaaaataaattagtcagcagaaaaatgtttgagagtgaagacaagcatcagtgctggctgaatccacatttggcctggaaaagatgtgaatgtgtttattacagcacatctttccagcacagcagaattttagaatggtcagagaattagtgtcttgcttttatttcctcccttcattttcttcttgttctttaagacagtttagcattcctcctcctcctcttccctttcagcacaacctctcctggcttctcccacttttcctttctagttttgaaaaactgttcctctatcctactgctcctgaaaaacttctgcttctgagaaactatgaattattataattagtttagaactaatgttctttattaagattagtttatatatactatttaaactagtgatagaaggaaactggggcaatttactcagaagctctagaacacttattgtgttcttcagtgaataattaacagtatttttaatcttattaaatttatttttataataattactaatttttaattttatgaaatatttttctgaacttatcaactttttttgaatgataattaacttttttcatgtgatggacaatttttttttatatgatgaaaaaaaggtttggacccttttgttcattcttcagaaaaatgaggcagcctactaagactatttctttgtctactccaaaagaaatatagtacagttcagttcagtagacattgatgtcctatgctaccacgtcctgagtattaggactacaaaagccaacaagtcaaaatctccaaccttaaatacacacgcttacagagaagatagattagtca

SEQ ID NO: 64147 - DNA, 1050 bp, Homo sapiens
taaaaaggaaaaaagaaaaaaaaggacaattcaactataatatggatccactttacaaaattcaagtgcatgttatatactatttaaggatatttaatctaatgatacaaacatacgtggtaaaagtatttttttaaaactaaggtaataagaaacaaaatatttaagaaaattacctctgcgggacacagaggaggggcagtaaacatggggatcttccaatgtaatgataatatactatttaggtacatgggtgttcattgtatcattcttcataaccttatagcttatgtatattttatgtcttaaagtactgactgctattagattctttacagggcatatttatcttctcaaactcacttcaaacattttgtagattgtataagttaattgccaagttaggggatgattcacttttactggatatacattctttagagtatgagacagtagatataatactttataatggcaaaaatcaaaaacagcctaactgcctaccatttggctagcgattaaatatggtgcacctcttctttagaacactgttcagctactaaatagaaacaagtacatctatatatgtactgatatggaaaaatttcttatatattgctaagtaggcaaaagggaagttacataaagtagatatgaatctatttttgacctaaaattatatgtatgtatgtatgtatatgatagtaaaaatctggaaggatatttacactaaaacctgttacgattatcctgataagagagataccaatgattacctctgggatgtggattagaagagttttgatttccattttaaacccttctctgcttgaaacatacacatataactacattatataagatatataacaagcatgtattacttttataatttgaaaaaagtcctcagttttttagaaaggaaattttagcatcctatgagaagaacttgccctaaaagaaaagccctgtcttttgttactttattacagttactttgttaccattattatagaggataaaggaatagaattaacagattaaggtctc

SEQ ID NO: 64148 - DNA, 1049 bp, Homo sapiens
tttaatttttctttctgttcttgccatggaaaatttactagttatagaaaggtgtcttacgtatctatggctttgactcatgatctgaagcaacagtcaatttggtaaccaaagttttgttaacttgaagaaaaatagtgaaattaaatgtttttcaatttatcacataattatcttatatttcttgctggtttacatataaaaataaccacaaatctattttataattgtcttaataataaatcacctattccctaggagtttaattttactaataactatgttaaataaattataggatgcgtttgaattttcaggatgattgtttgaaagttgttgtttcccccagtggtaccatttggtcatttgtacctctcttgtcctcagacccttcctgctgcactcagagcccttaaaggaaaggcagcaagacagtgtctcactgatgaattgggtttgcatgtccagcaaaaccgggcaatattagaccatcaacagtttgactacataataaggatgatgaattgtactctacaggtaatttgtagttctttcagattattcctcttatttgagaatacttttcatttttccagaatattttgtaattaccaatatatcagttcttgagcctaccacagctaataggatgaagcgtcagtatctctatcatttctgtcaaatacttttttattacttggcataaatattaagagtttttgttctttctttgttttctctttgaaaatgctagattattttactagttctgtaatataagcaagttctttgaaaatgaaaagtcatctttaaagcattcagttatatattacttaatgtctatagtcacatcagcccttttcagtcagttttcagttgtccaagcagaggacaatgaatggtggataatccaaacgataaatgaattacttaattaagtatttaagtactttgtgtttgtaaagcacaacaacaaaatttccacttggcttcaaaatgtgtgtatgatctttcagaaacaaacttcccacaaaacagtgaggacaatt

SEQ ID NO: 64149 - DNA, 1077 bp, Homo sapiens
gctagcctgatacttcaacactggaacatgtaatcaaaataatgatatggaatactttcaatgctctgtaataagggaaaaaataaggtgtaggtcatatcaacagtttttgtttgttttctaataagagatgtggtctcactctgtcacccagctgcagttcagtagtgctgtcctagctcaccgcagacttggactcctgggctcaagtgatcctccgacctcagcctcccgagtcactgggattacagtgcaagacaccatgcccggctaatttttgtattttttgtagacaagggtcttgctatgttgcccaggcttgtctcaaacctctgggctcaagggatcatcccacctcagcctcccaaattgctgggattacgggtgtgagcctccacgcccaacctacagtcttaaagtagtagtctctttgcttttgtaattaccaaagaagtttaatttatttgtgctttctttatattcttttactagtttcgataatggacaaggtgacgacagttttcaacagtgcacaaagactagaagttgtcagaaactgtatctcattcatatttgaaaataaaattttggaaactgaaaaggtaataaaatgtgatctttcccaagtaagcatttatcatttccctttcagatttacgtgctgaggttaccagcttctctcttctttaattctatcccttttcctaataaagtatcctctcattgtttggatcattttaaatgaatagtgtctaagatttaaagctgttgggccaagcttaattatatgaccaccagaaatatattcatagtaattttttctgtcaaacttttaaacattgttcacaaaacactattttgggatattacttagaaacttaaaatttttttcattttatttttatttttggagccagagtcttgctctgtcacccaggctggagtacagtgacatgatcttggctcactgcagcctctacgtcccaagttcaagcgattctcctgcctcagcctcccaagtagctgggactacaggcacgcaccactgcgcccgcctcatttttgtatttttagtaa

SEQ ID NO: 64150 - DNA, 2038 bp, Homo sapiens
ggtatggggtttaggagaaaacttgtttaaagaaaaaaacttgtgaattgttggtatttttatggtttaaagataggagactggaagtgatcaccaaggaatgaatgttaatagaaaaaagacccaaggactgagccctgagatattcacattgttaagggattagggagatgagaaatagacaaagatgtagcaagaagacctagaaaccaagtaaagaaagtgttcatggaagaggaagacagatgccaagctgtatcagatgctgctgatagagcatgtaagaagaagtaagattttggtacttcatgttttatggcgtatatatgaatgtatgtataactacccagctcgtgtccctgtaagctcccactcccttcctggtgatctgccattgttattttaacttggagtaattttacctatgtctgatattacaggagaatccaaatcctcatatggcattccagaaagttccacggccaacagaaggatcccatttgcgagttcatattcttcctttcccagagattaatgaagcccgggttcaggaattaatacaggaaaatgttgctaagaaccagaatgcacctcctgccacacgaatagaaaagaaatgtgttgtgccagcaggtccacctgttggtatgtatttgtctgtctgttttaaaagtaaactgtttataaggatgtaagacccaaaaaggaaaagtgtgcaatttgatgaattttcacaaagtgaacaaactcctgtagctagaatcagagcattatcaatactcagaaactgtttcattcactgcctcccaaaaagggtaatcataacccaaccactgccactatagaatcttttctttttttaataacagctttattgagatatgttacatactgtaaattcaccaatgtaaaatgtgcgatcccatgatttttagtatatttacagactcattcaaccattattactatttaatttgagaatatatatatattttatatatatatatatatatagagagagagagagagagagagagacagacagacagacagacagacagacagacagacagattgagtttcacccttgttgcccaggctggagtacaatggtgtgatctcggctcaccgtaacttctgcctcctgggttcaagcaattctcttgcctcaacctcctgagtagctgggattacaggcatgtgccacctcgcccagctaattttgtatttttagtagagacagagtttctccatgttagtcaggctggtctcgaactcccgacctcaggtgatccgcccaccttggcctcccaaagtgttgggattacagtcgtgagccactgcacccggcaagaatgtttttataacctaaatagaaacctcacacctattagcagtcactccccatttcctccccaaaccaccttctccccagccttatacagtaatctactttctgtcttcatagctttacgtattctggacattttatataaatagaattatacaaaatgtaatcttttatgactggcttctttcatttagcataatatttccaatgtacgtctatgttgtagcatgtatcagcatttcgtttcttttttttttttttttgagacggagtctcgctctgtcacccaggctggagtgcagtggagcaatctcggctcactgcaagctccgcctcccgggctcacaccgttctcctgcctcagcctcttgagtagctgggactccaggcgcccgccaccaggcccggctaatttttttgtatttttagtagagacggggtttcactgtgttagccaggatggtcttgacctcctgacctcgtgatctgccctcctcggcctcccaaagtcctgggattacaggcgtgagcctctgtgccaggcctcatttatttttaaatgtctgaataatactccgttgtttggatatatatcacattggttatttatccatcaattgatggatatttgagttggttctacattttggctattatgaataatgctgctgtgaacatttatgtgca

SEQ ID NO: 64151 - DNA, 1012 bp, Homo sapiens
aaatttgtgtcacttgctatcccacatagctctaagtataatttgtgcacgttaaataatttcaaatacttgaattaatctgggaaacttgataagctctaacaatatcatattgatttgtctttcagtgctgagaccaatacataggaaaaattttctttttcccaaggtggctgttgcctactttgaatttccattggggtttggggcttttgttgtgccttgctttgcttttatttgaaattagtttcaagccttgtattctgtaacccctaggcatattctcacttagcctaccaaagctgggggtagctgggcgtgctgcaggggggaggggtgctgcagaccagatgatgtgtgtatatgtcactttttcatgtctgagaaaaatcattctacctcgaattactaaagtatactcttaaagcaggattatagagaccattccttgaaaatcattatccaaattcaaaatgtaaaagacagtgcattctgccaaactcttttcagtagtttattttggttactttggaaaaaaatgttgccaggttcactgtaagtgtttagttgtctagcccttgtttattactttatatttgcatttctctggaatcaaagatgaaaatttggctgctgctttgtactgtcggaaaataacggatttccttatttcaacaaggagattcaacacaaaatttggctgtagcttttaatgagcttggtgacgttcaagggaccagtccaaacacatcttgtgttacaagtaaaagcagatgtttttaagtatatgcagaatacagtgagccctaccctaaacttcctctcattgctattgtcttctcaaaagtcatttcgcgaccaagttaggttcaaggtagcaaatgtggtcctttacatttatcatgctgcccgttagagggcagcagtatacagactcaggagccagaaaaccaaatattactgtattctggggcataagtctttttcgaatcttctaaacacagctaaatat

SEQ ID NO: 64152 - DNA, 1548 bp, Homo sapiens
ccctattctttaaaattgacactttaaaagtgatcatcgtgaagtattattattaagagattatattactaggtaagagcccttcaaatgtcttctacatttcataggccttattggaaatttttttcacaatctaattatatttcatttaatttaataaattctattagttaagtacttattagtgccaggcatattctaggtacgtaattctcctaatatccttcagaaaaggatacacagacatgacaagtaagaatttgtgactgtcccagtggattgtcattagattgtctgagattccttctagtgctaagattctgaagtccgtgatgacaaaatcatcattcatgaagtaaatactttataaagttaaaaaacagaacatgatagtaaagttactttcttaggttatgcaggaaattgggggaagggaggcaggatggtatcaatgcgaggaaaataatccacatggttctatttttaactagtcagttgttgtttttttaatcacatttctaaaattcccttttgataagcaagaaccagccatctaatttgactctttccttgttattgggttggaattgagacctggtgattccattcagatgtttgtaaatactttattgcactgaagtctggtatgtgtatctaggccctcttttcatttccctttgaagcacctcaaaaatacaccttaattttcctgtctcttctcaccactcctttatattgctttttagtgagattttaggaatgtgagtaggatgaattgtaactgagcttagctgctcttttagctttctggagcttcccaaataattaagaaaggcatttggtgactttgggggaatgggttaggtggaaggaaggagaaggaaatgactaaacccactagagacaaacagtgtaagcattggtaacaaagattattgtaaaaaagatattgtaacagagattatcggcaacacctctatgcagcttctttccattcccaattcataatgtaggagttggcctacttttttggctttcagaatcttcagtgtctgcatgagaacacaagtaactacttccctgccctatccctatgattctttttttttttttttcttaaagagacagggtcatgccctgtcacccagaaaggagtgcagtggcttgatcatagctcattgcaaccttgacctcctaggttcaagcaatcctcctgcttcagccttcctagtagctgggactacaggcacacatcaccatgcctagctaattttttgtaatttttttgtagagatagggtctcactatgttgcccaggatggtcttgaactcctagcctcaagcagtcctcctacctcagcctcctaaaatgttgggattacaggggtaagccaatgcccctggcctctatgattcttgatatgcacatataaaggaccactaataaatgttttcacaaagtgagaacattaagataggccaagacaaaaagataggccaagacaagaacttcataaaacttctacttcagggcattaagaaatcagt

SEQ ID NO: 64153 - DNA, 1049 bp, Homo sapiens
cacagaactagaaagcttcctgtgatagtttttttgctctggattgtaaattatgagatattacagttggtactgtatatcaaaatagaccacatttttcaaagtaattttcctgtcagtcagtgtgttatgaaaacatgttagtcacaattttttcagttagtcatttgccctcattatggttttcatttgggtctcttgtaagacataaagattagactcactggagaccagaaccacctcagacagaaccgaccagtgtcctctgctttggcttggcactgcggttgtcagctggtcaggagttgcattgttttgaacagagggagcgaaaagctgaaagaaaaaaagcaaattgacaagtgaccacagaaacacaaggatgaaaatattccatggatagaggaaatgcagtaagttaaaaggactcggatgtgataaagtgtgaaataactatttgaacaccaggaaagaaaagagcataaaatgacagagattatattcatatggaaaaatggatttgggctaatgagtgttccttatttcttctgctgtgaagttttgagtcctaagaaaagtaaagtaagtcggaactatagtcctccagggaaaagttgagggaagatgtgattttttttcattacgattaggtcctgactttagtaaacaaaaaaatattctggaagacagaaatgtaacattcgatactgtttctaatctaaacattgtcaaagtagaaattttcttttaatttgtggttctaacatatactttatctgtatagcaaataacttctgcaaagacaactcaaccgatctaaatttaaagccatatcattgatttaaatataatattggcatccaaagattaaaatataataatggttatacattttctcattagtcttttcataagggaaatatagaattgaacattaaaatcttactaataagatggtggttattggttgtatatctcttgaaaaaataaaagaaattataaatcaagtaaacttttgtttttgccgatttcaaacgttttttaaataa

SEQ ID NO: 64154 - DNA, 1045 bp, Homo sapiens
ggagtctcgctctgtcgcccaggctggagtgcagtggcgcaatctcggctcactgcaagctccgcctcccgggttcacgccattctcctgcctcagcctcccaagtagctgggactacaggcgcccaccaccacgcccggctaatttttttgtatttttagtagagatggggtttcaccgtgttagccaggatggtctcgatctcctgacctcgtgatctgcctgcctcagcctcccaaagtgctgggattacaggcgtgagccaccgcgcccggccgaacatgtttcaactgaatattttgtcttggagatctttctacaatagtacatatagaactaccccagctaattgaattgtattcatggagggaatatattataattcatatgctgacattttcatcttaatgtctcaataatagatttcattgatattatgatattttacataacaaaacttttttgctttagattttacacccagatttggaagtagcagatcatgcttttcctcctccacgaacagctttatcccactcaaaaatgctggtaagaagtttaatatttaaatttaatgctgttaaagagagctgtatttttatttatagggttgttaaagaagctaagtgaagttagagttagatggacagcagagtaaaaagtgccccaaattagaaattaggatacttgccgctgactgtccttatgtcctgctcaaggaggagccacagggaagttcactgggcaagaggccactagggctaagactgttgccctgaggaggcatgagttaagtgtaggacagaaaatcagagcctagattatagcctggaaaactgtgccaagcatcaaattgaaatggccacacaaggattcaaaacaaaagagatgcttacaagaatggatataaagaatgttggttataggagagaatcaagtttgaagagtctgtggatgaaaatagtttcaattagaagccataaaaggttacgtatataacagaggccccttttttattttgctcagtgcatttcttagcagtggg

SEQ ID NO: 64155 - DNA, 1047 bp, Homo sapiens
cacagtgggcttcaaatctagcttgggaagcagaaccaaaacttaagtacaaaaccattccaaagtatcatatgctaagtatcattcagtgaaacagataataattgcagactaggcaactggaataaatcatacagagtttaaaagactcagtggacattttaataagagctaacacctagagtaagggaaagaaaaaggacaattcaaacaaaaagcttgtgcaaaggaaaaaagattgtagtgcttatgataaattaaagtcttatgttctgggtactgtgctaaaagttttacaacactttatttcattctattttatttaactcacatatagtttattctcacaaaacaccatttgataggttttaacatttccattttacagatgaggcttacttagggacattcagtaccaagttaaagtgcttgattgattctgtctccaaggaccaaataataaccacatatactacaaagctgcaaaaattgtatcagtgtgctataggttcaagaattaagtgtcaagggtaaaaacaattatgggaacaaaaccaatactccagaagcagaccctattgtgtataggagatcagtgtccaacaatagaagctttataaatcaatggaatgtgtgtatttcaacaaatattatttaaacagttgatgagctatttgagaaaagaaaaaaatttaaacatagtatcatataattaattccaagcagttaagtaattacctggaaaatggagtaataaaaaggaatttataaattcgtctctagatggtataaaacagtggagaaaaccacacacaaaacagtgtatagatttagctgaagtactacaacccaatcatttttggtactcccccacccccaccatcccgctctttatcatagtaaactatgctcattgtagaagacatagagagaacatgcaggaaaaaatttgagagaacagaaaaagatggtttgacatattttcttccaataataaggattttttttttttaacaaaagttgctgtacactagttgaccatatagg

SEQ ID NO: 64156 - DNA, 1097 bp, Homo sapiens
agttcgagaccagcctggacaacatggaaagaccctttctctacaaaataaaaaatattagccagatatactggtaggcacctgtagtcccagctactcaggaggctgagatgggagaatcgcctgagcccagggggttggggttaaagtgagctgtgatcatgccactgcactgcagcctgggtgatgaaacaagaccctatctcaaaaaaaaaagaaagtgttgtttaacctgcaagtatttctggattttccagctatctgcctgttattgatttctagtttaattctgtcatggtctaacagcagacattctatgattcctcttttttaaatttgttgaagtatgttttatggacaagaatgtggtctgtcttgctgaacaagatatctctttttttgtaatgaattgaagactctcagattcatatggaaatttaaaaataattctattttccctcaatgatacatattttgcccttgatttctaatgtattccatgatttgttctcatagttgggggatgtctttaattttgatgcggtattcctacataggcctacctgggtctcagaaatggcacccagagtggcaactgtgggaaatcgaggctatcttcatgaaatatatatgcacattggtgaaagttttcaccattatgaatctgtacattaacttttttttaaatgttggctttagactcataccacatcaggtaggaatttgttaaaatgggcaaacatttaaaatttctcagagattaataattaacttttattgtttttaaatgttacatttttttttctatttcatttagttttgtcagcctggcgggtggcagctgtccagagagaggaagcagccaacgttctttgtggttgtcctgacagacattgactcagatcgacattactgctcatgcctaaccttctatgaggcagagatcaatcttcaggtacaaaaacctttactagctaaagtacagtcgaaggtacaacatttaggaatgttttttatatgccatatttttgttacaactgcaagtttgagttttatgggctagcataagaagcatgaagaaatttttatgtttaagg

SEQ ID NO: 64157 - DNA, 1035 bp, Homo sapiens
atcacagccatacataagctgcaaaaattacaacttcggccttatatttacagagtccttctttttagggtaaaatgttttaaaactaaatataacaataaaaattacccattttctagaaaaattaaaatcatgtatatgttatctccaagaaaaaaattagcatattagtaatcattttgattgccaaatgatggatctttctagggcctgagacccttactgttcccttgggacttgttttaatttctgtttctcaaaattactaactttgctttttctctacttttataagtgattggaagagttattttctctaaatattgtcttcagatcatattttgctttatttttcctttgtaggtgagtttatctttggtagtcttgaaatgtttaattattttaaagttcttaaaaatcagattacagttgttacattttacagtacaaataaattcagctaaactattacttgactaatccaaattgtactgataacttctgggcctcttccaagtaagagaaatcagggaagcaaaactcaaaaactcctagaaatctaccaagaactaacatttcatcataaccgacagttgtcttggttttagatcagttcgtgctttctttatctccttgtgcaggaaaccacaaaattatgtactgggtcacctagaaagtatagaattgtctcaaaataaaggcagcaagtaatggttgaatacctgccatatccataatgccaatactttttggagtggaataaatgatgagatacagttcctcctctatgcagcctccctacccccaaaattatctgtattacagacattaactagtaattgtttgctttattatgtatgcaggcaacattcctgagagcttataacggaagcattcatttcagttcattgggtctttatggagcactttctttatgtacagaattatacttaataatgtactttgttagctcagttgttatggtgacaagctggtgtataagaaaattgaatataggttatagtgtagagtaca

SEQ ID NO: 64158 - DNA, 1132 bp, Homo sapiens
ctgctcttacctcttctgtttattcattttgcttctgtcttctgtttcttgagccttacaaattttattttccccaaagatgtgtttgctaactgacttattaaaggttgcattgtccttgtctggtagtgtattagtccatttcacactgctgataaagacatacctgagactgggtaatttataccagaaagaagtttaatggacttacagtttcacatggctggggaggcctcacaatcatggcggaaggcaaggaggagcaagtcatatcttacatggatggcggcaggcaaagagggagcttgtgcaaggaaactcccattttaaaaaccatcagatcttgtgagactcagtcactatcacgagaatggtgcaggaaagacccacccccataattcagtcacctcctgctgggttccttccacaacacatggaaattgtgggagttacaattcaaggtgagatttgggtggggacatagccaaaccatatcaggtggtaagtgccctctttactctcagttcttgttcttttgctttcaagagtttagataaaggaaagaccagatgtgttttagaaatcaggggttcaaactttatcatgtgtagaatgtgacatttagttcatggctggtcttattcatactttgattcttgaaattagagactacatctttctgtgattcagagtaatttatgtcattcaaatttgatgtctaaatacagcttataactgctttcctctgaaataggagattttgcccttgatagaattttttaaatagtgaaacaaaacatctctaacagaactctaagttaattttttttggtttttttgagactgagtctcactgtgtcacccaggctggagtgaagtggtgtgaactcagctcactgcaatttctgtctcccgggttcaagcgattctcctgtctcagcctcctgagtagctgggattacaggcgtgcgccaccgcgcccagctaatttttcatatttttagtagagatgcggttttgccatgttggccaggctggtcttgaactcctgatctcaagtgatctgcccacctccgtctcccaaagtgctgggattacaggcgtgagccactgcacccagccaagtaaaatt

SEQ ID NO: 64159 - DNA, 1068 bp, Homo sapiens
agtatcacagtataatctttttagaaaactagacaaccaggaattaaatgaattaaaattcagtcacaatgacatacaaatgcaaatacctcaaccaaagtaatattcagataaacaaatattttttttcctttttttctttttgagagggagtctcgctctgtcgcccaggctggagtgcagtggcgtgatctcggctcacggcaagctccgcctcccaggttcacaccattctcctgcctcagcctcccgagtagctgggactacaggcgcccatcaccacgcctggctaatttttttgtatttttttagtagagatggggtttcaccgtgttagccaggatggtctcaatctcctgacctcgtgatctgcctgcctcggcctcccaaagtgctaggattacaggcatgagccaccgcacctggcccagataaacaaatattttatatgtacaattgtgtttgtagtagtattataacttacttttctacctgatcatcagaaagtttcctttgacattaattgaaagatacatcctgattgtagaaacattaaagtgtgaaagatatattttaggtttgaggttatatagtgttttcataatgcctatagcattatgtgtctcgtagattaggagtgccaattagtgttatatgttaataattgaagaagtaaaataggtgggaagagttgcaggatttagtatctagaatttagcagaaaacaaggaagaatagttaccaatgtgagaatatcaaatatgtgtactccaaatgaacagtaaatgggaatgtagtatatttctgtgtgtgcacatgagccagtaggtttggatctcagatcttcatgtctcaaatgggattagtaaaccatgccctttcttcccagggtggttgcaaggaatacatggaagacaccattttttgaatttacttaaaggattatgtaaactcttagcatacaacttgaatgtatttaatattatttttatgacaattactctaaaaatacacagcaatgtattgcattcctttattaaaaaggtgatttatagaaaaggttagaac

SEQ ID NO: 64160 - DNA, 1942 bp, Homo sapiens
cccaggctggtgtgcaatggcacaatctcagctcactgcaacctccgccccccaggttcaagcgattctcctgcctcagcctcccgaccagctgggattacaggcatgcaccaccacgcccggctaattttgtatttttagtagagaggggtttctccatgttggtcaggctggtctcgaactcccgacctcaggtgatctgcccaccttggcctcccaaagtgcttgaattacaggtgtgagccaccgctcccggcctatatggggtgttttctaattaataaatatgccttccttaattcagcatatggatcaaggggttctggcatgacgaaaatttttaagttatgttttaagataaattggattcaaaatcatagattctataaggatgtcttttacaagtcatctgcattatggatagtttttacaaatagaacagaattcccagttcagttccacaggtaaagcagaattcccagcctaatttttagtaaatcttagagaaaaacaagaactaactttgacaatgctacagaaaataatgaatcacaaaaagaactaaaaatatagtttattggctgatagctataaaagtatgtgttcctgaacgtttagtgaagatgacagtaatagttgattaatgttgactattcattggaaaatgaaattatgggtgatataggaatcatatgcatagtgacagcaatagacctatttaaatataaagaggaagatgggcaaaaattacctgcaaagctagaaatttcttctgtggtagccaaagtcccccagtccataattttatgttatactcaataatttaatttatgaaaaacagtagaaaggttattcaggaaatcatcacatttcttctaaatctaaaagtttcttattgtagtaaaagttgtacatttatgttttaagttaaaatgaacagagatgtttatcattttttctgatttcctacatttgtcaactagttggagtaatcagattaacctgctgtatactttgcgatctataaggaattatgtgaatgggagttattataaccaagaaaataagctctatgcagtagtaacatttgaataccacttttaccattttcaaagatattttgggtgtgctgtttctttgactttcaacaacatggggaggaaaggaatcctaattaaagatatcaatggatatatggaaccttgtgctcttcctccctaatcagcgaaaaaagatggatccagatggctgagcgagcaaagagatgccaagggattttctggttagcattatagaacctctttagaactagattactggatatttttagaggtataaagtattgtgtatgtatgcatagatgttttcaaatgttattgcgtccctgaaggcaagagactgtgtattttggaatataagatttgataacatatagacatgttctccaagggaaatacatgtcaacctttagcatagaaagttgggaagaaccttctacttttttaggagtcttacaagaaatgctgactggtgtttctataatgatttcatgccaattccagaaggtttaagtcatatgtgattaataatttaatatattagataattgctccagttctacgtttatccttatttggtaaaagatttatcctcccatttcattcctattcttgtttttacttagcagttgacctttttatatagacttgagggaaaaaaaaataactaaatgcctccatttatatttaaagtatgttttcctttgaagtgtttaagtctttactgttttatccaggtacaatatgtgggacatttatgttaaggtagaactaaaacagatgatcagttatttgtcgataaagagttttcaactaaacagcttaaaaactagcttttggggttgatttctagtcaataaaatattgttacttatttaaacaag

SEQ ID NO: 64161 - DNA, 2946 bp, Homo sapiens
tggctaacacggtgaaaccccgtctctactaaaaatacaaaaaattagccgggcgtggtggtgggcgcctgtagtcccagctacttgggaggttgaggtgagagaatggcatgagcccaggaggcagagcttgcagtgagcggagatcacgccattgcactccagcctgggcgacagagtgagactccgtctcaagcaacaacaacaacaataaaaaacaaaacaaaatactgtgtgatttcactaatatgagagacatagagtaatcaaattcatacaggcaggaagtagaatggtggttgccaggggctggggaaagggaggaatggcaagttgtttagtgggtatagattgtgaattttgcaagatggaaagagttttggagtttagttgcacaacagtgtgaatgtacttaacactatctgaactgtccacttaagattgttaagatgataaattttgtgttatatatattttactgtagttaactttttaaaacagtatgaaataaagctttatgtactgaaatgaataaatctctaaggcatattttatagcaagtagccaaaaactatctgggaaaaaaagaacaaagtttggaagacttatactacctggtttcaagacatcccataaggctcaataatcaagacagtatggtattagcttaaggaatagacatgtagatccatggtacagtctagaagcaaactcacatatatatcatgaatttatttcttttttctgaaatgttccactttattgaaagaaaagcatgtgttatcttttttgttttttccttttatttttagttgatatgtaataattctacatgtttatgggaaacagggtgatatttcagtacatgtatgcaatgtataatggtggaatcaaattagtgtatccatcacctcaaatacctatcatttctctgtgttgtgaacgttcagaatcttctaagtttttgaaaatatacactaaattattgttaaccatattcaccttaacggtgctacagaacacgagaacttatatttcccatttagctatgactctgtgtctgttaaccaatctcttcctttccttccctccccacatccttcccagcctctaataaccacaattctactctctgcttctatgagctcaaatttttgttttttgtgtttttagcttctacatatggatgagaacacacagtagttatcattctgtgcctgacttcataaattggtttttggaccgagttgctaatgtaattcagttgtggaagtgataagcccaaatggtgctagaacaactggatatccatttaggaaaaaaatgagccttgacccttaaaccatacacaaaaagtaacttgaaatggatcatagtctaaatgtaaaagctaacactataaagtttttaaaagaaaacttaggattttgagacctttagttaagccaagattttttagagagaatgtcaaaaccgtgactgattaaagtttctctggatttcctgaaaaaccttgaaaaatagtatataaccatgcagaaaaggtggataatacaatagcaataagccccattttttttagaagtttcccttggatctacagaatctttggatgctacttgggccttctagtttttactatttaccattggaaaggaggaggacgctggaagaaatgagaggatgtgggacgctttaagcagcgctttcacctagaaagggagagcaaagtttactcaggtgttatttttgccagatgccaggttttcttcttcaagccagaattttgggtatattagaaaatgtggggtgatgatcaccctgggcaacatggtgaaaccctgtctccacaaagcatagaaaaactggccaggcacagtggctcacgcctgtaatcccagcactttgggaggccgaggcgggcggatcacaaagtcaagagatcaagaccatcctggccaacatggtgaaaccctgtctctactaaaaatacaaaaattagctgggcgtggtggcgcgtgctatagtcccagctactcgggaggctgaggcgggagaatcacttgaacccaggacacggaggttgcagtgagacgagacatcgccactgcactccagcctggcgacagagcaagactccgtctcaaaaaaaaaaattaaaaaacaacaaacaaacaataacaacaacaacaacaacaacaaaaagacatagaaaaattagctggacatggtggtgcttgcctgtagttccacatacttgggaggctgaggtgggagggtcgcttgagcccaggaggcagagattgcagtgagccgagattgcaccactgcattccagcctgggtgacagagtaagaccctgtcttaaaataaacagacaaaaaaaaagtcaggtgattttgacaataagacttctttcttgaagttttgattgctgtaaatggtagccaacttgagatattaaaatcattatgtgaaagactttgtgatatgcaagaaagaatactgaactctaggattttatgtatctgtatgtttatatttatgtatatatagagaggtgtatatttaaatacataatttgcttataaaggacaacagcaatttgagagaacaccatctctctaggtcattcctgtaggtcatctctctaggtctactttcaaaggtacgtaaggaatgaatttttatattacctacccccccattttgatctcataaagctttttgtcgaattatacatctatacatccatacatcctaattactgtacgaaatatgtttacatctttttgcttgactttgaataattctttgagagtttccagttacggatattaccatgtatggtcatctccttgtaacttagcttaatttaaagtacctttaagctagccagaataacttgcaaatctgttgatttaataagatgaagtatttggtggc

SEQ ID NO: 64162 - DNA, 1126 bp, Homo sapiens
acctggctaattttgtatttttagtagagacagggtttcaccatgttggtcaggctggtctcgaactcctgacctcaggtgatccccctgccttggcctcccaaagtgctgcgattacagatgtgagccaccacacccagccgaccttagctcctttttaagatgccctgttttaggagtgaatttttttatatcattattcagaaaatatgccacaatctcagtagggcatgcctgtactaaggtttttgttagatgtacctgatttttttagaagactaaagtactgtagtaaataaattttgtggcttgaaaaagagaagcattcagttagaatttctaactttaatgttcttacgaaattggttctgttatttaaattatacactagcaatttgactacctgccctatgaattcagtcttctgtaaatgtagattgaggagaagagaggaaaaagagcttgtattccacattgtgcaggtgtaacataggaaaagtagctttaatatgggatgttatttgaggacagagaggtaaatataagtaccatgtaatgctttaattctttaagctgtttagaatgcaatacatacaataaatgggtagcaatcatccatctgacatagatgtaaatactgtttggttagaagagacttttctcttcctttttgtagaagaatatgcttgaaaggagaatgagatgacagaatcagggttcacaaacattttaaaaggcaggagttatgggatgtttaagaaaatgaaatataataagtaaaaatttaagttcttgcatgtgagtatataaagctagatttataagtaattatttagaataaagataggcagatactatccagctagagaggtttgagaaatagaagaagacagattttaaaaagtttataaaaggtatgtatggtagatactgtagatggaatctaaagcctctgtcctgaggtaaggtgcgaggtaaaatacacagttttaaagatggtccaaagcttggtataaaccgtgtgtggaaggactcttgatttggcatagagttgaggctgaaaacttaagaaaactgctacgaagtatgaagacctggcttttaaaacatactaagaactataaaa

SEQ ID NO: 64163 - DNA, 1735 bp, Homo sapiens
tcttcaaagcagtcctgttgagaggacatttggtataacatgatacttaagagtgcaggctctggagcagagtgcctaggttaaaatctcagctgcgtggtatgacttttgacaagttgctcaactactttgagccagcagaatacttatctataaaatgaggataatgattatattaatctcataggttgttgtaaagataaagtggaaaaaatacacataaaatgattagaacaatgtcttccataaatgagttgtcccattgtttaattagtattgttgctgtttgttcaacatatctcagcaccttacccacaggaacaattgttcattctcttgttggcatggatcagaaatatctgttagatattttgtattgaaaattgtaaattttctcgtcgtagctaataactgtccagttttgcttcactgaaaattaaagatacattgctaggtgcttagttttgattgttataactcagccatgtaaagaaagctgagggttctgtaggcctacagagggggtaaatcttgaattttggcattaaaaatggggaaggaatgtgaggatccaaggaaaatggctttttggaaagccctttgcattcctttctctttttccccatatgcctgcaaataccagtaattggccttacagtgtgaataagcaggcatttgttctataaaagcttttaaaccctgtttcaatgtcccttttagtgtgattgaggggaaatttttggtgctagggacctgttagaacttattgtgggttcctacctccattcacatcaaagtgtggagagatataaactataccaatttaacagtatgagcagtgactcaccttcataagtttcaggaaccaacagacatcatagagggagaagggaaatcatggattggcatagctatttagctaggacagagaaaggatagtgttgttttgaaaaccaagagaatagatacctatgatacctctcttatttctccagtagcaagggagagaaacatactgattttactacttagtaaatagatattttctctttgtatgacagacactgccatgttcaagtgctataaatgtttctccaataagtggagtcatgtgctgttagaatagtgaaatggaggtgctaagagttagacagaacttttcctccctaagattttcctagatgacttcttggcatattcttagcatagcatttcaagatttgttgggctagattaatatttaaagagtaatctgttggattacgtcagaaattttctttttccttttcctttttccataatggatcgcaatttcaattctttaatgtctatggtgttgtcaagtacaaaataaatttatcttacatctatcaaagtccattttaaaaacagaataaatcactattaattttttattgtccagtctttattgccttatttttgcatatctttagagagtgtgaatattctgtatatgaacaacaatagcttgaataattgtgatgccttatgtgatcttgagtaaccctgcggcttcaagaccaaagatagatataataaaattttagtctaattgaaggtgatctggcttaatccttaagtggtttgttgtttccagtgtagtcgtgacccttttctgatgatttatgggaaaaattcttaccccttccataatggtggaacaacattagcatgtaacattcatgttaatatgtagcagttgtataggattaat

SEQ ID NO: 64164 - DNA, 1049 bp, Homo sapiens
ttgtgatagagaactagcagacaccttagatcctttgtaaagacactaaagacacagctgatgatgggacatgaagtccataaaaaattggaggacctgacaccttagtgaaatttctgaggtaacagtattttgggatatattgggatgtcctttctgaagtagaagataagctactgcatcttgtattcactgctaccaaaaagaagtacagtaactggtgggtctctctgggtttgaagtcaggatatactaaattttaagtgtactgttccaacctcttgactcaacaatctataaaaactgccatttggttgctatgtggaatttgtggcaggctctgacaggagaatcacagtgaagcctccttcattttagagctaactgtatcttctctgagaaggctactggctttgttgttagatgtgatagagaacaaatttctaaatactggataccagtgacatgagcatgcatagcagtgttacattgtcaaataaaagcagtatacctgggattgggcaaaatggaagtactgaaaacacatgtacattgagcaagcaagaggctctttttttttttttttttttttgagtcaagagtcttgctcttgtcgcccaggctggagtgcagtggcgcaatttcagctcactgaaacctccgcctcctgggttcaaacgattctcctgccttagcctcccaagtagctgggtttacaggcacttgccaccacatccagctaatttttgtactttcagcagagacggggtttcaccacgttggccaggctggtctctaactcctgatctcaggtgatccacctccctcggcctcccaaagtgctgggattacaggtgtgagccaccgcgcctggccacaagaggccctttccatactgtgattcctttcacaaccccacacccatggttttattcctggggagtctgctgtgttcttggttaacagatggttctacatgatgtgttggcacctgtcagactaagagctgactctggtagaaacggccagttgtctcctaatactatttt

SEQ ID NO: 64165 - DNA, 1272 bp, Homo sapiens
ttttttttttgagacagagtcttgctctgtcgccaaactgaagtgcagtggtgagatcttagctcactgcaacctccgcctcccgggttcaagcgattctcctgcttcagcctcctgaatagctgggactacaggcgtgcaccaccatgcccagctaatttttgtatttttagtagagacggggttccccatgttagccaggatggtcttgatctcttgacctcgtgatctgcctgcctcggcatcccaaagtgctggggttacaggcgtgagccagcgcgccctgccgcgagtaacagaacttaaccatcagactcaagataggcatgcttaatatagtatgcaaattgattaaggggttcctagaactgtcatggaagggtagctcactaaggtcttgatcttgatactggaactaaacaaacaaatgaaaagagaacacttaaggtccaatgaatgtaggattgattttaggtctccataatgtctaatacctatagatttatcactttacaaatctagaactccttgaagaaaaaagaggcagcatatcttcctttaaggaaggaccttgtgataatatcacaagtaggcacaattaattttcttcatagccttccctaaagaaaggggtcttttattatttacaagcctaactgttcatcagaagacaaatactgaaacctttcaggagttattggaagctgagctaatgataattcccagcgactcaggacaccgttgtgttccatgaggcagatgggagcttgtggaaatcaggcatggaatggagctttgacttgaaattatttcacagtccatgaattcgtaccgtggttgtatcttgtttcttactgcatgtctggaataaatatgttcaacaagtggaagaatccccaaattagttcccatatccatgggttaatggactttatggtaggaagagccaagtgtaacctcccaaagttctttttaccaaagcagtctcacatcctgaatctcagagattagtgccatattaaagacttgaaaggttcagcctgctaactctggttttacctatgcagaagatagatacattttggagaatgatggtgtattatcataagctgcttctaccactccagttgtatatttggttccacatgtggtctctttgctagaaacagaacttggtagaaacaggcacttgctagaaacagaactttgctagaaacaggcacttggtagttaactatttgatctatcaaatgccttactgaatctaattaa

SEQ ID NO: 64166 - DNA, 1070 bp, Homo sapiens
cctctatctccaagatggcaaacctatttaaaatgaaacactatttgaaatgtgtgaaaatttgagtttatcttgagctttcagttaataaaatttataagcaccatcacttactcttattgtattagccattgggcatcctggtaaatcatgcaggtgtggtccctgttctcatggagctgtaggcctgtaggggtcttaggcaataaaagcaaaacaaaacaacaacaccataattaagcaatttgtgacaagtactataaagggaaaatatagtgttagataatggaaaatctattttcaacaaggtggtcagggtaggtactctgaagaggtgacatacaaactaacatgtgaagaattcgaaggaaccagccatgtatgcagaaaggggagtaaaccagtttgaggggacagcctattaaaaaaactttaggtatgaaagaacttggtatgttcaaggaattgaaaggatgcttctgtggctggaatatagtgggtgacattgaggctagaattggatgaatgacgttgtggaggtaggggccagatcatacagatcttgtaagcttagtaaggagcttagattttattaaaagtgcaatgggaagcaaatgaagtaaagtgacatgatctaatttattttggctgttgtgagaattatggatggggagtggggagactaataagaagtgatggtggctggatctagtgtaaaagcaatagagattgagggaaatgtatgcattcaaaatatagttgaccatttaacaacatgagcttagacaacatgggtctacttatacatggatcttttttcaataactatattggaaaattatttggtgatgtgtgacaatttgaaaaaacttgcagacaaactgcatagcctagaaatattgggaaaattaagaaaaaggtgttgcatgaatacataaaatataagtagatactagtctatcttaccataaaatatacacaaatctattataaaaagttaaaatttatgaaaacttacgccacaaacactgtagactatacatgacaccattcagttgagaaatgtaaac

SEQ ID NO: 64167 - DNA, 1030 bp, Homo sapiens
agcctggtggcgggggcctgtagtcccagctactggggaggctgaggcaggagaatggcgtgaacccgggaggcggaccttgcagtgagccaagattgtgccactgcactccagcctgggcgacagagcaagactctgtctcaaaaaaaaaaaaaaaaaaaaaaaaaaagtagtaaaattaattatacatatatacgtatatggatgcacacaaaaatctctggaaatacatatgttaaaatgtcagcagtatgccacttcttacccactggagtggttatgatcaaaaagacagaataacaagggagtagcaattgcaaaaccaaggacagcaatcttgattcttttttttttttttttttgaagttaagaattcttttaggttgtaatattttcatgttagtttttaatcatttacaatgttctgtgggtcacattttaaacatttttaaatatatgaaattctgtatttctttaagtacagccacaactacaaagcagagaaacgtaagaatacaaaaatcaaatctgcttcatttatatacacgatggggcagcctaatgcacatcataacattaacttttccaaagaagtttgctaagaatctgctcccataattagtgttaaaaataaagcaatcttcccatttagaaaaatcaagacatcagttgattaataaagcctattcttcctcccagcaatttgtactttctggtcttcatttaggaattataaattcatgagaaaagaacaaattttttatggaataaataacttccaggaacaacagtttataagtattcagttgtttaaataaacaaaactattttccttcctaaaatgtaaacatccagtaaatgaaacatacatgatattccaggtatagaaatcttagtaactcacttatgaaagaggtgcattttggtatgtttggtggtaaggtttttgtttatcttatgtataaaagtacttgcacaaaaaaacaagcagttattactatttaaaattctattccttcacccagttttc

SEQ ID NO: 64168 - DNA, 1052 bp, Homo sapiens
acagtagctaggattacaggcatgtgccaccatgcctggctaatttttgtattattagtagagatgaggttttaccatgttggccaggctctctcgaactcttgacctcaggtgatctgtccacctgggcctcccaaagtgctgggattacaggcgggagccaccgcgcccggcatgttattattattattattattttaagacaaggtctggctctgttgcccaggctggagtgcagtggtatcatcacagcccactgcagcctctgcttcccaggctcaagccaatctcagccttccaagtagctgggactacaggcacatgccaccatgcctggctaatttttgtatttttagtagagacggggttttgccgtgttgccctggctggtcttgaactggtgagttcgcactttggtagtgctgggattacaggcgtaagccagtgtgcctggcctggtattttttatttttaatgaataattttaaagaaatggtatggtgaaatcaccgtgtttgcccagggttgtttgtacttgtggctcatgaggtttgaagttattgaagaaattgttgcaagacttaaggaaattgtgtgagtaactggtaactagcaagtaagtaagccttagttacagtgaacgacttgtcattctcctaaagaatcaagattgctgcagcccctaggagcccagcgccgccgccatgtcctccggggctagcgcgagcgccctgcagctcttggtagagcagctcaagttggaggctggcgtggagaggatcaaggtctctcaggcagctgcagagcttcaacagtactgtatgcagaatgcctgcaaggatgccctgctggtgggtgttccagctggaagtaaccccttccgggagcctagatcctgtgctttactctgaagactcgagagaagtttgctgaggaatgccttcaagcacaaagtgatgaatgactgccttcaagtctcaagaaaacacttttacctaacttttagagatatttcagccctttcctgtggcctggtcctatagccaaaatca

SEQ ID NO: 64169 - DNA, 1064 bp, Homo sapiens
tatggtatgcataaacatttgctatgtgaaaaagaggatagaggagattataggcatagaggaaaaatgtgtgtatgtgaatgtcttgttacaggaatggagagaagtgaaagtagatggaaactgaggtaggctttgatgcttgagtgggttgacaattgtgaaaagctctgtatatcaggctatagaatttagccttgactctatagatggtgagccttgactctatagatggtggggtctgttgaaaaatggtagctcttaaaaagcaagaaacaacatagaaatgtgactcaaatggcaatgaactgaagggagaaagaccagtatgagaaagctcaaacgtttttatggtggaaatggcaaggaaggtatggatgctagagaaatttgaaagttcagattagtaaaatttagtaatgaatgaatgtgaggggtaaagtagaaagagtggatgagaggtaatatgtgtcatgatgctatggatacaaatagggaattcaggagaagaaatgaatttggatgagggaaggaaatgctgagtgaaaggtgatggtctataatcaaggtagagatgtcatttaggtgtttagacatgtgagtcaggaggtaaggagaaaagtgagatttaacttggcaattgtcagtagccagctgattgtcaaatatgaagaaaaatgtgagattgcctaggaaatgtgcaagagtgaaaaaaagagtggcctcagaattgtactcagagaaaaatcaatattcaaaaggtagataaagcagtggcagcctggaaactaaataggagtagtcagaggtattgcaaaagaaccaagatagcatgatatggtatcatggaaaaccctgggtatatagaatttcaaggaggaggaaataacaaatgtcaaatgtgctgaaaatgtcatgtataataaggactaaaaataggcttatggatttaataattaggataactttcgaacattatagtagagttgtgggggccatagtcattttgatgaatacatgccccaagtcatatgctgtataaacctcatgtagtctagtttgtt

SEQ ID NO: 64170 - DNA, 1011 bp, Homo sapiens
tgttgggctgttactccttccaggtcctgttaatggtcagggctggtaagtataggtatgtatgcataaacatacatatgcatttatatctatatttatttattatctctgtatattgaaaactatgaattcatactgatacctccaatttcagtcaaatagtccaggatctattctagtgttctcctttttcatattgtaacgttcttctctgacagtgagaaatctggcttctgttatcctgaatgtatttacttattgttcagtctcccatcttcactaccatctactcctctccctgctgggacttggattcttcattccatctcctccatccccctaccccagtctggatctaagagtccataccagcatgcttccatacagggacaccctccccagcactctggttatgactcctcatgttggtctccccactgtcggtggacacacttcgtaccccactcagactctgacacaccccagtgagttgcttccattggaagatatccttctcactctgttgtaccccagtgccctttgccagtttccccctcctgccttaatgcttgggctctgaagcaaaatgtttgcctcttcccctaccacacagactccttccctagctctcttggtctatgacaatatgacaagctccaccccagggatccacctccaccccaggggtaccatgacaactgctcttctcacagcaggaaaagggaaggagaaggaagattaattttttaagtaatacaatccagaagcttgtataaattgtagaatgtcaacagtgaaatgtataactttttaacttgggataattcttcttttgtcatgttgatggcagcgaagaggtgcgggcggtggtgtcaggagcggctatgggagcagcaatgatgctggtgggtcccctgtgccctgcatccctgaggcagccgactgtactgcccccgcccttgtgcctctgggcaggacctgccctcaggcccggagcctccccagctcctg

SEQ ID NO: 64171 - DNA, 1014 bp, Homo sapiens
tggggaccgggctctgacagccctgcggagaccctgagtccgggaggcaccgtccggcggcgagctctggctttgcaagggcccctccttctgggggcttcgcttccttagccttgctcaggtgcaagtgccccagggggcggggtgcagaagaatccgagtgtttgccaggcttaaggagaggagaaactgagaaatgaatgctgagacccccggagcaggggtctgagccacagccgtgctcgcccacaaactgatttctcacggcgtgtcaccccaccagggcgcaagcctcactattacttgaactttccaaaacctaaagaggaaaagtgcaatgcgtgttgtacatacagaggtaactatcaatatttaagtttgttgctgtcaagattttttttgtaacttcaaatatagagatatttttgtacgttatatattgtattaagggcattttaaaagcaattatattgtcctcccctattttaagacgtgaatgtctcagcgaggtgtaaagttgttcgccgcgtggaatgtgagtgtgtttgtgtgcatgaaagagaaagactgattacctcctgtgtggaagaaggaaacaccgagtctctgtataatctatttacataaaatgggtgatatgcgaacagcaaaccaataaactgtctcaatgctgattcattctctcggctcggctctcacgtctaggaagggagggtgccctggtcccggcccgcccaggagccttggggtcccgccgccgggcttgggaaggtgggacagcggcgcgtgcaggtgctggccctactctgagcgggctgagctgtcacgagctctgttctctgtgtggggcgcgcagaacacgtgtcctgggtgcgaatcagggcttcgcggagacgcccgaggtcaccgcctggcgtggcggccggcggggggtgggtagggggagccctagtgggttggcgagcctggactctcgggttgcgcaacggagtcctagatttatagggttgctca

SEQ ID NO: 64172 - DNA, 1069 bp, Homo sapiens
tgttctttctttgctagctgagatgccgcggcagtttcccaagctgaacatctctgaagtggatgagcaagtccggctcctggcggagaaggtgtttgctaaagtgctccgagaagaggacagcaaagatgccctgtccctgttcactgtcccagaggactgccccatcgggcaaaaggaagccaaggagagggagctgcagaaggagctggcagagcagaagtctgtggagaccgcaaaaaggtttgttcccaaggcatggttttcgtgtacatagagtcatgcagacccaggcaggctgtgggtgtgtgtcctgatatgaggcacctcatggggactggtatgtccctagagctgtgttggttccttaaccaagaccacttaactcacctcttatttattgagggatgtctcggtgcctctgttgcactgaaaagatcaaaacccactttgctgctgatgtgaaaaaatacacaccatttccaaatggcatttctcttttctttttggaaatttgaggatttcttaggagacagcaattgtatttcttctcatcacttgacaagcattttgcattactaatgaacacagcttactatttgccgggtgctgtgctgggactggagatgttataatgaacaagatagatagagtccctgggtctagacaataattaagtaactggacaaattaacttaaaaattacaagttataataagtgctgtatcagtcagggtccaactagaagatcagaaaccaatgaagtattagaattttaatgcagggaattggttacacaggtggtagagagctgagaaaccaaacaggggagagagaggcggctcagagattagacacagtaaggagcagctactacccaggacaggagtgacaaggaaagcagtagtgtttctggagccaaggtggagtcgccctggggaaggtggaactgtggtggactttccagtggaaactggagccaaggggaagaggtggcagctgcagagatgcctcccaaggcagagatggaggcaggcaatacctcgtttgaccctttctgcaccttcca

SEQ ID NO: 64173 - DNA, 1993 bp, Homo sapiens
gtttaaaatattacaaaattaaaaatgatgattttattaaagcagaggagatcactttcaggccccagccctccccactctgggctatgccagcatatggtgcctccctctgctgttccccttaccctgcattgtgtctgtctggccacttgtctccccaagcatatttctgcgattcccatccttcccaaacagactaagattaatgagcctgttggaaggcgggaatttatctcattcatctttgaatatgaggctgctctggtaaagcagaacatccttagactttgggactcaatcaggttagagtctgaaatttgactctgtagcttcctggcaagtgatttatcctctctgggcctcagttttcccatttgcaaaatgggttgctgtaaggagcaaaatgaaatctatggaaaggtctggcacataacacatgacaatggggcttgttgcctggatgagttgggtgattaacagagttaatcagaagtgtggggttggcaaagaagcaggctgagcatgcagaatttgcttttgcttcttgttttgtttcgccatctgaaggacacatgaattttctcaactgaaaatgacggtgctcatcgccttcagggataggactcaggctttgtccctccatgggcctggtacaaaaacagacttttggcttaattagctgcatgtgaggccggcttctgggtgtgcaggctggagcacttgtctgtcttccaacgaccctaactcctcctgtgtctcctgtgttgggggtctccaagaccactccaggttggatgattcaccaggaggactcacaggactcagcatatagctgtacttacagctttgatttattacagtgaaaggatacagagcaaatcagcaaagggagcgatacatggaggatacgaggtgcaagcttccaaggtcctctcccagcagagtcatcagaacataccaaatacctccagcatcacattgtgacagcacatgtgggaagtgttgtttaccagggaagctcattagagattcggtgcccagggttttcactggggctggtcacatgtctgcatagcacatctcaaattccaggctccagaaggaaagcaggtgtccaacataaaccatattgtttgtacaagtagtttaggtgcaatgaaccactcttattggtcaaggagtggtgagaaccctcctgaaatctaggttcccagataccaggcaagggccaatcttgcaagcacatctttccaaggatggcagtctcaggcctgctgcatgaaccctttcctgcctgcctcccttctgcagatcactttggaggactatgagcaggcagccaagagtctggccaaggccctaatgatccgggagaagtatgcgcggctcgcctaccaccgcttcccgcggatcacatcccagtacctgggtcatccgcgggcggatactgcacctccggaagagggccttccaggtatggagctctggctggaggttgggtcccaagtgtgggcagaccgagagctagtcagggcttttttctggctcggtctatttcccctgatagtattttaaaatgacaatgttctttcattggcttctcccacactgatgtttgatggttcccccaaggattgattctatgtgtactgtatgcctagcctgtgcagagctgaactgttgaagtcaagacagagatgtgaaagacagtccttgttcttgggagtccaccagggagacagggagtctcatgtgggaattttttttttctttttttttgagatgggtcttgctctgttgctcaggctggcatgcagtggtgcaatcatggctcactgcagcctcaatctcctgggctcaagcaatcctaccacctcagcctctcaagtagctgggatcaaaggcacacaccgccacacccagctaattaaaaaaatatatattattatgttttgtagagatgggggtcttaccatgttgcccaggctggtct

SEQ ID NO: 64174 - DNA, 1035 bp, Homo sapiens
ctgaggctgtcctgtgctccgtccactctggggcttgtctgggcagatggatgactgtgctgttgcagtgccggcagatgctcttatggaagtctacgtgattagatgccaaggaagctgctgtttgttttgggggcctgaggaagcagggtagcgtgaattgtggtcgaaggttccatgcggctgtggatgcaggtgtgtggctaggcacctaggctgtgtgtgggctggcagttggccacagcagtgagcacccccatccccaaaggcctttgctggctgataaatcatgggccccttctctgagttggtgggaatctgggggcatcagtccttacagagatttctgtctcggtaacaaatatccctacagtcccaatccacccatgatgcaaaatatcctcctcttgtcgtgaagcctcagagttgagagatccttgggccgtggccattaggtcagggggctggttcctctgcaacccaaggtgggcaggtcatgccttatagtttgactgtgttatcaatcctctgggcaacaaactccttcttcaaggaatgacaagtggctgaggatagaaaagaggaaggaaaggaggagatgaaggagggagacttccactgagcatccactctgcttggactcaggccctttcccaggcataaaccagtttaacccttacttcagccttgggtgttaccacctgatatttactcatgggaaatggaggcttgcggttaattccctaaacacataaacaagaagtcaaaacacctgtatgaggtcccagagctggcctgctactgccccatctcctgactctccactgactttatagagtctgtggatatgactcaacagttcagcagggtctgtagaaagccagaacctcctcattccgccctgctccgtcctgacccttccagccagggttggcccctgcagatgctggaggcctccaaactggagagctcgatgcgactcaactatggtctctccccatctccaacttgcaggaaaacctattgtcaccggcg

SEQ ID NO: 64175 - DNA, 1178 bp, Homo sapiens
gattacaggcacccgccaccacgtctggccaatttttatatttttagtagagatggggtttcaccatcttggccaggctggtcttgaactcctgacctcgtgatccacctgcctcagcctcccaaaatgctgggattacaggtgtgagccactgcatccagctgacactagaactcttgatctttgaaaaatatagatgtgcaaaggccttgggggaactactacccccgccttcttctcattgtgggttgaggatggattgtccttttggtgagccccagggtatggggagagctgtagtggtctacattgctggcctctccctggatgtcactcagacggctgctgtcctctccaggcggctggccagggtggagcccatggctccaggatgggctggggtatgtggtttagggaaacagagctgagtaacagaatgtttgggtcactgggaatttgaggattcatatctcagtctcttggtcagccagaatgccaccatcccattcctagtggcttctggcttgagaaagtgctctgatgggcatgggtaggtgtggagcttgcaaaccaaggcagaatattgcagacattgctgggagaggaggacagaggagggatctgttttctggtcccatctgacttgattctgggtgtttgatggggacacagggtgcctgaggaagtgactggggctggtctctgacagggcagcaggctgttggatccacctgacaagcgagtctttgctgtcccccagtgacatatttaggtcaaagaagctgctgccaaactttgggaagatgctggagaacatcttcctgccccttttcaaggccactatcaacccccaagatcatcgagagcttcacctcttccttaaatatgtaagtgtgggtggtgccctaggcagggctcatagcggcagaggcaggaatggattcgctgtgagctgggtcaggcttgctcctgcccttcacgatggtatcttaggtcctgccacctgtgttccaggcgtggggtcaccagccccaagaagctagatttctaaaaagtccccttctcctcaggggcagctctgggagtcagtgggtgtggggggatgggggtggtggtcttggggtaggcctttcccccagcagggaaggcaacagtgggcaaagactgggaactcggtt

SEQ ID NO: 64176 - DNA, 1001 bp, Homo sapiens
tgggtgataattatttagatgtgaatgttaggtcagttctactgtaataactaatcgtaaaagttgtaaatttgtttaatggatgaaatgtacactttttgtattctgtacagctttgtcttttttaaatatgaagtacttaaatgtacttactatgataggaaatataatgtgtgccttctaggatttgtgaagtggtttcatgaactctaaggaatttgttttccctatcctaactcagtaacagagggtttactccgattatgtatagaaccttagtttgagaaaatgaattttactatgtactgaatttagaggttgagaataataggatctgtgttattcttagtacccactgataaattgtgcaataaataatctttcgcaagtgattttagctaattgaagagattattttcctatgtaatttcacattctaatatactaaatgtttatattccttagagaactattttatattgtgcgctgggggcttgtgatgtttgtgtgctgttttaaaattcatttcaaattggactcgatttccttatatctaatatatatctgggagaaaaggctgcttgaaaatatcttttgattcagtgatttttaacattgggaagttgagtttattaaaaggtagtctgaagaatttgcatttttaactgctattgtctgaagtcaagcttagtctatccgggaataagaaaactacttgcagatgagggaagttaacaggtcactcacattcatgctgggccacacaatgacgatacaatacaaacctaagcagctgacaacagactcatttgttcgtatgtctattcaccctgctgtagcagtcctcaacctttttggcaccagggactgcattcatggaagaccatttttccacagaccagggttggggtgggaatagtttcgggatgaaatttttccacctcagatcatcaggcattagttagattctcataaggtgcatgcaacctagatccctcgta

SEQ ID NO: 64177 - DNA, 1088 bp, Homo sapiens
tttattaaatatgggggtgtaccttagttttgacacttttcttttgctgtatgaaaatttgtgcctgacttaagtctaaaatcaaacatttccctttttcctcctttttttctcctcatttctacatttattctgtgtatgtgtttagaaggaataaattcttgaatactggacctcagggaactttagagatcagctagtcaagttcattattttacaaaataagacttgagcgtttaggataatttataaaatacatacaataaactacatgtatttaatgtacagtttaatatgttttggcatatatacacacccataaaagttatgaatttttataaatggaatcatataatatgtgctttttttgtctggcttctttcattcagtctaattaccttggtatttattcatgttgtagcatgtatcaatagttcatgcctttttattgctgagtaatgtctgttatgtggataccatagcttgtttattcacctattgagggaaattagattattttccatatttatctattacaaaataaaggtactagatacattcatggacaagtcattttatggatgtattttggtttttttcttgggtgaatacctagacatggaatggctagatcatatggtatgtgtgtgtttaactttttaaaaagctgccagctattttccaaagcagtcttgtgccattttacacccccactagcagcatatgagattgcattgaataaatatatcaatttagggagagtgaatttcttactagtgcatcttcctatccacatacgctgtatatttctccacttatttaggtcttctttaatttctgtcaccaatttttttagttttcagtgttgcatatctttgacatctatccccaagtatttcatagttttatgctattttaaatggtatttaaaatttcaatttatgattgatactagtatatggaaatacaatagatatttgtatatcaaccttgtatcctgcgcccttattaaactcatgtatcagttctggtagtatttttgtagattccataggctcttcttgaatgtccgaatatcatttttcaaa

SEQ ID NO: 64178 - DNA, 1582 bp, Homo sapiens
actcactgcctgaaaaaagcaagccttttcatactcagatggctctaatcactatgaagtttttcctattgcttcattttcctcagagtagccaaaatctttcttgaggcagcacggcacagactctagcagcaagttgcctgtgttcaaatcctggctccactcctgtgtgatttttttgacaaatcaaactgtttcctcagtttcctcatcttctaacagaggttgataactgtagtatatgctttataggatttttgagagaattaaaagacataagatgctcagaacagtgcttgacacataataatttgtctataagagttaactgtcattattattgttactatattctatttattgttttcaatggctgtgccctctggaattcctccaaacaaatctgttctcttttccagcctttcaaatatttgaaaacagtcatcaaattctcactgaaccttctgttctcaaggataaacacccccagttcctttggcctttgtttatgtgggtctcgtctacatactggaggctttcccagatggtcttttctctgtcagtatgtgtgcctttcagagtatgaggcatagaaccaaatattccaatctacaggtgatctaacaggaacaaacagcacaagactctccttccttctggtcactgtgctgctaagaaggtagcaaaaagttaagagaactttgtactggttccactggctatttctgtatctcccattcttttatctctctccacaatgctcttctttgtagtcctctgcttctcacttttaaagtccagccttcagaatattctttcactctgtacagattcagttatattctctgctactgagaaactcagatacattagacccatatccatctaggtttttattcagttttcccattccaattcagtgacttccctcttttccctgttactaacgtataacacttaatctattaccacataaaagatttgtcttttataatgcttcttagacctaattatctctcagatgaattgctgaaataagatcctaaccagttttcctctttctagactgtccctcatactgcactcccaatttatcttcctgaagtaccatatcagttggagttcacttccccttgattatacactgattgtagtttgcttgtcaggacacgttcaaacttaatattttgacatttaaggatgagattatctccactttatctaatcaatctttttcctcagttttccatacccaagtatcatgccagcttcctggttacatatacacagacataaacacacatgattttgctttttacctctacaactttgtttatgcacctagaatgtcttctattaaaatcctattgtttttctatctcatcatttcaacaagtttgagatatattcatctcttccttctttacttagcacttactatatttaatatacatttgacatttatttttacattcaaatcaaaattttaagtactatctaaatatcttacatacagtgctataagcacaacagggaatggaaaacatattagtgatagctcctatccttaagaagtttatag

SEQ ID NO: 64179 - DNA, 1056 bp, Homo sapiens
ctaattttttgtacttttagtagagatggggtttcaccgtgttagccaggatggtctcaatctcctgacctcatgatctgcccacctcggcctcccaaagtgctgggattacaagcatgagccaccgtgcctggccgcatgactcattcttgagtctcagtatttttttccctgccttttcaaatagtaagcaattaataaacgtgttacaactattattttcatttacaatattcaaatgtataataatattttaaaatatgtaatctacctcattttctgatacccctagttccatcaatacattccagaacctaaagtcacaattttatggccctgtgtctttgtctctctccctatattcttcatttctttctaaatattttctgattttgcttgttcttactctgatatgcacttaatagatttcatggcttacttcttccccagtcttccatcctatgtcttgtgctgaaaggaagtctttcatgtctctaatctttctctgatttcaagttcttcatccaagaacattataccttcaccttactggcctcggtcatttcattatgcctcactccatggctccccaaagcttgtgaaagcaatctcctctgcttgccccaagtatcttctacattagattgtaaactggatgggggagaggtacaacctgtaaaggtacaacctttgggccactggtttcacctcatattaaacgagttttttgataaagctcaaaatggccttctgggaaaagtccaaccaccttttgttaggatttattttaaagtaattttcttgctttagtttagaagttttggtacaaaatagaacttaaagatatttaagaaagtacttgtttgagttgtagaatctcatgcggttgttggagtcaaatgaatcctgtggttaagaaattctttaagaaattaaagtgaaagaattgttaatactgatctctaaaatttatttcttaactctgagaaagtcaccttacccatcaacagcataatgcctaattaatcttacagggtgattttgtgtgttaaatga

SEQ ID NO: 64180 - DNA, 1040 bp, Homo sapiens
tcaccatctacgctactaccaccctattcctagtgaccatcctctatcaccaggattattccagtagcctcctaactgatctccctgcttctcttgccctgcttctgtctattctcagcacaacaagcagtctattccaagcacaacaaccagcctattccacatcacaatttgaaatgtaaattagatcatattactccttggctcaaaacccccccccgtgacttctcatgcacttggaatcaaagctacagttattactgaaatcagcaaagtcctatatattctattcccacctcaccgtctatctaccactccttcctctgtccgtctgtcactctgttccaaacactctgggcttcttgtgagactctctgtgctccttgccaggtacacctctattaaacagcctttgtatttcctgttgtctcagcctggaatgatcttccccctagacatctatatgactcatttctgcacctttcagttcttaaatgtcaacttctctgtaaggccttccctgtaacccctcagcgttccttctcccctgtttcatcttctccattacacttattttcatctaacctaatctgtatctgtattttatttgcctgtctctcctacctatcatgtaacttgcttgagggcagggattttgttttatacacactgtggctagtgcctagagcagtgcacatagtaccaataacatccacataatggtactcaataaatacttgtttcaggaatcctatgatgagaatagttacagtgtgatacactttgctatttctgtactgaccttatatggattattccataatttcttctgtactatgcagttccaaaggactacccgtttcctcagctctgaagatctattttgtaagcctgttaaattcctgttactttttaattctgtttattctctacctcatgtacagtcttttagtacaaagaaccttgtatatttgcatctccagatagattttaccttcccaaaatttaatcaactttctgattattagagatggttctaa

SEQ ID NO: 64181 - DNA, 1064 bp, Homo sapiens
ataaaccctgtctattgtatgaagttttgccctttagcataaagatacaggtattagataaaatgtaccctataaaaccatccacaaactaagcttactgtgtgatacagaggtcttccttttatttatttagcacaggatatttctgactggatttgattcttaaaaccaatttccatgggtcagaattggcatttcagacgtgcagtgatctccgagaactgtagaattaaacctatacaggacgaagcttggcagctagaaaacagagctggaaactggcacggctgaattattttcaccgaagactttgtttcctaaggctagttgcttaactttcgatggcctcattttatttagctgttagttgagtgtgatatccccactggtgctcagagagagttgttagtaatgataaaagggaactgcaatacttaagcatgtcttcgaactgatttaaattaatgttgatagcatgatattgaattatcttctagaagtgatacatttttatgtttaaatcctttagctctctaaattaaaattactctgctaggggaggacagtagagctatatataaagtgtctcaaatcatttgttttacttgatgtagccccaaattatctgaacaaaaattttcaagaggtttgttagtatcattgtttgaacaaggactgaaccaagagcaagatgtttttcatgctttatatacgtctgaggcaacagtcaaaaaattttgataaatgacactagctaaccttttttttttttttgagactgagtctcactctgtcgcccaggctggagtgcaatggcgtgatcttggctcactacaaccttcacctcccgtgttcaagcaatgctcctgcctcagcctcctgagtagctgggattacaggtgtacgccaccacgcccggctaatttttgtatttttagtagagacggggtttcaccatgttggtcaggctggactcgaactcctgacctcgtgatctgcctgccttggcctcccaaagtgctgggattacaggtgtgagccactgccctggccaaccttttttt

SEQ ID NO: 64182 - DNA, 1054 bp, Homo sapiens
ttaggtttttcaagccacaagtctttttatatatttttaaaaattaaaactaaggtacacatctataaataaagtaattcaacaaaaaattatttagctgatgtaaatatattgtgagccagtatgtcatagtggataagaatgtaagtactagaatctgaaaaacaaattcagagttcactttcaccacttacagctgtgtaactttagataaatcacctagctcagtttccctgtctatgggaaataggtaggggtgtaatattgtctacctcttaggattgttgtaagaagtaattgacataatatacggaaaacagtttggagcctgacatgtggtaagcagtcaggaaatgttcttaggaaaattatagaaggtagacaaacttcctcttaaatacaattacttgaatgcgtgtgtgtgtgtgtgtgtgtgtgtgtacacatgcacatgtgctttagtggtttttgacttggtaaaattataagaattagaggttcatcaccctcccaataatatataagtgaatcctgttttctcatttagctatgtgaatctgaaaacagagtcatttaaattctaccttagactcatgtaggtctactcaactctcacttaaaggtatccctagtttttctttatgtttttgaagaatgagtatattgccgtttttgtataatatgtaaaagtaacttttctgtatatttgacagaaactatgtgaagcaacactctggattttgaaagacatcttttcatcatgggacagcaaatttcggatcagacacagttggttattaacaagttaccagaaaaagtagcaaaacatgttacgttggttcgagagagtggctccttaacttatgaagaatttcttgggagagtagctgagcttaatgatgtgtaaggcttgctctttttgtttttcgtttttccccttgttgtatgtatgccccatatgtcatggctgtgtaagatataaccagaggtgttgattggtaagacttaatgttttcagttagcattaacaaatacttattgagtatctattata

SEQ ID NO: 64183 - DNA, 1043 bp, Homo sapiens
agcttttgaaattattccttcagttatttgtctcggcgttacaaaatgtggatttacgattgttattgaaatcgatccctatgccccttattaaaggtagtgtaccttttatattctgacactgtcctatttagcggtgccagctaattcagttcttgcctctggcatatatataaagctgctggaacactttcaattgtttataattcttacatcttcagcacgaatttattcgttttcactcccttctgcccattcttcttgctataaaatgacctctacccattcagaattttgtctgggggcatgagctgccaccggccgacgatcctaaattagtcacctccatgtcgaagtcacccgtctgagaagtgatgctttctgaattcagagctcaaaaatagtatggatttttatccttttctttcacattgcctgacttcagtttctagaactttttctcaagaatatgactatatgtttcaaaaattaatatttgtcatttggtgtaaatgaactttatattcgatgtgtgtagcctgatccttcttggttcccatctaaatacaaacacgctttccttcccaaaaaggcaagggaggtccagagagaattcttacaagtctaatatgctttttccaatatgaaatgcatttagtaaacacactgttactgtgagaaatccatattcttaatctcctagtacggcactctatccttttgtagtttctctctccttctctctctaatatatatgtatgtatctttttctgatcaagatctttgattctggaacaggcattctggactctatagtgactctggcctaattatttcactatgtatctatattaacttgtcttgaaaaaaaaaagttgatatctgtttacagatctacagtttgagtaaacaatgagtaataaagtaaataatatccttagggacccagtcagtagtacttggtatttattactgatgttaaagttgacttgacagtgaaaatcattgatgtttatttcaattaaatccttttaggtgaggtt

SEQ ID NO: 64184 - DNA, 1069 bp, Homo sapiens
tctcaaggggaaaaaaaaatagatagggtctggctgcactggttcacacctgtaatctcagcactttgggagggtgaggtagaaggattgcttgagcccaggaatttgagactagcctttgcaacaaagggagacccccatctctacagaaaatcagccgcacatggtagtgcttgtggtcgcacctacacaagaggctaggcaggaagatcacttgagcctaggcatttgaggctgcagtgagccatgttcatgccacggcactccagcctgggcaacagagccaagaccctgtctcaagaaaaaaaaagtctggatagtagattataatataatctttttgccctatactatttttctttccaaaatgtcattcatgtagcaaatttttactgagtaccaactatgtggcaggcagtgttctaaaccctgagaatgtagcaattaaccaaagagacaaaagttcctgccctcatggagtccagttttcagtgggcaagataaatagtaaagtatgtatgatgtgtaagctaccagtaagagccaaggagaagaataaagcagaaaaagggtatgagaagcatcaggaattgcttagaaaggatgaccaaggaaactcatcagagatagtgacatttgtgtgaagacctaaaaaacaactagcagccatgcagatatataggagaagaccactcctagagagagagcatagaaggtacaaaggtccagaggaaagagagtgcctggtaagtttaaggaagagtaaggaggccattgtttctggaatagagagagaaagagttggggggaaagtagtaagaaatggggtcaaagctataaccagggactgactaatcacgtagggcatcacagattattgtaaggactttagtttttacatcgacagagatgggaagccattggagggccttgggcagcagagtgacgtgatctgacctatatttaaaaggttcgtttgagctttggggttgagactagagtggggctcaaggggagggggtcaaggacagaagtagggagagcagggagaaggcatctgcagacaggc

SEQ ID NO: 64185 - DNA, 1178 bp, Homo sapiens
gataaatttggattgccatgcaaaaaaaaaaagaaagaaagaaaagaaagaaaaccactgttgtaatatagtttgtaaacctcttcagtaatcagctattgtgggaagatgattgatctctgtcaaactaaactgcagattttccttcttcatgtatgtatgtttcaggatcatccagatgcttggtctttgattggcaatcttcatttggcaaaacaagaatggggtcctgggcagaagaagtttgagaggatattaaaacagccatccacacagagtgatacctattctatgctagcccttggcaacgtgtggctccaaactttacatcagcccacccgagatcgagaaaaggtaatctctttttgtccttttaaacaaaactgatactctacattctcgtttgaatcttttttaagagcacttgtttctataggaaaagcgtcatcaagatcgtgctctggccatctacaaacaagtactcagaaatgatgcaaagaatctgtatgctgccaatggcataggtgattataagacttgagtacccataacaatttgtttcaaatgaatactttcagaggaatgtttgtaaatcagaatttttcttaaaatgtgatcaatgtagttgttttaaaatagaatttttagttgtttttctgactccaattagaaaattgttaagtgtgaacctttttatatctttaggagctgttttggcccacaaaggatattttcgtgaagctcgtgatgtatttgcccaagtaagagaagcaacagcagatattagtgatgtgtggctgaacttagcacacatctatgtggagcaaaagcagtacatcagcgccgttcagatggtaatagcttctctttcaagatatttttatatcttgttcattgttaagcagatgttttcttagccattctggccctgtcatggagctgcatgctatctcttgtgatactgtgtctatttagagatttataattatataatgctaaggccaggctttggtatccagacagagatgtgagtcctggttccaccactaattacatgcctcaggcaaaggacatcctttctgagccagttttcctatctataaaatggagataattgtaccttaacttcatagaattttgtgaggatcccgtatgaaaactacttggcactagcatgc

SEQ ID NO: 64186 - DNA, 1071 bp, Homo sapiens
acagggaaatgtcctttgaaacccttttctgcctttggaaaagggttaattcttcaaagtcttcaagccagttgagatcctggatttcacctttgttgctgttaatttgtgtacagagataaacaaatgtatcccttccttttcataattttatatatgaaattgggaaatgcttcattctgatgaaaagtgtccagtgagtcaccatccctgtttatattttgacttatagctaaagtgccttatctttttttcctttttaaacctttttgagttgtgaaatatatcacatttacagaatagtacacaaaacaagtatcacagaatgatacctgtgtaaccactatttaggtcaagaaatagaatattaaatgcccttctgttttaaaagcacattgtctgctcatcaaggccccagttagccagaatcctcagcttctaaccaatgatcatctttgccagacatcccaggaacagcaacagcaacagtgactcagacgaggacgaacaacgaaagaaatgtgcctcatcagagagtgattccgatgagaaccagaacaagtctggcagcgaggccggcagtccccggaggccacgaagacagcggtcagatcaggactcagacagtgaccagccatccagaaagagaaggccctccggttctgagcagtctgacaatgaatctgtgcagtcagggagaagccactcaggagtttctgagaacgactctcgcccagcttctccaagtgccgaatcagatcacgaatcggagagaggatctgataatgagggttctggccaaggctctggaaatgaatcggaaccagagggatccaacaatgaggcctcagatagaggctcagaacatgggtcagatgatagtgactaggttttatttcatcaataagcttcatctctggaggaaacttttttaatatatgaaagctgtgataaaaatgtttcagatgtttagtcaattgtgaaatttttcttaaggcaattttcttttctatcagtttgtatattactaagccccaagagacatttcctgtgctagagtccaatatttga

SEQ ID NO: 64187 - DNA, 12463 bp, Homo sapiens
ccaagaaaagcaatgctcactcgccacgcacagggttcgggggaggtaagggtgcgttttcttcccatattcccggtgagaaaacgaggtcgagggaaaaggggatgatacaactggagcatggcatatggactcagtgaacaaagggactggagcaagaagcagcagccacgccaacgcagactcaaaagggctctccggctttacgcacgcaaccctcatctcgacagcgctcggcgccccttacgccactggctcagcctcagagacttcgcgaatatggctttgcgcactgcggcggggctgcgccgcaaccgagctcagccctgtggctcctcctcgctgccctgcgcggattggtggcagacggcaaccgggccgctgattgggcggcgaaggagccattcggggagactctggtgggttcggctgccccaagagtgataagttcggcttcagacacgccttagcgccagcagtgagtcggagctctatggaggtggcagcgggtaccgagtggcggctgcagcagcgactcctctgagctgagtttgaggccgtccccgactccttcctcccccttccctcccccttttttttgttttccgttcccctttcccctcccttccctatccccgacgaccggatcctgaggaggcagctgcggtggcagctgctgagttctcggtgaaggtgagttgagccgctgccgccgccgagtggagcgctctaaaatggccgccgtccctggtcgcttcttctcgagtggtacaaaatggcggccgcaggcggagccgggtggggcgacccttttttagcatttcctctgcgcttcagatacctggaaagtcttggcttttgttctctcttcctgttgctgacggagtagaaggaaaacgtcagtgttggccaggccgccgtgcggtcatggccggatggccgacgcctgcagggacgaggccgtggcggaccgaggcacggctgtgctcggacggcgagggagcgtggctcggaccgctagcgccgtggcgggaggcacgcgggccggcagggaaggccaggccgttggcgcgggaccagggaaccgcaggcgtcccggagcctggcctcccggcggggaggtgtgtaggacctggagtcggcaggggctgcccttcgtcggggaggaaagagagagtgatgatttctgccccttttgtcagcagaggaggccgtggcgaggcggttgtcagtcccggggggatttatggtgcaggagggggcccgcttggaggcggcgggtgggcaggaggccgccttcctgcttggagaacaaagagctgggcgccgggctggcgggggtggcctcagctgctcctccccgtcgagcgacccgggcctcgcggggaggttgtcggaagcacttccctaacttgcgcctgggtgggaggaatgctccgctcttttgttcccaggaagggaaaaacggggcggaggttcctgctgccatgttgtggccctggtcttccgcctgcaagtgctagtcctgtacacccggccccctctcgcgcgtctttccacgagctctccacggggaggaggcgaaagggtggacaggggaaaactgctgaagagctttcggagagacctcatctagtcgctggcctcgtcaaggcagtaaaaattcctagggcagacattttccacgtgatgttgctcgtgtctgtagttagacttttctattgatctcagtgctcagttttaaagatagtagaatgtggctttttcaaaagattcgttctgagccgtttaaaatgctcttgtgttctacgaagtctctttgcatccttgaacaccggggaatttccaggtggctaaacaaaatgtaattgtcagtgttttgagtacattttaggttagtcttacagatctgcaatgcagtgacagtgccaggatctgaaatacgttgtaattgaatgaaggcttatagatctgtatgttagcagtgtctaattttggtgctctttctcgttccaggtatttcatttctcctgtcccctcccctccccaccccatctattaatattattcttttgaagattcttcgttgtcaagccgccaaagtggagagtgcgattgcagaagggggtgcttctcgtttcaggtacttgtagatttattttggggaatccttttgaaaaggccagtctcaaaaagtagttaacacagcaaataagtccgacttaatgggctgcaattttcatttgaaaagttcttaagttttcattgacagccttctaagaactgccatctgaagaataaataaaatcaattatttgcctttcctttgggtccgagttcagtcttcatttgtagcataatatacaagcactaaaatacaggcctggctccagtctgggcaaaatagcgagacccccatctctacaagcaaagcaaaacacaaaatagatgcttattctttttgagtgagacatagttgggatacagtaaacaatttttttcttttaaatagtgcttcttcgggcggaggaggaagtaggggtgcacctcagcactatcccaagactgctggcaacaggtgtggtaaacatgtaaaaaaacagtgagctttatttaacagattaaaagtctttcccatgtgacggtataattaaggcaatagccatcaagactcctaatcttaaggggcgtggtttctgttgggtatcctaaatacagaatatcagttcctgattattccttagccaaattttctaagtgagttgagactctcaagctgttatttttttccttattctttgggttatttttactaatgtgtttttctgaaatcagtagctattattcctactgattgttattagtaaagtagtacgcactcaacatggtcaataaaacattagaaagtgtttattggcagccggtacagtggctcacacctgtaatcccaacaacaactttgggaggcaaaggtgggagggtcgcttgaacccaagagtttgagatcagcctgggcaagacagcaagaccccatctcttaaaaaaaatgttaattttcaaaatgtggttccacagcgttgatactgggaatatttactagacatgcaaattcttaggccccaccccaaaccagtgaaagcagaaactgggtgggcccagcaatctgtattaacaagcccttcaggtgattctgatgcacactactgttccagaagcactaatttccagagttggctttcttggaggggaagtcgagaaagcctaaattacttttttctatgtaagagaatttatgatgtttaacatttggtgtgtgacaataagtgtttttgctgatttttattaatcagcgagttcctggggaaaaccccagggcaaaacgctcagaaatggattcctgcacgaagcactagacgagatgacaactccgcagcaaacaactccgcaaacgaaaaagaacgacatgatgcaatcttcaggaaagtaagagggtaagtttcaaggtctgttttactaaaagatgggaagtgtggattagctgtgtttggtgtgtgtgctgtattactaagaaggcaaggttcatgcccagagtatgtatgttttaatgaatcctcatggtagcaatttttaaaaatatcttgaactggccaggcactgtggctcacgcctgtaatcccagcactttgggaggccgaggtgggcagatcacttgaggtcaggagtttgagaccagcctggccaacatgttgaaaccccatctctactaaaaatacaaaaattagccggacgtagtggcaggcgcctgtagtcccagctactagagaggctgaggcaggagaatcacttgaataccccacaggtggaggttgcagtgagccgagatcacgccactgcactccagcctgggtgcagagcaagactgtgtctcaaaaaaaaaaaatgtatcttgaactgaagaacagcacgtcatattttggggcttcccgttgctttcagccattggattgcaatccataatcctgtcatgctagcatttcccttgactaagggaagtgctatgttatttaagccagtgaggcagggaatataatggtcttagttcatggtctagccttgataatgagatctttgcgctctaaccttgagaaagtgagaaaggattcttgtcaaacagctggggaccccccagtccaattcaaatcattgtaattaaaataacaggtttatttcagcatccctttggttttagatgagtaagaaaacatgtcttgattttttaaagggagcaagttagaagaaaaatcagtataatttaaaagcagtttttcaattcaaattctgtgtattagctaacacttaaaatgtaattcctttttctccagcatactaaataagcttactcctgaaaagtttgacaagctatgccttgagctcctcaatgtgggtgtagagtctaaactcatccttaaaggggtcatactgctggtaagttttaaatattggcttaactcaaaagggagagggaactgtttaacaaactcaagttgtgtttttttacacttggattactacttaaaacccttaggtgtgagttagataggtatgtatttttgaatactgatggtgattaaaaagaaccactgactttagtagcattagattgaagaggtaaatgttaagttcatggtatggttgaagaggtaaatgggagtgcttagcaagctgttctttttcttttgtggaaaacaccgtatttaggtcttggaaatgcattgtatgacagtttatgtagacttgaaagttttgatatccatggcattttctgactcccaggagatggatgtgactagatgaaatctgtataactggacatttttggtagactgtaatagctaacatttaggtggttgtatttttcctaaaggaagggttcttggagaagttttcatatttagtttaagcaatgacattttctgtagattgtggacaaagccctagaagagccaaagtatagctcactgtatgctcagctatgtctgcgattggcagaagatgcaccaaactttgatggcccagcagcagagggtcaaccaggacagaagcaaagcaccgtaagtggtagtttttgtttgcttgttttaaagttgacttgaaaaatttccttaataaagcatgacaatgtcttcttttccagacattcagacgcctcctaatttccaaattacaagatgaatttgaaaaccgaactagaaatgttgatggtaagacttatagctgataataagtactactgtatattttcagcttaattctgaatgttggcttacttcattggtatctttttcagtctatgataagcgtgaaaatcccctcctccccgaggaggaggaacagagagccattgctaagatcaagatgttgggaaacatcaaattcattggagagcttggcaagcttgatcttattcacgaatctatccttcataagtgcatcaaaacagtaagtgtgacagggaagttaggcgaatgtagtcagtcgtttggaggaaatgagtcaattattcatctaagagggaggttgactagttaaatacagatgtgcaacaaaatttactaaacagaataatttgaaatacgtggtgtgtttgacaaagtagagttagaactgatcaaccagactggtagaaagccctatactagattctgtaggaactgtgaatgagtcagtgcaaacataaagggaaagaaagtactacgcctaaaccagagtaactaaaactttgtcaccatggccttttattcttgtagcttttggaaaagaagaagagagtccaactcaaagatatgggagaggatttggagtgcctctgtcagataatgaggacagtgggacctagattagaccatgaacgagccaaggtacgtgtgtagctgatgaaagtagtacaagtagtttgtctttaaatcaagctattgatttttgtgacatcataagggattgccatatttagccattaactgggttataattttagaagtcttaaagctgtaaattgaacacatttgctttagctcttccaatgaatgtattcttctcttatcagtccttaatggatcagtactttgcccgaatgtgctccttgatgttaagtaaggaattgccagcaaggattcgtttcctgctgcaggtaatactggtttctttaaatttgttggtaagctgagtttttggtttaggaatattaaaataaaattatttttcaattaaaggataccgtagagttgcgagaacaccattgggttcctcgcaaggcttttcttgacaatggaccaaagacgatcaatcaaattcgtcaagatgcagtaaaagtaagattgggttttgttttgtttgtcacatagactctgtgtgtgtagaatagaatgggtttcctcctcacccaccccaaacgcttgaggggtctgtctcatcttagtggtggagcttaatgtttttagtgtctcgtcttccacttttatttttttattttttgagacggagtttcgcactgtcacccaggctggagtgcagtggcgcattctcgattcactgcagcctctgcctcccaggttcaagtgattctcctgcttcagcctccccagtagctgggactataggcgtgcgccaccacaccccgctaattttttgtatttttagtagagacagggttccaccatgttggccaggcttgtcttgaactcctgacctcatgcaaaccaaggcttgggcctcccaaagtcgggggattacagatgtgagccatcatgcccagccttgtctgccatttttggaagaagttatttacagaaataacataaattatggtttaatattctaggtttccccccctagttgcaagaattttagttttaagtgaaatagtgtccagagacaaaaagtgcatattcacttcatttctaaaggatctaggggtgtttattcctgctcctatggctcaagggatgagaagtgacttctttctggagggaccgttcatgccacccaggatgaaaatggatagggacccacttggaggacttgctgatatgtttggacaaatgccaggtaattttgaaaaaacaatggttgcgttaagctgaaaaatcagttaactttagttttgagagttgtccgtatatgtattttaaggtagcggaattggtactggtccaggagttatccaggatagattttcacccaccatgggacgtcatcgttcaaatcaactcttcaatggccatgggggacacatcatgcctcccacacaatcgcagtttggagagatgggaggcaagtttatgaaaagccaggtaagtaatatttgagtgtgcatgttttctaaaccttatctgcaacatttatttcaaactgaaatgtttatccttaagattagtaaagtattagtaaaatcacatcactttatttgataggttagatttttattcttccctgtttcatcttttactttctctgggcaaattcagttaaactaactttatggcttggctcatccctttggtacttgattaccataatttgtggacccctttttatctagactttctttctccttttctgaaataggggctaagccagctctaccataaccagagtcagggactcttatcccagctgcaaggacagtcgaaggatatgccacctcggttttctaagaaaggacagcttaatgcagatgaggtacatttgcctatgttacttatataccatagtttgtccattcagaaatttattgcccgatgattataaaaagacgcgttattaagaggactttatgctggagttcttgacgtttttctctcttttctatacttctttttctttctttgaatgtccagcgtcctgtgagcgaagattatgagatatgagggcaagtctcctaaagtctgttagagcaagaaaactggttgtcaaaatattgtggtttctttctttgtaagggtgatttaactaaggataaaacagggcattttctaaactgtagttaaatttgcagttttttatttgaatattttagtcatgctaattctaagagaatgtaagatttataatagtatcttactactgtatgcatcagatctttaaattttttgccaaaaattaaacctgttaatgtggagtaccttctttagtttttcaaaaagcttaatgtttccctagattctgtcactgtataggattttagaatgttgtatttaatatgttcgccaactgcatgttgttaatttagatatattttgttttcaattccagattagcctgaggcctgctcagtcgttcctaatgaataaaaatcaagtgccaaagcttcagccccagataactatgattcctcctagtgcacaaccaccacgcactcaaacaccacctctgggacaggtacagaccatagtaggacagcattttctaaagatatctgaagacttttttctaaatttagtgtgttcttccccctaatttcatagtcctctttttaaaaaaagtctgtcattgcttgttttttagacacctcagcttggtctcaaaactaatccaccgcttatccaggaaaagcctgccaagaccagcaaaaagccaccaccgtcaaaggaagaactccttaaactaactgtaagtttcaaatatcccattttagtgtaattagcctgtatttgagatagagaatacattaaagatacttgtgttcttcacaggaaactgttgtgactgaatatctaaatagtggaaatgcaaatgaggctgtcaatggtgtaagagaaatgagggctcctaaacactttcttcctgagatgttaagcaaagtaatcatcctgtcactagatagaagcgatgaagataaagaaaaagcaagttctttgatcagtttactcaaacaggaagggatagccacaagtgacaacttcatgcaggtaggacactttactgattgtgtggtaagaactcttaccactcaaattcgaaaactgataaactgttgtatatttctttcaaggctttcctgaatgtattggaccagtgtcccaaactggaggttgacatccctttggtgaaatcctatttagcacagtttgcagctcgtgccatcatttcagagctggtgagcatttcagaactagctcaaccactagaaagtggcacccattttcctctcttcctactttgtcttcagcagttagctaaattacaagatcgagaatggttaacagaactttttcaacaaagcaaggtcaatatgcagaaaatgctcccaggtaagagaatgctgacttgtttgttttgtttttttaatattatatctagagatttcaggtaccttgagtggatttatgtaggtcagacagtctgattgtcctgctcagataatgataaacattaccacagatctcacctataaagagagatttataatttaactactttcatttgatccgtatgttgagtttttttcatttgctgggttggttctctattctgctacatggatcttacatacttggggacatcatttgtgaagctctgctctctggacaggacaacttggtaaaatgaactattagatgatgcaggtggctttgtctcttcagaaattgatcagaataaggaccgcatgttggagattttggaaggaaagggactgagtttcttattcccactcctcaaattggagaaggaactgttgaagcaaataaagttggatccatcccctcaaaccatatataaatggattaaagataacatctctcccaaacttcatgtagataaaggatttgtgaacatcttaatgactaggtaagacgaatggttttctgcatatggtaatgtttcatgtactggaaaagaagcgtaggagactaagagttgtctcttgagcaagaaaactcactgttgggttctaacaagacctctttctgtccagcttcttacagtacatttctagtgaagtaaacccccccagcgatgaaacagattcatcctctgctccttccaaagaacagttagagcaggaaaaacaactactactatctttcaagccagtaatgcagaaatttcttcatgatcacgttgatctacaagtcagtgccctgtatgctctccaggtgcactgctataacagcaacttcccaaaaggtgagaggacttgtatcagaagaacggcgtgaggaagttcttaaacagaacactaaataatgggcttattacttttttctttttttttttttttttaaggcatgttacttcgcttttttgtgcacttctatgacatggaaattattgaagaagaagctttcttggcttggaaagaagatataacccaagagtttccgggaaaaggcaaggctttgttccaggtaagtcttttgttaaaaatttggtctgcttacttcagtttgcttggtattaacttcaagttaagagcctttttcaactgaaatacaggcaaggtagtcctagttagtagtttgtcttcacctgtacatttcattctgcactatttgaagctattattaagtaaagctacacaatgaatcaattctagtggtgtataagatgttagaggtagctaacttttcaaggagtatagctacttatatacatgggagtgactgtacaagtttcgatttaagcttttttaaaaacatcagtaaagaggaaattgtagctgggcacgtggctcatgcctgtaatcctagcactttaagaggctgaggtgggaggatcacttgagctcaggagttcaagaccagcctgggcagcatagtgaaaccctgtctctaaaaaatacaaaaaattagccagacgtggtgacatgttctgtggtcctggtcccagctactcgggaggatgtcttgagcccaggaggcagaggttgcagtgagctgagatcacaccactgcactctagtctgggcaacagagtgagactgtgtctcaaaaaaagaaaaaaagtttaaatactatatatttttctaaaaagaggagatgtttctgatttctcacaatttgattttttcttattgaatgaacttgtagccctaggggaagaacatcagggcattctctcaaatcacctgaagagcagtttaaaaagcaggttccaggcctattcctagagattctggtttagtaggtctgtggtacaaaatccaggtgattctttctcatgctactagttttccagggggcccaggcttgagaaacattggtcctgcagcatcttcctacctttttattgctgatgataaacaagattcacgaggatcatccttgcaggattaaatctttagctctgtgttgtcccaaatctggataatataccactgttcgttaacttaatatacaaattgttggtagggatatccttgtttcatattctaaaactgtgtagtaccacctaaaactttttggatggatttctgtttatatcatgaactattttaatttacaaatcttaatttataggtgaatcagtggctaacctggttagaaactgctgaagaagaagaatcagaggaagaagctgactaaagaaccagccaaagccttaaattgtgcaaaacatactgttgctatgatgtaactgcatttgacctaaccactgcgaaaattcattccgctgtaatgttttcacaatatttaaagcagaagcacgtcagttaggatttccttctgcataaggtttttttgtagtgtaatgtcttaatcatagtctaccatcaaatattttaggagtatctttaatgtttagatagtatattagcagcatgcaataattacatcataagttctcaagcagaggcagtctattgcaaggaccttctttgctgccagttatcataggctgttttaagttagaaaactgaatagcaacactgaatactgtagaaatgcactttgctcagtaatacttgagttgttgcaatatttgattatccatttggttgttacagaaaaattcttaactgtaattgatggttgttgccgtaatagtatattgcctgtatttctacctctagtaatgggctttatgtgctagattttaatatccttgagcctgggcaagtgcacaagtctttttaaaagaaacatggtttacttgcacaaaactgatcagttttgagagatcgttaatgcccttgaagtggtttttgtgggtgtgaaacaaatggtgagaatttgaattggtccctcctattatagtattgaaattaagtctacttaatttatcaagtcatgttcatgccctgattttatatacttgtatctatcaataaacattgtgatacttgatgtagtgatgtgtggctgtaaatggcatccatagtctgggagaattgtcagctttgtttttgaggtataggagacccaccttagtttgacttaaggacttcccaatttttgtttttctg

SEQ ID NO: 64188 - DNA, 1052 bp, Homo sapiens
ggagtgatacacctaggaataggaaagtagtctgaagccagatgataaaggtccttttatgccaaactaagaagttcagatattattgttagaggagagctattgaggtttttgagtagggcacttatatattcattttgtacttcaggaatgaatcagtagaggggataaatgagggtaccctcaaaattgcaagcaatgaagtattagaactgaatttttagggacagcaataccagcctaactggctgcataagagaagactgggtgtttgggagaggcaaaaaataaggccaacagaaaaggtagggtagggacagaatataaagggcttgaaagccaggtaaaagcatataaactgggatgcctgggttctaataactgtttccctacttggagaaactccccttatcttttttaaaccccagtttccttttcctgggatttgcttcagctataaatgttgtaattttctataatgctctgacctgctacagtggctctgaaaccttgactgcacactggaatcacctagagagctttaaaagctactgatggctagatctcactaccaaagattcagatttatctggtcttaggtgcagcctggacactgagatatttaaaagttctccaggtgattctaatgtgcagccaaggttgagatcaactcatgtagaaaatagtgaagcactaagattcttaagcatggtaataatatgttaaaatttagtttagtttttttgttttttttgttttttccaagacggagtcttgctctgtcgcccaggctggagtacaatggcatgatttcaactcactgcaacctccacctcctgggttcaagcgattctcctgcctcagcctcccgagtagctaggattacaggtgcgcaccacaacgtctggccaattttttgtatttttagtagagacagggtttcaccatgttggccagggtggtctataactcctgaccttgtaatctgcctgcctcagcctcccaaagtgctgggattacaggcatgagccaccgcgcctggctgaaaaaag

SEQ ID NO: 64189 - DNA, 1055 bp, Homo sapiens
tttctttgaagtcttgtgtttacttctaaattcaccgaaattggctaatttaaaatatgactaattttcatgtaaaatatagagtaaattgctgtcaactactaattccttagaagatgtatcataatttcttatatatgcaatgctttttatttactagtcccagaattataccctagtttgagaaggatgtgcagttccttaatatctgtgtccagcatatacctcaagcctggtaactagactcctgcgattgctgagttcgagcccttcattagattatttgtccaagatgtcagcctcttaaaatataaaaccattcttgttttccagtccttttcccctaacctccttggagactagattcctgctcttaagtccaagtccattatctgagaccctgctgtctgctactagacctttttaatgctgaccgtacccattttggttcttgatgccagctgttcacctcatctgtaacgtatcaggactaaattatggataccatgcacagctagtgagaatggacttttagtacgtgaaggtgggtctggtggacaacagacaagtcgagttccagatagcaactagttctagattaccctaacctaaatgtagttaccgtgactgaatcccaaagagaagattcttttcctttgtatttaaaccctacctacccttcagaattggcttttttttctctaaataaaaccaaaggaaaccaagtaacaagcactgccagcctccctttcttccatacttccaaagccctttggttacccttctgccactgtaatgtccctgagactgtaataatgaagcactctctggagctggagggaaacctctgacaaaccctttcacataaaagagagaacaactcttagaggaagaaatgaatggcattccatttaataaatggaagagctatttggggactaaattacattctcatggcaccctcaaatgatagctactcttccaactcatgcataaaacagtaaaatgcccctcttgtgtccaacgcaaaaggactttcccacttttaatcccta

SEQ ID NO: 64190 - DNA, 1034 bp, Homo sapiens
agataggggagaaaggattgtgatacttgtcagtttaaccggaaggagactaaagacggaagttttccccgctcttcagggagtggaaaggaaactttactctcaaaggagtccagattctttgtcctcgagaaattcggggaaacaccttcgaagaggtggggttgaggaccttctttctgaaaacaaaagcttcctactcttctgtgtcctctggcaacgagagggatcctgatcttttacgtgaaccagcagctccacagagttctccgttgcaaaatccaaaaggagactgtggaaggagaatctgcttttttgctcccaataagaagcagggctttatgctgttgctagtatgagaccctcgactttctggcagttataatccattgttcatccgtttcgctgcataacccaactcctagtaacgagattttttagtagttggggaattaaaagtattcaggaacacccaagtaatggctagacacatgggctatgcagtcaaactttttgggctctgaacttggtttttcacttacaagaggtgttagcgagatgtgttaacctgtgtctgtttatctctaaagtggggttattaataatccttgtgtcttcatagatgagataatctatatgagggatttagcagtaattggcatacagtaaacaatcatcagtcattagacattgtttacctgaggagattggtcactggggggctaaaaatgattgtagtgaaagaactgcttcatgtaatagttctatgtataattccattttagattcaagacctagttttagagacattgatgaggttgtacttttaaaaattaggcttagtttcaagttctagaaagtgtggtggtggtgttgttttaacatgtttctatgaagtcagtaggtgggggaacatctcaaagcatctaaattgccaagatattgaacaggatgaaaatgttagaatttttactatgctaggcgtcttctctttcagtccaagatctgcattgcagtaaagaatcattttcact

SEQ ID NO: 64191 - DNA, 1047 bp, Homo sapiens
tcaccttagccactgggggcagcacaaaagcccgtgctttatgaagaggggtcagtcaatgtcgttttgatttacagggtatgtcatttgactatacatttttagtctgcatgttcctcccttgggcatttttcccacaaaaagaatgaaatcagcaaatggtggcaaactggatttagagttgtggctttcaagaggtttacttgtcactccaaagagctgattttacaatatgggtttcttgccaataagtagcagagtcttcttagtcatgtggtgtgaaacaccaggctctggagctggaacttggaagggaattccaggcaggggcaacggcacaagctaaggggtgagaaaagtgaagtggattagtttggggaggagtggctgggccagccgcaggcaggtagtatgagcaaagctctcatttttattttaacagctcccaaggaaagattgctactgtttcaaatgcctgaaactgtaaactgtggatttatattgtcagtcaataatggggctcagacaaggaaaagaagaagaaaaatttaatccattttacattcagttatatctggttactaataataattacacattttcaacgattacaacctcctacaccagttatgttttatgacttcccgtgattatctaaaacatgtttcacaattcttgatgttcgtgtaagaacactaaaggtttacatttcagatgggtaaaaaacaagcctgtcaaagcagtttgacaggaagacagcccttatctctttctatgaagtggcaactgagaaatttgtcacctaagaagagcataatcatgtttagttttactgagaccttatctcaatctgacttgcaagcatatagattctttaactacctagattgtaaacaatttttatcctccagcttctctcattaggcaagaaaagcattttacagcgtaatgcctgaataaacaaaagcacttttaggtccaagtgattttcttccatttgtctttaattaaagctgatttgcttcttaaaaggtgattcatttctca

SEQ ID NO: 64192 - DNA, 1043 bp, Homo sapiens
aggcttctggcccctgagtccacatgtgccttcagagattttagcgagagaggagagggcagagtcagaaaccctgggactctaggtaccctttgctggcctttcataccctggaggctttctgagtgctcttggcttctgcagctccagttttgggctcatggaccactgggcaagggccacaaaatgtggcttctgaattagctccaaggggtggatggaaggtggaagggacaggaccacacctggtttccaggccaaaatcttgcagctgaggcccacagagaagcctattcaccagtcactggttggcagttcttactttaggctcttctgccacaacagttctcagtgaaaatgctgtggttttcagttccattggctcacactttgacaggtgctgggttgttaccaagtctttgaacagccagtcctcctggtctgctgtcttattaatgcatgacgaatgggagctgccatcttgtatgcaatgcagagacccagagtgcgtcctgggcaccatggagatacgatgacgcttttctcaaatgaaacatgacaagtagcacctcaggaactggggttaaaattggttagtaagactagcaagacagattttctgttgttgttaattaggaacaaatgttcgtatgcccctggtttcactcctagtggtattgaaattgtttttgtgaggtgacacagttggttctgtatttgaagatcacatgtctgtgccggatcccttatggaaacagattcagctcagttcctgcctgcgtatctcatacaaacagatgatagagttcactggcttatatattttgtgtatacatctatgtgcatgcatttatctatacaaagtataagtcatggatacaggtccatgtaagtaatgactacagaaaggaaatacatttagccaataatgaagtatgcttctgtcacactgctcaggcttactacttgcttatttttaataatgatgatgatgatgagaaaagaaaaatcgctcaaagcattctgagctatgcaagggtatg

SEQ ID NO: 64193 - DNA, 1049 bp, Homo sapiens
ggggaagcagatattcacatggccttggagtaacacccacacattacttattaattacaaacgaatgaagtacttttacgatggagaaatatggcagatgccaccttaatcaagtgaccacacttagaattaccaataatggggcaaactgacattatgtggcttttgatggagtgcagtgggatgagcacaacatcacttatgtagtatttgccaaacatctttgacctgaatctaataaagagatattaatcagacacattcacattataagatctcctacctcaaatagcgtatcctctaaaaatgtcaatgatttaaaaaacaaaaaagggtatatgtgtgtagagggaatgttccagaccaaaggagaccaaaaagatatataacaagcaaatgcaatgcttgagctcagattggattatgaatcagaaaatgaacaaagagctataaaggacatgattggataattgggaaagtttaaacatggaatgtatattagataataggtctatcaatgttaaatttcttgggtatcatatggtattatggtaatatacaataatgccgtcatacctcaaaagtagagaagctaacagtgcagccttcagtctgtggtcgaaggtagaacttggagtccaatgttcaagggcaggaagcatccagcatgggagaaagatgtaggctgggagactaagccagtgtagtctttccaggttcttctgctgcttttattctgaccacactggcagctgattagatggggcccacccggattgagggtgggtctacctttcccagtccactgactcaaatgttaatctcctttggcaatgccctcacagacacagccaggatcagcactttgcatccttcaatctaatcaagttgacatgaaatattaaccatcacagaggtggagcaggatactcctatagaaagggaatatatatgttttataaggtttgtagaaatatttcacactttaatctttgtgcatataaagcttggatctatgtaagaactaaaaagttagggaaggggaagaa

SEQ ID NO: 64194 - DNA, 1039 bp, Homo sapiens
gcatacctcgcaggacaggtggcaggagaaatttgtgtctgcagttgtatttgtaaacacagcgtggagaatatatcaagaatccagcaagaactgcacaggttctatttgtctgctaaatagaatgaagtaagtgccaatggaaaatggattgaggaaaaggtggaagttttcaagtcacatagaatggcaggaggggtggtaatctgacgtcttgggcaaggatagacctgtatctcagtgtgtatgtctgtagctctggctcagctattgctgtctcatctgtctccctggctggctaagcatcttgaggacaagactgtgttatattcacttttgcatcagcagcatccagcacagggtctggcatggagttggcattgagcaaatgtctgttgactgactaattgaaacccattactcaagataagagtgagacaaaatggctggtgagtagctcattctcctttcatattatgcctaccatgggctaatacttcctccttcagagggttctggcagatctcatggtcattgtgtgtctctttgaatatcagcctccctcaggggccatcaggttggcgataggagtcaccattggagtttgttagttctgaccagctgtggtcaaaggcgtgaacctattacccatggctaagggcctggacaccaaagtctggttgccctagttcaagtcttggcttcatcactttccatgaccttgggcaagccactcgacctctataagcctcagtttcctgatctgtgacgtaggggtgctagcatggggtgtgatgaggctgcgtgagatgatgcatagtgctggcacatagcaacacagctcaatccatgttaggtcttgtactataattcccgaggggctggggtacatgacagacccagccctactccatctgccaggcaggcagtaagcaagtcatggccccatgccacgtcacctttgtttagaagcacaaaggagagcaggagataatgaggcagagaaacgaggcatctactcggaatggcactgggagaa

SEQ ID NO: 64195 - DNA, 1045 bp, Homo sapiens
gaaatgttgcctgttaattttccttgttataggttggttttgatgttgatgactggtattacttctctaggatataactttggaaacagcattggtgagggcattccatgtaaaacatcaacttcagcttttctgttgtagggtattttccgtgcttgactactgatggtcttgcaaagctcctgtattcaaatcctaggctgagctccagagtgcttcctcctagatcgaggctttggatatgctcactgctcattagcaacctgcagaaaagctgggatgcagtcttcactgatttggtgtgtaacggattccttgaagggaagcctgctttgctgatggggtcagcatacgtggcgtactgacatgggaatcatggcatttccagccagtgctcaactctgtggaatgcttcccctttcagcccaagtctcaaattgcctccaagtttcctcatttctgagaaagtgagccagtgaaggttgatattcaaatatataaacagctaatgtggcatttggcagtgtccaatcagaaccagtcatatagtgctagagcaaattgctgtgccaggcagtaactgttttgtggctggctcttggggaaggtttggatactgggggaggggtcaggataatgggtgctggaagcatctctcaagtaacttgggaaagcagctttttctaaaatgggaggaaatttgagtttatttatttatttatttatttatttggagatggggtttcactcttgttccccaggctggagtgctttgacacgatctcggctcactgcaccctccgcctcctgggttcaagtgattctcctgcctcagcctcctgagtagctgggattacagacgcccgccaccacacctggcttttttttgtgtgtgtgtgtgtgtgtttttagtagagatggtgtttaaccatgttggccaggctggtctcaaactcctgacctcaggtgatctgcccgcctcggcgtcccaaagggctgtgattacaggcatgagctaccaagcccggcctatttcagtatttta

SEQ ID NO: 64196 - DNA, 1029 bp, Homo sapiens
ctaagggctgggactggcagcgcgccctctccgggagcttcaggtctggggcagcctgtgcaggcgcgggtggaggcccgggcgcgtccctgggggcgggagccaggggcggccagcaggtggggcctgggagctggactccgccccccgctccctccccgttggtccgctgccgctcagcaccggcccctctcccgagccggagcgcgattggtggcagcgcttgtcgctcggagggggccgggccgctctgcttcgcggctctccccgccgccgctgccgctgccgctgttctcctagcagcgcgggccggtcggaccgccaaggcagccggcgctggcgatgggaagcggcgtggccgccgacacaggcagtggcaaagtttcccagacgtacacatctggacgcgcggctgccggctacccgtgacccctctaggaagggttcagggatttttaatttggaaaaaaatccacctggtttcctttgtcaaggtctctccgggtggccagcggcaggagctgcaaacttgggcacggcggctacaccggcagcggaccgggctttggagaacctcgggactcaggtgctgaggtgcccagcggctccggacgtgctacggggtgcgagcgcgggggagttcggggcgcacgacaaggaagggcccccgggagctctatatggaggaaggagcccagaatggtgtgcaccaggaagaccaaaactttggtgtccacttgcgtgatcctgagcggcatgactaacatcatctgcctgctctacgtgggctgggtcaccaactacatcgccagcgtgtatgtgcgggggcaggagccggcgcccgacaagaagctggaggaagacaaaggggacactctgaagattattgagcggctggaccacctggagaatgtcatcaagcagcacattcaaggtacgggcgccccggaaacttgggtcgcccatgaggcccgggagtgccccgcgcggcgcggggtgcgctggggctggtgcgcatcaactcagcca

SEQ ID NO: 64197 - DNA, 1005 bp, Homo sapiens
ccatttttccattgattgcagcgggctgggggaggggccgacgacgaaggcggctgtggtagcggcggcggcggcggcggagccctgggtcggtgtctgcgcgctggtgtctgaggcccaggctgaggcctccgctattgctggagcgcaggcggcggagaggatgactgccgctgccattctctcttgagctagcgagccgccgccaccctccaccctcccccggcagggcggagaggagcggccggagtcagcgatggtgcccggcgaggagaaccaactggtcccgaaagaggtgaggggccccagaggaggttaggccttaggcctgcggccgctcgaggcaacacaggcccgggccggggttcggctgcgggcccggccggggtgcaggctcggctgtgggggaatgaggaggcgtgaggcagtcgggggtggacggtgggtgcggcgagcagttgggagacccgctggctctaggggccggggagcggacctcccgcctcgggttttatggggctggacgaataaaggagcggacgggaaagaatcaggttctgctctaggggagaaggtggccttttaagttcttgtttaacgtgtggagccgggagagatcatttcaaagaaaacattctggaacagttgcctatgggcacggcagggtgacggtgctgcttctgggtttgacagtggcagcgtatagctttcagcgcttgtgaaatctacacccaagtgagatctgtgggagggcagacttaactgttacgacttttttcaactcctgttacttggtagtactattggcctgcctaaatggggcctaccgaagatcgtggaaaagtagtacatgggacattaatgtaaaggaaggagataggagaacattaccacatggagagctgaactctttttttttttttttttttttgaggttgggttgtgtatgccaatttgagtgacttcttaaattcttaaaagcaagtgatacgagaagccttgact

SEQ ID NO: 64198 - DNA, 1039 bp, Homo sapiens
ctttcctggagcagatattcagtaaatattcgttgatgtggtgacagagttgtaagtaaatttagcattctaaccaattatcctgtccttggaggttttccacagcatcattggcaagctatttgccaacttttgctttaatacatacttctatgactaatctttgataaaatctttgtcttagaagagatctgttatttttaagtttttgagttgagagaagtctagatctctatagctgccatcttttgatagttgccttacagaaatgttaaagcatttcccataggatagtttttctcatcattgaagatgggagagggtagcctgagaactgaccttttctgttctgagtctgagcttcctcagttctttaactgtttcttagttcctctcttttggacataatctggggtttttagtattcctcctaaattgttgtacccagaaagagcaaagagagtggtatctcttcattgtggtgaagaacagagcttttcacccgtttcattctgccgtatgtctttgaattgtagtatattgatttctgctttgaggtctcttttaatagcatcccaattttaattattgtttggttgctattttgttattctgttttcttataaggatgtgtgtcattaatattcattgagtactcactgtgcatattactgtattctgccaaataggaaaaacttagaatagaaaaatttgttcttctctcaagtgtcttatagaatgatcaaggataaggtgcatatttactgatgctttaaaaataatacttaaactgcagtacttaaagtagtgctcatggactctaaatccagagaaaatggaaaaaatgaaggaaaaagagtagaaatgtaaattctttatctctgggtttttttctcctgtctttcatgcaatcactacttctgtctggaactggttttggcatctaatgatgatgatgatagtaataaccagtatttattgagcatttatttatataccagatactgttggttgtgctttgtattaactcatttgagct

SEQ ID NO: 64199 - DNA, 1465 bp, Homo sapiens
tattcttttaattttatttctcctaattaaattacctgaggaaatgtgctgcaattgtcattcttgattttagtgattcttttaaaatgaggctttttcttaaatttcagatgttgactctctcttaccagtaagagacaagtttgtcaagttatacccgccagcgttttaaacaaattggagtgtttaataaaagtcagtattttagatatcattggaaatgctcatttaatgaatgaaagcaaaagctgaatgcagaattgtatatgattctaattttgtccaggaaaaaatgaacaatttagggttaaatgcgttgaaagattagaaggaatacactaaaatattaagagttgctatttctgaatttctggattattgggatatatatttagactttcatatttaaaaatgagcatgtacattattttcaaaaacagaaattgagatgatctgattgtagttttgggggtatttacatagtgttttttttttttgtgctcacagttttcctatttcccctctcctcttactctgtatatttgtcttgagtaatcggatccacttgtatagcttcaacctttgattgtgatttacacatttatatctccagccctgaccccttctagattcagatttccactgttctggatatctgtacttggttgtactctaggacccacaaattaaatataggtaatatcgaacttatttctccttcccttctcacaacccaattcttggtgttctcctgtttcagttagtgttatcgccatctatttatatgcttaagttagaacagtttttgactcctctcttttcctttttctcacatatagttcaccacttagaaaatgtctctgtatccttatctttctctccatggctctgcctttgtctaattattgttattttctccaatgtgtagcctttctaattggtcagtctgcttccaaggcctttcctttcttaaccatcctccccacaactgccagggttactttctaaaacagatgagattaagatttacctgttttaaagtttataattattaccctctgattgcaatttgaatgataggtactatttgtaaacagtatgtgctagacactatgctaaccagttcacttacattatctcatttgacagtatgacagtattagctattattcttcattatccattttacacatgaagaaactaggcttaaagatgctaagtaacttgctcaaagttacatagctatttgattctaaatcaaggtagctttaaccagtaggaaagtccttgataatatggattcagttgattttttaaatttaatttttatcaaagttatgtttaatacatgcatatatttataagagttaaatagctctgcagaactatagtcacttgtcacttaatgatgaggacctattctgagaaatgtatcattagacatcatttgaacatgatacagtgt

SEQ ID NO: 64200 - DNA, 1060 bp, Homo sapiens
ctgtgcccttgccctgactgaatactatgaagtatttctttttgtcctgcagtttttaaggagttttaaatgggtggacttttattttacatgaaaatgactatttgaataattaggattcttgcctatcttctattttctcttttttggattagtcatatagattttttgtcttttagtgcccagatactgtaattttttttttgccaaatggaaaggaggagttcctgcatctccagaatagtagggtatggtgatagcccaagttagaaagaaaagattgtatcaaaaacaggggttgtaaaaaacagagcattaaatatatatatttaaatacctattgtaaattaaagttccaaaagacatctacttttagaacaaattccttggtattaaggaccttcttcagttcaggcagcatgtgtaggtggcatgatatgcagaggcatattctgttatgaggtttatgacacagattttcaaatctaacatacagacattctccattgtggaaaagtatttggcaaaatgattgtgcttggcagtgatggcagatgactgacaaaaaatgatgtgatctttcacatcgacgttcttaaagaatatgtgttttcctgagcctggtttttactggtatagtgtaagaagggatggatgtagatgtagtgtgagtaaatagatgcgtcctctctaccttactgcatacttccatttcctttgtccttaggtgtggaagtaataattgccctcttctttcatttaatgaaactaaactgaaacatgcatacataaagtatccatgtatatgaatgttttaatttatgcaaaactgttattgatataacctgctgttgagagattacagtttttacaaaaattactgagatatatgtctcaagttttgatgttctttaaaacatgctcttaaaatcctatccaaccggctgggcctggtggctcacacctgtaatcccagcactttgggaggccgagatgggtggatcacgaggtcaggagattgagaccatcctggctaacacagtgaaaccccgtctctact

SEQ ID NO: 64201 - DNA, 2024 bp, Homo sapiens
tgattttctgtagctctggtgtagaactagttgacatggatagaagagactgtccctgtcagtggtactatgatgatgctttaaatttgatgctgtgtagtggactgcttctatactaataattttcaagtattagtgtaatatgcttatattaaataaagtgactttctagtagagaaaaattaaagaaagcctaagtgacataattcagaaaaaggtctagaacttaaatctttctgtataaagatgtgaatccaatacctgtggtaaggttataggtttaacttcaggaaaatcatgaacctcatttacaacctcagtgaaattttttagtacaaccaaagcattctagtttactacaaatacctttcttgttttaaatacttatttgtatttaataatgaatacactttcattgtttttagtgtagatttccatggctcctgattttatagaattcattcagttaaacattgagttagtagctgccaagaactactacagagagattcaaagatgaataaggaatctggcctagttctagatcctagtctagactaatggaagagacaaacaggtgaccagacaaatatataatgtggaaataaagtgggaccatagagcggggagcagctggctttctctaggggattctgtgagaatgtaatcacaaaggctgacttgattattatgtagagaaggaggaatagtgttcaaaacaagaaagtttgtagtgcattttaggaagtggcaaaaaatttagtgtagatgcatggggcgcctggttctggcagattgtgtctaaaaattccaaaggctttgtgtgcccagaaagtgtttagatttttattgtttagacattagggggcaaaaaatatttttttccccagaaaaagtcaacagatttgtttacaattgttataaaatttagttgctgaaacttgttcatggaaacattttttacttgctggaatgttttttgtccccaacattaataccaaaaatttgcatacaaatcaaagtgggggaaaaacttgctaataccttattctctcatccatttatttccatttgcaatcatataattaggtacctttttgttttttaagaataaaatatttcttttcataatacattttagcacattttctacatatgagtctttttggtgggatatccttaggcataattgttacatatttgatatggataaaacaaaggtgggtgtcttcaaataggctaaccaggtaggcctcacttgcctttagaaaagtgtcagtggctgcactctggaagtatagatctgttttgaagttctcacaactgatgctggaagggaaatttgcaagtgagaagttcagcatacatttgataacttctgatctgattttcactgagagccacagtacaaggcttataatgatgtggtttcttaacctttctagtacacaacatattcttgtgagtggcttttgtagctagttacttcctgtgtgctttaccactggcatttttgtgggcatttggctttgtaggaactgtagtgtagagaactccctatttacttctcttcttggctgaagctctgcaagctaaaggtgacaccgtgctaggcagtgatgactgttggtggcagtcacagtgcagtaactgagaacaccataaggaatgtctttaatttgagaattaatggaatcttcctaaggttatccacagtgctccaaataatatttatttaataaaaataaaatatttaataaagagaagctctggattataaacctagttccaggttgcattaataagtagaatttttgtataactcatctccaaaagatgcagcatgttgctttagtaaatataaataagctatcaatgaatttatatacatttccttcattttatagtgtctgtccttttatgtgtttaggtattttacttgtattgcctttaagtttacaccagtttatataatctattattttatatctatttatagtactttgtgataacaagagaattgg

SEQ ID NO: 64202 - DNA, 1180 bp, Homo sapiens
tcagcctctgatttggcaccacttcatttacatgaggtgaataccaagtgaccaatgggaaacctttggcaggtatttggacccaagaagattctgtatccaggccctttagccgctgctggtgcagttcccattagtggagtgtactttcgttttcagtacatctctgctcttgttgtttcattcttttccttgcttcttttgtacattttgtccaattctttgttcaaaacgccaagaacctggacatgctccaccggtaacggttaaatactaatattatagcccctccattttctcggtaagaaaaactataaaggccacagaaactcattaagttacttagggtctcaggtaatgaaaggacataagtgagactttttgttttttaaatcagtgttactgaggtattatttatatatagaaaaattcatccttttaaggcatacagttttgtaagttttgacaaacatacagttgtacaaccactaccatagtcaaaatatagaatatatccatcatctcagaaaagttctctgttgtctcttcatcacctcaaaaaagttctctgtcgtctcttgtaatcagttctcttccccttcctccaggctctggcaaccactgatctgttttctgtcctcatgtttttccttttccagaatgtcatttacatggagtcatatagtatggtagcattttgggtaggaattttttcacctagcataaagcatttgagattcatttatgttgttgcttctatcagtagtctattcctttttattgctgagtgccacagtttatccatttaccagctgataaacatttgggttgtttccagtttttggtgattctgaataaagctactataaatatttgtatacaagcttttgggtggacatatgtcttcatatggtaagtgtatgtttaactttgtaaaacactgccaaactcttttctgaaatggctgtaccgtttgtgcattctagacagcaatgtatgagaattctggttgttctgtatctttgtttacttggcagtgtcagttttttttaagtttagttttgttttttaaccattttattaagtgtgtagtggtggtatctgtttgtgcttttagtttgcattttcctaacgactgataacagagcatcttttcatgtacttaatactggtttttatt

SEQ ID NO: 64203 - DNA, 1447 bp, Homo sapiens
tgccctgtatcctgccctgcgagttgtagctctttccaccccttgaactcccaactcctttaactcagggagattgctggactccacctgcactctccctccctgcactgcagcctagaaggtggcttaccttttttgtttctgctttcacagggatcattacctgtgttgcctcttgttcagtgtttgaaaatcattgtttcatacattgggagataaggagcaccaacaggattggaatgttagataagatgagagaaggacttgattgagaaatgaactattctgattatcttttgctatataacaatctgcccccagatctagtgacttttctcgtagatgtgcagtttgggtaaggttaggctgaaacagcttgtttctgctctgctaggcatcagctgggggcagcagaaaggctaggggctggaatcgtctgaaagcttcctcactcaacatgtaggtggttgatgctggttgtctgctgagatctcatttgggatgtggctggaacatctacacatagtttttccagtggctgcttggcttccttcctcacagcatggaggctgggttctaacagtaaggagctgagggccaggaggaagttattacaccttttctaacccagccttgaaaatcatgctgtgtattacagggagtcactaagtctggtctatattaaaggggactggaattagcctcctacttttgctggaggcaagttagactcctactttacgtagggaagcaagtcaaagaatttgtggatatgttttaaagccccacagcagtgatacttgagcaaaggaggtgaggacatccagggaaaaatattccaggtacatggtacagatacataaagaccctgaaggatgatggatgcctgatagtttagatttgcttatagattagttaccactgcacagcatcacctccttgagagcagggtgaacagtgttgggagaacagtgttgaaagatagttgcagttcaacaatttttttgtgaaaggcaccatgtattaaaaattctaaaaatgcgtacatatactttgatctagtaattctttctttgagaaattatcttaaggaaaaattatacaaacaagcaatgctgtagtgaatgtttggaggggcttaaatgcccattaatagcagattagttaaattatggtttgtctatataatggaacactgcagtttttaaactgaatgttttggcatacaaaaacaatgagtattgagggacaagaagtagatttcaaatactggtatatgaaattgtcctatttggttaaaagtactctctctgtataataaatattatatgtgcatagactggagaagatgagatgagagcaatggtggctattttagagttgcttttcagaaaactgtatgttgctattataacagaaatatatttctattgtaaaagtaaaagcg

SEQ ID NO: 64204 - DNA, 1302 bp, Homo sapiens
tcaaactttgctaggaaatctagctttgtttctgcaatgaatgtagccacagagcactctattagcttatacagtaaatataactgctgttgactttccccttagtctcataagtgtaatattgctatgagttgcctgtaaaataaatagtttcaactttaggatttatacctttttttgtacttggctagattttctttgtagaaaactttgtcctcttcaaatagcgcatctaaactacattaaatgtttttctaaatggaacatgctgtaggcttttctaaaattttacacttgttttctcttacctcaggttcatcagagaactcttgactaaaaatttttgctcccttccctaaatcatgatgtatcctcagatgccttttcttaatgttggatgtagtacttaaatgaaaagtagtacctttccctccctaccaacagcaccatcatcatactttccccacttgaacttggatgtgctcgaaggtgtttagctatatttattttttatctattactatgtaacagtggaccctaaagtttagtgacttaatagggcatttagtttatttgttcagatttctgtgggatgggattggggccagggctcaccagctattcagttctgctccaggtggcatcatctagaattacttggctccattaagttggtggcagtcattgaatggaacgtccaaaaggcttttctcatacatcaggcacctcagtgtctccaccaagtggctgcttcctctgaatgtggatttctagggcttcctcacagcatgctgattgatcccagggtaactggatttcttacatggtggctgggttataagagggaatgtttccaagaaatacaaaagcagaaactgctggtttcttaaggctctgccttaagttacacacacagcgtgacttctgtcacattctcttggtcttagatggtcacgtcagattcatgagaaaaggaaaaaaaaaagaatggcaaagaattttttgctatctttaatccacctcaagacgtaattgtttttacctttgggcataagtaggatcagttttggttagggctacaaagaaattaagaaagatagctgccctaatttcccatttccagaaaaaacctttttacatttaaatgttttggaaatgtttcctgcatgtttaatttatattgtataggtttttttctcttgaaaagctatttaagaaaaaaaaaaactattgccatatcttattggtggtatcttaaaattgcaacaacaaaaaaattgttttcttctcagttcccaaact

SEQ ID NO: 64205 - DNA, 1044 bp, Homo sapiens
tattatatactacattagttttatttttgttacattacataattatgttacataattattttggttgggttgcttagtatgttgcttatctggtatttttcatcatatttatatatcaaaacattttggtttttagttatgtaaaattatctttggtcaattttcttgaaaccccattaaatatcatattgcatatattgtatagaacatggaaagagaaatgtttatagattctttttatgtgtatgtagtgcttaacattacctcttaactttcgccttttctctttttagtttgttagatgttggggaatgtgagtctctgggatacctatcagtgtatgcactgttactgggcttagctattccagttaatgaataaatgagttaattccaagcctagatgaagagaattttaccagatcattactaaaaaaatactatttaaatgtagatatgtatctatttacagattacttattttatgtttctcataatctgaaacattatgttttatgtccataggcaccactggatcataccagtgacaagtcacttctcgacgctaattttgagccaggaaagaagaactttctgcatttgacagataaagatggtgaacaacctcaaatactgctggtaagctacttagaaagccccatatttataatttttgtgcactgtcacctactacttgaggatgcagtttcccaaaggaaataagatgtgttttgtaatttgtgtaataaattaatattttttcattttatgttggtttgttataagtgtgtagaataacatagttacactggacatccacagcaacattatttgtgtatacagtctgttgccgccttggatttaacatatactgctgtcttcaagaccactgccacaccagggatgggggtgggtctaggataagtcaaagtgccacaaagatctcctgtgtttcagtagtgacccttcctttgtttaagcatttgcttggttgctgtaaatctttggtggttttcatgaggtttttcagtatctgcaagaaggt

SEQ ID NO: 64206 - DNA, 1020 bp, Homo sapiens
taaatgcccatcaatgatagattggataaagaaaatatggttcatatacaccacagaatactatgcatccataacaactaacaagatcatgtcctttgcagggagatggatggagctggaagtcattattctcaggaaactaacacaggaacagaaaaccaaacactacatgttctcacttataagtgggagctgaatgatgagaacacgtggacacagggagggaacaacacacactggggcatgttgtgagggagagcattaggaagaatagctaagggatactggacttaatacctaggtgatgggatgatctgtgcagcaaacaaccatggcacacattacctgggtaacaaaccacatcctgcgcagatacacctgaacttaaaagttgaaaaaataataatttaaaaaattaaaatgccaaaaaaagattaagaaaacctggtctgatttacctcactcttttacaggctgagactttttcagaatccttctgtttaatgacgctttgctcaggaaagattgttctgtttgatgcttttcatttagaagtttattgtgattaacaatgcctgtctggatactagacagtaattaaacacagtccatctgtactgaagcagtaacagaatatgctctctgatcttcattaattgcatcatttagttttatgacatcatgagaagattttgattagtctgagtgacattgaaatctaaaatagctattaatttagggaactctggattcacagttcagggattcatgtttttaaatgcataagaattcttcagttctgttctaattgcttgtgctgcttttatgtcccttaatccttttcagcatcttccttattaaaatgaagtttcttgtcagagacagtaggaaactatccatctcaccaacaataattgtgtgtcccctatgtgctaggcctacgtggccaggatgatataaaaatgaatgatagactgtcatcacggagtacaatggtacttttcgtttattagtaccaaa

SEQ ID NO: 64207 - DNA, 1080 bp, Homo sapiens
tgaatatcctattatgacacatttaacacacctttgctttgtatattttctttaagataaacacataattttttagtttttaaggatacttttaagtatgagtaaactgatttttttttccttttttgtgttactttccactaacatctttaaattactgtaaatatgtatttaggttatttttggaacttttaatattgctgattgtgttactcaacattatatcaccattagattaatctgtcagcttgttatctgaacttacagaagttgatgtatttgtcattctgtatgcatgtattgccctgtagtgtttaaatgctaggcacttggtggatagagagggaattagtaataagatctttgttcttgagtaatttataagtctttctacaatagcaatatgtatatgtttgaaatagtttaaataacatttaaagacagccaaataccattagagtttaaagagaagaaaggttggtgaaacttggagaagaaagtaagcttcaggtaggtcatgaagctagatatggtttggccaggttgagaagaaagagaatacactgtgcagataggaggcctgtcaaaagtgaaagtgaataataggaagggctacctgagtgttagtcattgtttgtatcagatagtgttccgagcactttatatatagactcacttaattctcatagtaactgtatgaattttatgctattattgtccgcattttacaaagaaggtaactgaaggcacagagaaatatagctttgcctgaaagcacactgctagaagttgcacctagtagatgccaggattcactactctgttctgcctgtgcactagcggatgccaataagcacagtgtgttgcggggggcttcaggagatcagcataaccagagttttgtcagagtactggaggatgaggttaataaatagagttcagagcctgctctcaaaactagcacagaccagatcgttggacaatgtgcctgttttagggagtatgcacaggaatggggatcctgggcacttgtttaaccatctgttttaatactctgaaagtggactgtaaatttacagc

SEQ ID NO: 64208 - DNA, 1221 bp, Homo sapiens
ctcatagtcaatcttttttgtctataccctccaacttgattgtttggaagcatacctccatcatatcatctgtaaattatatctcaggtcagggctacgatttccctgattgcgtcatttaacaatttgtttaaatcaagatccatatgagctgtatattgcagttgattaataaaattcttaatctatttaatttgtttataatcctctttcatcttttttcatccttgcaatttattccctgcaaaaaatagaaagaaaactgatgtcatctatcctgtagttttccacagtttgggttttgatggttgtatgccgtagtatctcacgtaatagtattcttctgtttcctgtatttttgtgaattaataattaggacagaggttatggtcagattcaggttccacagttaaatgagctttgccttcttttcttgagcacttttgccttgttatgccttgttatgccttttcttgttaaagtctaaagttcttctgaatttatgaattagggaaacactaatgtttcattagatattattagtttcaattagcattcaaactctgtatagcttccaggattaaaatcttacattattatgattttgatattaattatgcttttaaataataaaatcattttataaatactttattaacattttattttaataggtgggaatttgaagaatctgaagaagatccagtgacaagtattccataccaacttcaaaggctttttgttttgttacaaaccagcaaaaagagagcaattgaaaccacagatgttacaaggagctttggatgggatagtagtgagggtactaattctcttgtaatgataagcgttctaatattcaaacaaattctagaagacaataatattacaaacacattacacataattacctttatcttaaacctttcattgcaagtttgttgtcatatattttctaacacatttcataactctacaatgaaaaataacaaacatgacaaatattgtagcaccataaagcatatattatttatagaatgctgcaatctattttctggcgtgtgatttccttttcatgactgtcatgtatattcttatgttcttttttaaatttggcattatttaaggtagacttcaatatttctgtctatttgcttttaaacaacagattgtttcattacataaagtttatagctatttctaattgaattttatcttaaaaca

SEQ ID NO: 64209 - DNA, 1040 bp, Homo sapiens
cttttttattcaggattttgtcattaatataatattttaagtaattataaaacaaatttttttctaactaggaagaagcattgcatgcatttattcagccagagattctggatggcccaaatcagtatttttgtgaacgttgtaagaagaagtgtgatgcacggaaggtaaatgccatgtagagattaatacttaggaatctgagataatattccatattcaatagactctccccctttttgttgtttgttttttagggccttcggtttttgcattttccttatctgctgaccttacagctgaaaagattcgattttgattatacaaccatgcataggattaaactgaatgatcgaatgacatttcccgaggaactagatatgagtacttttattgatgttgaagatgaggtaaatatttgttattttaaagtatttttcattaatccacattagtcagtcatggttttgaaagagctgtttgaggtaataacactgatgtcatttggactgtcttcttgatggaaactttttctttcttattttctaatgtggaattcaataaaatgatttacctttgtataagcttttcctgactgcataaattatattttaaatattcttgtttgatcagagtaacttatgatactctttgaaaagacaataaggaactcagctttggaattatttcttgaagttgagtgataatcttatattttataatttcgtcgttattgaaaccagcctgaaggtaagccatactcatgtttctgatctataataaatgcagacaatgcctatgatggaatgaatgaaccaactgaatagcatgggcttaatttcttgtacttacctactattttgtatttactatttgtctgttttccttttttagtttttttaatttgaaactttatttaaataatttaagcatgggatttgaagtgacacatgatgtaatgcttatcaatttcttcccacactttggcctgccaaaattctctggttcttctatccttattcaatgaaagacttacaata

SEQ ID NO: 64210 - DNA, 1053 bp, Homo sapiens
taacaaagagaattcttcaaattaaatttgtgtgaatgtggtttaaaaccataaagtagaaaagtataatgtgctgtaaccattatatttctacttcctgtaaaaagactatcaagttcttaaggatgaatacaatgtcttgtttctctttctaattatctgtaatacctaacgcactgataaaccgagttggactttttgttcaagaaaagaaattatattctttcctgatttgagaacaccagaagctcattttggagctcagcttctctgattttgtggattttgctaaaagaaatgataatttcaaccattatgttgtaacagtaaacataaatgaggtttaatagaattctgaatcactaatttgttgtattagaattttaaggacatgatagaaatgcttttaaaatacactgttgcttgtttaattttacttaaggtctcaatttttaagagaaaataaatgtactcaaagtaaaatatttttactaatatgttaaattgtgtgaaaatattagcagtatataggtacaaagttttgttgaacatattttctctgtatatggtttataactaagataattatgtcttattaagaaatctcctcagactgaaagttgcactgacagtggagcagaaaatgaaggtagttgtcacagtgatcagatgagcaacgatttctccaatgatgatggtgttgatgaaggaatctgtcttgaaaccaatagtggaactgaaaagatctcaaaatctggacttgaaaaggtaccttttatagtttgcattttttagttgaaagtgagaataatctctgacttcctatataattctatagctgttgtgactgataaagttatctttaaaagaaacttaatttttgaaagttaagacttctcaaatatagtttttttgtacatatatatatatatatatatatatatatatatatatatatatatgactataattaaacttcaggaaaaactgcttacaggtaagaacattaatttttgggagaccatactttaaactgtctaagcaagctggatg

SEQ ID NO: 64211 - DNA, 1010 bp, Homo sapiens
ttggacaaatcatttaatctgtgtgcctttcatttgctacattttggaggaatttggactaggtgctttctgttctacgcagatctagaaatttgtaattctgtttgctagtaccatgtttgaagatgtatccccttttaattaggagtaatgtattgctttgttaaatagtagtaaaagagaagaaaatgttaggacacgtttttatgtaattttatttacaaattatcatgctacatttggatgaaggcactttactttccttcctactttttggcaatgtatttgtgatttgaaactaaaattattgcaattgggaacccttactctgtcatgactgtattatctttgctttaaaatagatatatacaattctaatttggaaggtgattcagtcttctgaatatatcaccattattgtcatctagaagttgctgctattagaattttccaggaagataattatgttggctttgatcattatgatgaaacttaaaaaatgtatagctgttggttggcagactttttctgtgtttattttttttctaaatggggagactgcttatgataagatattcatatcattcagtgatatcaaaattttgtctagtgtatttactacattcaaagcattttaatttaataacatggggttaccacatttcataagttgttcaatgctttaaacacattttggattgcaaataaattctgaaacttcctccctatcaccactgtaattaattttagttttaggaataaaatttgaaccacaaaacaagttttcagacattttcaaaatttgttctagaaatttcactaattaacaatatattgtggtcagtttaaagttattttaagataaattagaatttcttgaaagttatagaaggctctacaatgctttttaggaaaagaataaagaagagaaaccctagtacttgtagaaaagtaaataaaataaagcttgtctgtcataaactggaaatcttctgatgtcaaattgcctt

SEQ ID NO: 64212 - DNA, 1020 bp, Homo sapiens
acaacccatgagccaaatccaacctgcctccatattttggaaataaagtttgaacactgacatagccatttgtttctatattatgtgttaatgcttttacactataataacatagttgagtagttgcagcacagaccatatggcctgcaaagcctgtgatttttactatttggtccttgctggaaacaacttgctggcccctgacttaactgttgtatgtagacattccaatacacagttttgttaaagactttactgtattaccaagaggagatacggaatcttctctaaatgtgataagaggaaacagattttcctcttatctggaatgttttaaatctcagtgtgtctgtgaacagtgacatgattttctaattgttttttaaaaaatcacaatttaaatatttcatgcttagaagtggaatctttttaatctactttttgtccttattaatcttttttatgtttctactagttccacaaatgcatatatgctgatctatagactgaaggatccagccagaaatgcaagtatgtttacctacagttatttgattttaatttgtgttataaactaatttcttttgtaagtttgcaaacccagataactacttttaaatgataggataattaagttgttttatgcctggaagaattatttacaaagactgttacaaaataataccaaatgttaaggaccttgaaaaaatgttgttgaattattttttaatatatgaagagacaaaactacattaaataaattgaatgtttattagtagtaagattatattatgtgcagtctgatgtagggacgataacatttttggaattattgcttttaaaatattgcagtgtttgttttttcttgctaattctgactcaggctgtattacaaatatctaggggggtgtgtacagatacatatacaggtgatgtgtttgctcatagtcttttcataattaaaaaaaatataatcacaatctttgatttcagtatatttcctttgtttagacactaccg

SEQ ID NO: 64213 - DNA, 1462 bp, Homo sapiens
aggcatttcacatggcaaaagcaggagcaagcaagttccggggttgggggaggggtgccacacacttttaaatgaccagaactcatgagaactcagtatggcaaagaaagcaccaagccatgaggcttgacccagacatctcccaccaggccccacctccagtattggggattccaattcaacatgagatttgggcgaggacagatgtccaaactatatcacataatcatcactttttgtattcaaatgaatcttgaccatatagagagggagaaatccaatagatgaaggtgtcagttttatgactctgcattctttggttaggaagcagctaaagactgctttgagaacacaggaaagataatagtaaacaaatgggtagtactcagtagcagcaacagcagcagtatttattaagttttattgtatctcaggtagtaactttatggggtagatgatattaataagctgaagagacctacatttggagaagtaaacttgcccaaggtcacacagtttgatggggatggcatgatttgaagtcagaaattattttcaagttgcagagagctttttcattctaaaatattaatccacatactggagttgttctggagccaagagccattttgaataaatacatggctctttaagatatggacctaaccatgtgtccctgttaactgtctcttaacccttttctggacgaagcttgtattccaagttgagagaaggatgtaatggagatatatctccatgagtgctacagtagaagtatataccatgagagcatagtgaagcaggatgaataaaggcagctcagtttcagtgacactgtcttatcctgtttttattactaatagaatttctagaagtggatgaatacccagaacatattaaaaacttggtgcagaaagagagagagttggaagaacaagaaaagagacaacgagaaattgagcgcaatacatgcaaggttgaattccatcattttatttttaattgaaagtgctatttttaagctcgcttacctgcaattctaatgactaactcattgggttgattctgagacaattatgctatcatgatcattgaacagtgtaaccaactatactataaaggtaaaatttgatttgatttgatgtgtaaaaacccagtaacatgtagtgacggtgctcagtgctggtgaagccacagttgaggtagacacattctcttatcctactaaaagaaaataaatccgtaaaaactggatagaaattgagtagtatttatcaagagccttaagcaaaatcatattttttaatataatttctcttatggaattacctaaggaaataatcataattactgtaataatcttgattacagggatattcattatagcattttccaaattagggaaaaattggaaacaacacaaatgtatattggtaggggaatgattacataaatatgatac

SEQ ID NO: 64214 - DNA, 1515 bp, Homo sapiens
taaaaaataacctccaattctgtgtttatgtcttcaaatgtgacagaagtgatggtgaaagttcatgttgttgatctaaaggcagaatctgtagctgctcctataactgttcgtgcttacttaaatcagacagttacagaattcaaacaactgatttcaaaggtaagttttaaaaggggtctgtaaataaatttttgagagcctgctatgtacaagacacactatgtgacagttatgaataagatacatgctttacctccaggagctaattaatatttgtagttaggagacaactgtagttaaaagaaacagattgagtaaagtgtggaggtaagaaagtgtaaggcaagtacatataacaacttatatgtgttggctggattatcataaaatacaggattggaaatgtaagtacagtttatttcatgaagagctttaaacagtaaacacgaaagtttgggctcctttttggcgtaggcaataagtcgagtttttgttttcgtcatttttaagtgcggcaatgctgcatttagtgtctggtgacactagactagcgttccacatgccttgaggggagtcaggaatggagaggaggaagctgttgaaataattcaagtgcagttgtatgactggaaatgagagaaggcatggattccaagagagatagaatctgtaggacttgtaattgttaaatgttggggtaaagcagatgcaccgatgacctgagccaggggtttcaaacttgggtaaccagaaaagtagggatacattaatagaaatagaggaggaaggtgaggctgtagacttgacagggaaggtgatgaattaaatactggtgccattatgtgagctagtgataaagaacataggctcattccgattttttgagctggaaaaatataacaatgaaaacattcaaattttggggggcaaaaggattagtccacaccagacaaatgattatcatccttacaagggtcctgtactctgcagaaccctgagcatacaaacggcagattttgcagggttcttgaaccgtaggttaatattccctggtgtagtggaaattgttccataattacaagttgagtccagttttcagtcattcatcttatggtagtcttgtctttcatctcattatctggggttgtaaatacctgtttagcagagttgtagtgaacattaatgaaaaataaataaatgctctgaggaaaaaaattgtaaggcattatgtaagagttggtggttattatgttctaaaaaaaagtctatattttgacttctgtatatgacttctaacaattttgctaaagtaataaccaagaaacaaatcattttgtgaaattatattttatgattaaattgcttgtaaatgcatactatgttggtataatatactgtatattacatttttaaaatatgaatgacaaatgtaaaaaaaattagtttaataagcactcacacataatacaaaagaaagagacacagtagtttcttccccaagaagttaataat

SEQ ID NO: 64215 - DNA, 1648 bp, Homo sapiens
tttacacatgttcctgtgtctgtagttcaggctaaacttggatttcctaaaggtgaaagatttctacaatctaaagaaaaaccagagtattaatttcctaaagagaaggatatataatacacaactttctgaaattggacaacccaataaacaagatgtttgtgtgtatgtgtatgtccataccgtctatcttagtgtagttttatggctagttacaaagacatttgagcctaatgttcattttattcagtctccaaaacaatagagtccttcagaaactatatcatcacacatgttataacataactgtgtattgtgttgtattgatgcaatataatgatgatgatgaatgagcatgtcactaaaattaatatataataaaactctgacttactatgtaggtgtttgttgaaagctccgagactttggattaccagatggcctttgcagactctcatttatggaaactcctggatcggcatgcaaatacaatcagattatttgttttgctacctgaacaatccccagtatcttattccaaaaggacagcataccagaaagctggaggcgattctggtaatgtggatgatgactgtgaaagagtcaaaggacctgtaggaagcctaaagtctgtggaagctattctagaagaaagcactgaaaaactcaaaagcttgtcactgcagcaacagcaggatggagataatggggacagcagcaaaagtactgagacaagtgactttgaaaacatcgaatcacctctcaatgagagggactcttcagcatcagtggataatagagaacttgaacagcatattcagacttctgatccagaaaattttcagtctgaagaacgatcagactcagatgtgaataatgacaggagtacaagttcagtggacagtgatattcttagctccagtcatagcagtgatactttgtgcaatgcagacaatgctcagatccctttggctaatggacttgactctcacagtatcacaagtagtagaagaacgaaagcaaatgaagggaaaaaagaaacatgggatacagcagaagaagactctggaactgatagtgaatatgatgagagtggcaagagtaggggagaaatgcagtacatgtatttcaaagctgaaccttatgctgcagatgaaggttctggggaaggacataaatgtatgtacttcaaaagaaaaacggtccttgaaacagcatcagtttttctctcagtttatttaaattttcagttaagtgttaggtacttagttctaagatcatttgtaactttctggattataagattattgacgcagttgtaatgaacactgttcttagacctgtgcagtaaattagatggtaattatatcagaactctgagataagaagtaaaaaaaaatagtattcaatgttaggaaggaattatgatataattactaagtaaaaaattagggaatatattaaaaagtaaataatattttttaaaagctgagaaactttagaaaatttgatattcaatgcccaggaaaatgttttatttctacatgctcttccctctctccatttccaatgcaaacaacaattcccttgccatacccccttaaaaagtccttaatcaactgggaaagtcagagaaagaaaaagcgct

SEQ ID NO: 64216 - DNA, 1021 bp, Homo sapiens
aaggattaataatagctttagtgaaaaaagaggataaagtgaagttgatttgtttatgattttagatagggataggagccaatagagaaacaaagattggaaatccagagaagagagtaattggtaatgcagtgttcaacaggagtcaggagggagtggaattaggagtactggtttgaagaagagaggaattatcttctgagactggagagaagagagtaaatatttcattctcaaaaactccttgggataattgggttttttcttgtgcccactttttaagagtaacacttgaagtaaatctttttgtttagtaaggcactaagggaaaagtcaaattatgaaccttcagaggaaatagaatgatgacctaatcttgcatattcttaggggtagagaagatgaagtccatgtcacagcttgcagttttgtcaagacggtggaagccttcagagatgaagttggatcccttccaggaggttgtattggaaagcagtagtgtggacgaattgcgagagaaggtaagttcattttaaacaaaacatgtatcttatgttgtatatgtatatcataatattaataaaatatataatatataaacaatacattcttcctgtgttgcgtaagagaaaacctaggaagtagtaccaaacactggtgcagcaacctttctttttggtttctgtcacaccttgtggcacactctggttgttcaggctcctgattctttgaaaaattactttggctcctggccattcagaagtggatcctcactttctgttacttggaccaattttgtcctaagtagttagaattagttagaagttactagagtgaattgctttatgtctaaaaaaaaccaaatgaagtcgaattgtgtagagaatccagatgaaggtctgttttgcattttaagatgggatatctaaggatctctggggaaagggtgaattagtcaatctgtggtactagcacaatgagcattttgaaaaagatttatttccatacttcatactaaaca

SEQ ID NO: 64217 - DNA, 1001 bp, Homo sapiens
agtagctgggactacaagcacatgccaccacgcccggctaattctttgtatttttagttgagacggggtttcaccatgtgcgaggatattcatggaagtatacagtagagctttgtaacttggaaaaactgaaaacagtctcagtgtccatcagtaggagataaaatgtatattgttcggttattgaagagaatgtggtcactttgtatcctattcctctaggaacagaattattatatagagatattaatctgattttacatgttttagaaacgtgggtgtagtttgtgtatgcataggaaaaggtctggaaggaatatactaacttggtatttctgggacatggtatttgcagggtggccgctttctgctttttcttaatttttttacatgaaacattttttaaactgagctatttctgtttgtggggtaaaaggaaaataacttttctaagcaagttaattttttaaatgaactcaaataaaatgttttattttacagcttagtgaaatcagtgggattcctttggatgatattgaatttgctaaggtaaagccctgagaatgttgcatctgtgtattgtgcatgataaacacagctagtggcatgatttattcattcattctttttctttttagggtagaggaacatttccctgtgatatttctgtccttgatattcatcaggatttagactggaatcctaaagtttctaccctgaatgtctggcctctttatatctgtgatgatggtgcggtcatattttataggtaacattcacaatgtttttgttgctgttagtaatacatttttggcgtgcatacatatcttattttccataaatatctttactgtttttatgatatggagcggcactaaccggtagaaatacagtgacagccaaacatgattataatttgaagttttctagtagccacattaaaaacaataaaaagaaacaggtgaaattaattttaaaaatattgtaaacccaatatatcc

SEQ ID NO: 64218 - DNA, 2030 bp, Homo sapiens
aaactagctttctgatttacctagctcctcatctataaaattgcaacaatgatgtctaccttgcaggattttatgagaattagagctgttgcatgtaaaataactggcacagtgcctattatagatgttcaataatgatagctgttactactgctaataacatggaagttattctccgccacttttagaagtaagcaatatgttcctgtgattaacaccttagaaatctgggacatctcagtatataaaataatattacttcaccagtaacagatttcattatcttgctgaggagcatcatagcattcaagcatacattaatagaggtggagggctctactggactaatatgtgattaatattttatatgtagggataaaacagaagaattaatggaattgacagatgagcaaagaaatgaactgatgaaaaaagaaagcagtcgactccagaagactggacatcgtgtaacatactcacctcgtaaagagaaagcactaaaaatatatctggatggagcaccaaataaagatctgactcaagactgactctgatagtgtagcattttccctgggggagttttggttttaattagatggttcactaccactgggtagtgccattttggccggacatggttggggtaacccagtgacaccagcactgattggactgccctacaccaatcagaagctcagtgcccaatgggccactgttttgactcggaatcatgttgtgcactatagtcaaatgtactgtaaagtgaaaagggatgtgcaaaaaaataaaaaaaaacaacaaaaaaagctaaccttctattagaaaaggggacaggggaatgagtaaacttcttttattgcggacaaatgtgcacatagccgctagtaaaactagcctcaaacaggatgctcatagcttaataataaaagctgtgcaaaggccatgaatgaatgaattttctgtttatttcactgatgcacacattacctcattgacaattcagaagtaaatccaacgtgtgttgactcttggaaagcagcaaaaacaggagctgaagaaaagaaattcttggaaccagccgtaacccagtaaggaattgtgaagttgtgtttttattttgtttcattttttgcagagtattaagaacattattctggaacatcagaacgtttcccttagaccgatcccagcaggtggcagctcagattgctgcagtgttgtaattataactgattgtacttaagttatggatgtagagaatatgtttcattcatttattcagcatgtaaataaaattgatcctgttgagttatcataattgcagttcaactatctgccatgattattcttttcacgtatcattcattctgtacatttgtgtacattgagaagtatagcaatctatgtaaatgtaatcctcagtgaggttcctcagtgctaggtcccataggattgtcgttgcccttgttaatgaggtttctctgttcagcggcttcaatttttttctctttgtacatctagttttgaagatttacttcaagtttgaatcttctagaatgcttgtaagtccagttttaatttttagagtcaatttgtagttacatgtagtttaacttttgggaaacgtcttaacattgttctgaataaacttgctaatgaggtcaggtcatggtacagactgatgcagtcaacatgatttcattgcagagtttattagtatcagcaagtttttgctttgctaaataaaagtactcaatgaacacaattctacataaattttgacataccatctaatttataaaaatcaataaaaaaggttttggtaaaactttttcatgccagatgctgtttacaacaatgaacatgccaataaaacatttgttcattctgttgtgttattttagtcattaaacttctgtggatgaagaatctgggttaagaatagatttgtcatctttaaatatgacattttgtaatgtgtattggatatctcatttctatgataaaggtatatttacagtaaagttctc

SEQ ID NO: 64219 - DNA, 1049 bp, Homo sapiens
cagcatcgtctttacagagacacggagctctttttctgaatagaaagcgataaagactagtttactatcaagggaatgcaggggactgtgctttgtcaccactgtctcattctatcattttgcaatttaatgatttttacggttggctctgaaatgcattacacactgcagaaactttctctcagagggaagagggagatttgccatggcaaaggacaaatcatatgctgtgtaaaccttaaaatactatacacaggagctaaattttcaggctttaaaatttccagatgaattcaattaaaagtaatcaccacacaccctatactttcctttcttcaaatgctggaatgtgtattaatatgtatggtaacccaaggaggctcacagaaagttacagagagtaacactatatgcctgtctagaaattgcacgcagtatgtgcaaggccctggtctgtttttacactcaaatgtgaaaggggaaaaggacaccgcagcatgttattgcacctgagcacatcggctgatggggatgtggtctgacgtctttgttgtgaggcttttgtgctgcacttgccgcctgccccacttcacaggtcagtggcagacgcactgatgctgtgctgcttttgtgctgggggtgaggaggaaagcagcatgtagaagctagagcatgggcaagccattgtgcattaataggacacttttatttatggaactgtgtccccacataggaagagtctggcccaattagccaaggcacccttttgatggcacacatcctctttaaaatccaactcgcagctacaaggcttagcatgtcctgcatgtgttgtctttccggtttcacattagaatttgatgttaaaaagtgagctggtttgtatctaggtgaacacacctagtttgaagctgtaagttcaatcatgtacaagcaactccaagatactggccaagacttctggaaggctgggtacagtggcccacacctgtagtcccagcactttggagggctgaggtgggaggatcacttgaagacaggagttcaag

SEQ ID NO: 64220 - DNA, 1023 bp, Homo sapiens
gatttcacagaaagaaaacctgggcacaggtcgggggatgacctggttggagtcactggtctcctaactcccagaccagaggtggctcaactgcacttcatcttcccaaagatgtgctggcttcggatgcacacgcctgctgaggagtggccagtagggaaagtgtgccttttttatgaagaccgcaggaagccagcccccctgtatccagatggcttctgcatcctcagccttcccagggcactgaggattttccccacgtcttttggtctgatggctggaagggaaccagtgtatggatgacagttaggaaggtggtgttgtcttggttagtagctgatggattttttcccttgtttttggcacagtgctcaaatgtcgggagctggccgacttttacagcaggctgggggtccagttggctgtgtgcaatggtagtgacccaccattcaagggagcctgggggtggggggaggaactgtgcagtgaagtggaaagggcactggctgtggagtctagaagccccactttgtcacctaccagctagggcacctcagtttccccatcttcaagtgaggtaacaatgtccatcatctctcccagccctggcagcacagaagcctctgaaacgaagacaaggttaactaaggcagggatggaagagaggccagcttccaaaggtgggaagagacagaagaaagcgaaacaaaaaccagccagccataggatatgatcatggtcctagagggaagtggtttagagtgttccagatctcaggctgtgtttggggtttgatgaaggattgaggcctgagcagagttgtagaatgaaaagggcaggggaagcagaactcacagggttgtgaattaggaaaaaagcctttgttctcaagtcaaaaaaaaaacttaatctatcattgcacagtggtacagccgtgctctggggagggcagcagccgtgcctgtgagcacatctgcacctgctggaggaccaggatacatgaggctgccacatgtgcatccc

SEQ ID NO: 64221 - DNA, 1093 bp, Homo sapiens
gtcaataagggaagggtataaaggctgagccccaggcacttccaggtatagaggacaggaagatgaggaggagcagcaagggtgcctgagcaactgcagggcaggagagagtcaagaaagtaggtcaactgtttcaaaggctgccctgactgcctctctacctctagtttcttttctctcttcttaccatctttgttattgctctggaaccaattgtcctaaagtagcacctccatcctattctaagctcataaaatccaaaggggaggaataaagtccaaactcttcagtctgccatccaagtccctccacgatctggctctttctttctctttctctctttctttctctactctcctggtttcaccttccccaccaacccctgaccctcacttcactggccactgccctgcaaaccacctccctctttctcagcatgccatttgttttctttctgcaaatcttcagcctcaattctccattcatggtctatctcctggagggatcctttcttgactgaagtcactaatctgtttcttctctaaattcctaaagtagtcagaggtaataccaaacaatccagcattcattgtatctgtttttcttcttctctagttcccagccaatttcctgaggtttgggaacatgagcctgtaatccccagagccatctcaccagtcctttacatatcttagatgctctgccacataacacttatggaaacctggaaggattaatataggattgggattttgagtatgggctcagaggctaggttcttcccctggttctattaccatggccaagtcatttaaccttcctgagctccagttttcctatctgccaaatggctatgaacatgcctaattcagggtgattgtaagaacgatgcaggatgcatttcttatagtatgcttagcacacttcatgtacattataagcaggcaataagcggtagctttgttttcattattgctattattaatactattattattcttggtcttcccaacagagatgcacaggcaacaacaaagatgggactgtgttgacctgttcactccatactttcagatctcaagtgaggtgttcg

SEQ ID NO: 64222 - DNA, 1052 bp, Homo sapiens
aggcagtgctgagaatataactgacctccctgcctttcctcccacaaagcccaggaagtcctttgtatcctatagcccctatctgaggggccaagctgggggccccagcaggggatggaacatcaggcaaacaatggcttattgtcctgagctgatacacctgaacctttcttggaagcaggggctaaatttcttggcatttgtggcctcctggaaatggcagacagtatgcttagaagcagaatcctaatccctcccaggttgggccagagtagaggccagggtggaagggggagccaggcctgacagctgctcccaagaagtggcaggcttggtaaactctgatgaggtcccatctgtctaagttcaagggatcagacacccccagcaagcctgcatccatgtcctctgcaggccccaaagccacacacatggtctggagtgaccattccaaaggtgctgtaatgttgggcttcctaatcagaaagggagcaaggagctcctgggctttgtttgcaccagtctgccaggcactcctttccctgctcagccctatttagtgcctgtgctttcgctggaagccagtgagttagccttaggccctgaggatgggcactgctaccaggaataggggagctgtggtgagcccgtcatctgctttgcagttccctggactccctgctttatgtttgaggctttctcttatcagtttagatgtgacctcccaagggcagtcttgggttttgatggaagtcatcatttcacccacacacaagttactgttatttggtgtggtgatggatatcaacccctgcccagaggccctgcagcctccattgctgctctctctggccacatctcccagaggctgggttcagaagctggggaggacctagagcttccctcactctacgatcctgggatcaggagcagtgtttctagaatctcatgctatgtgtatttacctcccacaagaagagactgcagcgataccagggtgggcttccagagcaggcttccagagctgggggtgaggggtgaaggggagagca

SEQ ID NO: 64223 - DNA, 1108 bp, Homo sapiens
cttagctgctccgctgccacacatatgtggtcaaaacagaaaccaatttcacactgccctgggaaaggaatgggtctgacctccaggggaagctctaccatatcttgactggcagggaaggctgggagtggaagctatttatggactgatccaaaggacatatgcatgagtaagggtaaaaatgagcatgcaggtccacctgtgttcttactctgggtatctagaagagtcctcagctctccctactccacgctgcctagacatacacagctgcagggtctggctgaacaatcaaggggccgccagagaaaggccatctacggtgcgcagtgtatctggagttgctgggcccaagatagctctgtggagttatcactagagatgcctctggattaactaagaggtgtgcctgggtgtgggtgaggagtcagaacctttgagagctttgagatgacagtttctatggggcgggaagaaggaggtgcatttctacaaacacttccctgaaatccttgggaaaaacagaggcatggccgtggccaactctgtgggaactggcgcctctgtccttgttggcactgttctcagtccgatgacttgcattgtgttttctccaatttttgctgggattttaatgttcagcatggtgggaggaacccttgattccttttgtttgagtatagaaagtaaatttttgaggtcatgatgtgaacggccatgttattgtgattatcttcagctcaggataggctgagatgctttgtggagtgttccatgaagcccgagtcggaatctctgactgtcgtgtacagccataaggagactggtttgaattactgtggcgagacagggcgtgcctgtcagaaatctgagatgtttgtacgctctgagatgttgaacctttctggtgggcagcaccgacacccaggggtggacccccgaggatgaatgcctctaggcctccgcaacatattcaagaatgaatgggagacgctagagtaaaatgggggcagagaggatatcagggagcaagatgcaaactgtgtgcatccactctcgtaaacaagtagctggtcacaaccagaaaggttcatctctcctaagcaaa

SEQ ID NO: 64224 - DNA, 1109 bp, Homo sapiens
ggcatagctgagcttgccttggccacccgcagccgcctcatcctgctaggccaccctggactccaccactctctcccctcatccccaagcccagtcatagcagtgcctttaacccaaagctgctattgcatggaagtcagatctccctccccttctgcctcttccatgcctcactcttacatgctttgtcttatcacgtagatatttgtgaacatgccttatctcccttgtgagacagaaagagatccttgaaggcagggattgtggtggcaggttcatccccaaacccctagcacaggcctggatctgaggaggacacagcatctattggaaatacaagcatttgggcacacagctcataggcacacaagaagcaaggcatggagctgggtctttgccacagtcattctatgtaataagcctccccagtctcagtggcatatggcacctattttcttgctcaggagtctgtgggttgactgagtagctctgcttcaggctgtaggtctaagggcgagggaggccccaagggattgactgggttggctccaggctatagcttggctccaggtctgttccatgtgccctcaatcagggaccctgactgaaggggtagtggccacctgcgacaagttcttttcatgtaacctagcaggaacatgagtgacagccaactggcaggcccacttaaagcctctgctcacgtcccatccacgagttaccacaggtcaaagcaagccttgccgccaagcctcacgtccatggggcagggctatacaccccaccaactccagcaggaaggactgcaaagtcacagcgtaaagcgcaactctagtatagggagggagaaaagaactgggggcactttccagccaaaactcccagcacaaaggtcatgcgcaacagtgtccattcatggttctgttgtgctcacagacacgcagactgatccccgtcctctgacagaatacatgaccttgtgctggtgtcgtaacctctctgtgcttgagttttctcagcaggaaaatgggggtaataacaacgcttttctgagaggatcgggtgagatttaatagacttaatacatgtcaaatgctcaaacaattatt

SEQ ID NO: 64225 - DNA, 1025 bp, Homo sapiens
tgaggatactagtttacactggggttgcttgtccattgaatcagaatcataaacgaaatgaaactcctttctccaaaagggaagagctctgcaaaggagctataatatgcccaatatctgattataaaatcaaaataaaattctttttacaattaacgtaaaatttttcctactttgctttgggttgggaaattactactatagttgagtagtgactcttttttcctcattttctttctcacctgtctcttgaaaaatattgctcacacatgttaaagaatttatattaaaagtgaattccaataaaaggcctattaaattagcctgattcattaactctttttgaaaataatgtgcatgtttaggacagtagtatctttcagtttttatttcatgagataaatgtgttgggaaatggagagagtacaaatagatgtgaatgtcattttatctaattgaagatgaatgctgaatttgggagctgtagaatttagtttaacttgccttgaaagagatttatgatcatgggatatgatgctttgtctcccaatggctctgccgttaaccgttcacctcttgtctttgtgaatccaaagaggtaacttgcaaggtggatggggcaagaaacaaggatgttgaagtttgtttggcaagtcaacagaaccaaaccaaaccaaaaaataactgcttatctgggcctgtgcaagttaaagtaatttgacaaagaaccacgttctgtcatgtgtacgttatttaggctcttgcgtcatttttttctgtatcaagattttcgagaatattttaaaaagtggagagctgttctagcacagttggtgctgcattgttgaagccaggcatagccattgtatttgaacctgttttctatcatgacctctgaaaatccattcccagaaaactgattgcttaggtcctgtggttacacccaaaggagatggtggctagaaatgagggctctgtcgtagccgtggtactgaaagatgcttccttgatggaatgttgccaga

SEQ ID NO: 64226 - DNA, 1150 bp, Homo sapiens
actcctgctaggagtgcacacgtgcattcgtgagcagaggaggcacgcttctcttagtagtcttggtacggatgattgctttctgccccttactgactgaagtattccatttcaccagagctggcaggtcaccactgtgttgcagataatctcctgcatatgtcccctgggaacactgagaatgccatctgtggcccttttgctcgcacttttctggtagtttataggcaagtggatgagtaggaatggtgggctctcatgcccccttcctgcctctgctctgagctcctctatccaaacccccacctagtgggggccatgccctggtctagtgggcttgagaccctgtagaccatgatataacaagaggggtaagaccttcctgaacctcaaggcacgtgtagccaaccagggaagagaaaagttggagccagttagcaaaatgaaatgacagtcatgggaactgttacgaaagaggtacaaggaagagtctgtgaggactgaggaggtgataccacttctgtcttgggggaggaacagtttgatggagacagtggggctcaaccataaggaccaggtagggctttggtgtatggagactgggagagaagtgtgtgcatgccagacagaatgacagcatgagcaaaagtccccccggggaagaatggggaccctgtctcatgactccttccagactcgttatctattgactctagccaacaaaggtcaactcctgttctcatttattaccaccttgtcctaagcccctggtcaactgagacctgggggaggacctctagcaaggctggtgtccccctggggctctctctttggcaaggccactccagccttcctaatgccattaggaatggactcttcttgttctgtgggcagatgatgagcaccctgcttctgggaggacagacacagtgagaaagttccgaccatcattttgcttccactttcttcaaccacttaatatgaaacttcctggttacagattggaagtacttctgctattttagaattgggatatttctttcccttgggacagataattttcccaatataaatcaatctatgggaatattttggaatataggtgatatttttatgcaattattaagttgctgaatgtgaaactaacaga

SEQ ID NO: 64227 - DNA, 1922 bp, Homo sapiens
ggtggggtggccgggcccagggaccgggagccggggagggagccgggcaccgagcagagggcgggggaagcggcgccgaagtttgcctcggactcgccgggcgctgcggtggctccctgggccgaggtaagttggcgcgcggggcggatgctggggtgcggggggcgcacggggcagcggggggccggcggcgcgtccctcgcgggccgctctttctttgcgggctctgctttgtgtgcgacggcgggcgggcacgcggagggccgcggccgggcccccacacccgcctccccgcgccccctccgaggtgagcggccgggcgccgccgcgcgacttgccaggacgccaagttgggccgcgcgctgggagcccgcgcggcaacaggcggcccccggccggccgcgccgcgccccccgcgcgccccctctcccgccgcctgcacgcgcacacacgcacacaccctcgggcgccttggacggggtgcgctggggagccagaagttcggagcgagcgcgggcgggcagagccgccgcctcggagcccggagccggcctgcacccccctgctttcgccgccgccccccggcgccgggtacccccgaggccggcccgggtctgcgcagacttgtgccgctggcggggggttcgctccttcttctcaaagatgaaaaagggcacggtcgtctttgccgcttctccaggactgttgctgccgctgccgccgccgcttcattgcacattcaagtggaaaattttcaggagtcagcagaaacattgtgtccaaaaaagactgagtcgcagttaccaccaaacccaggaggagactctccctggaaaacttcccttccctttcggtaggaaatactgggggatttgtttgttgattggaagagaaatgatccccgggggggagaaaatctgggtacacttctagtctttgttcgtaacagcaacacttgttttcaaaagtccagagtcccgctttaaagaaagtttaacttctgtgacttttcttctttttaaaaaaataacttttgtatttttaaaaaatcaaagcaatatttttaatgagtcgaaaacaatgaggactcacacctcccctctcatgaaaataaatgaaatccagatcagaattttctttgcttttaaattgccttttttaaaagatttatttaaagttggatagtgtcactatataaaaatatttatgaaacaatgaaataccagccaccagcgtttctcaggaggcttgttaacttcttagaagcaagtggcttcctgtgatttgcagaaatgaaaattgacctcagtgagccctggaaacttagagacagatgatgttccaggagcagggaatgtaaaaaggccatgtttaaaaacagtgcgttggaaggagcccaggtcttgggatagaaaggtctgttaagcctgccacatttcaaaatagtaaaaagaaatactaaaaacactacacgtattgcaaaggagcagaaccttatcagttcacaacaaccacagatttctttctccccgctttccaccttggttgtttttggaagttcaggtggtctgatggcttggggtgcgctggttgcctgcaatggttacctgagtagacatatccctcccttcagggagatgtgatccactgtgtagtcacagccgggagtgggctcctttctctgcaggctgcagtgaatcttgctggtcttctacggataggggcttctctgaggcacagattggggaacagtcttcaggctacgcccggtgcttcaccctttcactgttgggtttgtgccccgcttctgtaaacagcagggtcttcgggtccaagcatatctgaatgcttacaaggactagacttaaatccaacttccttaggaatcttttcctctttagaaggaaatagtagaactaatt

SEQ ID NO: 64228 - DNA, 3149 bp, Homo sapiens
agtagtgaggttttgaattgttgaatttttggggaaaggcttatttttctaatctcactgtttccataaatggtcacagatatttttctttagtgtttctttgtgcaactctatgttgaactctcaggtttcaggttttaaacagttaacaattcttttatttattgttggtataaaaaatgaactgatgataagctatatccattacgggttcttgctgatggtatcaaaatgccaaggtagactattttatttttactttaatggtaaatattatttgatctgcagttttaggggaatattagaacttttttttttaaaaacgagcttgaaacaaaaccagtatgacactttgctttgacaatatgggtaaagaaaattatagggaagaatctgtaaattcctcctctgtgtgatcctttataaagtaatgaactgcggggaacatgcctgagagagattattggagggttggagggttttttttcttttcttttcccaaaacaaaaaccaggactcaccatgacatatacttaattaaatttaatttaaagggggaggacatcccaatttagtttgagccagactgataggaatttctcactgagaggcttttccttgccttgtggtacaatgtgtgcccaggccccagcagcaaactaattacacataagggcgggtttgggagggcagcctggggggagtcggcttcctcctccctttcccatttcctctctccccccacttactttatacagcaggaattatatattagtatactcacttgggagactggagtccccttttatttagaaaaaggaacaaataagtcataaggaaaaaaatgttcgagtttttttccctgcttgagcttcagcagtttataaacaattttgtgttttgttggttcttagaatacagagcaacaattatgagggcatttcttaacgggaacgtttgggaagaatatacttttatcatcggtgtttagatcatatttgtccttacattttcagcagaaaagtatataatacgaacagtttaaagcatgtagatcccaaatattaaatagacttttgaagaaatgagctgtgacattaacaatattttaaggttggttgcttcagaaatggattgatctctcatacgtggtggtcatacaagagcctgggcatttgtgggattacttttctctctaatctcatgtgttatgtgttaattgtgagcataattatgctgcctgcaaatgaaaattgtgtcttatcactcaaggttggtgcaaataactgtatgtatgatctggtggacttaaaaatgaccatattcacatacagacagtaggtggataacacttttaagctccattttaggcacttgtacccagtagagagattgtgaaagggaaaataaataaatatgaaagctgtgtttagaggtcgaatctgtttagtggtaaaactttagggtctgttttctccaaagactgaagaatgtggccaaaagaagtgtccagatttctctgtagaactgcaagaaaatgcaagccaaccttgttaaatgcgagcgttacagctgcccctttggagtttagtgactggaactgcaaactgctaatgtccaacttttggactcagccagaaaaatatattgtaagcttattcccctttgacaaacctaggctgtgctgctgctgggctgcttggggacagattgatggctggcacaatcttttatagctgcatggtgctttttcttattttataataaggcatagattaccttgtggtatttaagttgcatctagagttgtgtttgaaccacatcagtgatacattttattctttcatattcataaaagtgataaaatcaggtaattcaggtccatcctacgcacttcatattcatggttgagctttttgacagacaccttatttagaccttgttgtattgcaattactttgtacctctgaaatcagggaagttctggggcttccctcttcttgggatagtttgtggagtgctagtatatttggatctaaatacttggagtgtttttctgtgggtttttattttttgtttcaaagctgtgaactcttgagtgtcctcaatctgtaagattctcattatgagcttcgtggtccatatttgaatttggaattgaaatttgaccattttttcaaatacattccagttttgtagtggtacagaatagggtagctttgaaatatgtgttttattttagtcaaagtaaaaatgggatgccctggtgggtgggttttcaggatgatgtttcttacaagggtaggttactcttagcttttaaattctcctttggtccactgattttttgcatagttgagaggattctcaaaaaaatagtttccaatagtccgggagtcttggctaactgtgaaactcactcgtttcctcttcttgattggataatggtagtagtggtggtggtggtggggagtagggggaaggtcctcgtaaaaacctatcttttttctacctttgtggcaggccaagggaagggtgtgttacatgcactacacccaccccgccttgtttaaaactggtctttactatcctaatgcaatgctttctatcctttttcgtgattcacatttgttttgaaggctctgtcctaggatttcattagcagttttaatttgcaggcatgggaccctggaaaatgggcttaaaagaaaaagctggcttattgatgaacaagttaagcatccgtcatctctaatgggaaattctggttgcttttaggcatctgacaggtttagatgtatgtgtaaagtgactgaaacactcttgactgggaatatacaacactgttgttcttactgatacataaactgaaaaactgctgctaatggtgggaaatgttaattatgtgagaacatattgaacttatattctctggcatgaacttttttaaaaaaatgcatcaactgtgctgcttttttttttaataggcacagctttctaattatcataattcagttcagctctgctcttggatggtgttcaagtgcaatctcaatttaacttgaaaggggatttttttttttaaacttggaatgtttaagaaaatttgaaaagttcatccaagaatgttgtctgcttaggtgtgagta

SEQ ID NO: 64229 - DNA, 1474 bp, Homo sapiens
aatcaggttaaatttggccacttcaaattctgaatgtgattttcttccctcaatatttgtgaggcagtgtacctaggaacataggctgaatctttatggaattcactaagatgttcttcattggttttaaagataagcctgcacaaaactaaggtctcacctttcgatccaggggaagcaataaaatgaaccagaaccaccttctctgctcggcattcatttacctcgtgggagtgtagcagttgtttccagatgtgattgtagaggtgtgtgtcacggttactggtgaggggcttgagaatggagttctgtctggctgcttatagaggttttgctttctgagtagcagggatgctcctagaggtcgttgggtggtatgcctggtgttgggaaatgaggggtaggaagggtaatcctgacggctttctggagatgaactgtggataaaccaccctgttgttcattttttccttccttgtctcttcccttcaccttgggcactttgaaatccagatgctcctggttttcacggagctactgcttgccactgagcgtttaaacatttatgggtgctactgtgtgccagggatttagtaattaggaaaaggtggctaatgaacagcgatcagtaaaactcccctgcccggcagagtttacagattagcaaggaaaacaggcatgtacagaggtcatggcaatccagtgggaaagttgtgtgtatggtatttcgtgagttccaaggtaacacatttttaacatgcttgaacatttttgaaattgggatgtgtttgacaatcatggctggccaggtggtggtaatgacccttgatgttgcatgcgctcaccaaagcctgtggagtgaatgcagcggagaggaaaaaaatcccagagtcagtagtgagcattcctaagaatactcttgttgttacagagggtggtagtgtatggacactgatcactctgagaagttactttagcttatgttacccgatttatttagcttgtattttcctttttatgtaggcataagattgatagagagtaaaaagtttcaatatgtataaaataatatttctaagtgataagcattgtgacatcatttgtttcacagtagtacgtctgaaataaaatcctgctgcatcttatcggcagtcatgtcttagggttagtgaaatgttgaaacaacacgtttgcatctctagtcctaaggatctgggaggttatacattgtggatgggtgttgccttgagggttgctttgagggagtggggttttttacacgtttatattttttaggagcatggatttccttatgtaacatcagaataaaggggaaacacactcactggggtaagccctcatgatacatccgaagagctgtgttgccctgtggtaggaactgaggagggctttgcggaggaagtgatgttggagttgggctttgaaggaacagggggattttttccagatgcca

SEQ ID NO: 64230 - DNA, 1680 bp, Homo sapiens
tctgcaagcctcggtgtccccatctataaatttcagttgtgcccactatataccagacacatggtgtggtgaatgctcagtaaatagcaacttcaaatgtcatgttgcataatagatctttaaggattttctgccaagtcaccctggacagtgacccttgaggaacacccaaggctgaggcatttacttagaatctgagccggattcctggtctcaggcaaacagatagaaatctaggagaggctgaggcaagcccataaagcccttgaccattaatcgctttgaaccacacgtcccttattcataaagtggaggaaatccatcagtaaatacgtaatatttgaggtcattccttacccagtatgaattaaatggaaatgcttcaaaaactggatagcatggtgcaacttcatctgtctaaaagaaaaccttttccttagcttcttgcttgaaagccacactcctaacattggggttgggttgtaaaagttcttttgtaagtggttgaatggaactcatcttttcatagcaaaacaatgcttagggtcttcggccttcttgtaaaaccattgcataatcccccctggggtgcagagggcattcagcttcaggtgcggagaagaaaggtacttttgctgccctcattgcacctcttaatacctgctttgggctagctgcttagcttctctgtgcccgcagtttccccatctggaaaatggggatgatgttatctacttggaagagttggagtaaagtttagattaggtaagtgctggctcggtaggctagagctgtaggtgtggctgctgttaaaacctaggccatttgtttctctcagtactgcaagctccagagataaatctttgcccctctcctaagactcgcttcctctgggccttaaatgtcactcaaataataattcacactcatgtgaatgaatggttgcccatctctttagccagtgtatttgcatgtttaagaggatggttgtgaattccagtgcctaactccaggtacttcctgggtagatgagctgagttccttctggaagctggtgatagaaccttgtgttttcgaagtcagctggcttaagctggtcctgctctgctcacattcccagctacacttctgggtgtgtcaatgtccctgtgtttttagatctgggccactcctggtgactggtctgagcagttaagattgctttgtgtgagcctgggccagggaccacctgcattttattgacatcttttccttttgtctcttaagcagtgtatagacatgtgtgctaattaatctggtttcccagttctttaaaaaaattaaaatgaagacttattgagggaggagagtagtctggttgaggagagagacttagattcaggcaggctgacagtggatgaggggagaaaatatatttaaaagcacttattcacaaccctgggagtctactaaaattactgaattacatacttcaaaagggtgaactttatggtatgtgaatcatatctcataaagaaataaaaccctggatctagtcaccacacagaacagcatcttgtcatgctcaccatggtatccccagcactctggctgtcatgtttttcggtgatcgagtgattaaaaactgataatcagacctaataagaagagtttctaccagttggttttagagaggagcca

SEQ ID NO: 64231 - DNA, 3415 bp, Homo sapiens
gcacctaaatagataagccagagaacattgagtggaattttagaaattttaaaagaaattttagtacttttagaactttgcctaaaaccaaaagtaattggaatgacactgctcagttcctggtggttcttttgacaccactgtttagttattttgtgatgtgccttaggcagtgacttcgggcaggagtggaggtgttcagtccagtgtttcagctctgaccaaaacaatggcgtctagactttgttgttgagaactctggtggagaactgttaccttgttggggtggttcactgggagaaggcatttgagggtcctccaagtgctgggtcttggtctctccacttctagctcgtgtggaaggaagtcctggttgggaatcctctgctatggctcttcctgtgaccttaggtaaatcatttgaaaatctttggtttatctttctgggaagatgatgctgtactgcctcttgcccctctagctgttttttgtgctgtgcttttgattaaagagagaaaatgtgtgagcccttaggcagaaaggtcctggaaaacttatcttatcataccatccataaccctcaaagacaggttttgtggaggaggagcagtactgctgagttcacttttagttgtgctcattcctgggcttcttggataggaagggaaggctgacaggccaggttctgtctcaagcccatataagagttgagttgcaattgtagttgaagaaggtgaagctcagagaagtttagtgacctacccaacatcacacagctgcactttaaaaccagttctttatctgtgtgactccacagctgtcaggctaacaaaggactgcacatcaagtcacctatccggttttcttgtggcatttgaagggagttaagatagattgtgacattgaaacaaaggtaggcttctcatttagtgtatttgcccagaaaaatgaggacacaatacttgtgttttcttggtggcccattttactccctcttacaaacatatggctaaggtcttgaaaagttgggtgtgtctcagttgagcctttcagagattacttatcctgccccattcacctctcccctgtggtttcagtcctccaggactgtggggaccagtacccctcacccccgtgactggttatactcaccgttgagagagagggggcaggactcctccgggccaggctaatccaaactattctctaggtgggtgtagtgggtagggggactgctgtagtttggaagtttggaactggacctgccagtttatctggttttgctttggaatgtgctgtgttggcaggcaggcagaataagttagccccctccatcaccctgtaggcctggatatggaaatggcctcatgctggggatagggtttaggcagatgaccttgacttcactttttgagaatgggagtgcttgggaacctgctgagatggggtgaatttctctcttcccacccaggtgaccagcttagcctgtgataggtgatgggcagtgatgggggcagctggcagaagagagttaactgtgcttgcccagagcccttcataatcaggactctgaaaaagacactgggtctttgaaatggggttgtttacagggttgatacccctctttgacaccttggttggtttttggtgggaggcagtggggctggttgatacaatcttttcctcctgtctacctgtttctggtgtctctcagctaaaaggtgtgtgatcactgattgccagtttttaggactctgtgctcatgactttccccgcttcccaacttgcttgtaccttcttagtcttcatgcatttcttaaattcttcctaggtggttctgttggctgttttggtgttgtcctaactgtgcagttcttactagtgcttggtgtattcagtaaggtagccggaaagcatggcttggaggtcagatcttggttgcagccccagttctgcctattggctgtgtgattttgagtaagtgattaactctatctcggcttcttgtttcctcctctgcaaaatggagaaaataatagtacttctccacatgtgagtttaaatgaaatatagcgaatgacccactgtcagcctctctgttggttcccccaacccattgagaagtctcttgcttcctccactctccagtttctcagttcagggtcctgaggttttcctcccgaataacataggctggtctgactgggggtcatttatttgccttttcgtcttcctcctttgggtttagttttaagctttgccccagcttcccctcttgctggatttcctgctttgttgtttttctgtttttttttttgttgttgtttatttgtttgttttgtttttaaatttttagtttgacaggctatttcccttttgttttcatattttctgttgtctctccctcctccctggaaaacacatccacccttcctgcctccacttttcaccctttctcctctgctcttatcactttaagatctcagagactctaccctgcagttcactacatttcaccaaaaatggtcatcagaaaagcaccacttctgctctctttaacactggattgaatctgttggcttatagagttcccagcactcttgatagttgttactattttggaataacataactcattctcatccgcattatgcttatgaacttgtggaatgacacaggtttccttcacttatctgtttgaccttgggcaacctctttatccttctgaagcacagtttcctaacccctgaaatggacatagaagtgccttccttatgggttatagtgcaggttcagtgagggtgagcacagtgctgactcgcggagaagtgtctcataaatgttagctgctgctgctaattatgattgtgactaccatcatccagcagctgtgaagtagagtgccaagtacctcttctgtagcatctgtctctctttttgaaggagggggtcaggagcagaatcttatttttattttagattttcagtgtctttgctttgggaaagtttagtacagtagagggcaattgaacccctgtgcacccattatcacccagcagcaatcatcacctcatggctattcttgtaaactcctggctcctctcccaccagattatttggaagcaatcctagttgtcataccgtttcatctgtaaattagtacatattttaaaaatatgactctttttaaaaaaaaacaaccaactattgataccgtgatcacaccagcactgtaataactccttaatgttggccgggcacggtggctcactcctgtaatcccagcactttgggaggccgaggtgggcggatcatgaggtcaggagatcgagaccatcctggctaacatagtgaaaccccgtctctactaaaaaatacaaaaaattagccaggcgtggtggcggccgcctgtagt

SEQ ID NO: 64232 - DNA, 7100 bp, Homo sapiens
acacaatgtacagtgtcactttttctgtgatgttagtgccattgattgatgatctctgcctgtatctattatttcatgtagtttttgcaaactggtggttctctgatactctagttctgtttttggagacaggtctcactcactgtgtcacccaagctagagtgcagtgatgcgatcccggcttgccgtagccttgacttcccgggctcaggtgatcctctgacctcagcctcctaaatagctgggactgtcagtgcgccaccatgcctggctagttttttagttttttgtagagacagggtttcatcactcaggctggtctgaaactcctgggctcaagcgatctgctcacctcggcttcccaaattgctgagattacaggcgtgagccatctcacccaacccattcctctttttatggagaaggtttctcttagcaactatatggttaacctagcatatagtttgtaaaggaaagatagtttttttttgttttgcatatcattaggcaatcactgattttaaattattgaatgcgtttcagtccattgcagttcctcctcttactgatgctcaaattgtttcatctttggccagtgggaatttctttagttggctcctgtggccttttgatgtgaccctattaatagtcttttatagtttccttgctgtccaacctcttgtgtattctgggagatagaatgaaccatttctgcagagtttgggttccttttagtgagaaatggagtttctaggctatgatgtgtgtgctaggttctctgctttttttctcctcccactccttcagttgaataatctgctcacctttggaaatggatcctgcctgccatgtcaactctaatcgtggtaaaagctttccttgcacacttgctcatgcctggcctctttggctctcatttgccactttcatgcttgtgcttgtcatcttgtcctttcctcccttaagaaaaagaccaaactgaagaattaccatggatggtttgtggtttgacttgcctcctgaaggccaaagctcatgttaatgtaggcttcacagaagtctttagtcattgccttcatcatgtctgcctgatagtttgttctattccttgtatacataaccaggacatgagagattccttatcttattaccaccgtgagccattcaggctgcaagctgtatttcgatggtattgttgggtacgtttgtactcatctgtttcaataaatattgattgaattaagctttgtacttcttctccaaagtgtttaaaatagaatgtatttaatgtcctagtcatttaaagaatttatcactagtctattatttttataagcttaaataagttaaagatttgtagttttagatagatttatgcattggatccctagttgtaacatagctattgttttagtgctgcgggcctatagtagtaggcctgcaagtctaagatgagtgttttttatttaacaagtctgctattaaacttatttttagtattataatttctgtctttgcttcttggaaattgttttatgcccatgttggtgcatcatagactatgcacttaggccaaccaccccccagtccccccagcaaagcagggctcattttaaagacacgctctaatgctttcttcagagtttccattcagacctacagttttagcttcagtaatacttttttgttttgttggtgaaacaaagctgtatgcgttcacagtgcagccaacacagtctcatgacggcacaagtgaatagtcctgaaattatcatcattctccacaccactgagaagttaaccagcatcctggcctgggaaattttggatacacatttaatgcccctcacccaccaccccggcttttttttctttttaaagccgcaagcttaatgtaatggttcctctgtattaaaggaaagtacagtattgtaggggtttatttcccccccgcccccgctttcctccgtgggcactgagagtagggggaagagccccgtaattcacaaggcaggcttctgtgccccgcggtaaactcagtttcacaaagggaattttcattatggtcctgtggctccctaacatagtggaggcttcaggaggcaagtggtaaaagctaccaaagaaaaagctggactggagccactgacgtcatgtcagtaaatctgctggaggagcccagccatgcagcgcctgccagccggcccctgcactttggccttgcctggtcaactgttcttactgcttcctccacccccaccccacagaacagcctgtgttttttgtgttcttttcccccttttccttctgtgcaactgggctgtgttgaaacccataaaggcttttgaaaaccacccctactggtcctgtgcttaatgtcttgtgtggggatagtggggagaacccaacaatccatgaatgagggaggctttaaaagttttttctagtggggacctctttgtgatgaataaatccacagggaacatcatggaaagcagccagaggtgcgagcccctggtgcttagtacttttaaagaacttcgcttttaagtcctgggctgtgtgcacatgtgtgtgtgcgtgtgtgcatgcgcacagtaaaggacagagaaggccagtcagcacatgggtggaaatacagaatttcagccttctagcagaggatgatttaagagaatgagttccaatgcgagtcctttattacccattaatcattggtctgctcactctgaactctggtttgcaactggaacagttaaatcttaagctacatgcttctgtacatcctggatatttagagtcacaaccccagatgggcctgaattaaaatattgctgtgctaaatctatttttacatctaggggaatgacatctaaaaataaaccttatcccacctgttatccacttttgggaagttgaaacgctgttaagtcgcagcccatggattaagctttgatgacggcttcccatgtgatgcctgcattccacttttcctgccactggcatgatgttttcattgtttcggtaaccgttgtcctcctgtttattttgctgtgaatattcatttgcaaataagagtgaagcataggttcagactggttttgattttcctgaatcttagggtcagaaacatattaaaagcagtatcttatccatgaatcatgagatgagtcagttcctgaaaccactacaagcctcatagttcttggctacaagcaaaggcaggaaatccaggcttcaataacttcctttcccagtcctggctatagccgcgttggtggttaggttctgctgcctgcctttgtaagcggtaggaagatgtatgtctgaggaacaaaggcacttgagtcaatttactgaaactgtttataatttgtggtcttgatctgaatgtcaggctgcgttggcacaccctgctctgctgtgcggcccggcacaactcagccaggaaaggcggcaggctgagtccggggaagtgccccagcaaacacatggcaaatgtttcaaggggctttagtgttccagtgaatcctaaaactaggggacatgcaagccgacactaggcagaaagctctggattccatatgtatagttgaagtatcgactctttgtttgttcttcacttgagagaaaggagagaaaaaagagagagaggggagagagacgagagaacaaactaacacactcgccagcctgccaagctctggcctgtctcttgcttttacttgcagtttacttccttatatacagggtcctctttttttttttttccttttgcagtgtttcacgccagtcttcctgacttcagaatcagttttataactgttttattaaatattttaaagagtaagggagaaacacgaagttgtctcccaatgttgggtctgctgtgactcgtatttatttttctcctttatgagcagtgcccactttgtgtacgtacccaagtcagagcagagttgggttggtgtttctgtgtgaagttgggactcactgttgctttgtgctttacttgtgaatttatgagctttttcaatcttgagaaaaattaaaattgagtgtgactcattttcatttaccaactcttaccttctttttctacgctaattggtgttagctagcgtgggatttgagaaaatgggactgaaatgagacccttctcccccctactgtaggtttatatggagtcattggaagttctgatagaagtctaaaaatagcatgggtagacaaaccctgtgaaaagacactgaggaagatggaaaaaaatttgagatgatgagcagttagatattgatgctaccttttaaattgagcttgtttccaattcatagctggcaatagctcagaaaggtcaaattctatttcagcctttgtaaagaataaaataaaagcaaatgcaaaagtttgcctggctttttaatcaagtgtggctaattcagcgcacagccaggctggcgagggccacttcgttcttacttgtcgtttgtattttgtgtttgggtaattttctgttcaacttcaggcctcactaaaaggctctgataagctgttgagaaagtcgggctcattttgattttagaggcttgactgagagtcataatttctggctgtggttctccagatttcaggctggtacaaaaactccttagtcttaggtgagtttctttggaaatcactgtgaaaatatattactctcattaacatgtaaatagtcactgtctaaacttggaggagatttttccttatgttaagagaggtacaaatccagttatttttatttgtccttcattgatctgacagttaacttctttttcatgtagatttcaggctgggattagagactgaatcttgaattgcttatcgtctctagaccaagttgttcggggccagggattgattaattaattaaaatcaatgtaaatggatttgtaagcctcctgtaacagattatcctattagcaaccacacagagcacagcccatgatctgtgaggaatgtttgttgccttaagtgaaatggacccagactgatggactctttggggttactttatgaaaaacccagtggcttttgtaaggaaggggcctcacttaacctttacactgaacagatatttcctatagatggcagattattttattttctgagcctgccccagaaggcttgagttctgtttgtgtgttgtgtgagtttctactgtgcctgtgtctccccaacccttgcattcatgccgtccaagaccttgccatattttagccaggttctgccccctttcaggtgagattcctgctaagaactcttctctgaagaaaaaaggaggaaccagaaatacattcctatttgatagcaacaaagtggttttttcctccaacccaggcaaccaacaagcaagcaagctacaaagaagacagttgcttgttatttgaggctctgactgtacagctgtgcctccttagagtggttaagaagacaagatgatactttaggaaaactttgtggatttaacaaaggtcggagttcattcagtggctgtcatgtacattgtgtgtgtttttttgttttgtttttgtttcgtaattgtgttggacaggtagatactttctatagtaggaccagctcacccaccttttcttggatcaaagtggggctatctgagccaagttgagttaaactctgtctcctgcctcttttgggattgagatagcaatcccagtttgtctttgatgctcacactgtagttcagggagaccctaactggggagtagatgtttgacccatgggtatagagaagtgtggaataaagccactttgcagagagacaaggaaacacagttgtgctgaggacgagacaagagaccaagggaatagtctcatttcctgatggttttctatttcctggtttccatctcttgtgagggttggctgcagtttctgattcaggggtcttcagatggacgccttggccttataatgaactcgtattcccttaccgttttttcctaccttaggttagtgggagtgggtttctgttaattgaaaccaaatggtgtttggccgactagtttgttgggaaatacaccctgcgtgctgtcctagggaggccccgttcagcaaagggagctccatttggttacatgtgccttctgcttggtcagccatgcagggctgctcccctcagcagatagagctgtcctggaccctgtgctctcctgtgtattgggtttgagggaactgactccggttcctggactgtctagctaactggggaacaagaagggctacccacttccaccctgtctcagactggaacatttcaaggcttgacttagtcctttctgctgcctggtgtgccctgtggatttaggctgtgtggtgctaggttcaagcatggcaggtgaggaattttcccagtcgtgcctgggggcactgaagagttctggttggctgagcacggggaaagcaagccaggtgtgtcattagacctgagtgtcctgcctggtggtaccacccctccctgcccgcccatccctgagcaatgtggaaggcatgctgtcagtggcctttggcaagtgcttccctgtgataaatctgaaaaataaaaagtgcacaggtgagtacttcctctgttagggaatctcgaaaatcagaggattttattagcaaatggattatatagcaaatgcctttctcaaggagaccagtatggttggggacccaaaggggtggtgtcagaataaaagcctgcccagaagggggtgcggtggcagtgtcaataagcagggaggaaatttagatgagacttgagaattttagataacagagtaaaaattattttagaggatagatttttttggggaggaaaacccctacaagtacattagcagatgtacatacatgcaatattagtttgttggcatcttctacaaatttgaagccatttttacttgaggctcaatataacatgttttacttgttttgttggtgaagtttggtttgtatatttaggaagtggaaatatggaaactctgtgctttaaattgagaggggtacagtgaaagaaggggggtatgtagaaagttctcagaatagagggctgg

SEQ ID NO: 64233 - DNA, 1187 bp, Homo sapiens
catacatgttttattatccacatgttgaattaattactgtagctctataatgtgtatacctacctatttctcattactcttcttttaaagatttttttttccctagcttttctcatcggtttatttaatgaattgtagaaaccgcttgtctggttaaaaaaattccagaagctgtttttactggagttgtattacatttgtagaatagtttacctcattctgttttttaaatagttttaccttttctaaattatatacaccaatagtacttcagagcatttttcagttagagtcatgccagcctttgcaatggaattttgaaacttatatcttctgtggggttattcatagagactttccacttattctgtatcactgcatcctgtttatttctctcaataaaactagtgtatctgatttactcactagattataagcctcacaagggaagtttccatgtctctttatttaccagtgtaattgctcagtgtctagaaaacctctggtacatagatgcccaatacatatttgttgaatgaatgaaatttcggtaaccagagactctagcattgcagttgaagatcgatgacatgtcgaattgtttggatttggatcccagtttgaattcagtgcaccttttgagattattgtgcagtcttttgggggaagtgttccttctctgccattgaattgaggatggacctgggaatgttttggtctatgagacttgacagttggtgtgaattcattgtgaaagtggagactgatgacccagcacaggcgttgtcaacccacacattatttgggaaataatgctgtgaatcaaatcccacaactttgattcaacagcatctcccttttaggtcattctggtattaatttttcttttaattaggaaaaataaaatatttctgcaaagaactttgtacctttttttctataattagagatcccttagataaattagcatcacccatttaagcccttttgttttaggcacaaatacccaacctgtgtgctacttatggacaggaatggaatcttcattcatttttataactcttaacaactttggactttttcttccataactagagatcccttagataaattagcatcatccatttaaacccttttgttttaggtacaaatacccaacctgtgtgcactttatggacaggaataga

SEQ ID NO: 64234 - DNA, 1832 bp, Homo sapiens
ttttctttctttaaataaaggcttcctctggttatcagctttaaaactattgaaagtcagccaaaaaagttggttgaagggaaaaggcactattctggagtgtcttaaattttagtcactatatgttgggggtgattagggcttttacttttccagaacctgtagcaaacaacaaaacaaaaacttagacgtcaagcctaaattttgcctttcttttgatcttggaaattggagttttggaaaaccaagcagggtaggcttaattaaaggagatgctgttatcttgaagtcttacctgagtgaaggggaaagttgagtaatcggaagggtcatgccggtgggttttcactgtctttagtttccaaaagatgctatgaaatttcagttcattgtttgcgagtgtctgtgttgggtggtggggattcagagaagaaaaactgcaggctagtgggaaaagggagttgtgttaaggggaccattccagtctaaaatggtgagtgatgtacgggaggtgtggggctcaccagataagagactttaagagacttagagctgggagtcctgagttccttttgaagctaaaataaataaaaattatatagggaatagaagctgctggtcattatgatctcctggactacactgggcataaaaaagatgactttctataagaaattctatccaaagagtggcaggattatgcaggaaatgtcatttggttatagccgaaggcaaactgatgcagagctgcctgccacagcactcgcaggctgcttgtctcatccccagccctctctggctggctccagggccctttgatctgctcacagactgtgtaaatggagagctgaaggagatagagccaactgatgttacttttctgtgtactccctttatccatggtgtgcccagaaatggtcagtttccctctcagcactcaggggccgccccttgaaccagatcctctctgcattcaacccttggtgccatggcaggctcaggtgtcagtggtcctaggctggtatcaggccacagcggtgcagggtaagaatgttggaaattgaccctgcgtgttactatctgagaacatcgtggacaacgttaagtggagtttgtctctctggctcactgtccagaccagtccctcgacaccactccctctttatagcttcatgacttccatctgtagaatgctttatgtcttaaatgtaccgtagccaagttcatggtcttatttgagcctcaggacaatgccgagagtagaaggataagaatcgttagccccattttagagatagaagaattgaggctcagagaaatgcacctgggtgtgcatttctgtcttcactgagtgcttttgtggctgagcggctcctccagcagcactgcctttcttcaggctgcaggcttccgtgaaacatttccctttcccttccatgttctcccaaatcagttacttccttcccattccctggaagctacttccgtccttctctcgcccggattactctggcagcctctcaggtaatcttccaatgccattgtgtctcagcaggttaattaatttgctgcatcatcatcaccatcattatccgataatgcacttacatagccattcttgtgaactggcactgttcttattgctttgtgattcatttaattttcacaataattctgtgaaggaggtagtaatatcagcctcatttaatgaggaactggaggcacagagaagttaagtaccttgtccaaaactgcacagttcttaggagccacagctgggattcaagcccaggcctgccggctccaggttacttgttctgagccactacatc

SEQ ID NO: 64235 - DNA, 1045 bp, Homo sapiens
agggtattgctacactgtcaaaaataaaatacagtgaaatttatgctaatgaaaacatacaccgtgtgtatgcccaactctgtgctttgcaaagtagacattcaatggctatctctggaatgactggattaatgaatgagtgagtggatgattgaatggaaagagactccatcctctgggaaggaaagaagaatggaatgggcttgacagccatactactcttaaagctgaacttgttgcttggctggaaggagggatgaggcaggagctaagctgacagaagcactcagggaattcgcatatcctctttcttgtgatttctgttttagggaaccaacaggtctttggtaccatctcccatttttccagaccacaagcttttatcttgttcttcagaatcctagaattttgccaccaagtttcagcctaaaggaaaatacacttgtagcatgcaagttctcacctcaaaacctgcgtgaaaatagtcggtgtcattgtagagtgatgcagtgcagaaaggggcctgggatgcttcacccggagaatgaaagtcccaaatctggatcccatttgctcttaccatccaccttgataggagtgtgggtgtggcacctgtcaccattctgcttgcatttgtgtgagtttatgccaggcaaacatgagtaaaaccaattccttccaacacttgacacatagataagtgaagaaaattttatcttacattgtgaacacaatggcaggtaagattgcaggaatgatggtttgtgtacaagctattaataaaagttgtgtgttgcatatacaaactttgctttattgtagatggccttttagttcggtgctatacatgtaatattcaaagtgtacattatattaccatgttgtctttttacttttatgagttatttgtaatgtggataataattcttagttcacatcacattttgctgaccactcaaggaaaagttgaactacaaatatttcaaatgaggtgataaattactgttgggttcttaattgtctgacaaagaaactccattgttct
